United States Patent Application Publication US 2013/0034624 A1 - sequence listing, part 6

SEQ ID NO: 30106 - DNA, 4011 bp, Bovine  19866880510894
  misc_feature (1)..(1): n is a, c, g, or t
natttcatgatatccattttcttttgacttggagccaaaaaaaaacaatacttattctaaaaagtacctgccaattggtaccaaagagaggtctgatacatattttattcttgttctaaatgtaaccagacactaaaaaatccagtacatttcaggagatattaaaactggtaagactaaaattactaatgtctcaattttaaaattccattaatagttcatgagttttccagaaaaggtcaactagaaaataaaggtcttcaatcctttagtctgtaattaagtagaaataatttattggtagcacttgtttttctacttaaaggtactgttggacatttgtccttgccaagctactgttgggttttaatcatttatccagtttttcaagataatattgaaatctaatttcccaaattacaagctactatttttatttaatgtcatttgaatagtgaatggcttgttctctaatttatcaatttaacagaagtgttaaatagcactatatctaggtctggctcctctacatcaccatatatctctctaacttcttctaaaacactgatagtcacctttggtgatattactgtggtctgcctgcttccaatatgctccaaacccataggtcctttctgcagagtgggagccacttaatctctcctggatgttcagtcttaccttaggctttggaccaacagcatccttatgagacagaaactctggctcaatgtagggcaccagatatcaagtcaagcttacttttagtccaactctgataactgatcatttggcaaagttttaacaattagacttctggcttgctcctgaaacctagtcccaattgatcctttagatgtggtaactgggtctcttgctcacatccctctgtgcctggtttctctgtcctgataaaaccattacgtctgtgctctgtatacaacagagcaccttcctgaatggacttcctcccaatgtctgtagttatgtcctggtcctatatcccatcccaacctcaacctcttccactcaagggcacgtctagttccaactttcagatcctctaaacttctggtccaatggagtgagcactgccatgcctgactcttctcaagatacacaaaaccaactgtaaattcaccaacatactgttaaaaaggaaggcatctggggaaaaaaaaaaaaaaaaaaactcttctatgctactggtggaaatgcaacctattccattcttttcaaaaagctattgtatgatttgttttcagattttttaaaaaaattctattattttgactcaaataattcccaaagagtctcctcttaaaatgtcagacattcaggcaaagatttatacacagaaatgcttcatttatatcaacagaaaaaaatgacctaagtaatcaatgaaatttggctcaataaattacaggatagctatatgataagaaatcttatagtctttttaaattatcttataaaacttaataaaatggaaaaaaatcagaatcaaaatcgtattctggttagtcatgactggtggaaatggttgttcagtaggtaagttgtgtgttcagatctttgtgaccccatggactgcagcatgccaggcttccctgtccgtcactatgtcctggaatttgctcaaattcgtgtccattgagttggtgatatctaaccatctcatcctctgccgcccttgtctccttttgtctccaatctttcccagcaaaagggtggaatggtagaagaatttaattttctttcctctctctctcttgcatgcacatttggttctatagatatcaaaagctctataccaagtaagtattgctctaaacctagaaaaatataaagaatataaaatatttttaaagcatgagagtatcttcaagtataataaagaatctaattgatttctctttttcattggttaacagggatggtttcccaaaaagagtcacactcagtgctgtaaccttaatctgcctctgtgtggtgccaactcctatcctcagaactctaaggcttactaagatcttagggatcttaagacaaaagcaggcaagaaaatacaccaaaaacactgtatctaaataccttattcaaatgtaatacaatgtagcaagctccagctgtctaatcccaccagtagattttttagatttttactgctattaggagaatcagacaactttagaacagattgagaaaagtgtaggtgggctccaaatttcaaaataaaaactcacattcatttctcacccaagggattaatataaacactgagtgctattgatttgaccagctttatattaacatacatatgaggataaaacaagtacacatgaatggtatgacaaacctccccagagacaagaaaaatagctgtataatgttacaaatctatacagtggtaatccagctctgatggcccccaaagctcattttctttctcatacactacttagctaatgaggctactaattcgagatagaacaagtataaagtaccttgaaccgtgctatgcactgggcaagtgctcaataatgatagttatttttacagctgctgaaaattagtgattttgtacattctcacttcagaaagaattaaaatgtggtaaaaatatacctcctccaaaaaatatacctaaaatgaatttcaaaagtcttctattcattgaattagcctttattcattgcaaaacacagttttccacatgagtccattatgtaaatttcattatgtggtaaatttctgtttattcagaatgatcagggaataaggctgtttagtactgctacttcaaaatgcaaatatagactaccaacatgttacccaagaaaattctctaacatacactgaaaataagtttgtctcttgatagtccaggagacagtttagaatctttcacaaatcatgaaattgccactgtggtctagacagaggacccatcagtaaagacattcaagaaaccatactctacacaatccaactttctcttcatgccttacaaagttcattactattaggatggcttcaactggagctaaaaaaaatattttcagtttcttaattaaatatactcggtaccagacttcaagcaatatgagtttcaaaaaacagcacaatcatcaactctctcatgtaattgaatttggccttgtattgaattctcattagtctgaaaggttcatgtatgggggcagaggctccattctcaaggtctttttgataacagatataatgcttggttatcacatatatttgatagatactcattcactgacagctgctccatgccaagcggaagatgactgctgtcttctttggtgggactaagaatctggaagttcctgaattagtcagataggttgcttttccaactacctgtaaagccgctttcatcttaaagtcaattctaccttctgtaggtctcagactctctggttctactgcaaaggttaacaaatcagttcaggagttgaatttcaaaagcagtgttgtataagagaagcagtctggtagagcacaaataactactgtgctggacactgtgaagtaagttatccaataccgacatcacaaggtgctctcacccatacagaaccgctgaggggacacagtattaggtcaacaagatcaactcaccactgtgactctgcagtcactattttcctacatcctagaatctaaaatggattataggtgacatgaaaatagcctcccactcagtagacagataaaggccaggtctagaaatgtgaacttcaagtagggtctactcctattaattatgactcaagtagggtcttttaccaatcatccttaatcataatgtattctgaaagtctagattaacactgaaaacctagaagggtataaataaaattcttgttatgttactaagagaaacataacactattaaaagaaaataagaaagtcatgaggactcaaattcataggattaattttaaaattctccagtagctgtatgaactcatctggag

SEQ ID NO: 30107 - DNA, 1303 bp, Bovine  19866880520788
  misc_feature (1)..(1): n is a, c, g, or t
nattcattaccaactgaactatcagggaagccctttatgtagcctaaatgttaaataaaatctgattataatggctgggcatatgagtgactcacatttcagaaaccaaacaagaaccagtgtctttatgtgtaagctggacaaagctttgctccggagtgatcaacgaaacatgcaagcttgtctcactcatttattcatcaaatggtaaagaatctgcctgcaatgcaggagaccaaacctgggttggaaagatgccctggagaagggaatagcaacctactccagtattcttgcctggagaactccatggacagaggagcctggtggtctacagtctgtggagtcacaaagagtcagacacaactgagtgaataacacactattgcctgtattaggctttctaatgtgaatgcaacagtaaacaggaaacatacatagttcttgcctcacatgatttgctgtctttcttaccaactagattgttgatttagtaaaaataaataagcaaataaaattataaataatgataagttctaagaagaaaacaaataccaggtattgtaaccttttccaattctctccctcttcagctcatatttcttgaaaggattgcccacatttactgtccaccttgggcttccctggtggctcagtggtaaagaatctgcctgcaatgcaggagatttggttcccatccctggattaggaaggacccctggaggaggaaatggcagcccactccaatattcttgcctgggaaatcccatggatagaggagtctggtgggtatagtccttagggtcaaaaagagtcagccatgactgaagtaacttagcatgcatacactctctaccttgccatttgccaattacactgtcatctctactcttcttctactccatggtggtttcttgtcatcagttctcctgaatttcagcttttgtcagattatattgtacaaaccaacactgtttttgaggttaaccaagcacttctgactttggtgggccatcttttattttaagatggtcaattatggaaggacatagttgagaagtattatcttgactttttaaatgttctttggctcaaaacagaaaggggaacttttgcatatgggtattaaacattatgttattttcctaaatataaaatgtcattttaaaaaactttataccagtattgttgttgttgttcagctgctaagttgtgcccatctctttgtgattccatgtactgcaacatgccaggcttccctgtccttcattattctttcagagtatgctcaaactcatgtccg

SEQ ID NO: 30108 - DNA, 2618 bp, Bovine  19866880552406
  misc_feature (1)..(1): n is a, c, g, or t
nctttattgactatgccaaagcctttgactgtgtggatcacaataaactgtggaaaattctgaaagagatgggaataccagaccacgtaacttgcctcttgagaaacctgtatgcaggtcaggaagcaccagttagaactggacatggaacaacagactgcttccaaatcaggaaaggagtacatcaaggctgtatattgtcaccctgcttatttaacttacatgcagagtacatcatgagaaatgctgtgctggatgaagtgcaagctggaatcaagattgctgggagaaatatcaataacctcagaaatgcagatgacaccacccttatggcagaaagcaaagaagaactaaagagcctcttgatgaaagtaaaagaggagagtgaaaaaattggtttaaaactcaacattcagaaaattgagatcatggcatctggtcccatcacttcatggcaaatagatggggaaacaatggaaacagtggctgactttattttggggggctccaaaatcactgcagatggtgactgcagccatgatattaaaagacgcttactccttggaagaaaagttatgaccaacctagacagcatattaaaaatcagagacattactttgccaaccaaggtccctctagtcaaggctatggtttttctagtagtcatgtatggatatcagagttggtctataaggaaagctgagcaccgaagaattgatgcttctgaactgtggtgttggagaagactcttgagagtccctcggactgcaaggagatccaaccagcccgtcctaaaggaagtcagtcctgaatgttcattggaaggactgacattgaagctgaaactccaatattttggccacctgatgtgaagaactgactcattggaaaagaccctgattctgggaaagatcgaaggtgggaagagaaggggacaacagaggatgagatggttgagggcctcaccgactcaacagacataagtttgagtaaactccaggtgttggtgatgtacagggaagcctgccgttctgtagtccatggggttgcaaagagttggacacgactgagcaactgaactgaactgaacttcctaaaaaacaaaccttgttttaggagaagagagccatacagaatctatatgttcttgaacaaaatttttaacttgaacctcatttttctcttatgccaatatcaatgtctcatgattgtcatggacagatgatttcataaagcttttgacatatattaggtgctcaacatatgttaggtttcatatctgctagttggaattaagttcaacacagtactatagttttagagcatatagtatgaaacatcagagaaggcaatggcaccccactccagtactcttgcttggaaaatcccatggatggaggagcctggtaggctgcagtccatggggtcgctaagagtcggagacgactgagtggcttcactttcacttttcagtttcatgcactggagaagaaaatggcaacccactccagtgttcttgcctggagaatcccagggacgggggagcctggtgggctgccgtctatggggtcacacagagtcggacatgactgaagtgacttagcatagtatgaaatatgcagtatgtttcaaaataatgtgattaaaaacagggcaagtaaagttatactgaattttcaaacatcaaaagtactgatccagtattggtttcttatgagtgctgctcagtcacttcagtcatgtctgactctttgtaagcttatggactgtagtctgccaggcttctcccatggcattctccaggcaagaatactggagtgggttgcccatgcccccctcctggggatcttctccgcacaaggattgaacctgcgtctcctgtgtctccacattgcaggtggtttctttacccactgatccatcttgttttcttacataggtccataaaaccacagtatcaccaactgctttgtcttatttacatttccttagagttatacagcatcaaataagaaaaagaaaaactttggtcataaaaaaataaggcttaagcattaaacaattttttatgcatgtaattataacccccaacaatctgtaataaacacctggcaagattgctaaaactttgaacacaatagagtatattacagaaggttcttccatttcagtggggctctgtgtttgaatgaatcaccaaggaaacagaatagtttgggttaaagatcagttcaagcaaataatatctctttgtcagtctccctgagtgaaatctaggctgaagtaatcttaagcactttctaatgaaagaaacagtgaacactcaggttcaaaagagctgtttataatgataaggatccatattggaatcaaagtgcagggaagcacaaagcacccagctttttaatgcattatttatagtgggattttcaccccagtttgaagaagtgccttagcaacgggatcttgaacctcattctcattatctctaatgtcttcgtgtgggtaggatggtttaaatggctaatggaagtatttgcagactcctttgaaaataaagtgctctttctttccctgtttctctgtctttcctagtgattctgctgctgctgctgctg

SEQ ID NO: 30109 - DNA, 705 bp, Bovine  19866880557473
  misc_feature (1)..(1): n is a, c, g, or t
ntaactttctgttcttcttctctgataagtaagtaaatgtgcgtcatgtggctttcttcttgatgtgtactttttttccctcccctctctcagtgcccttggggagaagatccactcattggttttgtaccaaagctgacaaggcctcagttatcaggtggcccaggaggatgtcacaaatagaagaaaagctgttcccagagcaaataatgatgagccctgtgaaggcgcctgcatgcttgtacccacatgtggaggttttacaggggactaagaggtctgtgaaagagagttccaataagagtaagaaatccagcccacagatgggcagtcttcatcctgagagtgctcgccagcacttccggagcttctgttaccatgacacgcctggaccgtatgaggctgtcagccaactgcaggaattatgctctcagtggctgaggccagagatccactcaaaagagcaaatcttggagttgctggtgctggagcagttcctggacgttctgcccagtcatatccagaactgggtgcagaagtatcatccacagaacgtcaaagaggctgtggccctggtagaccgctttcacagagaatgtggtggaataagcaatgaggtgagcagaaagattccttatatgtacactgtgaaagagggtgaaagaggggtcaataactggagaatgagaggattaagtcactctt

SEQ ID NO: 30110 - DNA, 1592 bp, Bovine  19866880595856
  misc_feature (1)..(1): n is a, c, g, or t
nctccatgaatatatctaggtttgaaaataccaattgcagtgttgatgaaaatttatgacagtgttggcaaaagtaataatgcaagcaagcttctgtggctgatgatgtagtctgggaaaagcaatttgctaatattttcagtctgcattttggttcagttaccatgatattcataatgaatgaggaaaataacattttaaccaagaagtgccaaagagagtcaccaatgtattatttcattgtatatgcccagttcatctctgaaatgtggagtccgcccatgaacaccttgtattaatatgtgactgtgaagatgacaaataggttcaagggattagatctgatagaaagagtgtcggaagaactatggatggaggttcctgacattgtacacgaggtagtgatcaagactgccccaaggaaaagaaatggaaaaaggcaaagtggctgtctgaggaggccttacaaatagctgtgacaagaaaagaaatgaaaggcaagggagataaggaaagatataaccatttgaatgcagagttccaaagactagcaaggagaaataagaaagccttcctcagtgatcagtgcaaagaaatagaggaaaacaatagaatgggaaagtttagagatctcttcaagaaaattagagataccaagggaatttttcatccaaagatgggcaaaataaaggacagaaatggtgtggacctaacagaagcagaagatattaagaagaggtggtaagaacacacagaagaactgtacaaaaaagatcttcatgacccagataatcatgatggtgtgatcactcacctagagccagacatcctgcaatgtgaagtcaagtgggccttaggaagcatcactacaaacaaagctagtggaggtgatggaattccagttgagctatttcaaaacctacaagatggtgctgtgaaagtgctgcacccaatatgtcagcaaatttggaaaacttagtagtggccataggacattccaactccaaagaaaggcaatgtcaaagaatgttcaaactactgcacaactgcactcatctcacatgctagcaaagtaatgctcaaaattctccaagaaaggcttcaacagtatgtgaatcatgaacttcctatattcaaactggatttagaaaaggcaaaggaaccagagatcaaattgccaacatctgttggattattgaaaaaccaagagagttccagaaaaacattgacctctgctttattgactatgtcaaagcctttgactatgtggatcacaacaaactgtggaaagttcttcaagagatgggaataccagaccacctgacctgcctcctgagaaatctgtatgcaggtcaagaagcatcagttagaaccatatggaacaacagactggttccaaatcgggaaaggagtacatcaaggctgtatattgtcaccctgcttatttaatttatatgcagagtacatcatgagaaacaatgggctggaggaagcagaagctgaaatcaagatttccgggagaaatataagtaacctcagatatgcggatgacaccaccctaaggcagaaagcgaagaggaactaaagagcct

SEQ ID NO: 30111 - DNA, 1111 bp, Bovine  19866880620656
  misc_feature (1)..(1): n is a, c, g, or t
nccgattcagcttgtcccaggtgatccagtcagttgtaatgacaagtacaaccacagacgtcagagtaaaaagaaccgtcctgcaaggaacatgacagtaaagaacactagagtaattatataaacagtggggagtgcacatgatctgctatattaaacatctaccctttgccaagtactcatcctaaggcatagtccccaaaaggaagatgaaaaaagaagcaacttgagctttctttcaaaagtaattagaaaaaggtatgatagtatctctttgaagaattttcctaaagaaaaataaggcactgattatagaacaaataattagaacgaaatattataaataaccttacttagtgcactatatattccaaagagagcattggctgtaactctcattatatacatattgtttcactgaaggtggcagatatacacaaagcagatgggtaagaaagtccttgaattccatgatcattctaaaaagagagactatagatagatgggtctccttcatcgtccccatagcctgacgagctctgtagaggaaccacttcatgccgaatgcatagtctcttctcatgggactcatatcatagatcacttggggcctagtgacctatccaggtcacacaatgtctgattcccccatccctagttataagatatcgtgtgtgttagttactcagttatgtccgactttgtgaatgcagggactgtagcccaccaggctcttctatccatggaattctccaagcaagaatactggagtgggttgccattcccttctccaggggatcttcccaacccagggatcaaacccaggcctcccacattgcaggtgggttctttaccatatgagctactagggaagcccataagatattatgggcctgagatttttcttttatatatttttgtagcctccataaaatcttacacaattatataaagaaggagttcaaagaacatttgttgaaactgtaacaattatcaaataaagtcttaaagaaaatacttcaattggtctttaatattgatattcaaagtgaatctgaaatgtgggcaggaaaaagcaatcggccagagaattgtccataatgtagtagag

SEQ ID NO: 30112 - DNA, 1886 bp, Bovine  19866880657845
  misc_feature (1)..(1): n is a, c, g, or t
ntttgagggctttgcacaactgcaataatgctaaccatgaaaacaagatccttcttttttcactttggaatgttatttgaaatataacatgaaataaaataattcatgaggctattggtttaaaaagaaaaatagtgtgtataacattatgaacatgtcttccatctgacagttgaaatgggtgaagttaaaatttcttaccatccaagctgtgacaaagtcccccatccaggtccctactgcagctaatttcatgaaactttcatttcggatgcccatatagtctgtaatgatatatgctctgtggaaacaaacacacaagacattgtccagactcagagaaccatacagtcaaagctttctggttcagcaacactcaaaagggaatttccccccttttaacaaactttcttgcttttgtctcaccagatgcgcttataaatctgaaaggctaggaggagctctgagggtgtctgggtcagttccaattagatttgaaaactgactgtggctacaccaattaccatgtgcctttcatttttgcgctgtaaggactgacaacagcttttggaaaatcaaacagaaatactcagcaaaggcatcattccatgctcactcaagtatgaggagaacagaaacaattcctgaattagtgtaactagaaaggaagagaagagctcactttcctccagttctgtcttctcaaagtcagaactattgaaaagatgctgggagtaagttttaagtataatgtcatatctgaaaaatgttcagaagaaagtcaagatttgggaaaaatttccacgtagggaagcgatgtaaaattttactcaaatacatgtgacttaaattattatttaatagcaatggccagattccacttcatcacttggcatagctagttattgtttgcttgctattaaacacaagtttatattcctcagagctcaaagaaaggttcaaaggtacacctgactattaaaaacaggtaataagatcatgcttattgcttattaagcattttcattttcttgtttggtagtgaagaaaatcctaactatcatttttcccatttgtaatttcactaagaaaactgggattcaaaaagatcacttaccctgcccaatgaataccatgtaactaatgaatggtacctaggaaccaaatttctctgtacatattttttttaattctaagtattttttttactcagttttattttactttaaatttttttccttttcttaaacatgataatacctatacaacttagagtacccattagattaactttaaaacaatatgcagtaaataaatgtttgttagttatctattgaaactatgaagaagcacatttttgaagtcattgagagttaaactgcttccaattcagttgttttttctagagttatttcagatagtttttttatctgatatttaaatgtacagatatttacacagatatttaaatggtttttaacaacaaaaacaaacttaagaattcttaacaactttttcaatgtgcttcatctacttactttggaggggctatgtacatatcttaaggtctcatctcaaaattctgggtcttattccatgcgtttccataatagccacacacacacaaaaaacttaagctaccaaaaactgcatactagcaatgtgctagagattgttattagcattttaaaaacacagtccccatcaactttcatatcagaacaacaaaatgtattgttattcccatttcacagatatggaattaaggctttagagagtttttgcaactttctcaagtttaagcatccaatgaatggacaagatttgaatataaatttgattgactcccaaatccatgcacttaactactgggctataccttcttc

SEQ ID NO: 30113 - DNA, 941 bp, Bovine  19866880677851
  misc_feature (1)..(1): n is a, c, g, or t
ntgattaaccattcatacctttgcattcattttagaaaactaaaccatctgactttgcttttgtttcttaaaataataaaaagagagagagagaaaggtttttaaaaagtaaataatgtgattggacactgcagtatgttgttcctgcaggaaaagggaacaagacctcaagtctaacaagctggcaaataatattttctgaagggatggacaattgaagaaggcagagattttaaggcagtaacataagatggtaattatatatgaagaggagctcttagcattttgaggctctacaggtacctgctttccatgaaatatttttcattcaccctgacttccaattaccccaatcacgatagaagttcgccacagatcgtctcccctcaccagcacaggccatcacataggcatcggcccagtcactcaggctgctggcatccatcctgtatcctgcagccctagctcctcctcaccttctctgcttgcacattagccacaatctgtcagccagctgtacagcagcaaggaaaccagagagcagggcagccacacacagctattgacaatacagtcaataatcacttttcctattgtgtagaatctctgtaattgacttttacaggctttgctcattcttttaaaagtgtccaaatgaaatttaattttacgataacatttttaaagtttattttccatccatactcaaacaccctatatgcaacatttaatactgaacaatataggattaaatttcttaagatgtcatggcaaccaaagatgaaatttgaatttgaataaaagaagttggcctcccttaaaaatcttctcttagctggaaagaatgctgatataattttatgtggagtcttgtcaagtgcattcaagaaatgtcaaactatatttttagcaaggagttgcttaatcccataagactctct

SEQ ID NO: 30114 - DNA, 2759 bp, Bovine  19866880706934
  misc_feature (1)..(1): n is a, c, g, or t
nggtagccaaacttaccaggcagcggcactgctggcaattctgaacccaggtgtcgccactattgtacaaggtttccccgttttgatggaggcactgactgctcaaccttgggtcacattcagggcagcagaaaagatcaactgtgggattctcacagtcacagaccatccgtcgacacattacaaatccattctgtatgacaaggagaaaaagtagttaccaaaagcctctgtttctcaatatactgatatcatatgtatgtgggtgtgtctgtacgtgtgagtacctatgtagataaacatctatatatacattatacatatgtgctgtgctgtgctaagtcactgcattcatgtccgactctttgggagcctctggaccatagcctgccaggttcctctgtccatgaggattctccaggcaagaatattgcaatgggttaccatttcctcctccaggggaatatatatagatatatttataatatatctatattcataattatctctctctatatatacatgtatattacataatatatctaaaatcgggcttcccaggtggtgctagtggtaaagattctgccagtcagtgcaggagatgcaagagacatgggttccatcactgggccaggaagatcctctggaggaggatatggcaacccactccagtattcttgcctgggaaatcccatggacagaagagcctggtgggttattgtccatggggttgcaaagagtcggacacgactgcagcaatttagcatgcatgcattgctgcagcagtggggagggagtacaaatgacaagctcccttgctgcctgctcccagtgagctggttccttatttgggtgaaggtaggtgtcaggctggaggggtagcttaggtggtttgtccacccctttggtggtgtgaaacaccctgcttttgctcccagctcttcagaagtggcagttgggttttttggtctttttctgtcttatccataatttccccagtggtgcatgcatgaagctatttttcagttcttcatagtttgtttgtattctgttgtttgaggagacgtttgtccaggtgcaaacaccacagcaaagggccccaagtcccaggtcccagcccgtctcagtgggacctcatcttgaccacttccccaaagactggtttcaaataaggtcctacgcacagggtccccatgggcatgaattttgaggaacacttttcaacctagtatcattcacatcataaagttcactcttttaaagtgtctggtttggcggcattcagtacattcacagtgttgtgctaccactaaccgtgaggaatgggtcctcaccctgcaagggaggccctgtccctgtcggcagtcactcctcctcctctcccagtccccggcagccatgaatctgctttccgtctccatgcatttgtctaggttatctccctttccttctgtctgtctatgtatctgtctatgtcgcatcaccagttcaatggacatggacttgggtgaacttcatgagatggttgggacagagaggcctggcatgctgcagtccacaggcctgcaaagagttgcaaagagttagacgacttagtgactgaacaactacaacaatacatatctgtcacctgtcagggcttcccaggcggctctagcggtaaagaacgctgctggccatgcagcagatataagagatgagggtttaatctctgggttgggaagatcccttggagaagggagtggcaacccactctagtattcttgcctggagaatgccatggacagaggaacctggtgggctacaatccatggggtcacaaagagtcagacacgcctgaagtgacaacacagcacgtcacatcatctctcatctgtctatcatgctgcttacacctagtggttggaggctaggaattccactatcatcctagatgatctgacccttagcatcacggtgggaggctgagaaactctgttaggcatgcattgtggccttttcaaacaccctctgtacagagtgggtagctgagtgtctgttgtatagggctgctgaaagaaagaatgagactatacttgcaaatagacatcacctggccaaggtccctcagccagcaccaaatgcagagtggtgtgacctcacacacagagcttgtctgcagtgcaggaaaggcaggtcccatgttggggggcaggtgaggtgcctgctttgggtccacattgtcacagggttgtctctggggatggagaagggctcttaacctagtggttcagttgtgaccttaggcacaccccccagcgcatatctctagcaccatccagtagaatattggcaatgagggcaagctctatatctcattgtccaccgtggtaaccacgagccacgtgtggcaaatagacacttgaaagccagcttatccatcccagaaaccggattttaaacttcattaatttttacctttcaatgactgtgtgtggctggtgacaactagactggacatcgtggctctagactcgatgagacacaacatcttcaagagcagggatggaattgaattcctttccccctggccatccaggaccatgaatacgcaaacctcagtttccccatctgacaaacagaagaaggccccctcctgcacaattccagctctcgagggcaccttatcagagggactcacatgctccgagaaccatctctccctgccacttaccttgtcctctccttcctggtgagttggcttatcttcttcctagcaa

SEQ ID NO: 30115 - DNA, 1023 bp, Bovine  19866880718118
  misc_feature (1)..(1): n is a, c, g, or t
ncaggaaggcttactatctttgtaactctcacttcaccaccactgaccatttttatacttctatttaatggcatgttaagtgtcagctgacagcagagtagaagcagatgagcaaataaaaagttaaaaaaaaaacatgtttaattttaaattttttctaaaataagagtttctgaaaataagtgctcctgatacataacaactcttgatgaaatgatacttactttactacttggtaattgctcattgtcagcatcttcatccaaacagaccaagtcaccctccacaactcttgagccgtaagtttcaagtctgtaagacactgcctcattccagattttgctgctgtatgcatgaacgtagaatatgcgcagagaatgggggaaggagaaccacgcctggatgtagccctcctccgtcacgccaaagcgatgcagtgactctaacagtgctctctcccgaactttgaattcgggcatcagggaaagtgtgcctttagcatcctctgaaacaaagagatcagtcagttccttttattcaaaggccagttattaagagctttaccaggctctctaaatgtactgagctatcctgggaacctgcatatgaagataaggctcagcaccaactataaaccagagctacatttgaagaggttttttgtttgttaaaaatcattaatcatatggttcattcactttccctgctttaaaaagagcacattagtaactccaatgtcaggatggagattaactaatttgcaattatttagaacactttttttaaagcattatataagttcctgagctgagattttaaagagctattatggacatttgacaaaattttttcaataagaaagggttgacatctggatccttcaagtacactattcagtcattctactattcagcatgctttttaaaattagattactggactccatggcaaagctgcttattcaggtagggccttggagtaagcattttaacaaatgcaccaggtttctgtacacactaaagt

SEQ ID NO: 30116 - DNA, 1015 bp, Bovine  19866880769165
  misc_feature (1)..(1): n is a, c, g, or t
nccttctttatactattttttaatataaatttattattttaattgtattggtgttgccatacatcaacatgaatccgccacaggtatacacgtgttccccatcccgaacccccctccctcctccctccccgtaccatccctctgggttgtcccagtgcactattttttatactattttggtactttgttataaaaacccattatgcttatttggctcttccctgttttccttgcctcatctctatatcttcacttagaattcttgccaagacagaacttttttaggcgtcttaactacacagaactcttttcactttaaagcctttactaattctgttccctgtgctcttggcataacttttcacagaactatcttgaggtcttgggttaaacatcacttctatatagaattctactctggccacccaatctaagtagccagactttttattaatctcataacatcacctagtttgtttcttttctagcactttttacaatttttgattgtacacttgattattaatggatacagctataggccctgtcctgtgagagtagcaaccatatctgctttattcatcagcatgtctagggctcagtttactcagtgcttattttgtgaatgggcaaataaaagaacaaatgtgatctaagagagtgccatggagtaaagaaagctgctgctgctagcctatgatttaccacaaataactggccacagttggtttttaagtgagacatgaaaagtgattaggacactgaactttcaggagcatataaataacaaatacactgttcggttatgtgtaacaatcagtgagaactgactagtggcttaaaaattcatactgtgcctttttcccctgtcttttctctagaatggccacatctgttgctcagtggatccacagtgccttcaggaactgtgaagttaactgtctcactggaaatttctgtttaaagaatgtttcattaaaaagaccaaaaaagaaaaaaaaaaaggtaaaactta

SEQ ID NO: 30117 - DNA, 857 bp, Bovine  19866880775631
  misc_feature (1)..(1): n is a, c, g, or t
ngtaagctggaaaatggtagaatcgtgatagcactcagatatatttgactccaaggtctgcacactcgacaattaacattcgttttcctggagcagagattttctggaacttctatttccatgtgtttctctccaacaaaaatagcagcaagaacaggagaaatgatacataggcacctgttaattttagttttaattttttattttttctttcctggtacaggagcagagaactgaatatgaaacagtgaagaaaaagtgcctttgtgtttctgtgtttcccacctactgttaatgtgggcttcccaggtggctttagtggtgaagaacctgtttgacaatgcaggaggcgtaagagacatgggttctatccctgggttggaaagatgccctggaggagggcatgggcagcccactccaatattcttgcctggagaatcccatggacagaggagcctggtggaccatggtccatagggtcacaaagagtcagacatgactgagtgatttagcatggcaccgcacagcactgtcaatgaatgccctgccagtaatgaccagactacttctcacacagctgggactagttatcaactgctttattaaagatacttggcttcttgtttcttcctttgctctccccatttccgcataactctgaagttttagaaataagatcatctacgtggaacctgtgatatttcatcatcatcatcatcattacatcatcactgatgttaatatttgctgagtgattgtcataggcctggaataatttaagcactttgatgttattttctcatttaatttttattaatgagactttttagttacttctaccattactctttctaatt

SEQ ID NO: 30118 - DNA, 717 bp, Bovine  19866880786305
  misc_feature (1)..(1): n is a, c, g, or t
ncatttaaagagtgaaggacatggtacaggcatcattctgtaggaactgaaaggtgatttagatccaccctcatggaacactgcaagtggcatacaccattaccaaagcaatatgtcatttataaattaaatacactgccaaacatttgtccaaaataatcttttctagagcataataaaaggagagcagtgggaacaaataatagaggcctggctttccagctaagacctacattgaaatgatgtaagttaacttatttaaaggtaatcaaattaaacaaacaaaatgattttatttttatggaatggatagaattttagaagaaagtaattcaatgctataaaggacaacacagtttcacagatctcaatttctttatttgttaaaagatgaaaccttagttagtagatgatctgtgaggtcccttttacctttaaaatattctgtgcttctacaagtgagataaattatttagtagaggataagaagctatattgtccctaattgtcgttttatttgcaaaccataaaaaaagagacaattaacagtactaggctcactattcagtatactttcaattttaaaatgtagaattaattacatccttattgaaaaataacattagcaatcagaaaataaagtaataatgatgatatgttgactatgtaaatgaatcacaattagctctctgttcaccttaatccttaaagactttg

SEQ ID NO: 30119 - DNA, 1688 bp, Bovine  19866880793307
  misc_feature (1)..(1): n is a, c, g, or t
ntggaattttaattaccctttaaccatagtaagattttagcagatgcagaaaatctgaaggtattttggagggcctgtaagcaaaagagtctgcctgataaagcagatggttcctttagggactacagaaagtgtagatgtaaagaaaaatttacatcagttcttataggatcttagaagttaggataagacaattgggatctaatattggtgaagaactgaaaacttgagtaaagaagtgttcagagcagaatgttaggaaagtcctctggcgctagtggttttttggtaacattggaggaaaactgaggaggaaaggagcaaagtcgaaggacagaagagcgaagaacagttaaggggttctatcacttgaactacggagaagtcagaaggctacatagagtgatagcattaggaatatgtgttccagttcttagaataactctgttaatataatcctacgataaagggtttttagtgcacatttgttgaattaaagatgtgtttttgaaataatccccccagtttttcagtattccagtataagtggttgtctgccatctgtcatttaaactttattttaaattaattttttgacatttttagcattttaaacatgttaataatttttaacattagtttaaacacaaactattttttaaatgtaagagttaactgaatccaaatgataaatgatttatcattcataggttgaaaaatattgaaaaagaagttgaaaagaaaagaatgaatgtgtttaacattcgttctgtagaggattcccttagacttggtcagctcaaaggaaatcactttgatattgtcatcagaaatttaaaaaatcaaataaatgattctgcaaacctgagagagagaattttggaggcaatagaaaatgttaaggtaagaaaactgcactgtagagtattttgggaaaatctttatttacattaagatatgaagggaagtattttgtacattttctttttatgtgcgtgtataattatttaaaaaaatgataactgggtccattttacttagtttttatttttcttcttagtatatatctttgtattggaaaaaacacaacgttagtgtaattaaaaaaattgtatagactctcccagttggaagggtaaaacctatctgtttaaaaggacagattttttttttttagtgtctgccatttagagtagtattacaggcaaagagattaatttgaggggagactttgttcagcatttcttttcagaaatctttggtaaatagtttttatattactttcaaaatggtttttcttttcaatctaattttgaattttgtttcaatgtatgcaaatggtaaatcatatacattttactattcttacagtaaaaaaaattacttactgtaagttttaaaatgatatttgctgggcatctaaatgtgcacatatagccatagccttcattctgatcatataaactgtgggtcagcagacttttctctgtgaagggccagaaaagaaatgttcatgttttgtagacatatggtctctgttgcagctactctagtggctattgtgtggaagcatccatgaaccatacataaatgaatgagcatggccgtattccagtagaactttgtatacaaaaacagtggttacagggccagatttgacttgtgggccagttaaatagcttgccaac

SEQ ID NO: 30120 - DNA, 1581 bp, Bovine  19866880832544
  misc_feature (1)..(1): n is a, c, g, or t
nctgagaagtggggaattctttgtaagggatgctgattgcttgtgatcgcttgcctttcctggctgaagggcagggtgtaaggacagtgtgcaaatgcctggaccattaagggcagaacacctgagcagaatgctggaaagagcttatctgacagtgacatggctgtgagaacagggcttgaaactggatgaaaatgcctcagggcttccataacatttcatcccccatgaagaagggattttctggaagcacctttttaacattgaggatgattttgccaattaaaaaaacataggcacttttagaatttccactgccaaactgtgtttgatatattgagtcctatccttaacttttaaaaaaaaaatatgtttcataaagcctaatgatatttacagagatataaaagttgaaaatctagccaaggttatttggtgtttaaaatcaagtatgatattttcctgtgaaatcccatgatcattaacattgctttagtcagcattactaggaaatacatgccagtaagatgaaaattaatttacagttgagtgctttatgtcaggagaccacttgcctgatcgcagttatttgaaacagagcatattctgagcacattgcctgctgctttttcttggctgtagatattgacgagtgtgggactgggaggcacagctgtgccaatgacacaatttgctttaacttggatggtggatatgattgccgatgtcctcacgggaagaactgcacaggggattgcatccacaatggaaaaattaagcacaacggtcagatttgggtgctggaaaatgaccggtgctccgtgtgttcatgtcaggttggtataaacaaagcactgtaaccatttttatcaaggtgtaatttgcatgtatttcaagtgtacggcttgataaacaaatgcatacatctgattaacctctgcacaattaatataacataacatttccacctacccacgttggctggcctctgccctttcttaatcccatagccccagacacaagtaaacactgtgtcctatttctacagattagatttgtattttctacagcctcatataagtggaatcatataacacagttggccttccatatctgcaggatccacattcatggattcagctaactgtggatgaaaaatacttaaggagaaagctccagaaagttctgaaaagcaaaactttcattttcctgaccccagcaactttttacataagttctatattatattagatattataggtaacctagaaataatttaaagtatatgggagattatgtataggttatatgcaaatactatgccattttatataagggacttgagcatccatggattttggtatccacctgcaacctggaaataatcccccaggtatatgagtgaaaactatacttattcttttgtgtctgacatttgtctcagcattatgctttgacactcaattatattcgttacctgtataagtaacccatccctttttattactgaatagtgttcctttgtacagaaataccacagtgtgtttatctattcaatgatagaatttgattctaactagg

SEQ ID NO: 30121 - DNA, 3531 bp, Bovine  19866880843747
  misc_feature (1)..(1): n is a, c, g, or t
nttcttttgtctacaccatctacctcatgacctgaaatctgtaatgaatcctttgcttcatatttgataattttaaactcactcatgcttcagactcccttaaatcccacattggcagcaattttctttccccttgttggtccactgtgacctccctttttgaattcccacagctctcactatctgttctattcatttgatacttgatatgcatttcctgtattatcaaagtaattaatttttcatgcatatgtatcttatctttaaccagactttaaattccctgagagcaggggccatgtctgatatcttataaatgaacaaatgagtactcttctatagcttacaataaaaaggcaacactggcaaagataacatgtaaaagacaaaaaaaattaatgtatttattcattcagatttatcaaataatactatgttccaggcattgttttaggcactgaggattaaatgataagcaacaaagcattattcttgaccttgtgaggcttatggtatggctaggaaataaaaaattaataaataatttatacaaattatgtatatgtgtgtttgaaaaaaggaactagacaatattaacaggcccagaatcatttttatacactatactagtcagttcattcttagtcgacctgcccttcacccacattgcctgcccttcatccaaattaaaaagaaaattgcaacgaataggcactctgcagatgttagaaaacaaaaagaaacaaaggaatacaaatagcaggagcagtctgtttgagaaataagtctatcacaatcttgatgttttaatatccatccctagataaagctattcaatcagaaggtattacttagactgatcacttcttaaaagttatactctaaacctttaagaaagttcattttaaaacacaagaatatgaaatctacttctgcacttgccacctcaccattcagtgttttctatattaaaaaaaaaaaaaaaaaaatctccttactagaatttagggcaagaaattccagaatttactgcacagaaagattcccctatgaaattcaatctgcatcgtttctgtcattttggatatccaaagctatggtgatgtatcacacactcccttttgtccagcctctaaggaagcacaaaacctacaagggagcaaaactcatgaaatcaaaacatatttgattctatggaatcattttctactctagaaacatatgtgctaaacacaaatgctttgtaaatcatttcaattccttttttggaataaaaatgatttcttggataagctcaaaaaatcaagttccccttttcatatgttttgttgttgctgttcacttgctcagtcgtgtccaactctttgcaactccatggactgcagcacaccacgcttccctgtccttcacatctcccagagtttgcagcataataagccttagtggcataataatttcaggtttctctattgatggatatctcaaataaacaattctataaaaggcattatttaaattcatgcttaattttttaaacaatggaatcatccaaaaaaatggaaaacagaggcactggaaaagtacaaactgatagtccaatgaaatccaatttttgtaaatcctaatataatacctcaacaagattcagtgttaaaactaaagaaatttaactgaaatgtattaattctgatttcacatgtgctcttaaattatattctacatttgggaaatttgggatttgtgaccagtctgaaatcttacaagtttagtgctaatatgtaggaaaaccaactccctcattttattccagtcatacagcacaggtgagagggggatagttttaaatgcatgtaatcatttctgtctctgataaaaagcagtttccaatttgcaagagttggtattttaatttaggacaaatcccactacaaactataaatcatgacagggtttcatgttatgaactaaattgcttatagttttcatgtctcataaaaataagatttatatccaatgaactgtattcaattgtgtgctcatacaatcattcactcttcctcacacacactttaaaatgccaatattgtgttgaccttctaaaatatactaagagaagacttttcataataaaataaatgaggggaaagtcaacaaattagtgaaatgcaagggggagtgacattctatttaatatttttatttcattaaagaattacaaaaaaggaatctgtttacttggtcaagcaataattttgattattttgtaaaccatcccaatttctataacaaaagtgtctgtgcttgtagtgaacaatcccatagctcttaagatacataaaccatcatcaccattaccaccacctaccacaagcttgcatctacaaactgctaaaggtttaaatatggcctttttaaaaaatgaattatgtacaaaagggaacaacgatgaaaacattcatcacattccaaaccaatgcaggtgcctgcattaaaatgtggattcttttccacaaggctgcatggctatcagttccagagtttcctcctgtatgtgctttggtgcaaatggacacagtgggagctgagagaaaacaacttcatctgataggagggagtcagagaaagtatcacagagaacataatacttgaacttggatatgaaggaaaaagagaaattggccaaattaacaagaaggggacaagcatgatgagcacagggagcacgcatgcaaagggacagagaattgagaagacagcaggtttgagaactagcaaacaattccatagcatgtggaaagagaccaggttaaaagtcaggcaggagcagacaataatgtgctttgaagttttgattttttcctgtagctgataggagccatttacccatgttaaaaatatatatatatatgtatatatatattctagtagcaaaatccagaatgagttggaggaggagagaactattaggagaaaatgaccaacaagaatttgtgagtgaaagaagaaacaacagccatggagaaagaaaggaggagactagtttggagttcattaaaaaattaaatcaggagtccagttatcttatctagtaatcaccaacagttgctgaagattattatcccttttctaataccccacataatttcatagacttttaataaggggagaaaagaaaaaagtaacttaccaaataaaagtgataaagctgactattctataaaatcttatctattgtaagaaaaaaaaaaaagaggacatacttttgcattattttaaaataacttgtagtcaataaactacatgaaatctagagtgattttttttcaggggtgaatgatatcagtaagcaaattaaaaagccatgactaaatgtaattttagtataagagataagaccacaaaagagtaacttaacaaaatgtaataattacaaagccaaattatctgcctgtattattaaaaccattaccttcacctaaattttcttttttttttcaccttagattttcattcagtcttttatacataggc

SEQ ID NO: 30122 - DNA, 1369 bp, Bovine  19866880916582
  misc_feature (1)..(1): n is a, c, g, or t
naggcttgtgtcctttgctttggtaagccagggtcttacctggcaggctcaaacctgcctacaagggtcttacccacccaggatctccagttcagccctaacaaccagacagggcaatagcctctacatttgatctttctcacaataacatgcaacaataaaagcctgatttattgacggcttattgtgcaccacacccatttcatgtattaaaatgttaaaatctctgcaacaggcctgtgagatagatagctgctgttagtttcacttccaagtttacctttgaggaaagatactcaaaaagactgagcagttcatacaggatctcatgactagtccaagtggtggagtaaggatcagaaaccagtcaacagatctcatcagcccacatttcagtctctcatcttatacttcctcctgtgtatctcaaaagggatatgggtttttacagttagagatctggaatagggactattggtgttgaatctggttccactacaaccctagccacaccctgagcaaattgctactataaaattacagtaagaatccctattgcttcttttcttcatcattaggttactgttatccttattctctagtctctttccatcccagttgctacctaccacacagacctattgggagttttaaatgccgtaatatgtataagacacctatacaataccagttacataatgggtgctcaataaaggccattcttccttcccatcaaactttattgtgctatgaaaaccttctttcaggtcaaagtttattggtccagtacacaaatgatgattgcttactcatagaaattaatcatttctctagtgttggccagcagtgtttgaaaatggtatagacacaagccccagaaagaagccaagatggcagggctatgtatctcccattagcccatccatattttaaccaaacgactccatttctttttttataggcagcaaactgactccagtttcagacaacatctgggcaatgatagaaatagtggaagtaggaaactcttaaatgaaaactctccaatcatctgcctactccacctcctcaagcagagtcaaccctgccgataggcttaaaatgtgtcttgtttacatacaatgtctttgtaaaatccaaccgagtgcagaaattagaagtaaccacatgagattatgttttactgtttacctcatcccattagactaataatagagctatactccatttgaaaaaaaaaagaaaaagacaagctcagtatacatttcgaaatttggtgaaaactttttatcacaccaaatgatcctctctaaatggaccttgaaaccaaaaggaaactacaggaggaagcctctgtatccataccaag

SEQ ID NO: 30123 - DNA, 965 bp, Bovine  19866880931168
  misc_feature (1)..(1): n is a, c, g, or t
nctttgagtgaatccctgcactctatttccctgacagcttctctaacttgtttcttctgctgcttaaaaccactgtagagtaaatgtccacttctatttttcaataatatgtactatttacatagcatttgagcacaatttattgaatttgatcttgataatattcttttaaatatacattattatcctcattttatagacaaagatccttttgttcaaagaaacaaggatgttgcataagatgataatgtgagaggtggaaccaaggcttgaaccttagggcattcatctacaccacagtacttggcatactgatggtattaaattaggtgattgatgagttgtctcttgctgaaaattttttccgacttgggcatttcttacatgtaaacaactgtgaatatctttgaacttctccctactcatttccctacaaacttccctcttcctacttcaagactttcaagacaggagaggattaattttgtatcagctaccatttcagtatgtctaatcggaccctgaaattaatttgaaatttcctgcttgacttgaaaagtcattttgtgttttctgacctcatctcttgatcaccttgctgtgactgcagagcgaatcactctttcatgttcactgcaccatcgcttacttcctttcttccccttgagccattacatatgtccctctgtacaaaatatgtttcttgttgtttgaatctgtttttaattccagtcttcaatcatccttcattgcctggagtacttacagcttgtctgaaagcccatttgtaattttacccctttactttagatttcttctctctttctcttttttctctttaggaatcttgttctattgattttcttatagtattatctctatatctactgtttgttcaaactttgctatttttctcttctcactatagcagaagagtgaaatttatctgttaatcacacacatat

SEQ ID NO: 30124 - DNA, 1076 bp, Bovine  19866881056481
  misc_feature (1)..(1): n is a, c, g, or t
naatcctgctgactctgcatgcataaatcctgatcatccttcctttctctctctctttttaaatactctttgagtgacccataacatctgcaaattgtagtattacattttcccacttcaatccctgattttagcgaaactattggaagaataattaaaactatataaagagggtaaaaggtggtagatggtagtaggaaatcaagacatttatgctctgacatatacaaatgaaaagataatggtctacttggctatggatacttctgacactaagatgggttcaagagctccagtaggccacttgggcaaagtagatattttacaaatgatagtatattcattaagaggagtgttagatgaaagaaaataaaaatcgtctttaaacaactaaagcatgacacattattgtgtaagtgctataaactcaattttacaaatatccagaggaggtcctacagcaagtgagagacagggaaccttgcaaaggcttccctagggctttcttcactatgctaaactatcacacaggaaatacaaaaatgtatgtcaatttttagatgagacaataattcaatttaatttaattcttaaaaactattatgtattttaaattgtcacccattaaaataatactatttgctggtggcccagacaataaataatcctcctgcaatgaaggagacctaggttcgatccttggattgggacgatccctggaggagggcatggcaacccactccagtattcttgcccggagtaccaccacggacgtaggaggctggtggggtacagaccatggggttgcaaagagttggacacaattgagtgactcagcacagcacaaaataataatatatcctaagaaccatcttgagtctcatgcctgggctatgttatataccaaaacaaagaaacaaaaacataacccccctcaaaaacaacaccaataaccacaaagcaaaacagattgttattctctttcaaaacactaaagaatatctttcataaaggcatctctttgcctctagaaatgagaaagccagtctagtatcctgtgaaatctcacataaatt

SEQ ID NO: 30125 - DNA, 934 bp, Bovine  19866881169483
  misc_feature (1)..(1): n is a, c, g, or t
ngaggaatcgctccgcagaagacacacttggttttggagctgagacataaattaggactcttttactgaacatgtctattttacagagaagaaaaaattttctctcccaactcaccaactgaactcttctgatacattttaaattcataaaaagttataatgttaaaaagagaacattcatattcaaagtatattctcccacgtgtgtttacaaaaccatctttcttacagcatattcaacgttgtgtaaaatcacattctattcggtagtatttcactattccataaagaatatggttgcatgtattttctacttcaaattgaatttttctagtaatttgggcttttcgtctctactaaatacatttctcactacagatctttgtgtgtcattttatcatctctcaaatatattccaaaggaagataactttatctgttatgaataaaacagaattgattttattttagtgatttgaaatattttaactatgaagcaaacccaatacaaacagaatcttatcactttggtgtaattctcactctcagtgagcagggccccagcaaaacacttcattaggtgacaactaacaataaacacagagcttgaattaacacatttagctcatgttttttgaacgttagttttcattattctatatgtgtcacatgtcaatctttacagaattttatctgcctttattttccttgatggaaaactgcttatagtttgacttttatcaaaagtgagctgttttgcttatctgttactttatggttttttaattacttttattaaaagttattcttcctcctattacagttgataacaaccactttgtcattgttctgagagaagacaatgttccgattcacatcttaaagagtttctttctttcttcttttatttttttatattagagtaaatttcttta

SEQ ID NO: 30126 - DNA, 1215 bp, Bovine  19866881373199
  misc_feature (1)..(1): n is a, c, g, or t
naatgagggcttgaattttctcaaaactctagacaggttcatgagtctttcctccttctcaaacctgagtttcacaagttatccgatctattaacagagatcttcccttccctctgccctgagccaaatggcccagaatccgttgggagtccatttctcacatgaccttttttctgaagtctcaccactgtgaccttactcagaaaaaagtcattgaaacactcaaagatgtgtttatctgctcttgcatatattaatatgtagttaatatttattaggtatagactaggtactggggctacaaagatgaataaaatacatatcatttattctaagattctcaacatttctgaaaataagaattaatgaaaattaaatggaaacgtttagtgaatatttaaaaattggagaaaggatcacaactgcataattcacattttcacagttactgaaattcaagtgaatttatagtgcattcagatataaaactatgtttaagaggataagtataaaggaaaataattaaattttcctgacttatatagaagagtagcagcattgtgttctgaatcaaacgcataatttttgctgagatgattaagtggaagatgtttatgcttccattggaaatttgattggtgtcatacagcatgttaactgaaagacatgctcatttttacttgcttaggaatccttataatgttcaataaagcggctgcatgtttttgcataacaaaagagaatgtgcatagttaatcagtgaatgtcgggataatgagcatgttacgtattttagcatctgttatatttatatttcattgtggccattaatggatgattttcctttccactgtttagaagaaaattttttcttattgttgcacagcagtttgaagtaggagttgtagtttttctagaagcaaattactcaagcgtattattgtatttggagtcactccttcagatatcagtgtgctgtgcagctgaagttcccagtcagtaagaaacccacaattgggggtcagaagctctcaatattttaatcccatatctccacactttcagagttggctagagagctgtcatgaaatgcccattaagaaaaatgtattcctcaacattatacacatgagttaattagccagaccccagcctgaacttctggaaaagttctgtaaacttctgggaaaaaaaaatgtgtttttctctgtaaag

SEQ ID NO: 30127 - DNA, 1640 bp, Bovine  19866881401721
  misc_feature (1)..(1): n is a, c, g, or t
ncttggtgcttaaaggaatgatgccttcagcatagtgtccatagtgctttctctatgggcactaaactgttacttaaatctcactgaagtacactggcttcaaaattagccagggaaattcctattggcctttgcaagtgaaaaggattactgatgaagaaaatacattaaaccacactacaaaatatgcctttaggatgaattagattgtttgaacaacagttctgagagttcatccataccttagaatgtgtaaaaatcttgagtcaacttctttcaacattttaagtaaggatttacagtttgacttggattgtcttagtgatgaatgagatctgctatctactctactcattgaaaaaagcctacttcaatcagaaagacaagatttttctccaaagcttttaaatcttttaaatacaataagtgactaccgagagagagctccaaaagagtatggaattcatttgcccagagggggagaaaacaataatgaatattaggagaaaatgagagtataacttataagaataattgtcaaaagatacctataagcattaacctgctgatctttctcttttgtatatccttcatgtttattgctgggcatctctgatattcgttgttgccttgatcaccttcctagtgtcacccattgtgggaaatgatcctcccttttttcatcacatgttggtttacattctcttttcttgttctctgacttggttgaacgtgtctcatgagcttctttacacttatatgggaattaaaaggatgtcttggatcatcacaatgagcatttttactaattgcccaaatattaactgcctcatctaacagtatttaaatttgaccactttcttcctcccattatatactgtctcctttcctctgtgatctttggcaaatgacttaatctttgggttaaaggaatgatctttcaagctgtctagatgtaataaaacttatcttaaaaaacccactgctatcatgccagagcctgatggtaaagtttcttaaaagtaattacagtctgtgtaattgcaatacgccttgtttatagggaaaaaaacatttttttcattataatgaatctcagtttgatgtgtaatattatttacaaaaccgcatatttattgctctgtttaactaaattccatttacatgaaactcagaagtaattgtatatctttaactttcaaagagcaacattcatcaattcatcaagtatatgagttcttagtatatactacaggtatggagaaatgtaacagtgaacaaaacaggagaaaattccttatgttccttggggcttacattccaatgggagaggaaggtaataaacaaacaaataagcaacatctactgtacatcaagatttccaagggtttattcagctaagtgagaccatggcagttttgtcaattaagagaagtgtactgttgctgaaagaaatcaggtacttgagattcttaataagaagcaaaaatatcttccaaagcatgagtacaattcttcagaccaccactgttcactgtcatctaaaatcttgttgctaggacacggtaagcatagaaaaaccaagggcactttacaagctgggggcattttgggtagaataatgttctgatattcatgga

SEQ ID NO: 30128 - DNA, 3308 bp, Bovine  19866881463371
  misc_feature (1)..(1): n is a, c, g, or t
ntactattgccaagatctatgtcatgaagatttttgcctctgttttcttctaggatttttacagtttcaggtactaagttttagttttaatctcttttgaggtgatttttgtatatgatgtgtatttttctttctttcttttcttttttttttttgcatgtagaaatccagttttacctgcaccacctgttgaagagactgtcctttcccctttgtgaccttgttgaagatcagttgaccatatatgtgtagatttatttctgggctctctattctctatgtgtttcatttattttcatttctctagatgtttcatttgatctctatatctgtttttatgacaattctattctgtaagaccatagtgagatgtcatctcatagtgagatgtcacctcgtcacagtgaggacaaccattatcaaaaagtaagaaaaaacgagtgttggtgaggatgtgaagaaaatggaaaactgtgcaagcttgtggaatgtgaaatgctggagccagtatgaaaacagtatggaggcttctcaaaaaaattaaaaatacaacttatcatatgtttcaacagttctgcttctggatatatagccaaaagaatcgaaatcaggatctggaagagatttgttttctcatattcattgtagcatttttcacagtagctaaaatttgaacataatattaatatccattgataaatgcatgggtaaagaaaatgtgaaatacacagccatacatgcaccaccaccccccaccccctgccccgaccacctcacgtgcacacactgtgcttttctggtggctcagtggtaaaaggatctgcctgccaagcaggaggtgcagattcagtccctgggttgggaaaatcccctggagaaggaaatggcaacccactccagtattcttgcctgggaaatcacatggagggaggaagctggcagacttcagtccatggggtctcagagagtttgacattgacatgtacacacacacacacacacacacacacacacacacacactggaatactatttagccttaaaaaatgaaatcctatcatatgcagcagtatggatgaattttgaattatgccatgtgaaataagctagtcacagaaggaaaaaatactatatgactcctaatatgtgagatacataaagcagtcaaagcagcaagtaaaatggtgattacataattggtgttcaatgagtgtaaagtttcagttatgcaagatgaaaatattttagagatctgtacaacattgtgcttattgttaagaatactgtattatacagtgaacaatttgttaagagggtagatctcatactatatatatatattttttttactcaaatgtttgaaaaaagaaatatattcaactcattactttatattggatgctgtgtgtgtgtgtgtgtgttagtcactcagtagtgtccaactctttgcaaccccatggactatagcccaccaggctcctctgtccatggaattctctaggcaagaatactggattgggtagcattcccttctccagggaatcttcctgacccagggttgaacccaggtttcctgcattacaggtggattgtttaccatctgtgccaccagggaagccagtattggatgccagtaagagacaaaccatctaagggacagagatgtggaatacatgtgagaaaatgaattcttgttgaaagagggcttacagactggatgaccacttaagattcctttagctgtgggtttctgtgatatctgtttgaagacgtgtgaagtggtttgcatatcattaagaatgctgtctctagtatagggataatttagtaatgctaatttactaattaatatactaatggtggtatttcaagtgctgtggattaaaaaaaataaggagaatgaaaagcaaagctcaaaaggatctgctttagctctatggcatttatgatgtattatggtccttgtttgatacatgactgtaataaagcattgccattcaattagagtaagttaagtttaaaattaatattgtgcctgtgtttgattccatttaaagggctggagaaaggaaagagggttttgaaccattcactgtgcattagcttcaatgacagactataaatcatagtaagtcatgggcctctgcccagttgtgatcgctgtgtggtccatgtcaatgtcaaactttaaaaatgtgcacctcagttagaacggcatgcatttagtaattggacagaagtaagtggaatgaataggaggttaaaatctggccctttggaaatgttttgacactttacccaggagcctgcatttattaatagtaatggtttctaaatttttattttggccagcttgctgattatatagaaagccctagaagagtgatgaaggaaatacattagtaaaaagtattaaaaattatctttgacatctctagcagaaggagcaagatcagatggttgatgaaagagcataattgaatcaataggaacatccattttagatttttttctttcttgttcgatatttaattcttcccattcgtgttatgaagatacatcaagaattccattattactaagaaaattcatcctgtgggcatccattttaagctttgaattttctcaaaattcactaattagcaattaatgaacagaagaaattagagaaataaagtacacaccatgtgtaagtttatgtatatagtatatactcaattgaagagaaaagctttgagaaggaattaaaatttcaaaattcctactgtgtcagagattcttttagacagtaactaatttgtaaacaacaagtattatttgcttgagaatatatgacattgtttaatatttatataccatcacatttttatattagttgtatgatatcatcaagattagttaattaactagttatgttattgccatgatgatcagctttttctttggtggaggatgataagaaaaaaatacattattcaggcactgatgtcaggcattggattcactacatcactatagcttgttatttctgcgtctgcaatgtggtaagcagtgtaaaggaacagcatttgcctattatatacatacctatcccactaaaacaaacattacacgatcacataccagtcttttaatgagaatctgatcctgaagtatcaatatatttatttgctttattcagtttaatatttttctggcattttgtatatggaatcttcaagtcagacaattccttggcaacaccattgagaaaaaataaacaaactcatccagtgatgaggattgggaagtcacctgcataaaatttg

SEQ ID NO: 30129 - DNA, 1177 bp, Bovine  19866880357840
  misc_feature (1)..(1): n is a, c, g, or t
ntcaaaggcatctttcaaaactttgtagagtagttctcatgtactctgaagacaattttccttcacatctttctgccaagaaatgaatgtgttcctcaagtttatcactctctaatccctaatacgtttcaacttctactttttgccatgacttgtttgtatacttccaatgagaactctgtgaagacagaaaatgaatcctggaagaccggtcttatagtacagatgccgataaactggtaagagccaaatactgagaagctaacaaagctccatgtgccagatgtccttgaatggtttccatcttgcaggaaccaaaatcttaagggcttattcctctgtttcagcactcccttctaaccccctgtttagatcctcaaaatgaaacaccaacaggaacacctgagaaataaaacctaaccctgtcatcacactcactgctggcagagaccacgtgagtagtcggggaaatagccaagtgccaaactctaaatatttcaccttaccttatgtagcttttcaaacacaactctgaaaatgagtcatgatctgggaaaggaaggctagcatgaatcatcctacagcctttataagattaaattttctgagcatttaatgaaatatggcctagtgttaagaactaagaaatattatggaattaaaactcgtaggctaagaaaatgccatgcagacttctgccacccaaaaaaaacagaacattcaaagccacacgtagttggtagtatggcttcaaaatcataaatgtaatacctgcctagctgagtatgtatgtttgaaggaagagaatgagttaaaatgaagtgccattcattcccctaactagatacagagttttgtcagtaaacattaaaaaaaaaaaaacctgaacaataaagaagtttctcatccagcttttctacacattcaacaaaagctttgaaaagcattagatacacaaatcggagaaggtaatggcaacccacctccagtactcttgcctggaaaatcccatggacggaggagcctggtagggcagcagtccatggggtcgctaggagtcggacacaactgagcgacttcactttcacttttcacttttcgtgcattggagaaggaaatggcaacccactccagtgttcctgcctggagaatcccagggacgggggagcctggtggg

SEQ ID NO: 30130 - DNA, 1744 bp, Bovine  19866880403985
  misc_feature (1)..(1): n is a, c, g, or t
nattcatgtatggatgtgagagttgggctataaagaaagctgagtgccaaagaattgatgcttttgaactgtggtattggagaagactcttgagagtcccttggactgcaaggagatccaaccagtccatcctaaatgagatcagtccttggtgttcattggaaggactgatgttgaagctgaaactccaatactttggccacttgatgtgaagagctgactcattggaaaagaccctgatggtgggaaagactgagggcaggaggagaaggtgacgacagaggatgagatggttagatggcatcaccaactcaatggacatgtgtttgggtggactctgggagttggtgagggacagggaggcctggtgtgctgcagttcatcaggttgcaacaagtcagacatgactgagcgactgaactgaactgaaagctcaaatgtgacactgctaaaatgctgtgagctcccaagcagctttttatttagggaagataggccaaaaccaactacttatttaaaatacaacatttagaacacagagatttattcagagaggagaaaacttttctttaaaaccagagtaagacatcaagatacctcatttaagattacaagagaccaagctgccacaaataagaaccaccacaaaaagaacttttagaaaccaaaaagcataataaaagaaatttagaaatcactatgagttagaagataaaactggagatatctcacagaaaatagatcaaaaggataatgagattttttttataaatgggaaaggaaagatatgaaaggtaggtgaacagtctaggaggtctaccagttgtaaagcagcatctccaggaagagaaagatcatcacacagttcaagaatatttgttcaactctctaaccagatcaactgaggtttgaggaagaaccaggtacccattggtgcagtttctctacatgttcaatttcaagcagaaaataaatctagacagtaccagatccctggagccaaatagaagattttttttttttaattacaagaatactgtttaaatcatctttttacttagctggagcaaagggataaatctttcaataagggataccttgaaagaactctttcactgattagtgatcaacaatgttcttctttccttagaaaaacaaagaaatcagtaggtgccaaaattattattccagagtcttcagcacagattgcctattgaatattctcacaaccagagaaagtacaaaatctgttctgacccatttagaacccaaagcttcattacaaacctcccaagaactggaaatctgcacttcattaggaacaggctgggatccagggcttcatgagggagttgcccgaatagcaggaggcagttggaagaaatcttctggattcctttacatttctaaaaataaacaggagactctcttgatgagcttaagatacagaaaatcaaaaaagcttaggccctaggttctttaatactcatcaaaataaaacctgttccaaagttataatgatcttagttgcatgataaaacctaattcctataccctttttaaattctttttcaatcttttattatccaattatacattgttttaaaattttaaaaccaattccaaataagtagtcaataatcgaaatagttttctaggtcatggcaaccctgtgatcacttcctcctctcacatatgcctgtctttgttagacaccagaaaaattctagaatcagagtatttc

SEQ ID NO: 30131 - DNA, 1654 bp, Bovine  19866880419995
  misc_feature (1)..(1): n is a, c, g, or t
ncaccccctgggaagcccaaagagacgcatggaaccacataaacttgctcgctaagttattgttaaccaaaaagaacttaatgtacgagggagggaagtgctgcctccaacagtttaaacccttttagtctctgtaatagcaggttgtatagtgttttaggttgagattagttgctcataaagttgtcaagataaagaacctttgcccaaagtctgtttctcagctgctttatgattagcaatacaacagctggagaaccacatcctgtggtctcctacctgttaaacagcttcacaacaccagatttttacatcaaatgaaaagggctattaaaatggattttagtttctggtgactgaggcttttgcggtctgacatgcagagcaactctgaaatatctgatgacttattcttattataattttggtatggtatgttagcattctgagcttgaaaacacaaaattttagcattcatagcatccctttcttaacaaagagaaatgcatttcttctaaaaggaaaaaagtattacaaaattacctagacgcaaatatatttcaagtggttatccaggccctatacaaaaacattccaatggaagcaaatcattcttggtagcattctttgcatttttaattccttgcattattcctgcaacttcaatggtttcattattaagtcaaaatgaaggtcttggcagcaatgtcctttgaatggtgaacaaagcaggttaattagaagcattctaatttttcttatgttacaaattgtcttgagtaaaagaaatggattagaagtctcataaggcaagaagaaaaatgacattgtatgctttctgttgaataagccactctaagaaaaaatattgtttatggaaagtctgtaacaatagtggatttttttcttttaaagaagattggccccttgccatctttttcactaagcatctattccctgtggtgaccacaacatcaacattttatgtaataatctattctgtcttctttttccctatagtcgtgaactcctttcttctagtccttcttgccctgcgtttggacagaaagagaatctttttgtgatcacagcgatctatggttgcctttcaattatcatcgcaggcattttccatttcccagattccctggggcaccctgagccagcttctcccactgtgcagcatgctcccaggataaattccctgccatcagttgctgtgtgggcaggaaatgcaaactaattttaaccttagcttcaccaaaccattattagaatctttaaaccagagaaaataaatcctacagtataggcaaaaggcaagcaagaatggtatttggagaaaatctggggctattaggcaagatggtttattgtaatctctgattctctccatgaataccaatccttgagagcagagtctatagatttgcatatttattattctcaagcacatgtcagacagacaatatttatctgggtcagtgagctcagttggtgtggagctaataaggccaaaagcatggactctttccccttagaaaccaggaaaatggactcagagaaaaaccaacctactctacattcacaagttgtatctctaaaccggccagacatcctgcaagtgcatgctggggtaacaagcagcagggga

SEQ ID NO: 30132 - DNA, 1875 bp, Bovine  19866880555756
  misc_feature (1)..(1): n is a, c, g, or t
naaaaggcatgggctgggttctactaggaagtccccttagttgagcaagaagttattgtccacccaggaggagctgacgccttgtaggtgtgtatgaccccagggttcgtgaactcctgctccaaggccaccacggaggttgaaaggcacatcctaaactgccatttagaacagaagccagtccttcctgtcccacctgacgcataggctcttgaggaagtggacttctgttcttccactgccaacacgtcatgccttcagtgggtcatcgtcgtagaggcacctggcaggggagaaatcagggaggaggaaagaagggagagaaaacagatggctctcctcctccgaccccatctccctctccaggtgcatggatctctgcccaggctcagagaagtaccgagaacaatggtaccccggtgcctggaagctatggaaacaggcagggatcctgctttttcatagctccattttcttctctctgttctcccttctctgtcttccccagacgtgtgagggaggtgtcgacctggaaagcagcgttcccaacactgctgaagatatgctagaggtaatcatacgagaaaatgagagactgtctatggagctgaatatcgacaaaagaatataagagcagacgtcaaagtgtcaatgttgtaggtggattaatctagtttcttttttaaatttttaattgatttttattggagtatagttgctttacaatgttgttagtttctgctgcacagcaaagcgaatcagctttggatttcctttccacttaggccaccacagagcgctgaggagcgttccctgcagcttctgattagttatcaattttatgtgaaagtgctagtcactcagtcatgtctgactctttgtgaccccagagactctagcccaccaggctcctttgtccatgaattctccaggcaaaaatgctggagcggagtagccattcccttgtccaggggatcttcctaacccagagatcaagccgtcttctgattgacagatgggttcttaaccatctgagccaccagggaagcatggtatgaatagtgtatatatgtcaaccccaatctctctattcatcccaggcttggttaccccatggtatccatacatctgttctctacatctgggatttagtttctaggcattgttttaggtttgtgtcttcttttttcctctcagtgttgtggttcattctgcttcccactgggagtggctgcccttcccgattctgcacataaatagatggtcagggatgagtgtcctgcctacactggcagaactcacgtctcctttcccttggctgattccccaacctaagctccccgttttcatggttcttctgaatctgccaggtgctcctgtcccctactggtccgcttatctcatgattagctttactgcagttgtttcaggatttgtttggcatgtgggtgaatctgcaaactctgatggcacccacattggagtgaagttgcaagccacatctcccagtcgtttggtgcttctcaagctcctggagcgctctttcttcattgtctgtttgtctttctgtccaggagtgtcactgggacctatcctgactaccaccagatgagaatcaggcctgagccatcagctatcactgagggcagaggaattacacttgtgacacggccatcaactgccccgcatttgcaaccttttggagtgtgcatcatctaagcaagtgtgacacagtcagtgtggcaggaaaagaaagattcgtgtttactctctctatactcagggatcaaacccaggtctcctgcactgcaggcagttcttcaccagctgagccactacggaagcctattttctctatattggtccatctccctg

SEQ ID NO: 30133 - DNA, 2306 bp, Bovine  19866880623914
  misc_feature (1)..(1): n is a, c, g, or t
ntcaataaatggtgttgggaaaactgggccagctacattcaaaaagagtgaaaccagggccactttataccattcacaaaaattaactaaaaatggattcaagacttgaatgtaatgcctgaaaccataaaactgctagaagaaaacataggcagtaagcttcttgacatcagtcctggattgaagttttgaacctgacttctaaagcaaaggcaaagataaataagtgggactacagcaaattaaaaaagcttttgcacagcaaaagaacacatcaacaaaatgaaaagacagtggatggaatgggagaaaatattttcaaatcatatatctgagaaagggctaatattcaaagcatataaagagctcaaacaactcaatagcatggaaaccaaatgactcaatttaaaaatgggcagaagatctaaacagatatttttctaaagaagacattcagacatgaggagatgtttagcattagtaatcatcaaaatgcaagtcaaaaccacaatgagatatcacctcacatcctattaggatgactaaatttatacaatacttttctcacattattaaaatgtgagaaataacacattttattcacattattaaaatgagaaataaggaagttttggagaggatgtggagaaaagggaactgttggtgagaatgctaattggtacagttactatggaaaacaatatagagttttctcagaaaaattaaagatagaactaacttatgatccagctatcccacttctgggtatttatctgaagaaaatgaaacactaattgaaaaacattaacaacactagttgaaaaaatatatgcatcctggtattcattatttacaaaggccaagatatggaaatcactatgtgtatatataatattactcaactgtgaaaaagaaggaaatcttgctgtttcaacaacttgaggatcctgaggatattacacaaactgaaatgtcaggcaaagagaaacaaacatcttacaatttcatttatatgtggaatataaaaacaaaacaaatgaacaaaccaaacaaacatagatgcggaaaacagatgggtgggtgtcagaggggaagggagcagggtgttgagtgaatgcgtaaagggggttaattatcatggaagctgggaggtggcaactagccttgttgcggtgatcactttacagtgaaaacaaagattgaactattatgttgtacacgtgaaaccaatacaatagtctacaccaactttacctcaagaaaaaataatatgtaaaaaactcactgtgttagttactggagctcattttcctatcaatatgacacacaactctaagtgtgtgtcatagtgtaagccaactgtgagtggaacacaaccaatgaattttgtgtaaatatctctaaagttatgtgaacggtacattactcttgaacccttgtctggtctttttgagtgggccttttggagttgacttttagtggagataagattgattctctgtcactgtaaggatttgtagtatgagggcatataataggggcatgatagatgctggttgaattgaattgaattctctagtcttagagaaaatctgtcattgaaagagaatttagttaattctcataagacaagaagtattgcttgaaagttctttttgacatatttgagcagagtggattcaaatacctacttgctgtgatatagttagtgatatctattattttatctcatgttcccatgcaggttaccagggctgattctaggcacaattctgaattcagaaaactcagaaaactgtgtctttattctcccttttgtggattgatatttgtcacttagagcccattggaccgttcccctttcctcaacgtgtaagtatatatgtgttcaggtctcaagccccattgtccctgggcaattcttgctacttcctcaacgttgactaggaagataaataatagacaaatcatttatttaataaaaccaaatctagggtaatgtgtcctctggaaaagattaaccccctcaccctctttccttccttttgcctctcattaattgcctctaattactcaattgcatctaattattgccttctccagatcactgctgctgctgctgctgctaagtcgcttcagtcgtgtccgactctgtgcgaccccatagacagcagcccaccaggctgccctgtgcctgggattctgcaggcaagaatactggagtgggttgccattgccttctccagatcacaccgttgcctaaattcaaaggagtgatttttacgagactaagtcagaaagaatga

SEQ ID NO: 30134 - DNA, 1468 bp, Bovine  19866880652840
  misc_feature (1)..(1): n is a, c, g, or t
ncccctttaaagactcttccacggaatcagactgtctataccggatgggaactttcactcttagcagtttgctgatgggcgttgcagccaatgctaggtcagcccaggactgaatttattcttggggcacggtgttgtgttcagtgttatggagaatacaaaccaagtgaaagactcgcaagtctagatagatgagatatgaagaaaccaacaaaataacacgaactagtggtataagcatttttcaaaggcctaaataactattgaggaaatgtaaagacaggaagacattggtatggatatttacagtttttttttttaatgttcagatttagctgctatttagctaataatgggctcccccgggtggctcagatagtaaagaatctgcctgcaaagcaggagatcagggttcgatccctgagttgggaagatcccttaaagaaggaaatgactacccactccaatattcttgcctggagaactccatggacagaggaagcctggagggctacagtcactggggtcacaaacagtttgatatgactaagaaactaacaattagctaataattctttgttaacctgatgggggacttccctggtagcacagccagtaaagaatctgcctgcaacatgggagacctgggttctatccctcagttgggaatgtctcctggaggagtgcatggcaacccactacagtattcttgcctggagaacccatggacagaggagcctggtaggctgtagtccatgagttgcaaggaggtggacacgactgtgtgactgagcacatgcacacaacttgaggggaccgttttggcttctttccaaataatgctgttgcatttagcctacatttgtttaacttcagagtatttcattctatcctgctggctgatgatactgacaaaaaaatttttttttcacatattaatgtacagcctactcgtatgctgtctctctttcatacacacaccctagaattcagaatcttcacttccctgtggcattacctttgaagcttattggctctgtgaagagtttgtgaagacttagtctgatgtatgacttcttcaaactatcagcttataactttcaactgactttgtggaataaactggaatttgttgcatgtcaccttctgtgcctggcttcttaggaggagtcattagcatagatcagtgtgtgaatgatcaccttgaggattttagtggaggctttactgcttcctgaagtggaaaagttatagctatattttccagtgtgatacctgtatactgaagaaaataatgtatgacttctcgattacatggatctgttttgtgggtagacaagataaaatatttgaaatactctggaatctcttggaaaaataagtcatacagcattgggtttcatatttagctgtgctcctcagtaatcaggaagattctcttttccctgtgagatttaacctcacgagg

SEQ ID NO: 30135 - DNA, 1673 bp, Bovine  19866880658608
  misc_feature (1)..(1): n is a, c, g, or t
ntcaggactagtgttctgaacactacactgagaaacactgcaataaatccctggacacttcatgcttcactcctgccctactttaggccctgccatctcttacgtggaccatctctttcctgggcagcctcctctcgtctctctctgccaccattcactctacaggctctactgccagttttatttttcttgacagaaagaagtagtcatacttcactccttccccatctcccagctttaatatcatcattggctctcaaatacacatgggtcaactcctgggtctgctattataatcacatcaaaacctagtctcacccatctccgcaacttcatttcttaccaaatctctccttccccaagacatagcactttcttttgtcctttggctcttccactgatgcaaatggcctctcctgttcccacttacctttaatgaacttctccttaaaacccatttctaatgagatctcatctgagaaattttccctctggcatctggttggttactcctcagtgtctccctaatcacttgcaccaactgtatgccagcagttgtcagaataagaaattacccaagtatttgtccccaccactactctctgagccttttaagctttgtgtttccaactcctaacatactgcctgacacagaaaggcactcactgagtgaaaaaaattcaaatgaatgaataacatagtaagcaataacaaaacagggaaatgtagatgaagttatgaaagtttataactaggaaatgtattttgagaggtcatttattctggccaggaaaacacattagtctcagaaaacagtattactctgcttaaatagacctccaaggttccactttactgaaatcctgataaagaagaaacctttaccacaataggtcctaaaggaaactctatacctcccccaaatccttttacggtcttggggtaacagcctcatgaatagctcacctacgctagctaccccgctcaacaacagaccccagagccatgagcctctgcctgctctaggaactgtgtctactggaagaagtggtcaacccattctgttcctctgcattcctctttccatgaggatgccttcttttcaccttctggtggctctcagaggttagcagctcttccaaacatgcctccctacctttcactgctagcatttaaaatgtggggttttgtttaaaggtagaaatttcattacaagcacaccataagcaaataattctgcctgatggcttgctgaacttctttgctccaccaaaaaacttacctttcacaattagatctataggctccttgtgtttcttttttatattaaaaatgtgtggctcactgaaagcagtccgttgtggaggctcctcagaaggtccacttttggaatggtccttgggaaaacaaatccttttgtatgctgcctgaagttcttggaccgcatcaagtgtttccttttttttgatctccaaaggtatgaatttggtagattttggtttctgatgtttatttctgaagacatttatggaagtacctggaactttattctataaacaaaaataaatttaattaaatttaactgtataaaactaggtaataaatttggtaataaattaataaaattatatccactaaatatattttacaaagtactttactgtataagacat

SEQ ID NO: 30136 - DNA, 1415 bp, Bovine  19866880751999
  misc_feature (1)..(1): n is a, c, g, or t
natatttctttgagttgctcagaaatctctaaaattaagtttgaggtttccacatattcaatattttaaatcaggcaatctcaaacataattccataatttattaacatctctcaatatcattctcagtgatataataggaggaatgtctttcatgtagattcttaccatttttgcttacattcacttctgtctgtattttcattaatcctttctatatctcctttctttagaactaatttgttattttgtttattgcatatcttcattccttcttattttaatcatagtattttatgatgtaagtttgcttttaatttcagctttggccaggttccatggtttttaatatgcagtgttgtcatcatcattcctgatgcatttgataaattcagttttgatgtatttaataacccacagtttatctggaagagtatttaattttccagtgtttcatcaatatcaagaacaaaacggtattcactggcttcctgtgatacaaaatgaaaacattaccacaatttatcttctcacatcctggttttatttttgtattatctaagtttttagttacagtttttaaaatctccacaatattacataatttattttcaaaattaaagttgccacttttgcaaccacaggtaaaataattattcaaacatctcaaaattgatttgatgcacagctttagttagttatacacaattttcctattttttaaatctattattttagcatttgttagccaaacagttgagtttaaatcgtgactcattggtcatttactttctatgttttcttgtataagtaatagatagtctcctaaagaggagtgtggtctcagcattatctttgtttctaaattaatttttattggagtatagttgctttacaatgttgtgttagtttcttctgtacagcagactgaatcagctatatgtatacatatatcccctcttttttggattttcttcccatttaagtcactatgctactgctaagtcacttcagtcgtgtccgactctgtgtgaccccatagacggaagcccaccaggctcccccgtccctgggattctccaggcaagaacactggagtgggttgccatttccttctccaatgcatgaaagtgaaaagtgaaagtgaagtcgctcagtcgtgtccgactcttcccgaccccatggactgcagcccaccaggctcttccgtcaatgggattttccaggcaataatactggagtggggtgccattgcctaactgaatagagttcccagtgctaaatagttgatttgcattagttatctatttttatacatagcatcaatagtgtatgtatgtcaatctcaatctcccagttcattccgcctcactcttccccacttagtgtctgtatgcttgttctctgtgtctatgt

SEQ ID NO: 30137 - DNA, 2146 bp, Bovine  19866880753084
  misc_feature (1)..(1): n is a, c, g, or t
nccagagagtcgcctccactcaccacaaccagaaaaagcctgcattcagccacgaagcctcatcacagccaaaaatcaaataaattattttcaaattttttaaataaaataaagatgccaggaagctcctttttttcccaggaggatctttttgctaattgactaatgcctgaaaatctgacagaacacaaaagccattctttcacacaataattaaaaataaaattttaaatgtaaattgcttcaggagatgtaaaacatggaaaatttcaaagtaggctggaaattacccttacctgaccctcttctgaagaggggtttgagcagggcaagctgccagaaagaatctgaaagtcctgaagaaatagactaaaaaagaggccctgaaagtactgaaaataaaattttaccaggtccaaagctgtgcttagtatcaccccatccacaatgtcataaacaggaggcagatcccgaactgttgggagaagaattctttcctttggttatagaagcgaggaattatcgtcattaataattgcattgtctaaactcgagagagctttaaataaaaagtctgccctcattctccaacccacatattcattttcaacttctacctaataatcttgacatatttcattggttttatgagtttttttaatatctctctaacattagttaatttttaattgccaagaaggtttttaaaatctattatgggtattaggatatggaactactaagtttatatatatatatttatatatatacatttatctgactttgagatatttctgaagcctgtcataaagtcttaacttttaaaaagactctactactttcatgagctttctgcaaaaccactcatcagagccatttagaaaggaatatgacattaaaaggaggtaaattttcctcatgttatactgtgatttagttgtgctcgcccattaagtctaaatctgtcttccaaccagtgtgaagtaggcatgatttatttaaccctgatggtaaaggtctattaaaataataacttgaacatagtcattgaagaagggagtggcaatccactccagtattcttgcttgaagaactcaatggacagaggagcctggtaggctacagtccatggagtcacaaagagtcagacaatgactgagcagctaacacacacacacacatagtcatggctaatacgtcactcatcaaaaagagcaggccagggattccacggaaggctgtgggtctctccatgtcaagggaatgaacaaccaaagggactaaagatatcaacccctcaggaacttctctggtggtccaggggttaagactttgcctttcagggcaggaggtggggggtttgatccccggttggggagctaggatcccacacaccttgcagccaacacaccagaacacaaacagcagaagaaatattgtaacaaattcaatatagacttaaaaaaagtgatgtcatgaacagagaatctcattctcagagggtctcaaggagccaggaagcagcctattggaagtggggggtctccatgacacaatcatgaaccattatcacagaccagctctgcatttaacaaaggaaatgtctgcagttggataaggaaaacaacaacaaaaatcacggtgtttaaatctttaaaataacatacagcagtgttgctttacaatacaccttgttgatgaatggatttagacgttctaaggatcaaattcacattcctcgagtgttttcactatgactacatctacaaactttctcacagtcctttaaaatgttagggctttttaggtacttgaatccaacaatgactttaatcagtcattccactttttctacagccgtacacttatttcatcactaaacttctcaaaggcaagttctatccttatactatctacttcttgctctgtcttcactatccacttcttctcaatataaggacataaatcaattcattgcctcaacactctcctaaaactgctctagttaaaataaccagtcatacaaaaaacaacagtcctaagatatgaattctttactcctattccctgggggtaatcacctttatcagttctactctcagaaataagtccattaaatgttatgaaaatagtttgtaatagcaat

SEQ ID NO: 30138 - DNA, 2989 bp, Bovine  19866880848673
  misc_feature (1)..(1): n is a, c, g, or t
nggatcggctatccatgcccactttaaattattaaaacgcatgttgtaaatgattaaaatgtcaaattctgttacatatatttaattacaagaaaagaaaaaacaaaatgataaaagcaaaaaaaaaaaaaaaggaaaaacaggaaaacatagatttgtgtgaaatatagtgtttctacatgttattcaatcaaagcaaattcctacacttggaagccatattcttagttagatttgtccaactcaacccaccatgagggagcagaaaaccagacttctccagaaaattttttttttccaggactaaaagaagttcaagagaaatgctatctggagaggtatttaatgtggattaaagaacacacattgcccattctagtttcataaagctctcttctcaattagggctgaattataccctggctaaagcgagtcctacacctcctgttcttcctagagtcaatcaatagcatcatctcctagaaagggaggcctgacctctgacttccctgctcttgtattctggacaatttttatccatggtggtaatggtccaagggctggcagtagagggatatagtgttccatagctcttcaaaccaaaaatagctggtatcttttgggcacaattttgaaagtgttgtgactccaaatgtctgaattcattagaatttgggatttaaaacatttatgctatagattttctgtgattaggtttaaaaaagaacagagtggcaggttatacctttttaaaaatttcatatgaatttgatatccatttatattcagtaggaatatttgagacctagataagaaattctgtttttcttttcattaaatccaggttcccccatattaaccatttgttagccttcttggattattattaatatttgacagcattaaagttttagtaaaattatctctattcctattccagagcagacgtcccagctgatagtctacccagatttcattgaattctcagctgctagaagctgaggcatgtgcatgcgtgcaaatcgcttcagtcatgtatgactctttgcaaccctatggactgtaggctcccaggttcctctgtccatgggattctccaggcaggaatactggagtgggttgtcatgccctcctccaggggatcttcctgaacaagggattgagcccgtgtctcttacatctcctgcactggcaggcggattctttaccaccaacaccacctgggagccatcatatttcttcatatttacttggctacggacctcagatttgaaaacctaaggaagaaatatgtctttcctctggtgttgaaaaattttattctctttaaaccatacttaaattttttttctccttaaaattttccttgttattcttagcccttgttatttttagctttttgccaagtccttgcgtgattttcttcctttttttctgagctctttatgcacagaaagggtcaaggggactttattactcagtgaatcgtttataagtaaggatctccacctcaggtgtaagaacatgctgggtgtcatgtaggtgaatgtgtaagtacctgtgtatgtgtatgtgaacacacgtctctattcacttcctacagagaaacaggagccagaaaaaataaaagtgggtggtctgtgtgaggttggtgctacttgaaactgagtgactgcatagggctggtatttatacttacacataaacagtgacccaataatacactttttgtaaagacatttcattttgggtccatttggaagtgtcatagacacatgtattaatctccagagttgtctttttcagaaatttcaagagttttattgtttagagtgtctctgaatgctccttttgggtgtgatgtttgatcagatccacagttgataaactgtctccaaactgaaaatgttctgcatgaccctgtttaatttcatggagtctttagaaagggttttgtgtgcagactcaatccccgagtccggaagattctcctggagaaggaaatggcaacccactgcagtatccttgcctggaaaatcccatggacagaagagcctggtgggctgcagtccacggggtcacaaagggttggacaggactgagcgacttcacgttccctttctctttcagtctgcaaaaacagctccttcagctgctccaggtattcaattgcacttccaagtgacacttcctgaaaccaaatacagttgctattgagtgaatgaaggagtgaattagtgaggaagtgatatttaaagtggtctatttgttttagaggaagagcatggggtcttccaagaagtctcccttaatctaccactgaaatgagattgcagccaggaggatggagagagagctgaaatgtaaataggggaaaggagaatgatagatgagcaatagttttgcatactgaagaatgttccagactgccaggaagtcaccaggagggaagaagtaaacctgttgtctctgaacctgttgccctctgcagtgagttgatgcgtgttctcctaaccctccttctcgccttagctccctcccagatgggcacggagctaagttactgctaagggaagctagttactgcccacaccgcctttgattctgtctgcttgccatgcactcctacttcttctcagagcagcttatctgggcccttgccctgctgaactcagtgtcatgggactgtcattcaaagtggccttacttactatttacaatagccagacgtggaaatagtctaaaagtccattgacagaggaatggataaagaaaatgtggtacatatatacagtggaatattcctcagccataaaaatgaacaaaatagggtcatttgtagtgatgaggatggacctagggtctgtcatacggagtgaagtaggtcagcaaaacaagtatcatgtattaacacatacatatggaatctagaaaaatggtacagatgaacctatttgcagggcaggatagagtcacagatacagaacag

SEQ ID NO: 30139 - DNA, 1864 bp, Bovine  19866880857044
  misc_feature (1)..(1): n is a, c, g, or t
ncgagccactcagtccatagcgtttattatggcaggcctggcaaactaaaacgcaaagtaacaaagaaagcacggtcgttctgatactcacaatgtctacaagagaagcacacttattttctgtaaatttttttccattagactaactttgaagattaacttttcttctaaaatttcttccatgagtactttaaaggaagcctgggataatggcatggtcagcttcaagagcatctcttcaataatgacactggagtgcttaatatggatcttttatacaatccttcaataccagtcagcagtggaaagaacaactcagaaagataatttttcaagacctcagaataactgggccattccctttctggtcattaggtgtgatccaaagcttaaactgatacctagaggcaatgcatacccaatttataatctgctatgacaattattgtgcccaaaatagcttttgaaaagatggccttgaatgggaggaatttgaggcaatcttgttaatgagtgaagactaatggattttggattgttggcgttgtcttccctctcagactctagaagaagtcagtaccagaaagtgtcttggctatggatgtgtttctcatagcataaggaaaacatttattttagttttgtttttaaagtttcaagtatatatatttcaccactgtttggcacctggagtcaaagaagtctgctctataaaatctcaggatatataaagaataaatgtaaacatgaaatatggaagaaatctgtatttgtattgcaataggactcagttttaagacacagagtgattattttaaatatattaaacaaatcataaacttctcctttggagtcaagcttcactctatcctacagtgagtattctcctgaatgcagtctgacttgtatgtataaatttttatttcatgccattcattttttaaggttgaagattaacttttcttctatagttgcgttagaatacaatattaaccttgagaagcactttgtattatctcttgactacttgttccttttagaactccctgatcatgttttctatttcaaagcaaaaaatcatcctcaaaagtaatattgtacttttaaaaatgtatgcgcacatataggtgataataaaacatgaaacaggacctatagtctaaataccaccctcaagatgttccatgacacatattcatggctagaaaaatactcatggctatacaaattattttttaacctatatattccatactttcacacaaaacaaagtgcttggcttgaaacacactgtccttataagatatactatttacacttgccagcttgatttttttcactgcctccttctctggccacatgacacactctccattatgaagggtgtcagatatgaaggtcattcagcaaagcagcctgacaaccattctttttttaaacggtggttgtacaagacacagactaaaaggcagccaccccaacttcaggattttaacactttatttgtctgttctgggtcctagttatggtatgcaggatctttttcagtggcaggcatattcctagttgcagcatgtgggatctagttccctgctgctaagtcacttcagtcgtgcccgactttgtgcaaccccatagacgcccaccaggctcccctgtccctgggattctccagaccagggaccaaatcttggccccctgcaggggagtgtggagtcttggccactagaccatcagggaagtccctcagacaaacagtcttgaggattcttactaaaatgttctctgatttttttctagtgacatctgttgtttctttttcttcctacttaacataattagaacctgagggatttggggtcat

SEQ ID NO: 30140 - DNA, 1577 bp, Bovine  19866880872566
  misc_feature (1)..(1): n is a, c, g, or t
ngtctttgacttacttctgtatcttctaattctcattgcaatattttataagaaaggagaaaagaaatacataggtatcagtatattaataacaaaaacatccccaaatgctgaaactccaagttctactattatccctaaataatattggagggtgtgttgggtgtgattcagtgtgggaaacagaagccacttttcatacttcaaacaaaaaaagatctaacacgtgaaattaggggttgataaagtgtttggaagagtttggtctctagaaaccaatcacagaaccattccttagaactgactcactggaagctatttctctgagactaccatttgaacaattgagttcaagaacatacagtcataactgtagtgacgacattaggaagtggaaatgaaggagctgaacgcgacatttagcctcctctctacggcaactcctctgaaaacatagaaagctagataaggaaattggtagcatcactagcagaaaacttcacatcccgtgagcttgtttgccaatggaataaggcaaaagtcaagaaaatggcctccacttcacttctgcctcccgaatctcatgcaaggaatcttgcaaggaatctcatttctaggaaactaccataggaaaagaaattttcagcattccaaaccctacaatagagaaaaacatactagaagcatgatcaaatagaaattgaattagccagtccaccatgcccaccacacagaagggaagactgagtttaccacattgaaagatctctatggaattagcaggtgagccatatctccagcccagtgcctggcgcaacatcctgcacctattagatgctcatcaaaaatttagtaagtgaaagaatgagtccatgaataaatgcactgtggatgccacaaaaatgaactgtaatggtggcttctttcttttagtctccttttagaaaattattcctaaatgatgtagtgatagttgtttgttcacttatttcaaatacaaactaaaatattcttaactgtctcacttcccttttgtgtctgtctaagcagcttttagaaagctcaggaagtaaagttttaaaaatagaagaaatctagattttttttttctccttccttttgttggacaatgagtttccctttcacgcttttgtggttattattgctaaatgtttcctccaagaagaagtcttcctatttgggttatttttagaaagtcaaaagagaacttctaagcaatggctctttatttaggccaggatagcagcaactttgagtagattataagaatatagccctgcagttggtcaacctctgattctctttgttccacattaaacagcatttttcaagactactttttattctcttcccctatagcatataggggggggggatccatttacccctaacaaaaagtcacccagatatctccttgcttaaatgagaactaattaggattggcactaagttgcacaaactcttatcacagaatgttgggaccaaaagaagttttaagagtcacacggtgctactgtctcacttgtaggtgaaccgcttgtttgtagatgagcaaa

SEQ ID NO: 30141 - DNA, 1699 bp, Bovine  19866880874866
  misc_feature (1)..(1): n is a, c, g, or t
ntacattaatataccaatatgatttcagttaagaatggaccattggcttgagaaagtagcttaatcattcatttgtattccctaaattatttccttgaaagacaatggctgaactaccccttttaaggtattcccattaaaattccacaagttccttaatgtaacctacagcttccaagttggacattcaccaaagtcacagaaacttaatgaaggagaggaacaagttcagtgtatctgtgacaggccagaaggtcaagtgagctcaaggacagacaactcataaggaaatacaatcaaaagcatgttaaaagactagccttccaaaataagctttctgaaaacaagtttgacaagaagacatatgctcctgaaaaaaattttagacttttttttattcattgatgttgtaagactataaaattatgattcagaagaaataatttgtgcatattaagcaatttgaaatcatgacttatacagcattccagttacattcaagctactgtgctaggaattctgggatgtaaaatatggaaataccaaatatttttagagtatgtgtgatctttatattacataatttgttagcagcccatgccatttatagagcattcagtaactctattaactgctcctcagttcttgctgatgatacatctctaaatctacagagtgaaaacaataaacagaagtgctacattgtggagtattaatgttgaaaaatgtaataaattcccagagttatcttccctaaaatatttatagtcaaggagttactgagttttagaaggcccttctgtaatagactaatctttttcaaggcaaatgctgtaaactctactgtcaatcaatttaataacaactgtaattttaaaagatacaaggccctggccacttactaaaaagggcaaagacagcacaaaacttcagaagatggagtcttcaacttataaggccacttgcatatctcctttctgtctatttggaccaaatgttcacaaatggactctaaacaatgaacacaaatcttttagaatgataggctagctctaaacaatgatgcaaattttttagaatgataggctaattttcaagagggaaattgcgaagagaaaataaattgcaatcaggatcttagttcatctcatagaacctaaagcctcaactttctttttcgtaattttctttcttttgtttcctcttctttctccaggctatcttttagaactgagcacttaaatacacctttatatgcacaagccaaacgagaccgcatttaatttgtgactctctgtagctatctctaacatactggttttaataattcccaaaataccaatttcactattttggttctttaaatttatgctttcaactttatttttatagcttcattgacatgtaaatgaaaaactacacatactgaaagtgtataatttgacaaattttgacatatgtttacacccatgggaccatccccccataaccacagtcaacttaataaacatttccattctctattgtaatccatcaggtctcacttcatttcccacacccattccaggtaaccacagatctgattctgtcatgggcctagtttatttgcaacttctagacttttatataaacagaatcatactcttgtactcttttttgtctgacttttttcagcataactcatttgagattcagtcat

SEQ ID NO: 30142 - DNA, 2332 bp, Bovine  19866880931318
  misc_feature (1)..(1): n is a, c, g, or t
ngacttggtgttttaatttatactccgtttgaggttcaaaaaaaatctactgtcggcaacttttgaagtcttttctagaaaaaaacatctacatcatgttctgcaaagaccccagagtgcccacattttttgagtcactttttgtgatgcctaaggtgtccttattaaacctcattgctagttggaaaacaatgacactgaaattaagggaagaattcttggatatctcactgcttcctcaggagagactgaagtcatcctcaataaatgccatcattctaaggaaggcttgggattttgaacatcagcttaaaggaaaaatcctcctctaaggccacaacttcctctactttctgtttgatgccagagtgtttctacttttgtgtttgaactgaaatcatattatctgctgctacctgaagctctttcaacaccctctgcctccatagagaagagaagcatctttggaagtgtatccttatctttgttggtgtcccttctgtgcatcagatggagggtttacgttatgttttgggggagcaggtgggaggagcagctggtgtgagaagaagtgagcagcctgacaacagtaaaatggagagtagtgtgtgtgtgtgtgtgtgtgtgtgtgtgtgtgtgtgagtaaagagagctagtgccacaatatgaaaatggcccaagactgtaaactttgtggtctgttctccagagctaacaatacggtaaatgttccaggtgaaaagtcactgagaccctggaatcatgaaaatcagaacagaagaaactaggattaatagcaactttagtaatttatcatgaatttcagtgacacttgtaacattacattttccattgttttttttagttataattccacttaaatctttggtttcttctgtgaatatttggtacattcctattctgggtcaggtcctgtcacgagctctgagaaaggccaggaacaaggcaaagcagcagcatccatggacccagagggatggtccagggagggaggtgggagggggttcaggatggggaacatgtgtacacccctggcggattcatgttgatgtatggcaaaaccaatacaatattgtaaagtaattaggctccaattaaaataaataaatttatattaaaaaaaaacaccaagactagttttcagtttcatacaatgaaataaacactatccctttatttcaagcttagcaaattagtttaatatccgttctgttacaacagtgcacttcaaagagctatctgattttaattatatatggcatatataattatatattctttactttttcaaacacaaaaagaattatgataaatacgttttgcctcacaaaaaagtatcttttttcattccatatcagtacttagagagctccttttaatagctgcataggattccagcatataaatgttgtgtattttatttaaccagttcctgttgatgaatatttaggtcctttccaatcttcccaagagaggcaaagaagaatattgttggacatgtgttatttggcaaatgttcacatgtattgtaagatataattctggaagtggaatttctgggtcaaagttacatgtactggcactttaaaattttttaagtttattttggaatttctggccgcactgggtcttctttgctacatgaaggctttctccagttgtggcgagtgggggtcactgtctggtgaggcgtgtgggcttctcactgcagtggcttctcttgttgcccagcacgggctctagactgtgaggggacattagtcgaggtgcacgggctgagttgctccatggcacgtggaatcttcttggaccagggttggaaccctagttccctgcactggcaggcagattcttaaccactagaccaccagggaagtccatggcacttttgatgtgtgtgtatgtgtgcgttagttactcagtcatgtctgactctttgtgaccctgtagactgtagcccaccaggctcctctgtccatgggattctccaggcaagaatactggagtgggttgccattcccttctccaggagatcttcctaacttagggatataacccaggtttcctgcattgcaggcagactcttcaccgtctgagccaccagggaagcccaacagttttgatatatattgtcaaatttcctttggtttaagttgtatcaatttgcacttagtaatatgtaactacctgcttcctcaaaaccttgaccaaagcctgcattgtcaaagtttaaaattttttgtcaagctgctaagtagaaaatgatacctcctcagtagcatttaatttgtatttctcttattaagtaaga

SEQ ID NO: 30143 - DNA, 1432 bp, Bovine  19866880960776
  misc_feature (1)..(1): n is a, c, g, or t
nagccatcaaggaatgtcatttcttgacctctctaaatgagactgggagacctttgcatgaccttgagttggaggtggcagtaagcaggaggaaaagaaaccccacgacgactaaaattgaatttcccaccacctggtgggacagaaattgaattttatttaggttcataggaagaaaagaaagaaatgtgacatttcttatattcctggcttgtagaccaagattcaagcatctttcatacataaaataatttattttctaaatattagcattagcaccgccacttcaagataggagtagaccacatgattaattcttttctctctcgtcagatttagagtgccttctgactcagccgcgtggttccctatagacacctctccccactgagacctatatgcaaaacccagcaaggtggttcaagtgagctccaagcgcccggaaggtggtgccatggcaaccatgtgaacaggccaatgattctgagttaggtgggtgggtctttgtggagacacattcaaatacatatgtgttgattagacaacttcctggtgggtttttagtatctgaagtatatcattaaaacaaaacaaagaacaacttttgaagaaaattttctccctgtttatcaccagatttgagatcgtggtttagacagtatttctcaaggggaaatgaaagaataatttagatcctccaagcagctatgatttcaagatgcttgcgagctgtgggataagccgtgatggggagagtagctacacaagaagcaccagtttgcagccacgtggattttctttgactagatggagtttatctcacctctgcgtctttgcatctgctgggctcttcgtctagatacctgttcctccatttttctcacggctgcttccttctcaccctgtatgcttgagctcagtgttactacaggcagcctttcctggccagtctttctaaaataggtctcctcttcctgtcctgcctctcagcatcctgcttgttccctttattgctctagaatcatcttaaatatttaatttgcttaccttttaatcaggttactaatttgtttatttaacctacactcctcccccataatgtaagctccacaaggttagagagacatgcttgttttgtttattccagtactcactcacatagtgttttacacagagaatgtcatcaattaatatttgttggatcatgtatgaaagaagataggagacagtctgcttggatatataatggtaatttctttttcctccacttggcagtgctgctcatgaataaatacctctgtgcttacgttcacttagcctctttaagagagtgcttttcatattggtattttggtttgtctgagccctgggtttcagctctgtagattattctatttgtcctttgtcaacctggttctccaccacagctttt

SEQ ID NO: 30144 - DNA, 1775 bp, Bovine  19866880993835
  misc_feature (1)..(1): n is a, c, g, or t
naggatgagatggttggatggcatcaccgacttaatggacatgagtttgggtagactttgggagttggtgatggacagggaggcctggcatgctgcagttcatcgggtcacaaagtcggacatgactgagcgactgaactgaactaaagtcatcttttacttacattctctccctcagttaatactatactatcagctcaaataggaaaatcacccaagcggggaaacagaaaattttctctacattcttatatttcattagttaacaaccattaaataccttaaaatttttattcttctcatcatccagaataattctcttattttttttcattgagaaagggaacatagaagagaaaatattttcctacaacagaaacctgaatgagctttaatataccttgaattaaaagaaatattttcagactcattaaaataaaacactaggattttaaaaataatattgagttcaccaaaaagtttgttcagttttttccattatggaaaaaaataaactttttggccaaggtagtattttaacatggatagtataatgttaccatttttggaaaatgtgtcaccaactgatcatcataaatgtggatccaagtagatctagaattgcctgttatcatataccaactcttcatcaagccccatcagggcttccctgatggctcagcaaataaagaatcaaaaaatcctcctgcaatgcaggagacacaggagatgagggtttgatctctggagtcaggaagatccccaggagaaggaaatggcaacccactccagtattcttgccttgagaattccacggacagagaagcctggcgggctgcagtcatggggtcgcaaagagttggccacgactgagcacatggcccacatcacattacacataatgtgtatgtcgaaattgcctgtgaccatgtgggttagagaaagagctcatggttcaggcactaagcaacaccttttctaaagggagcaaaggaggaggatcccagtggcttgcaggaattggtacctttgcccttgggtgatctctgcagttagagaacgcacgcacggtctgagaaaaaattcaccttactatggaccttgaaccattctgcacacacacagaaaaataaattaattcaagtgttcttaatgctgctaacattgtacttcactgaggagaaaaaaaaaaaaaggtgggtgcagatagaggggaggactacagagaaagaaatttggaaatggcacaaaaatctacattctgcctagggcttcccggagtatacatttatgaaaaggagacataatcaaacacgaaccatctattctgttgtgtaataattaacaaccctggtccaagcatgtggccctattcagatataaggcttttcttcttcttttttattttctacttcataacatacaaaacctcctgtccaaacagagcctggtgctacacccacaataagattcagcctcctctgtagttttaattaactcaggcccagcagttgtttttaacagttaacagtttgcatgagttacagtatgcacactgctgagacataaatgcaaagtaatcactctaataagtagatacaaacatttacaacaattgcaacaagtctctgcaacaataagggatataaagaaaaatatccagcagcaagccaggaaacaacttctcagtacaacagcatgagtatgaatatcattcaaaggctctgatccttttgttgcctttagtaatttcaataacccaaagccactaatgg

SEQ ID NO: 30145 - DNA, 2083 bp, Bovine  19866881011937
  misc_feature (1)..(1): n is a, c, g, or t
nagtggtatagtatgtaatacattcatatgacgaaccaatgcagtgttttttaaaatttgagagagctgattcagaagatagaaaaagttgttctgtgtcagacattttcaaattaaacctaaaatacatttacttctctctgataagagaatgtgaaggtgttgtgggtttgataacccacggtgctaataaccatcattgagtgtcagctaattacagtgtgtaaaaataaagtatccagctaatggtaggttacattagtttcagttcttgaatcatcttgtgtaaacaaaagttgtaagaaaatgagatgaaaaaagttgagatagtacagagtatataagggctgttattactcccttaaagacactggcagtctccaaaatattgtccagtctctttaatgattgcacgattaaaggaattcctttggaaaacagagttcggtgtttgtgatacaacattaaaattcaggaaatgagattgcatgttttgaaagcattctcctctgaatgacacttttgtgttcaaaatattgtgagacatcctatggtagggactgttttgtgaaataaacagataaagcagtacttgatgtgttgacaagataactggaaacatcctgggagatttcagtcactcacagatgcagggtgtgtctatttgtgtttatgtgtgtgtagcgagggctcatggtatgtgtcagtgttctttggttttgtttcttgcatgttttttggctttgttttttgatttccagggaagtctggagggttacagtttaaggggtcgcaaagaatcagacacgactgagcgactataagttgtcttatcatctttaaaccaatcatgtacagtgatggtataatagttaagtgctggatagcatcaataattgctttcttgttgcaaagattttgaaatatccaaaagtcttgtttttctgtcttctcaaaatccatctgctttctgaagcctggtgtgttctgggcttatggtttgagtttgtggttgttcttcacagtagttctctgagaaatgctccctctctcctggcggccttccgtttcactcaggaggccagactagcaatggcctcactctctcttttgatactattttggtctttaaatgagttcatcttctaaataactgtttactgactttccttagccagatgataatgttagaccattgacaaaaccccaatttcattcattatataatgaaatggttacttagaatgcttttaaacaatttataaaccaaattttagaagactggttttctaaattattatttttccctattctctgggcagtgctttcaaaaaagtcaaaatccactgtgcctcaccccccttcacaaacatacacgtaccatacgtatgggtacacacacattatatatatgtgcgtgtgtgtgtgtgtatctgtattccagagttctgggttgtatttgggaaaggcatcattcttagagactcaaagtgcatattagcttatcagaagctttgaaaaatcctgtcgtgacaaagcctattggtacaggaatccccagctctggggccacggcctgttacaaggcaggccgtacagcaggagatgagttgcagagagcgagtgaagcttcatctgtattcacagctgctccccatcgctcgcattaccagctgagctccccctcctgtcagatcagtggtggcataataaatataatgcacttaaatcatcctgaaatcttcccccgctccctcaaccctcctggtccgtggaaaaattgccttctgtgaaactgggccctggtgttgtgttagaacatttcccaaagtatttgatcatagaccccttcgttgcggaataccctgttagtatcccctggagctcatgttctgtaaaatgctgccctgaagagaaacaggcatttaaatgttattactcactcaaatatagctagtgtctactatgggccaaccaccaagctaagcagaaggcatgtaattgatgactaatggtttttaccactttcacggggagagcagtgaatgagacagaacgcagtgtgatgggtgacaggtacctg

SEQ ID NO: 30146 - DNA, 1483 bp, Bovine  19866881014415
  misc_feature (1)..(1): n is a, c, g, or t
ntgcctatagaaaaataaaaataggtggactataaagattttgcatctaattcaaaattttacattttcagtgtataagcttttcctgaatatatgttaatcatctttgaaagctatgttaatactttcaggtgactaaagcactatttaaaacacaacagataaatgagagtttacaaagtagtcaatacaagtctaccttaatctattatctttgtaacttaaaaatcatataagcccagttttgttttatcattcagtaattcttattttgttggcatctgaaaacctcattgtaagatctgatctctttttatcagatggaaacatatttgaccaaatatacaagcaggaacatatagatggtgatgatagtcatttcatcctagttgaatttcctttagtccaattactaatgcattttttctttcatgttatttattatgatgccttctgataattaagttctttccatgggaagaaatagtacattaggaaatatttattgagtaaaaagccttgctttgaaaaatctaccaatagttttatgtcctctcagcaagagtcaattgtaagatgaaattttccaaacattttcttttttataaaaataaaatttgctaattgaaacagagaatctgttgaacttttgttatcccctgtagagaagctaaaaatgcatgaattaatatactgtgactatggagcttagatactattaacaaggggaaaaataaatatgattctaggccaccaaccacttttagtatccttctagctattattttccctattgaaaaagtacattaggatttgatgtgcttggcatactgtacagaatgctaatacttgctaattatagactgctttaaaaaaaatcaggtagatctacaaataatgtccaatttatctgcacttgcaggaaaggcaattcaatattgctgagaaagtaagaggccagtggaagataccatataccatgacaattttaccttagctttgattctcttttcatattttaaaactggggtatagttgctttacgacgttgtgctttctgttgtacagcgaagtgaatcagccttcagttcaattcagttccgtcgctcagtcatgtctaaatctttgcgaccccatgaaccgcagcacgccaggcctccctgtccatcaccaactcccggagttcacccaaactcatgtgcatcaagtcggtggtgccatcaagccatctcgtcctctgtggtccccttcttctcctgcccccaatctctcccagcatcagggtcttttccaatgagacagctcttcacatcaggtggccaaagtattggagtttcagcctcagcatcagtccttccaatgaacacccaggactggtctcctttaggatggactggttgtatctccttgcagtccaagggactctcaagagtcttctccaacaccacagttcaaaagcatcaactcttcagcactcagcttt

SEQ ID NO: 30147 - DNA, 2164 bp, Bovine  19866881017971
  misc_feature (1)..(1): n is a, c, g, or t
ncccacccacctgcccatccaataagcgtttgttgatcactcactcttttccagattctatgcttgatgcgaagaggtcagaaataatgagaaactcagaataaaacaaaacaagattttgagaggggatactaagacccatatttaccctcccacatggaacaataaaaaattcaattaaaatatatggaacaatggatttcaacatattggacagcagacaagaaaatacagggattcctgagaaattgagataagccctattattgccttggcttgccacctggagtttttcagcccacagtacacagagaacccaaacagaaccagaagactttatgatttgagaacatggagctgagagtctgggggcaaccaagacagagttctaagaacagagtaccagagaaaagagaactacggtgacttacagtgagtccctcttgagtatttagcagagtattcaccagtacctttgtgtaaggaaagtgcccaagtctgggaaaggagccatccaagactgttagggggaaccatacccagggctcacacaatgcttggaataatgcctgctcccaccaggctgactggaatacctcataattcacaatagaaatacttaggaaaatcttgcctcaataaagcagaataattaacccaagactgggcactgctccagactcacctaacgaatcataaatcaaaacttaaaggataaaactgtctccaagtaaattaacttcatcctagaacaaacgctcaagaagatttataataaaaaaaaatattcagcacctaacaagtgtgacatccggtcaaagattatcaggcattcaaagagccaggacccactccagtgttcttgcctggagaatcccaggggcaggggagcctggtgggctgccatctatggagtcgcacagagctggacacgactgaagcgacttagcagaagcagcagcaacaccccactttctactaaaaatttatcctaatttgggaaaattatcttaacatgcatgtctaaatgattaaagtatttaaaagatgatctttttagtcaattattgtgtcattgcctgttgtaatccatgagcttatgatactttataggcttccctggtggctcagatgataaagaatctgcctgcaatgcagcagacctaggtttgatccctgggttggaaagatcccctggagaagggaatggcaacccccaccagtattcttgcctagagaattccaaggacagaggagcctggcgagctacagtccatgaggtcccaaagagtccaacacgacttagtgactaacactttctctttcactatggtactttattagctccttgtaatatacaagaaaaagagaataggcaccaacatggttgaccatttgcctgtcacttggtactcaagggcttgagtgagcaaggttattggagattctgaacttgacattttccctgtatgctcaccaggctgtagagtcctactgccctagagacacagatgcaggggagagtttgcaatctccacaagtcttgccaagagtcaaaggaagatattttttcagagaaaaatctcaaaagtggaagtcacaggtttttctttgtagaggcgcaaaattgattgaaggagagaaactgggaatgaaaatgagaaagcactcctttttggaggtctacatgtaccagtatttaagatatcacctcatttagttgtaagcctgtaaaagtaccgttattcctgttttacagttgaggaatttattaacagaaggactaattaactttttggaggtcacaaagctagaaagtgccacagttaagttttgaaccttaagcttgatctttcagtccagagcactctctgctcctcactgatacctcagctcagtttgagagatcaaggacaccaccataactgtgatcccttcttgcccctggaatgttaagtccaccctcttctgaatccaagatctaaggatggaaaggagagaggtaggaaggcctgagtccctgggagaagaaattcaggtcctttaggggtatgggtcatgaaagtgtttcctagaagaataaagttgatattaaggttaagtctcttctgttacaaatgttgttgggctataagaacaagcaagtttttttcaaatgtcaagg

SEQ ID NO: 30148 - DNA, 971 bp, Bovine  19866881060523
  misc_feature (1)..(1): n is a, c, g, or t
ntttatattaatgtttctttcatttatcagagccttgcagagcaaagttgctctcaccagggaatttatattcctgatattatagtaattcagtcatataaaacaaaggcttgttggtggatctctgcgtgttaggaagactgagtgtgtaatcttaataaacagtgatctaacaaaagaaacctaaagccttgctctcgaacagacttatgaaagtaattatacctttattgaagttattccattctccaacccctgctgttcctgttgtttcttaaagatggttattttctacttaaagaaaacagacaggctttagaagaagagctggtgttaaatactattacaccatttaatcagattctctgtgcagcttatagaacaatagtacaaatatttcaacctaaataataaaagattcaaagaaacccagaatggttaattagggtaacctaataattggagtaacaactcacatgatggtaggatagcaattaggggaaaacaaggcttccaaaggcgatggccattctcagggcatatcattagcacaggatttcataggcttggcacagccatggatgaagtgatagaaggcattagcagtgttaaataatgtaagatgagacaaaatgtcaagaaccatctttttaaaagttttagaggagaaagcaggaggaattttaggagcagctgcttggattaggtagctgaagcaaggtgatgacacatgtttcaggattgctctttgccccgagggttccgtctccagtttattcagggggtatttgagctctagggaagagtgtttaaatagctcctactgtcacataactgatttataaccaaaatctaatttgcattgtgaatttggaaacaaccatttcccataggcagatgacaggtggagaagggacttaaaacaaggagaatcctatagggagaagcaaccacagtccaactagatctca

SEQ ID NO: 30149 - DNA, 1249 bp, Bovine  19866881079057
  misc_feature (1)..(1): n is a, c, g, or t
naaaaataaaaggaggcaagaaagggatcgacaaaaagcaggctttgaatgcataatgaatgctttgcagctcattgatagacaacccttaaaacaaagcattgttgtgtgaaatgttctaggagaaaagaactcaagagtttatcaaatgagttattggaaaagaattttttttaatttgccagaaaagtaccaggccattattgcatcttataaattatttattattcttagatatgtcataaagtccaacacaaataaaggaaaaatgctgacaagacagaaatatcattgtgaatatagagatagctgcctgaaaccttgcaaaaagttctaagaatttttgcaccctgcctaccacattttcaccacttagatattttgcttttctgtatttgagggtgtcagcagtttctttttccagccagaccacccattcccatctttctttgcatgactaagctaacagaccgtaaaccctttgctctgtatgtgtgtgtgagagagagacagcaagagagaaagaaaattaaccatgaaaaattaagtaaaatatgatggtgaagagaaatccaattttaaaagcatctattcatatgattacctagtttatatgcatctctgcaagattctgctggggactgccttagctgttctggagtcttacttaataaaacagccaagtttattaagaaagaccctagtctttcactcttatgaagcaggctaatgaaatatcatagaaacggtttcattttaatactaagaagatattgcgtatctgactgtaaaatatttttcttcttattcactttaagagtcttatgagaatgactggtttaaagtaaaagcagcaatttcaaagttgcctagtcacacaaagacacaccatcactcaccttttctgctctttgcccattaattatttcagaatctggaagcacatatttatctctcatggcttttccagtgaatcacaggatcctccaaggcacttcaccaaatgttttacagatcgccaggttccgaaaatatttgttgatttgaacaagtatgtgtgtggagtgaggtgcatggaatctttcatctcccacctgctgcgtgcttaggaaattctagaacactgagggtcacatgactttatctgactttctttaccatggcaggtgtttgggaggtcacagctctattcttttgtatctgctctattattttgtatctgagaaccccactaaatatggggtttttc

SEQ ID NO: 30150 - DNA, 975 bp, Bovine  19866881086777
  misc_feature (1)..(1): n is a, c, g, or t
nccccgtccctgggattttccaggcaagagtactggagtgggttgccattgccttctccgtggtaatagcaaggacaggtgcaaagtcagcatggtgttttagaatttacagttgagacaggaaattatttagtgtagctatctaattttatagatgagaaatctttcagggctcataatagcttttgaggacatgatgaaatctgtgatttttctcttccaagtaaagcctgactcaaaattttatgtatgatcagcttgtttgcagtttaagaaactcttctttggcctgttttactctgatccctttagttgggggaactgtttactttcagccttaaaatcattgattttccttgagagcaaaagttaagcttaatcatggtcatccacattcttagagtgctgtctcatagaagaggaattaattggatttcaactaaaaattacttgaggaagaaaaatagtgccagagtctttattcgcttttttagtaatgctgtgcaatctcctggatttaaaaaattaacctcttgcattttgcttgagtaaggaggagcaccacacttaaactgtaagactagctttcatgaatattcggtgtgtgtgtatttttagaacttttaattgtaccctgatgcagctgccagactcccagaaaagtgttggaacgcccgtagtctttagaggtttgcctccacagaagtttaattttctgggcctgaggattgttacaaatgaagtaacacatacccagaaggagcgttctgctttgccatatgcatttcaggctataagacttgaaatagtaaagttttattttaaagtttctttttttgttttgtaatggtttatggcaagcttctctaaatgtgagcataaagacgcttgattatatttttaaatattgctctttgtttgccgacatggtaagtcattaaatgccattttaagtgtgagttgggaagatatcta

SEQ ID NO: 30151 - DNA, 1066 bp, Bovine  19866881087564
  misc_feature (1)..(1): n is a, c, g, or t
naaaacagttttacttctttatgtgaatatattatcttgtgataccgttatttcttccagaatgagacattaaaaattagttaatggacttttgtaagcaaggagtaccttagaattcacctgattcaacaacttccctttagagacaaccatgctgagaagcaaagagcaggaaattccctggtggtccagtggttaggactctgcactttcactgctgggggcgtgggtttgatccctgatcagggaagtaaggtctcacaagctgctctatgcagggtgacatatgaccagaaagaaactcagatctttagtttcattgtccagtacgtttcactccgcacacattatgaatagcatcacacaagatgctattaaaaagaaagggctgtggggagaatgctgaatctgttaagttgaagagtcactcaatggacttacagcatttgtgcttcatagaaaatgcttctacggtgggaataattccattgataaacctgattttttttctttttaggtgagagttatgtgtgcgcgtcaaatgaaccatttcgcaaagtggactacaccaaaaacgttaatccgaactggtccgtgaatatcaagggtggggccacccgctcggcccctccctcctcagtgaagagcgaagtaaaggaaagtaaagatttcatcaagcccaaattagtgactgtgattcgaagtggagtgaagcctagaaaagctgtgcggatcctcctgaataagaagactgctcactccttcgaacaggtcttaacagacatcaccgaagccattaagctggactcgggagtggtgaagaggctctgcacgctggacgggaagcaggtaggatgtttctagccccacacactctagcttgcttttaaaccctctctgtaccacaggagttacctagttaacaatatgaatgtcatagctcattagaaatgattctcctagttgtacttgtgaggagtgtgtgcgtgtgggtctttatcatgaaaaatgataaagcaagggcttccttgtctctttacccaagtatctcaaaagagatgtagag

SEQ ID NO: 30152 - DNA, 2069 bp, Bovine  19866881227823
  misc_feature (1)..(1): n is a, c, g, or t
nctcagcttggtgctctgtgatggcccagagaggtgggatggagcggggaggaaggctcaagagggatgggatatatgtatacttatagctgattcctgtcggacagcattgtacagcaattatactccaataagaaatagataaaaggatcaccacaaaaactaaatgaaaaagaaaataaattaaaactgcatctcaaggtgcccctctgtcctccagtcgagcccaaactcaaggtccacttctttctccctgatctgtattttgtcctgagtgatgcaaggacagctgagaaggcctggaactcattcttcaggatcgagggtggtggtcctggtggctgtgaagggattgtcagtttattcctaaagtcctacagctgcctggattctggcttttttcacagaaagatcccgtacactgggttcctattagttttctgttttataggtggtggtgcctcagtacatgtttcaatgctactctctcagttcatccctccctctcctccttgtgcccccctgtgcccatgaggttgttccctatgtctgcatatctattggtgccctggtactagctcatttgtaccatttttctagattccacatacatgcattaatatatgaactattcttagtctacggcatcaggatgctctgtgttctaccctggttagctggaaaaccccttcctctgcagctcaatgtgtgtgtgctgcagtgagcggccttggttcctttaggggagcaggttggagtcagagacaggcatcatcataccgcatgtacactcccttcccccttctctcctctttgccactccaccctagaagggaaagagttgagtccattcatcagacagagggcagatattggggcatagagaaacaccagcaattacaatgttgagtccacacgcatcacttattctgggaatgctcaatctttcagcatgcaaatgcctcagcactacacgtctgatttttgttccacgtaatttcaacaattgtgtaatattataaacatcaattgaatatctgtgctttcatgaaagtaaggtcccgcttttatgcaaatattaaccaagtagtttagaaaaccgaaagaagtaacaaagaaaataagacctgtgggcagatggtttctgaaattatatgtttttccgtgaggcattagctgttttaaaagcattaatgctgatctttcttctgggatgtgggtgtataatttaagataaaacaccttccttgcacaatgcaaagtttaccttgccaagtacttaatttataatgaatttttttctgttaaaatatttcctcaaataatttttagtaatttttcatggagtgccgggtgttctagaaagactctttcaggactgaaataagcttgaaaggattatccagagcggaatggaatacattttattaaagaattcctccttaaaaggaaattctataacttctcttatggaccctttctcaagtttatcagctgctctttcagaaagttaattttcgtttttcatctaaatatctcatgttgtacatccaagctgttattttatttttcctaaaatgaagaagagccaggaaccacattctgggtaaggcctttcatgggtgttatatggccagctacaattctctcaacatgaatggaagcatttcttttctgacaggcatgttataataacaacttgctatgggactttgattctagtggtaaataacccccttgtcaatgcaggagacataggagcccccaatttgatccctgggttggtaagatccccagaggagggcatggcaacccactccagtgttcttgcctagagaatccccatgggcagaggagcctggcagactacagtccaccaggtcacaaagagtcagacatgactgaagtgacttttagcacgcactcacgctagctctggcaaaagggcccaaacagccacgggaggcctttgcaagcagttgctgggccaccccgtgttaggacttcccgggcgaaaaatgccagtttgggcccctaggcccaggctccaggtgggcgcccagggtctt

SEQ ID NO: 30153 - DNA, 1714 bp, Bovine  19866881251978
  misc_feature (1)..(1): n is a, c, g, or t
nctagcccatgtccttcaccttcaacatgttaagagcttaaaagctaacaaagcttaacatttgccagacttattttattctaaaaaactcaaagttatccagaaaatagatgtaataatatcaagtcatgggctacttacataggaggggtgaacctgagggagccaaatgtaccagtgttataactcatttcagaacaaagtgaggactcctacatgctcttctccggagcatccgtggctgatggtgacagtagaggcaggagtaccagctggttcgcccactggctacattaactgaggcatgtcattagcctgcctgaagtcctgtttttcaccatgaaaacaaagcgattaatgcgctaatgcctcccaaatatcttttgaggtatgtgtagagatcaaactagataatacatgtgaattcataactgtacctattagctattatgacttccctggtggctcatatggtaaagcatctgcctatactgtgggagacccgggttccatccctggatgggggaagatcctctggagaaggaaatggcaacctgctccaatactcttgcctggaaaacccccacggactgaggggcctggtaggctacagtccatggggtcgcaaagactcgggcatgactgaatgacttcacacatagggaaaacagcatatattcaattatgaatttctgtagctggagtttcttgcagtgaaacatttctaatgttccataaaatccctcttccacctacaagtttgcctggttttaatacaccaagttacattttaaagatataaccattctctaattacaatggtttcctatattgcaagattaactgttacacttaagcgccgagtttagcatctggctcaacttttatgctttttactcagaccacacactgtggcataatatgctttgactttattccagtgttccacataaattttacacttcttaattgtcctttacagtaattctgtcttttaaaaaaattgtggcatcaagtgaaacacatgtggaaccacaggccaccacccaatcaaaacttcaatttttcctaatgagtcacctagcaattttataaaagataaaattcaggaaaagataacgaagttgctcaacaccaaagctgatattttaattatttataaagcagaagggaagaattagatattgctgaaacaaaaggatttttgcacttgacgtattttaagtgatttttacatgcacagtatgttttttaaagtgttctgatcccacatttagtaataaactccattggacgtctggcagaaattccctgccacaacagtttacatctaccatctgtgtctacaagaagcttccagatattctgccacctgattcactgtcccaactcttctcacttctattcacaggcttcttttcattttcatcatatactgtatctgccctgtgaggaagaaaatattaccaaaacaatatagtgttacatattcctgagcccaaactaagattgaagaatttttaacaaccaatttactctgaaatggattgatgaagctccagctcttgagaatgaggatacatcagcatcagagacatttatagaagggggggggtctttaaaacttggttagtcctctgccttcttttgctggataaggaaacaggctcagaaagtgagaggctggcccaaggccccacagactgaggtaagg

SEQ ID NO: 30154 - DNA, 1558 bp, Bovine  19866881326469
  misc_feature (1)..(1): n is a, c, g, or t
ntcttcactctttatcttaagtggttgggtggacagttgtacactcctattagtaatctttacttccctgtcagtctttatcatatttcaatgcaattatttttaactgacttcttcttatagtacactgtatgatctgtgggggtagaaatcttgactttcttattcactttaagcgcacatccttctaccgatagtcaaagctatggtttctccagtagtcatgcatggatgtgagagttggatcataaagaaggctgagtgctgaagaattactgcttttgaattgtggtgctaaaaaaggctcttcagagtcccttggactgcaaggagatcaaaccagtaaatcctaaaggaaatcagccctgaatattaattggaaggactgatgctgaagctgaaactccaatactttggccacctgatgcgaagagctgactcattggaaaagaccctgatgctgggaaagattgagggcaggaggagaagggtgtgacagaggatgagatagttggatgacaccactgactcaatggacataaatttgagcaaactcctagtgatgctaaaggacagggaaacctggcatgctgcagtccatggggtcacaaacagacacgactaagagactgaacagttcactttaaaattttcagcaactagccatagtttctggaacatactctatacttagatgtctgcttattaaaaggttatttattacctttagctctttaacaaacttagtttatacaatataccacattttatggatttttttggatcatcagtgcctagtacagtggcaaatatgtagaaggcacttgataaatgttactaatagttaacttaagaaataaagatcttatgatatcagttattaatggcatcaagcacactgcactgatactagacccagatttctaacgagaatcactataccatcgtgttcgtgctcagggtatatgtcatttttagtgttttaacgtctttcccatttataattgcatatgcagtggtaccaagcaaatattatttctaaatgaatacaggatgaaagaatacttgttaaatagtatctgtgaatattccactagttattttgaggaaataaataattcacacattcagacttgaaaaaaagttgacatatctccagaaaagcgatgaaaatcattacgattccaagattcagtgatgtgttttaagataagagttgaagagacctcctcagggaattatcctagcaggaaagtgaaagaatttcccctacaaactcttcgctccacagaactaaatgttaaatatcttcatggttagaaaatgaattctcccttccactagctaaatatttctctgtggcttggatgaacatttcctaaatctgttatgacatgctccttcagagggcagctccaaaatgcttctgttgttttccttcgtcctttgaaggaatgtctagtaacttccctccaaactttaagtctttgtttccatccggaaaacagatggtctatttcatccaaaaagagtttctgtcaggcagtgagagaccagg

SEQ ID NO: 30155 - DNA, 810 bp, Bovine  19866881371113
  misc_feature (1)..(1): n is a, c, g, or t
natgtagctcttacacatttatgctaataaagtctgatgatttgaagtaagtaactcaatcatccaatttaatggtctttatctttgaaatttatcatttcaatattaacataaagagaaatattatgaatttataatccttaatactctcttatatgttaaatcattgacttcattttagaaagtgcaatagttttcttaattaaacattcagtaattaaaaagcaaagtaatataaagtataaataattttattcaggcaccaaaagttccaataagagaattaataagatttgatgcttcatatttcattacacataaatagcttttgtaggtaacactatttattgactatacttcattgctgtcttttgctgtttttctccatctttctttcattgactctaattatcctctttttaacctagaaaaaaatttttaattatacactctgcagtcatgctattgaataactgaaaattctaaacagttcacgtacatgagaaacataaccatacttcatataatgtccttattttacactacaaggatgtttagagaaacagcctacaatagaacaagaaatgaaactacagaataccactcgattacttggaaactgtcattattgtaaacagtatacatttaaactatcacaatggaatctcaaattttaaactcaacacagaaggttaaataccagtagaaaaataagtatgggttgagaactaaaattgttttaattccacaacatgatcagagtggtgtatataactgacttcaagaacaacctaaccagagaataaactg

SEQ ID NO: 30156 - DNA, 2119 bp, Bovine  19866881392418
  misc_feature (1)..(1): n is a, c, g, or t
ntctggaagtttctggttcacataatgctgaagtctagcatgcaaagttttaagcatgactttactagcatggggtttcctggtggctcagaggttaaagcatctgcctgcaatgcgggagactcgggttcaatccctgagttgggaagatcccctggagaaggaaatggcaacccactccagtattcttgcctagagaatcccatggagagaggagcctggtaggctatagtccacggggtcacagagttggacacgactgagcaacttcactttcactttactagcactggagatgaatgctactgtctgatggttaagtctttagtactattcttactacccatctagggaattgggatgagggttcattataaaacaggggtgacaaaaaaagaaaaaccatctattatcacaactgttccctttctaggattattattaaaagatattttaacaccaaaaatgactgagggacacaatctcaggtgtgttgcgcacaaagtaagttttggattgaataatgagaaactggaggttctaggatttttgaaagtgctaactttttcctaatgggccagtcctcaacacaaattccggcacagactcaatattaggatcaatcctaagtgtatcaagggactttacaactgaccctcacttattaaaccagaatagaagacctcattgtggaagtcaattattaagaagtatttgcaactatggggcttcccaggtagctcagtggtaaagaattctcctgccagtgcaggagacacaagggcctagggtttgctctctgtgttgggaagatcccctggagtaggaaatggcaacctgcttcagtactcttgcctggagaatctcatggacagaggagcctggcaagctacatccacgggatcgcaaagagtcggacacgactgagcacagtgcacagtaaacttaaagccatgagtaaaaagtctgatcacatgtgagtttaaactggtggtcagattatctataacccagagaaaatgaccgatttctaaatgttgtacttttaatataaggccattgttaaagcactttaaacttctatgttgcattcattttattttatttgaattagatgaatgtcatacttttttatcttgctgcttttatctaagctttctctattaattagtaaatttaaaagaatatcaatctatcagtttaaaaaattacatgtcgtgaacaagggaaagtgaatttaaagcattcccattctgaaattaatgaaactttcctacattcaatttatcttaagctgatatataaaatcttaaagatcactgatgaagaagcaaaacatttaagaatcaaagcggcagggaaaaatggttaagaaggcagttaaataatatgcccttggatgatataatcagcaaaaataaattcaaggaacatagatctcttgtattataattaaataccaacattgtttaacttaaaggagagcaaaaatgttcataacagttcactctgagtaaataatctaaaataaggacatgaattaattaaaaaattattaaagtgcaggaatattaatttaaatttttttaatgtagcaagtattactacttttaagtcctctcatttcatgacaatcatgcatgttataagtttatccagaacatttttgctatattattcaaagatttcatgtgggaacattgtgtcattaatacatacatatctttataaatccaatcaaatttctaatacaaaatagaaaattagaggattgcagtcatttgattgttgaataatcaaagtaaagttattgcaaaaggttcacttcttcagtggaataagtatacagaattcataaatacgctaaaatttatttttatttttatttctatgctgttgttaatttttagatttataagcaaattaaacacatttgcaattgttgttcattcactcaatcatgtatgaccctttgtgaccccatggactatagcaaaccaaccttccctgtccttcactgtctcctggagtttattctaactcatgtccattgagtcagtgataccatccaaccttctcatcctctattgtccccttctcctcctgccctcaatctttt

SEQ ID NO: 30157 - DNA, 1146 bp, Bovine  19866881794280
  misc_feature (1)..(1): n is a, c, g, or t
ntagaatttctgtgtgtgtatatatatatatatatatatatatcatctgaacattccaatagggttctccaaagaaggttgaatatgtcaaaatcaataaaacatacataaattgaccttctgatgaaatgaaacctaaaagaaagtgaatctgtcaaagtttagccacaagtattcaaaagagagatacagtatctaaggaacaaaatattttcatatgacaaggcacattagtaaaaataactttcctgtcccagaagctattttaaactaaagactgctgcaaaattattcagcactgattctctgcttaccaaactcctctgaaaagtaattttattttccaaatgcttccaattgagaggcagggtacgtattgatagcgccatggactacaggatcacggaagtgagtgatcctactggaaaacaggacaagccttgcaacaccgatatggacggcccttgcagccgtgacgaccgcgtgagaagactttctgcatggcagtctgtgaccttggtactcttctgtctgctttattccctcgtatatcttttttattttttactttgtagtcagcttttcaaagtcttccaaagttcaaagtatagtttccttgcaatttttagcatacaaacatctttttctcctcttaattgcttttgcttctgcatctttcacagctggagttccaatgagatagccaggtcatttcacacaccagacctgagtcttgccctacaaagtgcactgtgcatagacttctaaatcccagacccaactctgttgattcccggagtgaatatcattgactgtttctacaattttcttcaccagatctgttttgatatttgcattaagctggctcttacagactcctgttctagtttgcacatgatcattatttttcttcccctggtgactaaaatgttggaagtctgattttgattattgactccagccatctagtctctgttgggtggtagatagtagataacaggggatcttttttccatttgtttcttctgttagtttgtcttgaaacttggggtatcttctaatatgccttggattatcagtatacctaaaatcaagtttccctgtggctcagcggtaaagaatctacctgtaatgcaggagacacat

SEQ ID NO: 30158 - DNA, 1007 bp, Bovine  19866881890674
  misc_feature (1)..(1): n is a, c, g, or t
ncaaggacacaactacattgcatatccctgccatgtagcaaacatttaaaaaaatgtatctgaaagaaacatttctttaaccaatagagctgcaaaattgctttactgaataattctgagacctcctctctgcttttgacaataattagtcttacaacactgattatttattccctgaagtttaaaatataaatagtttaattaaattgctttcctccagttaatggaagtttgatgaataatgtttaattgaattaaacatttgtttaattgtttaaacattaagcaattgtttaatgaataaaagatagcagcactgtatatgttttatggcatttttcgaatacagctttgtctgtttttaaggtctatattttctttcctatatattaagatatatattacacaaaacataacacgaatttaagacaaaaatacaaaaccatttctccagagtgcccagtactattgacttaaggcctttattacagagaaagaactggcccacaacctttcagagctgcaagtgtgtctttaccattttcccactcctctttcttcactcaggtcctagcacctgtctcatcctcccgatcccaaatacccagggccctcacgctctcctttggatgtcaaaagtgagcccacttcaatgtcctctgctcaggcttgccttacacttaagaactccggggaataagttatctccctcttctctcttcctgacccccatcaaaacttccatcaactagagaaaagcaatgtaactaaactaagctacattagattgtgaatgattgattaacagactactcaaccctccctgggatatttttattttaaaagaggacactgtaatctaagtaaatctgtaataggcaaaacttgaaacagttcataaaagtagtgagaaatatacaggcttctctcagagagagatgttttaatacaaaacctcgtgagggtccttaaattatccctgtgtggccaccactcaccttcagctc

SEQ ID NO: 30159 - DNA, 1634 bp, Bovine  19866880470968
  misc_feature (1)..(1): n is a, c, g, or t
ncccaggccctccagacccgcttgcagctcttgtgtggctctggccatacaaagagattctgggagatttcacttaaatcccctgtttgtaaaaatagtttttatccagtgtgttttatttatgtcacatttaagttctctttgcattctcttgccgagttctctctcccaaagtatgctacctctcttcccagggtctttttcgaaaccatgagcccctctcactctagtttttattttaaataattcatgaagccattagagtcataacctagaaaggaatttctctttctttatgaaagcctgcctgagccccttacaagcctaacgagcaaataaaatcctggatctgagttgttttaagagagcttacaggcatatttttggctaatgttcaaggttctctttaaacatttcaccataaagtcttctgactgcccctctttgtgggactgaaatgccgtgttgggaaaatatgtattttcgtttaaagtaaaaatggtcacacagtgcaaactttttgtcccaagaagcttgaattacaagctcccagatcaagcttcttttgaagttttaattccttttctcataaagaacacagcaccaagctatataaatatccataatgtggaaatatggttgtttcaggcatcagtagcttttacattggaacacctgaaaaaaaaaatagtaaggatcatctaagtatatcctatcctttgtactgagactagctcttttataatttttcaaccttttataagctaaaaataaacagtacataaaaataaagatggcacattttaaactattcagagactaattgctcagtgtcagaaatatttgagtaccagcgttgtcctcactcagttggttcttacactgcatcctcacataaagagagaatgaaatggaaaagcccaaatttaagctcgtctttcacctgtgcacaagtctggtaaggggcttgatgggaaggaaattgaaaggtaatttagcaatttaatgttacctgcagatgtcaaataatgcatgctctgttcctcattatcgtagaaaacaggaaagctgcataaattgatctgagagagaaaacaccagcctatttgttatatgccatccacatattttctgcaaccatgagaaaggcatgatccagaatatacgggggtgtggctatgcattctaatcaaatttaattccaagcaaatggagtcatttcaatgtaattaaagaaagactcttgagaggtaaagtagcatttacctggagtctttgctcacattcccctgtaaagaaccacttcctgttctgtcagtttctctatcttcagtgtactcagaggccacttccgtctcaggccagcggacactgaacgtgagctgggcattggcatttgtagttcacttgaaatttgacaaatttgttttcaatacaccctctcatgcgattctcttagccactcattttctataaaatctttctatttgacagttgtgaaaactaaggggggaaaaggatgatagttttgcccctgggtaccccgctggttagagaagtgactatgacacatgcattcaacacaacccataccttttcttctgctttcaaataataaaagaacagcttttgct

SEQ ID NO: 30160 - DNA, 1129 bp, Bovine  19866880548509
  misc_feature (1)..(1): n is a, c, g, or t
naagaaaagcaaaatagttatggggggaaatccagattaaaaaaatgcagatgtttaattgacctgtcagttacgttaggaggaaagaagggcagaaataaccagaagccactggtggaaaattaaaatcgtttcatgagccaatgccaagctaaaagcagtgaaaactgtaacagaatacagacaggggctttctcagctgagatctgaaaatgttaccatgtgcgattttgtaaattagccatttccaaaaaaaaaaaaaaaccttttgcattaaagcacaataaaagttcttcagactctcctctctctctttggtcgttaatttgggcacttaggcagaatttggctttcatcagagacaaactctccccccgtgctccttgccccctttctgagaccccctaatactgctgagtggccagaaattacagatgcaaaggggagctgacaaatgacggccaggcccctccccccgagcttagacagtcaaagctgctgccagaacatgcctgagagcagggagtgcagagacaaagacacaaagattccattttctcagtgaaaatagacttcatgtgtaaaacactagtgagaaaaatggaaagctgacacatatgtgcaattttcgagaggcagggctggatctttcaagaagattgaaattgcatttgattgcatcaaaaacctaacaaatgttgtttaacctaagaagtcttttcagtctgtaaaaagacattcagtggcaagatactttatttttttttctttttaaagcacatggtgcaaaaggaaaaagagtcttgagctcagtaaagagacgttgatttcatcctactgctacatcaagaattaaccctggttcagttcacgggtctacagaataaaggggaaagttaaaaaaaaaaatacaaaaaaaatactctattaaatcaaagggttcagagagataatattaaatccttacgagtatgttttctataaaaagaatcccctcccagcagccgcagggtatcattactggagaggcagcaagtggtttattagagattcaagccatggcatctgggccttgccaagcatgcaagttgcagcctgtgagcccctggctcccacagtccctcggcat

SEQ ID NO: 30161 - DNA, 1782 bp, Bovine  19866880658784
  misc_feature (1)..(1): n is a, c, g, or t
nggctcctctgtccatggaattttccaggcaagaatcctggaatgggttgccatttcctactccaggggatcttccctgatccagagatcaaaccctgcgtctcttacgtctcctgtattggcaggtgggttctttatccctgaggcacctgggaagccccaatatcgtatatgaaatatgtagaaatgataagtgggataggtatacaattcaacttattttttaaaagattttttgatgtgtaccattttttgaaatctttattgaattttttaccatattgtttctgttttatgttttggttttttggccccaagacatgtcagatctttggtccctagccaggaatcaaacccacaccccctgcataggaaggcaaagtcttcaacactgggcagccagggaagtccccattcaacttttatattatgaggtgtaccaaacatcagctgctcgtgacagtatcgaaacacagactggaatcactgccgtagagacttcatagaaatagttttcttctcccctccttgatttgattactgttttcaatattttctacttcttaacctactagaaaaatcactgagactatttcagaggatctctctttattctggaatatcaacacatttgttttatatttcaagcttaatctgttatagttaactatagacctgatttttcctgaatttagggataataatatcttgtcctctctgctgtcacgatagcaaagaccattttatacacagttttggttagcttctagtcggctttgtcaaatttagaaccacttgaacactgtggtttctaaatttagtcagagcctctgagctttaagttccgtttggcactggctgaacagaagctgctgctttgaaaaaaaaattcctgtggtagtagtggggtcgagatgtgtgcacagcacagacctcctcttatttaaaagaaatacattcacttttatttgaaagttgggagctccaaggggataaataataaaatatgaaactttaaaaaatgggtcatattttagaacagctctcaagcagaattgggctcttgggtttagggcatggcattctaaaaaagaatgaaagcaagcaagaagagggcctattttagtcgctttaaaacggacttgctttaacttggctctggagtagagcaaaatcagtccattaattgccaagcatttggtttttctctttttacttctttatttattatttttttggttttactaaagagggtcttggtgaaccttttgtttgtttgtttgttttttagaaaataaactcttctccatggtatgagagataatcagggtgtctcagaatcagatggatttatttttttcttttcacatttttgctaccaactcaaagtatgtgtttgggtgttagtaactcagtcgtgtctgactctttgtgaccccatggaccccaccaggcttctctgtctatggaattctccgggcaagaatactggagtgggttccattcccttctccagaacttaaagtgtaatggtcataaaatacatttacataggaggcaaggcaggccacgtcctaatcatttagacatgttaattcatttaatacaatcatctcttacctgcattgttgtccccagtttaaggatcaggagactgagttgtgggaactttctaaatgtcagatggtcaggggtggaaccagggtcagaaccagagccgtctttctgtagactttcaacccccactgtgccttgtaggcggacaattttcaaaaccacagt

SEQ ID NO: 30162 - DNA, 1559 bp, Bovine  19866880765099
  misc_feature (1)..(1): n is a, c, g, or t
nctagagatagagttagcttggtttcagtggggagtcacagctgaggcctgagtgcaggcacaatgatgaccaggattcagaatgtctgaggcttcaccattagctggacggcaggtcatttgattttcacacgtgctatctttcctaggacgggctcagaatgccctcacctcctcacgtgtcccaccaaacaagtgagtctgctgatggcccagttgacatcaaagtgcctcggacctgggcactgggatggtctcgtgttgccgcatctgcccatctgctcttgacttttcttatctccaaaagaaggagagaggcctccaggatctccagcattccatcgaagcaagatctcgctgtaagtctggggttccagagtctctgcagaagacagttggggatgggggcagtgcccacggctccctctgcggttctgaatggtgccccgtgactccactcccagtcaccgcccggccggcgctccggttcagccgaggtccgggcgtggcaggccaacccgctgccctgaccgaggtatacccagggagacgcgggtgctgtttacacaggcccggagctggggcctgcctcgccctggcccgagcctcttactgctctgcgaactggaattccccaaattttcccccaaattaaaagaactaacaaactgtattgcaaaaacaaacagagtttgtttttcttttaacaaataaaaactaatttatgctctagctttgttgccttgaatcaacccgaccgcacaatttcgctgccaacaaatttctgtattaacttctcaagttcgtcaagcttagcccttgctggaaaaagtatagggtttgcaagccactaattggcctaaaatgctcctctattttatataaacacacagcatagtatcaaaaatagagttgcattcattagcctaaaatccagcttcccacgtggaagcttttttttttttttatacccctcaagatttaggtctgcgtctggagttgaagggaaacttgttttttaaacatgtactctgtaatttcacattaaaaaaaaaagacggctttgatttctatttttgcctattaatgtattttataagcagtgaagctgaaaacgaaaatctttccctcagctctttggggctgatattattaggagagtaagtctgaaactatgcaaaagacaaagtaataacaagacaataacaatgacaataagaaaagagaaatagatgggatcctgtggattctgccacagacgggtgattaaatcccatcaccgtctgcagaccctggtctgcaatcctctgtgactctcccactccacgcctcaccagcctccgcagaaaacgcttccttcttcttcaggaagagcaagacgagcccgtgtgtcccctaggccagcttctcctgagcccagggtgcccggggtgtcttcctccgggcctccttcgtgctttgcctctgccgtttgtccctcttttgttgcaggaggcccgtctgcgcccgtctgtgttctctgttccacagcctcacactccctcctcaattaccagcct

SEQ ID NO: 30163 - DNA, 1737 bp, Bovine  19866880790211
  misc_feature (1)..(1): n is a, c, g, or t
nttactgctgagcaactggggaaacccatgggacttatttaacaatctgcatgtgtatagaaaaagacacagcccttttcctggagcaactgaggtgcggtcctcctcagtcgtctgtgcaaggcctccctctatcctttgtaatatgctcagtaagactgagccagtggtctaccaggtgttcattgtgaatgtactctttcccagcacttgcaaccattgggaaaataaaagggagaataatgcctttccttatctcacaggaaaaagataccaaggtataaaatcactgaaatgcatccttaggcttctttcttttaattcatctgtcttggcctcactgagcggcgtacaggaatcttccagttccccaaccagggatcgaacctgctctcgctgccattgaagcgtgggttcttaatcacgggaccaccagggaagacttaggcttcttttaatacattgaatgatacataaactacatacctaacctaaaaatgagaagcagagaagacagttgtgacaccaaggagtccaagtgcagtaacactaatatcaatgttctcaaaccccagggaacattgctctcccagctgtcttaggacgagttccttttgatttttgatgttttctggtgcctgtaaatggtaacatcattccgttctttggggagcttcttatcaatgacccatcgttcgtctacatcttttcacattcaccaattctctctcagaaatacagggaaatcaactcctacaggagggagggaagttcagatagcacagattcatctgattctgagtttcatccctaaattaaaggtttgccaaaatgttcagggttttacaaataataagacatcacttttcttatttgcttatattcacaaaaacaaaagtgagctcaaacgtgtcatcccctccccaagaattccaatgacgagggcttttctttctccctcttccctttttccccaaagtcacatcccctgcagccctgactcattccagattgctgcgaaccttgttctcttcagagcctggctatggaattcatccagacctctacctctcaccttggacgtccatgcactcctggtcctcccgtgctctgcagttttagggagaagaaaagtgttaagacccctctgtagtcacgagcagaagttaagctatgataaatcattttgtaaggagacacgtcttcccgctgtaatacttctaaaattcagaactgcaaaatatatttgaaccgcccttttctgccattttccagaatattagggcatctaattaaattatgcatgctgccttgaccaaataaggcctttgcttcattttaatggggagtgacatttattttcctaccctaaaagaattccatggagctttcgttggaagaaaggttaattttatctttaatatggtaactgtatagacatcaccatatcattttttttttcagattagccatcttaaagaggtagattttccttacctgcatcttaaaattaacaatagatttgataagtcacttcaacttttcatcctggttttacagcatatgttcttgtcgtatccccaatctgggaactgaaaatgtcatttgaatgcacaattgagaatcaacataattattttaaatgggttctttctatgtttcagagactattgaaatttgtacaatggggtcaaattgcaatttacaaacttttgtgcatttgaaaggatttcttgg

SEQ ID NO: 30164 - DNA, 1143 bp, Bovine  19866880790466
  misc_feature (1)..(1): n is a, c, g, or t
naatgacatcagcccctgagtatttattggaaggactgatgctgaagctgaagctccaatactttggcccctgatgtgaagaactgactcactggcaaagaccctgatgctggaaagattgaaggcaggaggagagggggatcacagaggatgagatggttggacggcatcaccaacttgatggacgtgagtctgagcaagctccaggagttgatgatggacagggaggcctggcgtgctgcagtccttggggcggcaaagagtcggacatgactgagtgactgactgaacaaaagcaacaaatatacaaaattatatataatgatatttgtagtataattggtattaatacatatattaatattatacacatctcttgtggtaaagtacacatttcctctcaaaagagccctgtcaatcttcaaacctcttttcatgtctgttgtattagactccacagtagatgcagggagtgagttatgggaaacacaccagtagaaaaacaaatgtaaaattcctttcctccaagctcccgtccggtttagccactactaaaccaaagtcaagaagagtgaaaaattaaatacactctctaaccctgccccatccagctagtgggagactgaacttgtatatctttgtcaagatttgagagatgtacgaaaatctagatcatctctgctttcctttgttgggttgtaatgatttacatcaggacctatttattaagagctctgaggtgggtcattgtaagttcaagtgcaaaagaggatctctatttgcatttgaattgccatgatcctccataaccaaccaaggaatgtctcctcttgaagggcaggtgggtaggaagagagattagtaaatgtcttgattccagatgactccagacctcccccaacacattatttttcaaactggggaatgaatggaggagttgggtgatgattactgtccttgcatttggaagacaaggaaacagtcctgaggatcatcctccccactttatttccctgaaggggaagatcaattagtatggttatcttctgctggtgcgtgataatttttacagaaagtatgagtgattctcggcatttactgcatattattccacaagaggccccggtactgtgcatcataaac

SEQ ID NO: 30165 - DNA, 1646 bp, Bovine  19866880803992
  misc_feature (1)..(1): n is a, c, g, or t
ntatcataaacactcttcctgagcaaagagctttgctatgaacagcataaacgttcccacatgtttggaagcctgaagaaaacaatgcaggtcctgccacgtgtttaaaacgatgcatttaatgtgatatgaagtgcattaaagtaatttcaagacggctttacattcataaccaggcaggaaaacattaaagtgtggtacattttaatcacaagaaatactgaacagaatgggtcctttaaatttagggagcctgtttcttcataggtgtgtacaactcctatttgtgatattggaaattaataatccatgtgggagtgagagcttcaggatggcagcagttttacatatattgggaaagaggttactcctgttttgaattaactcccagctttcttggagacgatgtatcaggtctgtgccatttaccttctctgctgctgctgctaagttgcttcagccgtgtccgactctgtgcgaccccatagacagcagcccaccaggctccgctgtccctgggattctccaggcaagaacactggagtgggttgccatttccttctccaacacatgaaagtgaaaagcgaaagtgaagttgctcagtagtgtctgactcttctcaaccccatggactgcagcctaccaggcacccccgtccgtgggattttccaggcaagagtactggactggggtgccatcgccttctcccttaatacgctaagtgctgtgaaatgggaaaaacacagatataccatgtttctgtgagttggttggctggctggttggtgggtttgttttcaaagccactctgacagctgtctgaagaatgggtttgaaggaagagataatagaagctatgaacaggccaagtgtaaaaggaaagaaaaaaaaaggagagaacaggttttagagataaatttggggcagactccctggcactcatagtaaattgaaaggggagatggtttgtaggagatagggtctcgcaaggctactcaaagtttggtccatggtcacctggagactcagcaccctccccaaacttcctcaatcagaatctctgggattgagaaaaggcagggggaagggaggagccagaatttggtgttagaaaaagtcgactggatgatctgtattcatcccaaagttacagaagccctgggatagcagataaggcaaaatccccaggctggtgaacagagtggatggtgatttaaaatgagaaaggtaagtttggagtctagtcttgaaaatattctattctaatccttaaaagagattgaagtggagtaaaagtcactcagtcgtgtccatctctttgtgaccccatggactgagtccatggaattctccaggccagaatactggagtgagtagacttcccttctccagggaatcttctcaacccagggattgaacccaggtctcctgcagtgcaggtggattctttaccaactgagccacaagggaagcccaagaatactgaagtgggtagcctatcccttctccagtgcatcttactgacccagtaatcaaaccggggtctcctgcatttcaggcagattctttaccaactgagctatgagggaagccctaaaaagaaattattataaaataaatacataatactttcttgaatacatatt

SEQ ID NO: 30166 - DNA, 1445 bp, Bovine  19866880811715
  misc_feature (1)..(1): n is a, c, g, or t
ntcatgtcaatgtatggcaaaaacccactcccaatattgtaaaataattagcctccaattaaataaatttaaaaaaagagagtcaaatagaagcagtgaatcagaggattagattttcccgtatttcaaagaacttctttcttttttcttcatgtggacagctgccatctaaagctccatgaaaagctcgcccttcttctgggagaatgtgtgatgggacgttattccaggaagaaggaactcgagtttctcgtgcttcttcttaggccttgcataaggaaactaaacacaggatgttttcttggccgttggcaggctagcaacttctggagtaagaccagtgagtagatttgattttaaaacttaccacaacttttctttgacatttataggcagagagacagatgttaacttgtaataaacttgaaagcataattccattctcagagccatgaaccaagtctgaactttccatggctctatccattcagccatcactttttagtgtttaatataattcagtctagtaatttcctagaaattcttcctattcagatgagttgaaatactgcagtactctctttctttttaaccagccctgtggtgctaagttgcctccgtcgtgtccagccctttgtgatgacatgcactgtggcctgctaggctcctctgtccattctccaggcaagaatactgagtgggtcgcgatctccccaacctgaagatcgaactcgtgtcccttacatctcctgcattggcaggggggttcttcaccgctagggccactcggaaaacccttttattgaagcgtaattcaaatatcatacaattcacccgttaaaaatatatgatccagtcttgtttagtatactcagagttgtgcaccggtcaatacaatctaattttagaatatttttcattcccaaaagaaatcctatactcactagcagtcattcacactctatccccaaactctgggtaaccacgcactagtttctggagatgtgcctgctttggacatctatgtattgaagtcatacaatttgtggtctttagtagcagactggtacttaacataatgtttccaaggttcatttaagtatgaatttgtattcctttcctttttatggctgaataatattccattgtgtatgtaaatagatataaatatataatattttatgcatttattaattcatgaagatttgctaattttctacttcttggcagtcatgaatagtgggtactatatattctcatatacaagattttgtatgaatgtaggttttcatttctcttgggtatatccctaggagtaaaattgctctagaaactctatgtttaatattctgaggaactgtccaactgttttccaagggcagctgtacagtactgtatccccatcagcaatgtgtaagcattctcatttctccgcctctccaaca

SEQ ID NO: 30167 - DNA, 1404 bp, Bovine  19866880883454
  misc_feature (1)..(1): n is a, c, g, or t
natatgattaagctgttctaccttccttgaataaattgagtatccatgtaattgcgtgtgtgaaattgtagcacagtgaaatgtcaggttgaagtattttaatcctgtttgaggggttgtaaatatttatagaagcttctgcttaatgtccttttagtctttagtcttcctgggtccaccttttacagactttttttttttctcttatattcttatttatcttcaaaaatatctctcaggtcatgatgacaggcttgacattttactgaatgaaagcaagtgttttacaggcaattaactttaagagattaccttattgaacctggaaaataaaatagaaaaggctcaaggaaccccgagttcactctacaacttcagcctcttaacctaggtaagtgcatggcttttacagacaccaaattacccagtaaggtcttcaattatgaaaattgttaggccttccagacatcacattacatttgagctgtatctatatattcgattccaactctactctcaactcttgggtggcctaaaattgagataattaattaaaccctttgaaaagcatctgccttccacattttgtcttggatgaaagaaattatttcatgctttacttacggaaagttaatacccaaaggctgcatattaccactgtctcaaattagaacctaccaaatcttaaaattggctattcacatgcaatctcctttaataacttatgaaaatttaaactaaattttggattaataatttatgtagaaagttccaccagtgagactccacatttctaagttttagagtgagcagtgaaaatatcagtaaggaaagtgggttgttggatgcgctctttcgaaaattgttataaaagacttgaaaaacaaggggaaaaaatccttcttaggaacttgtcttagagtgatatataatgagggtttcttaggtcacactaaagaaactcctgcctgctggcacaggagacttagatggatttcatccctgggtggggaagatcccctggagaaggaaaggacaacccactccagtattcttgcctgggaaattccatggacagaggagcctggcgggctacagtacatggtgttgcaaagagtcagacacgacggaagtgacttagcacatacacagattttataaatgcagatgctttaacctctgtgccaccagggaagctatatatatatatatatatatatatatatatatataggagaaggaaatggcacccactccagtactcttgcctggaaatttccatggactaaggagccctggagcctggtgggctacagtccatggggtcgcaaagagtcggacatgactgagtgacttcactttcactttcatgtatatatatataataagaacagtacatttttt

SEQ ID NO: 30168 - DNA, 1377 bp, Bovine  19866880885186
  misc_feature (1)..(1): n is a, c, g, or t
nggaagtaaaatttctgggaaggtatatatttcatagtctttttccattttttccttctttaagattttttttcaataactatctgtttaaactgaaattgtttagattccatcacacatgcttccttgcagttttgatatttccttctcagaaatccgaagtttttcagctaaagttcaggtcctggcttaaactgcatacttctggttttcccacattttatttcagatgttgagccaagctcaaattagattcatattttctgttctttaaaaaacaccccacaaactctgtatggttatagattatgtctgtttggaaaagttgggggagactaaaaaagatgtcttattaatgtgaagttcataatttagcctccaaagttctcttactgccatataataaagtaaaaataaaatgaatcaaggctaagatgtggataaaggggatttatttcaataaggaagaactcaaaagaaaacatggcttctagcaaaattaccattgtgcatcatagacccattattgctgaatattcaatgtgtttgaccaaccttcagtagcacataatgcaaagaaaggcttggacaatccttttatgaaatattaaggaaatgaaagcatagttccatttaataattatattcttcaagaaaataacttggaagcattcaaagtgctttatccaacaagcaatgctgttctttgatctcattttttcttttttttttttttttttgctttcccaagcactttttaaaattgaagtactgttgtttttcaacgttgtgttaatttcaggtttaaagcaaagtgattcatgtacacacacacagacatacacacacgtattctctttccaattcttttcccttataggctgtcacaaaacactgagcagcattccctgtgctggacagtagctccttgttggctatccactttctatacagtaatgtgtttattgttcttacatcttgaactcacgtgaattgcacgatgcttttcatacaactgtctcaccgtgtttgttcctagagtgtgatcatcccttgtctcattttaaacatgaggttgcccgaggccaaatgattaagcttacacactaccacatattaatccctaatattctgtaatgtgggtaaaggtggtgagtggtataggtgggatttgaagtcatgacctggggggtcgtgagtgtctcgctgcacagacttctttctgctggttggtctttaaaccatgtaatctattgacagttgtctgtatttttggaaagaagctaaaacaaaagctaaaaaaaagctataaaaagaaggtaaaactgagtaactaacacaactcatactcatccggagtgtcaaaattgcaaaaat

SEQ ID NO: 30169 - DNA, 890 bp, Bovine  19866881146370
  misc_feature (1)..(1): n is a, c, g, or t
natgggattctccaggcaagaatactggagtgggttgccatttcctattccaggggatcttccccaatccagagatcgaaccctgcgtctcttacagctccctgcattggcaggagggttctagtgcgtggaccttggcaccctgtcaatgctcacgaagtgccagccatattgttgttctcacctttatacagcttgtgcacttccaaaagcagacttcatttcatgttcaaagttttcagtgttgactagctgtcacccagacagaagaagaaaaatctggggcatccaattacaacgggctaaagtgccataacacacctgcagatacttcccaactgaacagcacctaagcatgacttcattttcctctccttgttactatactaacagtttataaataaacacactgtaacctctgagggaggcccggcatgtccggtcttgggagtagccagctgggccgtgggctgctggccctgtgtcaagagccagctcccctgtgctggtcattagctgccaggaaatgccttccttattagtcattatggcctgatgatgttctagtgatagtgttaatactgtgtgaaacgctgtagtttctaagttggattaggagatttgtactgtactttattattctagtttgaatcattaaagtgatcaccttgtcaaaggaaaaatacatcataaaattcatagtttccagtgttagcctggatttagtcctataatcaagagtgggaaaagtgagtggtattagaatattagagattcattctatctttggatgtgtttgttataaagggccttctgtgtgctcggcatcgctctcataagacatacctgaaccgacacagagagctgacagtcccgttagagaaacaaaa

SEQ ID NO: 30170 - DNA, 1556 bp, Bovine  19866881235608
  misc_feature (1)..(1): n is a, c, g, or t
ncgcactctgaacttggctgtcaggtgacatacctggtctctaaaaggcataaggtttctcgcgatactcttgcagataaaagtgaacgttgagtggatgataataaacttactgtgggacagtgagtacccactcccaaagtttatcatactctgaatcactttcgccctagttaggtttcttatgacatgctttgggttctgtcgcttaatatttttatcactgacatggataaaaataaaggcacacttaggaaagcacgggcaaatgaaagatatccagctgtaaaaatagatttgcattacggtacaaagctggtaagacgggattcagggacgcattccacattagaatcgcactgcagctcaaaggcatgcagttcacaccgctggttctacggatgagggcactggtgctcagagaggcaaggcgattcgcccggaaggctgctccagatggagccaggctggagctctgggttctttctccgcactacgctttcatcttctgtactctgcagatgcctgccagagtagtctcggaaactgatgtttaattcgcagaattctggatagatttaacaacctgagcgtatgaatgtagagtcctttattttgacccaagcagacacaaatccctggcatctgtgcacaatggacaaggcaggggtgaaaaagacatgggcttttctttttgatgcagaaagtctctaaaatgtgatttgacttcataacgagctaactccactcagattcaccagcaggcatgaagcatcggggtcgagagcggcttttgcgcattctatcctgtcgtgagatgccagcctactctgtactgggctgcccctccaacagcctcacaaaacaagacctccatcacaggaccatctgcagggagaggatctgaaaatcatgaccgaaaccaaatgtttgttaaaactggccatgagatacttggcctggggaaacatgcactctagttatgtgtgtgcttgtttatcgtttgatacaagacattatgaaacagcagtgaggtgaataagggacttctttttaattatgttcagttctgtctgaagtgatctaaattttctgtagtaaagagactctggcaaagctaaattctctttctgattaaaaacactgttaatcttctttgcttttattaatctaaagtgactcaatacttctttttaaggaaaccacagagagttacattttttcgtatggtacctgaatatgttacccactgagccagaagatataaaccccagaagtccttttactcttctggccgttgggctgtacaagcaatcagctgtaggactttcattggcctgtttctcacttaacctcgcctaaatgtctgtagatttatgagttgcccccttgttttaaatctgtgaaaggattttatttcaaagcataatttattttattaataagtaatatcttatttccacatggtgttagtaggcatagttcaaagacattaaaaataaaattcacatttttctctttcttctcttgaaatatcctgttttttcacaatgaga

SEQ ID NO: 30171 - DNA, 906 bp, Bovine  19866881433127
  misc_feature (1)..(1): n is a, c, g, or t
natgtacaattgtatatgcagaattaaggccagatggggctataaaactagcccctaaatctcaacatttaattccgtgtgtttcagcaggatagcatggaatatcaatcaggaaataggtaggcgctggaatcattcttgtgcagttcctcaccactcttttctccctatgctgtcaaccaaagggacatgcctagaaatgggacctccaggattgaggagagggaaagaaaaatgaaaatgacttgatttcccagagggagagtagacattgtgcagaggctgtttttactcactcagatgctgaatatgaagactagccgtggttccccccagacagtgcccaactccatctcactgaatccaatacatattcatcagaccttagaattacttattcactgaggaggaaaggacttgcggcccttcatatgggcagacccggacatgagcgaacaagcagttggcttatgcaggctgcttttaggccgtgtgagtcacatgaatttttttgttgttttgtttggtaaatcagtcaaacaataggtctgccctctttcactcactcaaattgtcatacgggaagagacacttttctataattttatcaactcatacgctgtgtaagagacatacattgacccagtaactgtttcaaaaagaaaacatgtaaatctcggagacttttaacccacaacttttgaacaagaacagaccagaatgagggttccatcaatctcttcaccctcaaattggaaaaaaatatgcagtaaaataatttaagggaaatatataataaagaaatgaagggagaaaaggtattcatttattcataccttactttacttcagaaaagaatggaggagaatttataaaatatgatataaaggaataagaaaaaacaaa

SEQ ID NO: 30172 - DNA, 957 bp, Bovine  19866881482185
  misc_feature (1)..(1): n is a, c, g, or t
nggatcgctttcctggttgcagacagcccaacgtgccccttgtaacttcagggtgtggggaagacagtaagagggctccctgaggtcttgttcataagtgcacagatcccagtttttgaggggttttaaagctctttttgtgcaaaagagagcaacactatgacaaaacgattattttgcattggatagaacaggaaaaactgcagaatctacccaattttcagctttctgggattaccgcatgcctcgtgtttttcaaactgaaaaatgtagcatttttgcttcacaggcaaagctggaaatcagctatctgctctaacgcctaaaacagtggatttaatccaagttctcctagggatcctgttttattcactgccctgagcttatgttgggcttccctggtacctcagctggtaaagaacccgtctgcaatgcaggagaccctggtttgattcctgggtcaggaagagtgcctggagaaggaatggggtacccactccagtgttcttggacttccctggtggctcagatggtaaagaatccacccgcaatatggacgacccgagttctatcccagggttaggaagactccctggaggaaggaatggtaacccactccagttttattacttggagaatccccatggacacaggagcctggcaggctacagtccatgcggttgcaaagagttgaacacgacttagcaactaagcaagcttatgctggctctgaatgcaaggtgacaaattcacatatgttaatttcaatcattaaaagtataataacaataatcttcaaagcaaatgcatgagaaaactttcatttcttaagtcagcactcaaaacaagcaagggaaaaaaaaatagagggacatttaaactacatgtaccatgccaggcactgttaataggtatgaattatgtctactgggtttcataatggtatggataaacatg

SEQ ID NO: 30173 - DNA, 1137 bp, Bovine  19866881535708
  misc_feature (1)..(1): n is a, c, g, or t
nactctgccatctgtgagagtgtaagagttcttggaaaatgactcattcagttaagcaaagacatgaaaccaaatttgaatagtaaaactatgtgagttacagagaatccagaatgctgggtgtcagcacaaagtcctgctaacacagtgtttagggtagttgtggggtcatgggaaaattaacagatgctacacaagtggatgagaaaagggctcatagtgggcaccactctttgaaattgacttgatttagttggcgggactaaatgtggaaggcctgctgctgttgttattcagtagctcagttgtatctgactctctgtgaccccatggactgcaacacaccatgcttccctgtccttcactgtctccaggagtgtgctcaattcatgcccattggttcagtgatgctatctaaccattatatcctctgccacccctttctccttttgccttcagtctttcccagcatcagaatgttttccagtgagccagctctttgcatcaggtggctaaagtattggagccttatcagcttcagactttactttcaccaccagacacatctacaactgagcatcgtttccacttcggtccagcagcttcatcctttctggagctgttagtagccgccctctgctcttccccactagcatactggacaccttctgagctgggagtctcaccttctggtgtcacatctttttgcctcttcatactgttcacggggcatcacagcaggaatgccgggagtggtctgccactccctcctccagtgggccatgtttggtcaggtctctccactatgacccgtctgtcttgagtggccctgaagggcaaggctcataggttcactgagtcatgcaagcctctttgcggcatcaaggctgtgatccatgaaggagtgaagacctgtcaggatcacttagttcaacagcattttgtcaattaagccattaaagaaagaatccaacttgagaatgcacttctgattgccaggcggaaggatgggggggaagggatagttaggcggtttgggatggacatgtacacactgttcagtttaaaatggataaccaacaaggacctactggatagcacaggaatctctgctcagtgttataaggcagcttggat

SEQ ID NO: 30174 - DNA, 915 bp, Bovine  19866881676381
  misc_feature (1)..(1): n is a, c, g, or t
naaatggctgtttgttgtgttttatttatttattttttactcccttcccattctctcttagagacactgaagcacactccagctggcaagcagaaacataataacaaaaagacgaagagacagggatgagatgaagggaaaaagccaccaccagagtctgtataattcacaaactgattatagactttgggcatttgagagttgaccccacttatataactcagagccaccagaaggctgaagggggtcccttaacgtaaagcaagttctacacattttagcaatttttacggtgagccaggagtgataattcaattgaataatattcctccagagtcttaggcatggtatagaactgcttaattgtaaaacagaaaaatcattttatgaggttcactgtaatgtttgcataagagccagtgtattcagtagcaataagcaggtattgtactttctattgtagaggaaactgtccggtttaagccccttttactcacttcttcagcatgcaaagacttcggactgaatgtgtttgcgttttgcggctttgtagcagttattaaagaaggtttctgtccattcctttcaggtattttgttttggaaggttttgagattttataaaaaattatattggagtattgctgactaacaatgttttgtaagtttctggtattttaaaatgtttttatttactgtttgagcagttccaagaaccatccacctgtggttccaccatcttttgtcacagtttcacacgattttcagggtgattgtaaaatttcgtaacttttcaggaagtctctgctgttatggtcgtagtgggtgggtgtcctgttctgatgctgatgaaaggacctgcctattagaatacgatagcaagtctcacaaagacacagggaatggggaggagggg

SEQ ID NO: 30175 - DNA, 2948 bp, Bovine  19866880210462
  misc_feature (1)..(1): n is a, c, g, or t
naaatagatggggaaacaatggaaacagtggctgactttattttggggggctccaaaatcactgcagatggtgactgcagccatgaaattaaaagatgcttgctccttggaagaaaagccatgaccaaccttagatagcatattaaaaagcagagacattactttgccaacaaagatccatatagtcaaagctatggtttttccagtagtcatgtatggatgtgagagttggactataaagaaagctgagtgccgaagaattgatgcttttgaactgtggtgttggagaagactcttgagaatcccttggactgcaaggagatccaaccagtccattctaaaggagatcagtcctgaatattcattggaaggattgatgttgcagctgaaactccaatactttggccacctgatgcgaagagctgactcattggaaaagaccctgatgctgggaaagattgaaggcgggagaagaaggggatgacagagaatgagatggttggatggcatcaccgacttgatggacatgagtttgagcaagctctgggagttggtgatggacagggaaccctggtgtgctgcagtccatggggtcgcaaagagtcagacacaactgagtgagtgaactgaactgaactgaaagctcctgaagaatctgagagatgtttgtagtccagtgtcctcattttagaccctgaagaattcttgtaactggttatcagaactagtgctccgtagtactccagttctttggaatctaacttttgattttaggagttaaagaagagtgaaaaatgacatcacaaactgcattgtgttcaacagtgtttctagatcagagaaagtgatttagataattcatctttcttgaaactccattttggtgtcttcctcctttacaacctcccccaagcagttctttgtctcagaataccacttatcaaaaaacataactcagaaagaatggaagaattgcctcaataaacataaaaatcttatcttctgtttaaagctattattctttgtatcaaaatgaatggttgttaccatactgttgacttcagactcttttacttccttgatattttcttcagcagtagataagaacatttcaagctctaaatactgaattctaatttgaaatactctattaaggaggatttaaggtctctttatgttgtaaatgctcttacttttggaagatgcaccaaatctggaatcatggcaaatacattcaaaggtactgccatctcacattagatttttttggttgaaaaatatttaaaagtcttaataattttgagtttgctaagaataatttcattcttatgagttatactgttaaaatttctcacaaatttttgtaccctttggaaagctcactatgactgtagtatccagtgcatgaaatagtcctggagctataatgtgctaatttcagagttttggggtctttttctgttctcatgaacaagagtttaacatgatgtttctctactctggttacatattagaatcacattaaaacatacaaaaaatcggttggtcaggttttattcccagagattctgactgaactgatgtaagatgattctaggtactgggtagtttttcaaagctccccagacccaggatattctaatgtgtagtcaggattgagaaccactgttttgttgttaataaatgaattttctaataaataaaaatgtaatttaaataatgtaatttaaaaacaaatgtaagaactatacaataaagcctctaataaaaaacatgaactgtatatgtagttcaattacttttaaaaagtctaaaattccggtgtttacatatatatgtcataattcccttgctatgaaaaaggaaatgaataatttgctgaatgaatagggattgcccagaagtctgccatctgtactcaaggagcagacctctggtactaaagtgggtttctgggtacagagtgtgaggtgagaccttatggtgttgacgtcttgggaagactctgtcgctgtcacatgatagagaaggttctgtgctgctgagtgtggtgatagagaatcttttcaatacttcttcaagagggaactaatcaagacctgtcttgagtggctaatggctgttgactgaagacaggagactgagttaagtaatctaataagggcccctataattctgagttccatttcatgggagggacagcatcaaggagttagttgataggcagtctcataagaattattgtcagaagcaactccaaatataacccaacatcagttccttacgctacatgattatgaggtagcatgctacctacatgattatgaagtagcactacatgctacatgataatgagaaaaatattagctatttgatattggagatcaagtcagaaagaagagtgtaaagactaggaggatagtttggggtcaacatacgagattgattttcaaatatattattctaaaagttgaggcaagatatggttagaacttgatggtcagcttaatataagagtaagttacaaagaaccaatatgttaggaaagaagaattggcaatattgagtgatgcttggaatgggagggctgaaagacaagaaatagctttttagtgactgttttatcaagaggtgtattttactgagagatgaactagcacaaatctgcgttattaacttttgaaaaaatatttatttatttgacggcgtcaggtctgagttgcgtcttgtgcagtctttccttgcagtgcacgggctctctagttgtggcttgcagccttggtagttacagcctgctccagcttagttgctccatggcttagttctccaggttcttagttctcagttctccaaacagtgatcgaactcaattccactgcattgcaaagtagattcttaaccactggaccatcccatgaatctgctttagagtacagctttagattcat

SEQ ID NO: 30176 - DNA, 1097 bp, Bovine  19866880385365
  misc_feature (1)..(1): n is a, c, g, or t
naaaattctaactgattttttgctgaaaaagagaaaaaatataacgtattttgtgatttatcataaataagccacacaaagtaagattctaatagttttgtaagtttacaattactattttctcatacagaagtcctcaatgacattgtgttcagtccataaaagcagagtctcttcaggagatgatctcacgttgtccttaataaagaagacagatcttctgatacaagtaactccatgttccctccatttttatttgtccttccttgtcattcatcactctaatctcaaagaaaggtcttgcttcctagtccaattttttttatctctactttaaacagtctttcccatcttccttctctaggaccaccagaaccattcattcctttagcattcacatatgtcttctttgggtccttaccttctacttttaaatttactcaggtcttttttcatgctattgtttttagtaacacagatctccttccttctcattatgtgctctagtttccgtatgttcaccctccttaacttcatgtattatggcttttgccctcacacttccacagaaagtgctcttcattgtttctacctcttcataaaactcacatgttttcattcccatagcatgaaacttaccttcctaccttattgactatttctctcccttctattaatcagtcaactatagacattcacaaaagttcttttgattgtaatctattatgctttacaaacttaccagcactgacaaacttatttactcctaaatctctctcaccaattttaacattttatgtaagaccaagtctcatatcactatttttcaggacatttgtacctgactgttccatcagtaacttaaattcaaaatacttgaaagtgaatttttccttctatcttcctaaggcggctgtcattcccctctgtcctatctccttagttagaaatcatatcaatttgttctctttgtatcaccagctcaaaaactaaatctgtaaccaggatctgctctttattacaccaagaacgctctggtgagtcattttttccacatgagcagccagtaccaccattctggtatcgatgttaagtga

SEQ ID NO: 30177 - DNA, 991 bp, Bovine  19866880616677
  misc_feature (1)..(1): n is a, c, g, or t
nacacgactgagcgactccactttcacttttcactttcatgcattggagaaggaaatggcaacccactccagtgttcttgcctggggagtcccagggaccggggagcctggtgggctgccatctctggggtcgcacagagtcggacacgactgaagcaacttagcagcagcagcagcagcagtctacatcacagtcactttgtgcattggatgaacctgaaaagcaaccttgggtgaaagggcttttattaatgttgcccattatttctgtaaactgtttaaaataaattttatcaagtaatttgagaaaagaagaaacgtttccctcccctgtaaaggatcatgttgtatttcttaaattttatgagctgctacatcttcatcagggcaaagttaataatcctacaacagaaagtcctaagaaacatggacgtatttgatctgtggtcctccatttcttgtattcattattcttttgttatcttttagaagcgtgtttcttctgggttgatttctcagtacagtgttgtgcattgaaaagttgctctgaatcaggagattttcctgaaagcagagaggttgatagctacctcgcttgaagacatagatgggaaaaagaatagttgggattattggagttaccataaaatctatgaaatattattgttcaaagcgaaggcaaatgcagttgtaaactgaaagtttcatccagataccaaagatgtttgtagaaaaagctgaaaagtatccttgtcactaagtaatagatactcatcttcagaagcaaacagacccgcaatcatttggtctattttcctgcagttgccacaaatgactttctccctttgaacccaagctctgtagctccacaattggcttctgcccagaactctacttaagagaccataggctgaactgagtccttgaagtattaatagcttgcttttcatatggatcattttaaaagtctttattgaacttgttataatat

SEQ ID NO: 30178 - DNA, 3515 bp, Bovine  19866880659243
  misc_feature (1)..(1): n is a, c, g, or t
ncccccacccttcacccgctgaggaggagcctgagagaagctatgaactacccagaacagcttgccgcaggcaggaaagtcaggaacaggacgcaagggttggaattagccaggggagttgttacctcggaactgcgcagtcccaagaattctgagcagaccgtgaagccagtttggaaaaggtgctcccatgaacagagagtgggtaaggctccaaagcagaaacccgttccacagcactgagatgatgtagaaatgcgaaaaatacctgccaagggaaaacaggttagataatgatcaaagcagatccacttgaagctattatgctagaagactattcttttccctcatgctgcaagcatagttttgcttttttaatagaacctgaatcctacagatgttcagatttttgaaatttcctttcagatgataggactggttaactcataggaaaaaggtttcctgaggttaataagaacatgaatggccttgttaaatttagattaaagttaacgatctgtcttatcttcgggtaacaaaattgggctcaaattcaaaaatagagggccccagggcctgacagggagagcctagactgtgctaccacaagccaaacctgtggaagatttctaaatctcaagtaatattgctgcaatagccatacaagttacacaagatttgcacaatcacatgctcatagggctgcaagaaaccttaaataggtcttctgatttagtgtctttctaaattgtgtcgacctaaattacttctatgataacatgacaaataagaactcataaaactagctatcaactcctgatgggtacagtctagtacaagtatagtgtgtgtgttaccatcaacagagtaacaaatgaaataaaaccacaaaagcaacataaattgcaattaacagagttaattttacttgaaagacaatgttggtttgctgcaatacctggtatggtacgagggcccaccacgggtttttttgaggtctctttacctattctctatttgaatcaacttaaaatctttctgactctgcaagttgcctggacatcacctggccttccctggtcttcaaagcatcacagctatattaagccttccttcttgtctcattaatctgtgatgcagtaagacaacctggagtcaagaagactacacacagactcaagagactcctcttctaggtgatccagaatatgcttctatgtcccagaactcacagtccgctagaccatgcccacaacccagtctaactaacgctgatctaagctgatcattccatagcaacccacttaattctcccaccactgttacaaattctgtcactagatctgtcctgagatgtcctgttaatcctgattcagctcttcttcatgcaaaagagcttagttcaagcatgagtgtcgattctgccccctctgccccatccctagaccctggcctctggttgcctaccagagtcttccttaagacacacttcctagaactgagcccaggtctggtctgagccaatacctcagaatggcagcagcgccttgctctgcaggctcccatggaaagaggaggggacagcttctgaggggcaactttagagccactttaccaatttcattttttcaaaaaaagagtactgagcacttcgaacctgctaggtgatgttcttggagctggggatgcagcagggagcagaccaggtgcctggcttgctgaaatttacctttcagcagagagtcagcaaatgaatctgcagacatcctgcctgatgctgggtaatgggacagaggtggtgcagaggagaggtcattctggatgggtggatggacaacgacggcccttctagaagtgatgcttggctagaatgagtaacccttgtgaatttctaggggaaagttttctaggcagacgaaacagcaaccacaaaggccctgaggtacaataaatgacacctatatagatagtgggcttccctggtggatcagtggtaaagaatctgcctgccaatgcaggagatgtgcgttcaatccgtaggttgggaagatcccctggagaaggaaatagcaacccactccagtattcttgcctggaaaatcccagggacaaaggagcttggtgggttacagtccaaggggtcccaagagtcagacatgacctagcgactaaacaacatatggacagtgctagagcatgaaaaaggagggaaagatgctatggggtcctgtaagggcactggcttttaagtgtgatgggccagcgttcgaacacagtgacttgaaggaataatctatgttttaaaaatctaacagaaaagttctggagatggacagtgctgatgactgcacaacaatgtgaatggacttaaagatgctgaattgtatactcagggttaaagtggaaaaggttatgtcatgtatatttcatcacaatccaaaaaaaagggagtatgtgagagaatatatgtgtgtgtgtgtgtgtgtgtgagagagagagagagagaaagagagaacatagctcattcattttggtcattgtttaaaaaaatcccctctggtacttaggtaagaggatcatctagttgtgggaagatcagttaagagtattcattccatcttcccaacaatgtgtgtacgagagagagagagagcgcgcgagagagcgagagaaagtgagaacatagctcattcattttggtcattgttcaaaaaaatccctctggtacttaggtaagaggatcatctagttgtgggaagaccagttaagagtattcatcccatcttcccaacaaccctggcaagtttatcttcatgtggcagatgagaaaacaaaggctcggaaggttctagttacttgtccaacacttcccaggaagtggcagtgtttggctccagactcagcctcgatgaccctgaagttaaaagtcacatggctgtgctcctggtcatgtggtcaagatttgtttgaacctacttttccacctctaccattacacataccaatttataccaaatcatgagtcattcaagtcactcacatgtttgatataagctgctaagccacattttgctctgccctacttgtgccatagggttttgattgacaggctgacttgtttttcttattcctacattttgcacattctctctcattttgtttgcctgattcctgctacatgaaatgtgttctactctttatttgaggttgtatctctatttatttatttatttggttgtgctgggtcttcgctgtggcactcaaactcttagttgcacatgcaggatctagttccctgagcagggattaaacccgggtcccctgcattgggagcgtgaagtcttagccactggatcaccaggaaagtcccatatttctttttgaaaagacccagctctagcctcaaaagcagattggaaaactccacttccttctgttctaaatactctccctgtttttcttccattcgcactatgcttaattgaagtgagcccttgggagcaaggatacagtga

SEQ ID NO: 30179 - DNA, 1363 bp, Bovine  19866880672177
  misc_feature (1)..(1): n is a, c, g, or t
naaagtatgagatcatgaatacttgtggttttcagctgcttaatgttggggtaatttgtatacggcaataggtactaatacaaatgcctaccttgcaaaactgtgaagaacaattggtaaaatgtgcttaattagattatctatgctaataagctaaaacatgtgaaacaggaagagaaaagcctagctcataaaaggcagcctataaatgttagttttctcttccattcacctctaaaatgagaacaatcataactgctctcttgtgaaaatgttttgaaaaatgtaatctactatggaactataatacatgtaataatgtaaggtattattgtaacaagaaagaaaacattgttactttaaaagctgtttgcagtttacactggtctggttggcccaaaaggaatgaagaattcttaagaagacactagctcttttgtttgggaggtggggaccctaaataagtgggtacgattatgagaaagaaaggaattcactgaaagctggaattcaaaacaggaggtgaccctgataatgtaagaatccccccaggaagctttggcaatcttggaaaaggtgtggttttcccacaatactcaagattgggccacatactatttaatgcgtatgttcaaagacaaagtgtctctaaaaggatggagggcctggagggtacatgggcaggaaatacaaagatcatgagataggtacaggcctgaaatctgaccccagaataaagcttagccttgagtttagggacagaatgaaggtataaagtaaattattatagaaacactcaaggaaaaggctctttctcaaagtatggaggacaagcatgtttgtcataaatattttccactacctctcatttttttattcttattaattcttaattaatcttcttaatctctcattcatttaagagatacaaagaaggtgtgttgtttgctagtcaaggaactgaatcaatagtaagtcaaaatttcccacaatttatgttactttaataaaatcatgtgattccttgggtcttctccttttttatcttttactttctttgagggagaagtagaattttaaattatttatttatttattattttttggctgtgccacgtggcttgctggagtttagttcccaaaccagggattgaaccctggccctggcagtgaaagtgccaagtcctaactcccggaccactagggcattcctggtatgagtttgtgtgtgtgtgtgtgtgaaaactaaggatccagagtagtcagagaataagacatttgtatacccagcttgggcattgtgcctgcagatgtggctgggtctgtcctttatttcagtctttcataagccacaggacgaagt

SEQ ID NO: 30180 - DNA, 2213 bp, Bovine  19866880781929
  misc_feature (1)..(1): n is a, c, g, or t
nacttttaaaatagtgtattcagtggcattatttatgaagtacctgtatcacatatctgtatctgtactgagcagtgtttcctgctaagcagtaatgcatatttttaatcactttttacttattagagtcccccattcccatccttgttaaaagaagttggggaatggattctttttttcctctttccatctcttgctcctcatactgggggcccacagaagtatgcaggagataatttacttgcttttctttctggttcattgttaaatttgggatgagaaacacggacagagtattaagtttggtgatcattctaggaagagagtggagtatgtgagtggagtatgtagagtgtaagggaattaagagagaaggcactttctggtggacttgggtgaatatggatatatcatttaagacatacctcatgaggaaaactatcaaaatgaaataagcccagtacagatttagttaataatatccaccatttgttgagtatctatttagtataggtactgtgataaaattttatatgctttgacgtatttatttcaagacaagactgctattattctcaagttacagataaggaaaataagacttacagaagcctatgcagcttgtcagtgacaaagagagtatcacgagtcttctagtaactaccattcaataaaaagctgatgatgtgccagcaatcacgctaagtgcagttcaaacattattgtagcatctgcatgaagtaggcattattaccctcattttagagatgcagaaactgaggcaatatagttattggaatgacttaacttgtacttcagttatttaccagtatactgatgcagggtgttcataagttgaggtatactgttaagccttgaaagtattaaaaataaagataatttcatcagtgtgatcaatgcactgcataaacctaaaaaaatgtactattagactagttctgaattccaacttaatattttctattgatgatgaatcagctcacctacaccacctatctcacgcgtgtcttgtctctcctctcagtagagttctatatctgtatcccactgcaaaaacaaaaccttcatttcttcttgttctcttcttttatgagagtacattctcaagtaacgtcttaggtaaacgcgctgctttctttgatggatcattgtgtgactgaatatggtttttcgttttcttttccaattgattattcggtggggtataaaattgtaggttgaggagaaggaaatggcaacccactccagtgttcctccctggagaatcccagggacgggggagcctggtggtctgccgtctatggggtcgcatagagtcggacacgactgaagcgacttatcagcagcagctcctgttttaataaataaaaaacttcctatggaagacacagcatctcctcagaggatgaacggcacagtgggagaaaatagatttgctattcataagatgagaagtgctgttcatctgtgggagatcataagagatgattttctcccccagcttagcgtcagtcttttcacgctgatatcatgaatcagaataaaatgtaaaactgagaattaagccaacacttgggataaggagatggttctgtttatagaaatcacctctgcctagcagtgggctattaaaacagcagactacattagcagtcaagcacctaggagtttagcaatcatatgattaacaagttgaaaatagaaaagtgtaacaagcaaaacagagagggggaagacagtgacctacattatagttcattatcgagatgggaatgctaaaattaaaagccacgggtgtggactccacagttacagcattggggccacccactgtatgtgggacagccacagagaaggcaccacccggcccgaccaactcacctcggccatcctgggcgacccgacgtccggaagggccgactgcactgtgattcggggcacgggctgaggaaacaagggagcgagtgggctcggggctcgggggagcagggcagacagaatcagagaagccttccacccagagggaacttctacagcttgtagggattctgacaagtcactgcctggcagggctgtcaggggctgggcggggatgctgtgccggaaacatacaaagccaggagcagtcagtggcccagcgacaccagacgtgtaaggagtgcaggtgctctcttcgcttgcgcacggcacgt

SEQ ID NO: 30181 - DNA, 822 bp, Bovine  19866880858088
  misc_feature (1)..(1): n is a, c, g, or t
ntttgtttgtttttgctaaaagctcgtttgagactctcacaaacgggaatacaatgagtttaaatggaaagggaaaacattttggctttttgagcagatttttagcccttcagtggggacaaaaacctgagtcttaatactgcaatggaaactgagtctgttgcttaatgcagtatcaggatgcagtttgtgggaaaataacctgtatttttatatgctgtttatccacacagacatgcgtatgagaacacgctgacacatgcacagatacatgctcaaataacgccacagtatttttaacaggaacatatggagatagatatagaaatgtagatatatagaaatagagatacacacacatatatgggtatacatgtggatattgatgtatacatacacacacacacatatatacatgtttgtggcgtttcttgaaacatgaattacatttacaaaagttgcatccttttgtcctagaaagagaagcttgcatggagtgtagagatttgcaaactaccctctctcctccttatctgaagcacaagccagtgattgtcattagcaccgcgcagaggtgtctgtgccaaagggtgacagaatagggaagtaatccccagtgtcagcagctgggcgcgatcctgcagcgaagtatgccctccgtgcctgccaggcctgtctctctctgttcgggaaagtggaatccaatgataaatgtcaatacacttatgttgccacatggaagtgagctgtagctgtctggagcacaaacagaagcggcagatctcaagatgtgggtgccagatggcacttaggagctgggcg

SEQ ID NO: 30182 - DNA, 765 bp, Bovine  19866880918297
  misc_feature (1)..(1): n is a, c, g, or t
ntacatggcagaaccataaatattgtaaagtttaaaaataaaataaaaattaaaaaaaatgatagtttgttgcagatatccaaaggtacctctcttttaggaaatttctgtcttcattttaatgttctttgaacggtaaactatttccagccaccaactctgtggctggccctttacctttttattgccatttgcatctctgctaactcatttttgccgaggatgctacactattgacatgattctcccccctctggctttgtggcatttgctttgttgttttttgatacatccacttgcaccttgcataatgattaaccttcgtggattatctcccagcttggcttatgtatgtcaagcttcccctccagtgctattgtcagggctcaggaatatagcagatcaccatggcagatcagatgagggtaaattcaccctcttcccttctcatcacatttttagagagataaaattaatattttagtattaacagcaggtctgaaggggaaagaagacccaaaagggtagtctagggggatttctgtgtagggaaggaggtatctcatcccttaacttaagaaacagtggggatatttacgagatgattggtcaaccagcagataccctcttgtggaaataacacccaagacttgctgtttttagaaaatggctgctgcttcctatagtttctgcccaatcaccaggagcctgaaaattcccctgtatccctctgctaaaagaagttctctctcactgatgcaaaat

SEQ ID NO: 30183 - DNA, 959 bp, Bovine  19866881085471
  misc_feature (1)..(1): n is a, c, g, or t
natggagaaaaccatgtcaagtggatcagctctaatgtgcgactactagattaagagttccttcaaggcaaagcccatatctgtcagttcttgcctacacaccaaaagaagctgtgcacacacacatgtatgtgcacacacctcaaagagaaattaagttttgtgtcagttcgtctgtacctgtataattatttttttttgtacctgtataattaaattgcatgcacacactaaatatgtccaaatagagtttaatgtgaatgcccaaatttataaatattttatcaggttaggagaattctggcaaatcagtaaacatgattcagagaagcgtgagaatacctgttgatttcgtttgcaagctgagcttttggggaaggcaatatattttctaattgttccttgaccaaaatgagaaactcactgggtttcttaaaaataatcattgtttgcgtctttctctttggagactctgatttattgccttttgttttttggtatcaccacactggtttccccagaggacactgacgttgacagagaaagaccaaaagaacttttgtgacttcttccaaatgtcataacaaaagtaagtttcagcagtcttctgagggattgactttcaagcaggaactaggttgttttggaaacttacctaatgacattgttattatttcttgtgagtgataaggttgatagatcagtcccccttgcatttactgtaatcccttcagacctgagaggtgacctactagtacagaagctgtgtggccctaaagcttggccatagctctcgtctctctaagaaggatgtggcattggcttctgaaatctgtacatttgactgtgaacctccaagtgatgttttaataaagaagtccacttaaagattttgagtcatctttcatccttggaattttaaaaagatttgaaaaaatttaaggatagattgcaaagca

SEQ ID NO: 30184 - DNA, 1651 bp, Bovine  19866881101554
  misc_feature (1)..(1): n is a, c, g, or t
ntacttctcactccacacatttctctattcactcacatgcctataaagtctcattctaatctctctcctgaattatagttctatatttctgtctggatgtttccacataccacaaactcaacatgtcctaaaatgaaccaactattttaatcctcatatccagttacataatgttccatctcattaatggaggcatacctgtactgtgccattaagtctaaaatctaatagtcacaatacattcattttcacctttcaccatctaaatggccactgctaaatcctttcagtttcaccttctaagttgttttttttttttttttaatctattcaatcccatccatcttcagggtcttagtttagactctagttgccaccactggctcacattattgcaaaatattccaaacaagtttccctgtccttcaacccatcttctattctggccacaatgaccttataaatactcaaacatgattgtataatttccctaacagaaaaatcttaatggctgctcattccattaggacaaaatctaaacaaggagaaacaaacaacaaagaaaaaaacatgcatcactgccagcgtctgcttacttttctaacctcatctctcaacatccctaccctccctccattcacagtaaccctaggctttagtcgtatgcaacaatgtattccaacctgcccctgttcttgaatgaccttctgcagcacaatgtagtgattaagagtttgggtttaggaaaaaaaggaattagaatcaatctcagttctactacttaatagctgtgactctgggtaagtaacttaacttccctaagccacagtttccttacatataaaatggtgatcgtatcaccatttgtaagtattaggtgagataatgcacgtaaacagcatgtggtaagcatccaaaaagcatgttaccaccaccattacttcctacgatcaaaacgagtagagtcagagtggtttaagatcctctaactgctaattcagtactttgtcctatggtatttccctaaatttaaaatcttagcctggcttattttcagccactttgtggttactgaagtctttcattttctgactttactactaatcatctacttcctggacccaggatataaaaataaaattatttaattgacttttaaaattgaaaaggtaaattaaatgtaataaggtcacctgtgtatttcaaaagaaaatttcaaaagcaatctttggctgttcccctttaatgtatttgtgaactatacaacaaaagcacctcaaaattttgcacaaaagcaggacaatggtgatatataaccactggttaacagccaaaaatttcacaaacccaaatgaaatttttggccaacccaacacaaggtatattatcaaaaaattagttctataatttgatgagtgctttgataactcactatttgcttcaaaaatattatgatcatacatgtttaatgactcatggccattactactttaatgtttacaggaagtatctgggaacaattaaaaaaacaacagataggacccataatatgaagtgaaacccttctgggaaacagaaacataccttaatgaactgaggtgtagctaatctgacagtagctacaaaacaaactctatcttcataagaaggc

SEQ ID NO: 30185 - DNA, 1259 bp, Bovine  19866881107478
  misc_feature (1)..(1): n is a, c, g, or t
naaactgaagttatgggtaccacttacacacagctgatctgtggaaccttcgaacttgttatctcatgaaatttcagcctgctttttcctttgtgatcacttcagcatcagtctagctctcctgacattgttacaatggctgtctacaactctagacttatgtccagtgtccccaacaactccaacaaaaatagaaactacctttccaatagtttaaaaaaaaaaaaaagatcgagtccagttggttctaacaggatcgtgtgctggcccctgaaccagtcaccatggcctgaggagcataacgctctgatccacgaatcctaggttcatataacctctgttggaaatcgactgagagtagaggagagattgtccccgccatcaaagaatcatggtgctgttaccagaataaggcacggatgctgagacagtattaaaaaaaaataaaaattgaaatgtctgctatggccttacagtagaggcaagatgaacaggtaggagtcctggcttcaaaggctgaaccttcatccaaaataccaagctgcattttgacactgttatttgatgaagcaaagaatattaatgtcacagaaaaattcacttttaggctcatattctcctaaatgtagatatattttgaaaatatccttacttacatgtatcaatatattttgccataagaattctgatctcacagtacagatgtgagatttgtacacagtacaaataaacagagaatcaagcatgttagacatctactcctctgacagatgatgtgagagggacccaaagtcttgttgctacctaagagcaaaggcggactagagctcttacccatctctccagtctcagcattgctgcaccttgaggacacaccccatataactctggccagcaataacccttcagatttttaagatttcactgtgaatgaagcatagttaaagctttaataggtcagctcataaacacctcattttttgttctggctaaagattaaacagtgcctatccatagggataactagctaagtggcaacatatgtcccccaaagctcactttgagtaagttctccctttattaattatttttcataagtattttaacatttcaaagctcacacttaatactaagaaaccaggcttgccaaatacattcacagtagaagatctgtcactctatacctagatctaccctctgctaaacttgtctctccataactgggaatagaccaatgttcaatgtggttacagggaagg

SEQ ID NO: 30186 - DNA, 785 bp, Bovine  19866881186898
  misc_feature (1)..(1): n is a, c, g, or t
natgcttgaaaaattttaaggatatttactctcattttctgtttatatctctgtgtatgaggcaagaataaggaaaactgtgattgcagtgtgattttcattctaactgatctttaaaatagtattttttattataataactatcacctcagataataactagtaattggaatttcttaatgctgagtttttatttttatttttcattaatgcttaatgctgctctattttttaaatttggccaagttgctattttaagatcatgggtttaagcactcctccatgaattggagttttactcttaggtacttccaagaaatattcatttctttaatcttattttcattatataataaattcagtcactttaacatggaaaaaggacattagaccctcctcccttaaagagcgagctgtgtgcacttatatcaggagctttcccatcatcatctctgggctttttcttgaggcaggtttggatttggtacagcttgggacagaagagtgtagagaccaaggcatgtggcatcaacatgggtggcaacaggcacggatcagcctgcaatccaaggggcaggcaggggtcatcctgtgatccaagggacaggcagagtctaatctgggagtgcttggagccaacagaggtgacatcaaaagtcaaagagaaatgagccaggagcccaggaagctgctagggggagccaaataaatgtgcaaaaggtaactttcttgcttaggataaatatgtagtcaatctctggccatatgtctcaagggtttctgat

SEQ ID NO: 30187 - DNA, 1052 bp, Bovine  19866881265451
  misc_feature (1)..(1): n is a, c, g, or t
nggaatgagaaagctgacctctgctccagtttgtcccattctttgtcctctcccttcttcaaggagtaatatttggggggaataaatccaggaaagggggttgagtgcttcagtgggaaggatagtagcactgactgactctgatcccatgtgcctttcacaggatgtggggcaagaaatgactcatcaagaagcctctgagccattgttaggcaaagagatttcatgggagcctggtgctttacatagggaatctcgttaagccaaaatgacttatcatgacaaaggggattgaaaacattccgttcattgccacagaaagagcagaaatggacttaggaaagcccagacccaatgttgagaattcaggctggatgcacagtgggcaacagcattccacattcattgcctaagctaacgagaaaactggcagcctgtagtgcgagagcaggccttccagagaaatcaggaccaaagactcagcctttaatactcaattataagcaagtaatattggtttgtttgtatttaactgtactttaaatatgctaccttgtgccagacactcttttgaaaagagtttattaatattaacccatttaattaatagagactctaaagcaagatagaggcatcatagtgtagatccggcgacaagcccatgtagaagacagtaaaggagctcattgatggtttctaccaatgtttgttaggcacttactatgtgccaggcaccttaacagttagtggtcagaactgtcttcttagctgcttgggttaaaagttagcagaaccctggaaaggagtaatttcaatcttatcccagaattctctacatattcttaggatatccctttaaccaactgagcatatttctcattattggctcattcttctttcagtctttttgaacaaagatctgagttcaaggacatttctaggtattacaatacatagattctattgtgggggaacttaacctgggtcagaatgctcatggcaaaaatcaggtaagaagctctttgacagcaggttgggggaatgaggctttt

SEQ ID NO: 30188 - DNA, 958 bp, Bovine  19866881386188
  misc_feature (1)..(1): n is a, c, g, or t
natctccagcatattgattccatagctcccttacaaaaacataacacttactgtatctgcttcttttccatcgatcatctgcagatcattcaaagaccactttttggttacttcatatttttcatctaaacctattctgtagtgtttcaccataattatttttacttcttcatttttggtcactgtgggacagaaaaagacttcgtttacatagactcttgcaagataataaattattcaccaagtcatagttttctgtatttatgtatctccttttcatataatgaacttgaaccatacattttatctgcaccctggttgtgaactctgaggtatctgaagcttcatgaatgttccctcaaatttgctcactgttctatcagtgtgttaactttatttttgctacagttgtggtcacatacagccgcggtaatatctgtcagatagaacaccgagctctgtgctttcagctctgagctttgtggtggaggatggagttcaactcagggcaggaaataagaggcttagcgtgagcatacagtcagtgccaaagtgtttaccagaacaagttggaattttaatttatgacaatataagaaaatgaggtcaggaaagtatatcattctgctcacccagcaaccaactgtggaagagagagcatgcaaataatattatgcacactttcttttaaagttgctctgagattttgaatgtaggattgctggcaacacagcttttactaacctatttggtattgtttgaggtttttaatcttctccagagtgtatctaaacttctagtatttgaaatgtgccattgaggcaaaaactttagtactatactttgaagggtgtggggaaaagcattgcttactttatatgaacgacataagggaaataattttctggccttaaaatcattgagttggtctcatacgaacacactaggagaatcagca

SEQ ID NO: 30189 - DNA, 1679 bp, Bovine  19866881395512
  misc_feature (1)..(1): n is a, c, g, or t
nacagggcctggttgaagaagacatatgttaccacgagccaccaagtcaagttgtagaaaccgaaaggtgacagccatgaaatgtagatcagcagctctgccaagtagttaggggaagagacgtattcaaaccagtctccaaaagggattcggtggttacagtgaatgaccactcctgaaacgggagaagatacccttaacgtctgaagttgctagaagaaagttttaccactttgctcccaaagtcatttataaaaactcaaccagaaaaggatgtcacagacctgtacaaaccaccatgctatcaccacctccactgtcaacctactacatgtcagaaagtcacagactgaagttatactaactgtaaataagcacaaaagaaagcctgtttctccaacaatcctccaagctagtgatgaagagctcagattccagagtcagactgcatgagttagagtcctagctttgccacttacaagctgtgtaattttaggtaagttgcttaacctctctgtgcctctgtttcctcacctgtaaaatcagggtaagactgtatttgcctcaagcgagtactgtgatgttaaacataaagcgactcagaacagggctggcacaaagcaagtgcctgataaatgttgagtagcactgttcaatttttattatctcaaaaagcctaataaaaactgtatatgtgataagtcagtacaagctaactaaaaaagttaaatttttttgctttggctggaacgatactaacttggcacagtaatggtagtgctgacatgctggttcgacacttatatgcagtgcaggccccaaaatgtgggcacagcatagagtcacagaatgtcagggctagatggtgccagcgagggctgtcagtaaaatgctctcgttttacagatgggaagatcaagacccagagagtcttgtcaaaatgagtatttgatagattgattagttgactaattagagcaggaaagaaaagagagaaagaataagtacatttaactcctgagggctaaaaccccccagtcagtggttctaaaagatatcttacctgctttgtttttcctgagattgctgagaatgacatgacatttatactgatgggcagatgaccagatgaacatcatcattccgaggatatggaaccaccgagcctgcatcaagagattcttccctatcacatagactacagaaataagaattacctattagccaactctgcaaaacttcagaggctcagcgcattaaaaaaattatacagtctgcagaacacaattatccacttatttggttccttatgactagaaaaccaccctgatatcatttcccaagcacagaagggagaacactgtccctgtggatgaaggaggtatgctcctcagctaggggcagcttcagggctcactggcagagaactccagatcggcacattctcctgctccttcttcaagtgcttcaggcacggggatcagctctgtgggtcagcttccactcttgtgatgtattcttgtgtggtaagaccactctgcatttttattgctaagcctggtttgatgtcttctttcttgcagtctgctgtcagaaaaacaccttctgaaggatctcacctgagccatttctagggaaacttgaatacgactgactagctccagccaataagaaaatca

SEQ ID NO: 30190 - DNA, 822 bp, Bovine  19866881403501
  misc_feature (1)..(1): n is a, c, g, or t
nctctccccctcccttcccattcaggtgtttgaaatgacaagctgctatttattttgctccatttcccacttttaacagaaaccagtagctgaagatgtgccaggtggtcctgttgataaacaatgagttctaatacaagatttcctcctggaacgccagctttttttttctggcagatgaccgaggtgggaggaaacttggctctgtcttctagacatttttcctttggcagcttgtctccattccctacagagtgacagaagaaggagaatggtacgctggctgtgcaggagttcctggggctatttctggtggtggctaacagtctaaccttactcaacttactaaattcctgaggtcaggccacttcccaactgagcgtctggtcttaaagtggcccccatttgactctaggattccctggtgatattccatctgccacagctgcgaaaaatccaacctttcgatctcttgcaccttccatcaaagtatttcttttctctgttcctggacacagtaagtgctcaatagacctttttgaaagctcagtgaactctactctctattttcccagtttcacaaatattccattattgcagaattaatgcatcagcccagtaactgacgtcctactttctaagttccatgagtgagaggggagtgtgctggaggctgaaggtctgatggagaccagtttggtcacgtgtgggccatgtggccttggctagtttctgcagatgcaagaagcattgatcgagtgactgtggatcaaggattgtgcaggacacaaagataaagaaataaatgcattagcccacatg

SEQ ID NO: 30191 - DNA, 787 bp, Bovine  19866881405763
  misc_feature (1)..(1): n is a, c, g, or t
ncgtcgtggggggaaatgagggcccagcactgtcggacaggatttcatggtggtgtcagtaagtagcaagaaaacacatagagtcttaagcattcttaagcagaagctcaattaaaaagacaacctttggaacaggctatgtggaaagccaagagatttggattctgccagtgcaggaaggaagggattccaaagataaagggcatccatcgcaaacatcttgttaccaagtcccaggagctctccatcaggaaatgaatagccatgtgctgcttcacagagacagagagagaggagagagaaggaatgtctgtaagataaccactagcatgagcctctagaatccaggtgttttggtttccaaaatcttcagggaaagtctatgtccctcagatgctaaatgcattaaaaggctgagaacctaacgtttccactgccctttgtattacaatcctttcctccacctttctatttaaaactaaatttggtttcattctttggtccagactctgccatggtgaccgttcctgatgtgcaagtaagaaaatttaattgctggggaaatgcagattttaggttaaaagtcatggagttgactgtttcttggcattaatgactctatttgagcagggttggtaatatgggttgaggaatgcctggtggttagtatgactaaattctggctctcacatgtgaccttcaccctgatgtcagacagggagtcagactaactcacgtgtctagatctgtgttaagagcagctgggtgtcgtacggggaggtaaagt

SEQ ID NO: 30192 - DNA, 1802 bp, Bovine  19866881549798
  misc_feature (1)..(1): n is a, c, g, or t
ncattcatggtctacagctgccgatgggatcaggctggggtgggctacagctgggcccacatcttttgcttcctgccttttgctgtcctggttgccccatttccttatagttttcacctgagaacctccccatcattgcatacaagagtctttgtctcagggtgtgcttctgtgtctcaacctgagacaactggctttgtctgcagtaggcataccttgggtttggttgcagaccactgcaataaatcaaatatcacaataaactgattcacatgaattttttttgttttcctgttcataagaagttatgtttacactatactgtagtctgttaagtgtgcagaagcagtatgtccaaaataatgtacatgccttaattaaaaagtactttaatgctaaaaattgctgaccattatctgagccttcagcaagtcataatctttttgctgatagacttactcagtgcagggttgctacagccttcaatttgtttgaaaaaaaaaaagcaaaccaacagtatctgtgatgtacaataaaatgaagtatgcctgtactgggttgtgaagttttcagagttttattcttaatttcctagcaggaattctatagaaatacagtccatcagttttaagcatgtctctatcagatgactttctcttttggctaatatataaagagatatataaaggaagttatgctgctaaaatgttattttatatgcataaaggaaataacaatatggcttcttttagatgctgtttggccagaaaaacactattcctaccagggatggaggtggccagagtaggtgatagatgagtattcattgatttcttgattgatgaacctgattatgagaaggaaatatgttaatactgtttttaacagctttataggggtataattgacatggtaaaagtgtatattttgataagttgctttatgcatatgcccacaaaccctcaccacaatcaaaataatgaaaatgtacatcactcttcaaagtttcttcagctctttctggttccaggcaaccactgcttttgttttagtaacataaggctgaagaaaacctcagaggtcatgagcttcaactgctcagtagttgggcatgcctgagtacaggcatgcagggatttccactgggtaagaccatgagggcagttgacgtaaccagggccagccagtctgccatcagcatgtaataaagaagatgggtacaaagctggacactgatgacaactttggcatcaaggcaaagattccatgtgtgtggcaaattttgatgagtttcaggtaaactttgggatagcccagggttttgttacaattaaaggaggccctgtgagggagtgatgccatcctcgaaacgcacagcctaaataaaaacatacaaataaacctttccacccaaactcagacctcccagtctggtactggaaacggaatctcctggggggtggggcaactgatttctgcccttcacgttcatgccctcttggttctcttactggctgctgctggatacagaggacatactttcccattttaaccctttggctcaagtgtgctacctcgtggtccagctcagacatgtttagaatgttctgaggcactgctgaaagctctggcagaagcaacagagataacacagtgagagcagtagttctagataatctggcatttaaaacctagttttctatctttgctttatgagcctttcttccatgcctggaaatccccttttttgattcctttaagttcaagccaaacccagttcaccgctaactccttccgcctct

SEQ ID NO: 30193 - DNA, 723 bp, Bovine  19866881773965
  misc_feature (1)..(1): n is a, c, g, or t
nttgtttggcctaattttagttttctctaaacttatcttgtctacttctgctttttccttttaagctgtttaaaagctcaaatttgggctgagattcaagattgaaactagcttacatatctaatgagtgaaaagataggaaaaaaggacctgcgatatatttttgaggagaagggtattcgatcacctcacagatgaacaaggagaatagactactcaacattgactcattttattcttctcagaaatatcttaaatttctaaaaataatatcatctagtatttaatttagagcaacatgacatacatccatatacacctttgagaatttcgtatctctatggtctgcttaaaaaatcagagctaaaattatttgagaaactagagataaaatgagtagtgactactccttttatgatactaactgaaatgtcacttgtttttatattcagaaactcattccaggtctctcttgattattttactttagcatttttcagaagatcaaataatatcaatttttcttttcatttttttcaattacctttgatgaagtgcagtaaaaaaattttaacttatctatgtagagaaattatgcatttttcataaatacagatgtctttagaaaatgtaatattttgattctttttaaaatagactgaaaaaccagtctatgataagaaatgggttgtacaacttattgtatagaaataataaatttta

SEQ ID NO: 30194 - DNA, 1552 bp, Bovine  19866880659958
  misc_feature (1)..(1): n is a, c, g, or t
ntactgattacactattcaactgttctgtgcagtttaatgcaatgtgttttataataaaaagctaaaaaaaaaacaacccaccataaatgaagttaaaacacaaaaactgggaaaaaagatacagctcatattataaacaaaaaactaacatcccccataagctcctagaaactgctaaaaatatcaacaagcccacagaaaaatgaagccaggacacagagtttctggcccctcaacaaattaaaagactcattcttgaaaggcagtcttttaaaaacctgaatggtcttttgaaagagttcccttgaaaatttaggtcagatcctttttactttctggcttaaaacctactaagcatttcccatctactcagatacatgtgtttttctatcaacgcagaatcattctgtcctgatctgtgtagctatgtatgttttttgccccccatcaaagtcagttttaaggatctggagaaactgaagcacctacttcttgtccttccctgccactagctgtgtagtatttcatccagtaatgaaaaaccacagctaattgatgcgtgaagttgttattgttcaataatatgaactaacctaacagctttgtgactgctccacatggatgtgtcctgggacaatgtgagtttacaagtggtttcacagtagtaaccttgaacattatgcagtttgcctcttcagactttcccacctaacaaagttggaaacatgcagaccagagaagtattaaggagcaggagctagttggggtggcgggcaatctgtgaaggaggaagggctgataagggagccacatcgaagaatagctgttcccactgccttgcttctgtggtgacaggtcagggagccctgggttctagctgcttgagtttctcctggagttcctggagctggcttcgaccccaggtgatgcggctctgaaggctggccatgtccgcagccagttgcagaccctcccggaagctggcttgagcttgtcgcagactgtgaggaaccaggattccaaaccatttcaaagggttctggggagctggggaggagtctggctctggggtccttgggagacccttgcgcctgtgcagagctgcctcgcgggatcccacctcctctggagtctgggtgccggctctcaccatccagaacttctggagtccgtcctgagcctcgctggtgccgacgcggacctggggctccatgtgggacgcatactgcaggggccctactgaattggcacccatggcatagcacgctttggagagcgagagccagccctcctccacccgggcgtttagccaggaaatctttcttaacactccttgttattctttggaactttgcattcagatgggtatatctttccttttctcctttgccttttgcttttcttcttttctcagttattggtaaggcctcctcaggcaaccattttgcctttttgcagttctttttcttggagacggttttgatcactgcctcctctacaatgttatgaatctctgtccatagttcttcaggcactctatcagatctaatc

SEQ ID NO: 30195 - DNA, 1193 bp, Bovine  19866880984998
  misc_feature (1)..(1): n is a, c, g, or t
naaaagaagattctgctcatcactttggtgttttagctactccctttccacaaaacaataaatccaatcttaatattttcagctttgtcttgagtctcattctcttttcccaaagtgagataattgtaacaatattcttaaagaaattctgtgtatgtgtgtagctctcccttttccagttgttattaaacttacttggtaaaagagacagcttggagataactggtaatacttaatatgtggtgaaatgagggggactgcttaccataacagctaggtaaatagacagcacttaatactctggtaattttagtgtaatatttgaattaattgagagatgtgtgtgtgtgtgagcacatatgcacacatgtgtgtgtgctcatgtatacatggtaatgtgctcagttgtgtttgattctttgcagccccaaggactgtagcccgccaggctcctctgcccatgaaattttttaggcaagaatactggaaagtgaaagtcgctcagtcatgtttgactctttgtgaccccatggactacatagtccatggaactctccaggccagagtactggagtgggtagccttccccttctccaggggatcttcctgacccaggagtcaaaccagggtctcctgcattgcacagctgtaaatataaaagattcacacaattttgtttaatgcttgtctctccagttttatatctggcacatgcatgcatgcttagtcactcagtcgtgtccaactctttgtgaccccatggaccacagcccaccaggcttctctgtccatggaattttccaggcaagaacactggagtgggttgtatttcctactccaatacctggcacagcattcaataaataacttttgaatgaagaacaactaaaaaaacccaatggtatacttaggagtaagatgaaccaaataggtaaaacatttatgcactgaaaacaataaggcattgatgaaagaaattagaacagatgcaaaaaaaaaaaaaaggaacaatatcccatatcatggtctggaagaattaatattgttaatatgtccatactatccaaagccagctatagattcaatgcaatccctataaaactcccaatgggcagttttcctcaaaatagaaaaaaacaatcttacaattcatgtggaatcacaaaaagaccccaagagcaaaagtagttttt

SEQ ID NO: 30196 - DNA, 1895 bp, Bovine  19866881280549
  misc_feature (1)..(1): n is a, c, g, or t
ntttcagaatgggcgggtaggcgatcatctggtcaatcgctgtacagcttttacagctgctggagctacagttatgattattttagggactcctcaccttcaaacgaacattagcctcctcgccgtaggtagtgaagccgggctgtcgcctttattaactgcctggtctaagtcacgtgacagcaccttgcctccctatcctgcctattggttgcttcagtgagcacgcgcttcagtctggccaatcgctttgctactcccaccttctgttcgccattttaacttcgggcattgtaggaatcagcggaatctagtgaggtctctaccgacttttggttaagggcggaagcgaggaccgcggaggcgaggactgcgttgcgcaagcggtatccaaagattctcctggacccacgtggaagttgccctcaggatggtaaggagggatgttttaaactcctgttttggaggtcgggggctagtggaggctggggttgtggccggtggggtcggggcgtatgtttctggagcctgctttgcttggagaaaccgggtcgtctgaatgggcccgctcttccccagctgcgccgcgaggcccgccttcgccgcgagtacctgtaccgcaaggcacgagaggaggctgagcgaacggcccaggagaggaaggacaaggttcggcgcgcgcttgagggtacgtgtgtcccccgctttccgatcttttctagagaccttagttttaaaacccaacgggaaacaggccccaaagctgtaaaaggcgtttaattagcatttacttgtgttagagtggtgagtattttttcacgtatttactggtcatttcccttaactgttcgatcttcttcatggtttgcaaatgttcctttcaagatcgtatgaattacttgtcatttatgttacagtatccagattttacagcttgcttattaattttatttacagtgtctttgttgtttagtcgctaagttgcagtgtctaggcctttccagatttaaacatttcacgtggtcctatacatatttcccctgcatcgtttctgttcttgctacttgttgtcactacaaggtaatatctgattgtcctttactgttgttacaagtcccttgtatttgaaaactgttaattcgtgtagaacttcgttttatttgcgttgtaaattaggaatttaactttgcaatattttgcccactttccatttgcactgctgttaaaagagtctgtcacacgtgcctgattggaaatgctttatttatatgtatcttgttggttcttgtgttggtggagctctgtttcctgatagtacatcaactcagtacctccgttttaaattcactttgatgggcttaggttttagacatgtaaagtatgtgtatgtatattcatgtcaagcataatgtaatacagagcttctcagcgctagtggtaaaagaatctaccctgctgatgcaagaggtgtgggttcgaacccggaggaggaaatggcaaccgactccagtatccttgcctggaaaattccagggacagaggaacctggcggactgctgcccatggatcccgtagagagtctgttgggactgagctcctgatgtaatgacctatctgctcacattaagaaatgaaaatgataaatatattgaagtttagaaatatttcccccgacctagagaaccacagtattaaatattgattaaaaataagccatttccttcctcttctttttttcctgtatcatgcttgtttgtaatattaaatcatattggttgattttaggtagtattaggttttgtgtattcttttgccacattatgtttttgtttggcatcgttactaagatccattgagtgtaggtggggctcctgcaggtaaagattccacagggt

SEQ ID NO: 30197 - DNA, 1974 bp, Bovine  19866880388379
  misc_feature (1)..(1): n is a, c, g, or t
nttctggataagccgtaaaaagtccacatatcctctcagaccagtcagtttattcttatttgatttgtcaggtctctcctcctcttgttcggcactgtggcttctgggccatgacccaaggatctgctgcacccagatccttcttgaggcaaatcagagggatgataataaaagaagaactctacacacccttctcccccaagagcagaaagggggagaccacagtgctgatgaccccaagatgcaagtcacgggacatctgtctgtattatctgctgccccatggccaacactgccctccctcacccaggagctggttcgccaccggtaagacacagagcagtggggggaggtagtctagaatagtcctctgcttggccaacagacctccaggggccaagaaggtcagcagggatctttcaggtcctcttgagggtcccctcccacatcttacctgatgaggtcaatgggttgaaacttataaaacacccccgtagcgtgcccattcttgatacagcagctaaacaagaaaaacagggaaccaggttagaggtgaagtgtgcaactagtcaccttttatatccagcttagcaagtcaaaattagacacttgccaaggcatggtggccctagtggtaaagaacctgcctgccaatgcaggagacataagtgatgcaggttcaatccctgggtcgggaagatcccctggagagggcatggcaacctactccagtattcttgcctagagaatcccatggatagaggaacctggcaggctacagtccatgaggtcacaaagagtcggacatgacagaagcaacttagcagcatacacgtacagtacaggaactctactcaatactctaatgacctagatgggaaaagaatctaaaagagtggacacatgtttatgtataactgattcactttgctctacacctgaaactaacacaacattgcaaatcaactattctcagatcaaaattaattttaaaacaaagtaattattgataaagtgaagtcactcagtcgtgtctgactctttgcaaccccatggactgtagcctaccaggcttctccctccacggcattttccaggcaagaatactggagtgggttgccatttccttctcgggggagtcttcccgacccagggattgaacccagggtctcccgcgttgcaggcagatactctacgctctgagccaccagggaatgtaaaaaaggacagcaagagaagggctctctgaggaggtgaaatttgggttgagacctagaaggtgggggtgtgtttcaactaggagaacatgccttctgtgccaaggccttgagaaaagtgcatgtgacgtgtcctcacaggaaggccaggctgagcaaggggagaatcttgggagataatgctatttcacacttcctagtcttctgcatcgcatcttctcacacatcacacagaactcatgcaattctagcaaggagaagtgactctaaccaggtattctggatagatggctgaacatgagccctacaggaagtcttcaaagacaccatattaaaactgaaataagaattggcattcctactcggcagctatagactttttattgtcacagtgtcctccaacaacttcaaaaaagaaccagaaattgcatggaccctgatggtgcaaactgcacccacagtcccaccttctacagagcaggacaccccaacacagagggggcgacacggtgcccggtgggcaggtgcagatctgaatccgtgaagcctgatgctctgttccaggcaagaggctccaaacctgatcataccgttattactatctctcttcctccctgtcatcctggtgcttctactgccctgggtttttattccctccccagtgccaacgctgggctcaccagcaccttggctgtcacagtgacatcactgggggcccacagggaggccagctttgcgtcaagagatacaggcaagg

SEQ ID NO: 30198 - DNA, 1599 bp, Bovine  19866880428535
  misc_feature (1)..(1): n is a, c, g, or t
naaaatacttgaccagaacgtctcaaaactgtcagggtcatgaagaaggaggacaatgagagcagacagacactgtcacagaccagaggagacaggggagactgtacacccgtcacctggtatctcgggtgggatcctgaaacagagaggtgacaggactggaaaaacagatggaatctgaggaagtctcgcttaattaagggtagtatagcaatgctggcttcagcgccgtgacaactgtaccttggaatatgcactgtgaacgagaaagaagatgggcgtggtggggagtacaagggaactttctgtaatatctttgcaacttttctgtagatctgaagctgttgtaaaatcgtgtgtgtatgtgtgtgtgtgtgtgtatggtagggcctctctttcaaaacttcctgtctccttcaagaacctgctccattaatccacccctttcctgcctctgctgcctgtctcagccgctgttttactttctgccaacacacagaggaaggtttgtctgtcccaaaaaaacccatcagaaaacaagccctctcttcctccaactgcattgctcctcctggctgctctgtgctttaaccccagagtttgtagctaaaccatctccgagtcctcactcagttaggagtccctgtaacgtcccctgccctcctctgacccctgtccttcacgcaggatggtggctgttgaaaggatcagacggcttgggtcaccaccaagtgtgaaggcttctactctgtcctcacactttttgatctctgagcagtgacattgtggaaccctgccgctgcctcctcttctgttccttagatggaatcgctccagcaagcccttcctcctggacagctgccctggccatccaggccggctgcttccccaccaggatgtccaccccaggaaatgtgacccctactccacactggtctccccagcatcctcgccccctccctttctgtccacattttcctggagggcggggtgacttaagtcatttgagtagctcccctgccccatccacacttgggaccaaagcagtccttggtaaatcattattcagtgagtgaaggctgagcaccaaagaattgatgctttcaaactgtggtgatagagaagcctcttgagagtcccttggacagcaaagagatcaaaccagtcagtcctaaaggaaatcaaccttgaatactcattggaaggactgatgctgaagctgaagctccgatactttggccgcttgatgccaagagccaactcactggaaaagaccctgatgctggaaaagcttgaaggaaggaggagaagggggtgacagagggtgagatggttggatggcatcactgactcaatggacatgagtttgagcaaacttcaggagatagtgaaggacagggaagcctggtgtgctgcagttcatggggacccaaagaggtggacatgacttagtgactgaacaacaggtgaaggacgacttcaataaaagagaagagaatctctgggacttccttggtggtccagtggctaggactccgtgttcacaatgcaggggcccggggttcaatccctagtcaggggactagatcccacatacca

SEQ ID NO: 30199 - DNA, 2144 bp, Bovine  19866880445737
  misc_feature (1)..(1): n is a, c, g, or t
nactctgacctcctgtccccacccaggtaagggacagagaccagtctcccattcaccatcacctgcccaaaggagaaaagccccatcagtagtcatggcaacgaaggatcctaggatttcacttgtagtctctttccacagttcatgacagtccctacacattcatcccactcaactccactgttattcacaaacttgggcactggccggcagctcttctaagataaaggggctctacagaccttggcaggagagtggactcttacaaagctgaacagccagccaggcatctggaacccaaaagctcaggggttaaaggaaaccttgagtccatctgcactcgagagggaagactgactcctcaagacaggctggggaagttgccatttgccaactcattgatgccctatctccaggagcatctaataggaacactttaatctttattttattttggtcaccagatctacagaggctccacaacatatcacaccaaacctgttaaaatacactcacctcccatgatgactataatttttgctgtaaaaaatttggaaagctttttatccttttgaattttaaacatttggctatgagctactcatttaatatatgacgagctgtgattatttttttcagcaatcactgtgcatgttcaagaagtcttgcaagagaaggtctaaccccttaagttgctttcatgtaatgaaatatttatgatttccaaaagaactgaaggatacaacctcttgtaaacaggtaatcaaacatttattttgatgagttttgcagtttcccttttgagttttggagccacacatttttcttaggccctaaacattttcaaaggctttcatctaggccctaaatattttccttcagaaggttggcaggccctagcctaggaacagggcgcaaaatgcctgctggacaaacagcctggtgtcaaccccaatcttctactagtgcaaaaaactggcaccccattgacgatgtaatgctactgacatcagaccctttctgggacttccctgggggtccagtggctaaggctccatgctcccaatgcaggggcctaggtttgatccccagtcagggaactaaaatcccacatgccacaactaaagattccacacgccacaactaagagtttgccaaactcagataaggaaatatttccatcagcagatgaatggataagaaagctgtggtacatatacacaatggagtgttactcagccattaaaaagaatacatttgaatcagttctaatgaggtggatgaaactggagcctattatacagagtgaagcaagccagaaagaaaaacaccaatacagtatactaatgcatgtatatatatatatatatatatatatatatatatatatatatatatatggaatttgactggaatgcgaaagtaggaagtcaagaaacacctggagtaacaggcaaatttggccttggaatacggaatgaagcagggcaaagacttaatagagttttgccaagaaaatgcactggtcataacaaactccctcttccaacaacacaagagaagactatacatggacatcaccaacaccaaaatcagattgattatattctttgcagccaaagatggagaggctctatacagtcagcaaaaacaagaccaggagctgactgtggctcagaccatgaactccttattgccaaattcagacctaaattgaagaaagtagggaaaaccactagaccattcaggtatgacctaaataaaatcccttatgattatacagtggaagtgagaaatagatttaagggcctagatctgatagaatagagtgcctgatgaaccatggaatgaggtttgtgacattgtacaggagacagagatcaagaccatccccatggaaaagaaatgcaaacaagcaaaatggcttttgctatgtaggttatatctggggaggccttacaaatagctgtgaaaagaagagaagcgaaaagcaaaggagaaaaggaaatatataaacatctgaatgcagagttccaaagaatagcaagaagagataagaaagccttcttcagcaatcaacgcccagaaatagaggaaaacaacagaatgggaaagactagagatctcttcaagaaaattagaga

SEQ ID NO: 30200 - DNA, 1387 bp, Bovine  19866880450954
  misc_feature (1)..(1): n is a, c, g, or t
nacacacacactctctatgtagtccaaggagatactatacacacacacacactccaccacacacattggattagccagaaagttcattagggttttttcataacaccttatggaagaacaggaacgaactttttggctaacccagtacaattccatggtctaataagtctgagaagcaaaacctggcaatggacatcagcacatcaaaagctctaaagaatccagcaataaagaaactgtctaacttgcttagctagtgtattttcatcccctcttactgacaatgactgtcaataccctgcctgcaaaacacatcttggaatgttcaaacataaatacagagtgcttagtacaatgcaaggcacctaatatatcttaaaaatggtgaaaagtgaaaaagtgttaagtcactcagtcgtgtccaactctttgtgaccccatggactgtagcccaccaggctcctctgaccatggaattctccaggcaagaatactggagtggagagccattcccttctccgggggatcttaccaacccagggattgaacctgggtgtcctgcagtggaggcagattctttactgtctgagccatcagggaaccccctaataatggtagacatcactatataaagtattcttttcccatgccattcttttccctgcattctacttatgtgaatataatcataaaaaatactgctaatgggaacttccctggtggtccaatggtaagaactttgccttccaacgcaaggagtgcaggtttgactcctgtcaagaaactaagacccccacacgtcttgtgaccaaaaaacagaaacagtaatgcaacaaattgaataaagacatcaaaaaatgttttttaaaaaatagtactagtagtaataatgggttgttacactctggtgtttaaccacacagctaacccacaatagactggaatttgaaccaaggtgcgtccgactccaagtctttatgccatgctgcttccctatccctcagggatgcctggaatagccgagccctgctgccaaggttggaaggggccaatcacgggtcaatgcttccaccactgagccagtgagaagcagcccccttggggaggggggggctcctacctggtgccggatgccatcgtcaccgacgcactgggtacaggcctcctcagggacacagctgccttccagcatcacttggtgcggagggcagaagcagccttccaagggatggtccccgcaggagctcgagttgccctcacactgccgggggcagccactctcacagtggttgtagatcagggagggcgggcaggacacagctgcagagagagaaggagatgatcctcaggggccacagcaaccagagggaagcagataccactgatt

SEQ ID NO: 30201 - DNA, 847 bp, Bovine  19866880460883
  misc_feature (1)..(1): n is a, c, g, or t
ngtcagcagagctggggccagtcctgggcagagagaaaacatgagcctttttcccgggggattatggttctaagtaacaggtgtgaagaggctggcgacttgaagggactttggggatcagtaaagaggtccttggtgagccatgctttgtatgagctgaggcaccacttttctttggagagagagggaatggaaaacatccgtccttcttcctggggcccccccccactttctgggagtaagagggcaggaaagggggtctctctcccccgagtctcgagcaggaaggaaggcctttggatattatcctgaagaagaaagctttgctgtttctggccagatgggtggtgtacgatggaaccaattagctgaaaagaaaggggaaaattcagaatttcaattttcaaagcagagactctttttttttttttttttaaaaagaaaacgtttgattattttcttctttcaaactgatttccatgcttgtttgggagtagattcttggtgtctgaagtctgtggttgagaggccaaagtggtgctcatttttgggtgaaattgtggatatgtggttacttttcagcgtgcctcttcccccccacccccactcctcctcctttcgtgtgccatcccctccctccacctggcagccactgatgggagggcccatatgttatcacctgagaaaggggagacccacagcagcaaggcagagacatcgtctgttacagcgttgtggagctctggtttgatgacctgaattgtcttggctccaaggcaaaaaatacttggtctgggcttcctctcttaggaagcagactagttaaccagggtttaagattccttca

SEQ ID NO: 30202 - DNA, 1604 bp, Bovine  19866880553148
  misc_feature (1)..(1): n is a, c, g, or t
ncagaagattaaaaaaaatcagcaatgattcaaagcttcctttgaggagaatggagggttacttatggaacacgggagctgccttccccggagatccatcaaacatgcatagaaattgcagctacagggctgggtgtgagagttccaattaggggaggcctttcagacacactgcctggctgtcctgggttcctctggccgaggccaggcctggaggagggcaggtgcaagaagccggctgccccagagccctccccaccctgggactctctatcacccgcgtcgctgcctctctctttcccgctgtagggaagatgcaccagcaaagccctgtactccatcgacacggaggatgtgcaggaccagtgttcctgctgctcgccgacgcgcacggagcccatgccagtgcccctgcgctgcaccaacggctccatcatccaccatgtggtcctcaacgccctgcagtgccagtgctcctccaggaaatgcagcccgtgacgcgctgcccgcccgccacggacacccgctgcctcccgctaggctcggcgatctctgctccgcgcatgcgcactctactcccggaccttcccgggctcacaataaaggccaatctatcctctcgtcaaaggctggtggttcatccaggttgagatggctgggctgctctgagccgggtgctgaggtgggggctggggagtggagagggagcccaggctttcacaccagatccttttcaccccgagagagactgtactcagtgcagccactggacaatgaagctgggaaggatttagacatcatctcatccactgccctctccggccccttcaccgaggatgaaggtagctcagagagcgtgagtgacttgcccaaggtcacacagccgctgggtggcaaggccaggttcagaacccaaggacctagacacctgggcaagaaccctcgggctggtccagcagagccacatgaatctagtcctgacagattcagccttgatctcaccggaaccggggagggctgcatttttaggcctttctgcttccgctggataagaacctccagggaagataacgttggaggcaaatggcatgagttgcgttgagtcgcgttggtggggagttttagccaggtagagggaaggaggaatggagagaagttttatataactgctcaataattcaaaggctgtcaccctctatccatcatcaccccacctccaactttgagtagtctctaaggtctctgtgggaaagcagatccggggccagagaattattaatagctgtctctctcctgactgatcgcctgatgctccaccccaggaccgaggtgctgttggtggcatggggctccaagaaactcagtgggaggctacttcttcaacagggggtgccaatttcccagtgctcccatagcccgagttctcctcgtatttactgacaggacgattcgctaccaaggaaaaagctaaacttgaaaaattgcatgttttgatttaaaaaaaaacgtcagggagcagggtaaataggatgctgaaggagaaacatagtgggatgtgaaccaggagctctcccactctacacgctttccaaggggggatctgc

SEQ ID NO: 30203 - DNA, 916 bp, Bovine  19866880580359
  misc_feature (1)..(1): n is a, c, g, or t
nactcgttgagtctaatgaccttgtgaagtaggaacgcctctcctttctttcttttgttttccaggtaaggaaaatgaggggtagagatattaattcagttttctttcctttaaaaaaaatatttatttattcggctgtgcagggtgttagtcgtggcatgcaaactcttggttgcagcatgtaggctctagttccctcaccagggattgaaccctgcgttgggagctctgagtcttagtaactggactaccagggaagtggctaaggcacaccaggacaaaggcacagatttatacgtaggcaagtctgactccagagtctgtgcatttaacactgtgccatggagacggctgcagaaagctgttctggacacagaaggaaggtaagggaaaggtctgaggctgaaaaaggtctcaagaggccagggagttcagctccataacatttgtgtcttcagcccttccttgcccaatcttgacttctggcttccctcctgtttcaggtctccactgccgatgaggctgtgaccaaaggcatcccactgctccccaccttcccccaggccggctgccttgcaaccacaacccacacgcccatgctgaacctccgtttgctctggggctctctgtgcagcccccaggccccggccccagagactggagatgctaggacgtgggtgcgccccctgatgccccgagcctagctcctcggcgcacagtggcacgatgcaagccaactcctcggccaagtctcttcccaccgagtgcccggactaccagcccatccatcatttgcatctggtggtctacagcgtggtgctggcggccgggctccccctcaacgcgctggccctctgggtcttcctgcgcgcgctgcgcgtgcattcggtggtgagcgtgtacatgtgcaacctgg

SEQ ID NO: 30204 - DNA, 761 bp, Bovine  19866880627938
  misc_feature (1)..(1): n is a, c, g, or t
nactctcatctcctgttctagaaaaggcaaactgacccctcatgcagggagtggggctccaggagtgacagctggcttactgctcacctcttagtcccaccgccagcctgaagctccagtgccgggcacaggaaggcagacagaaggcctgggtgatatcccagcttagctcccaactcactgtgcaacactgggcgggcacttcctgcctgcccatgggcctcagtgtacccatccatgaaatggaggactcagaggaccatttcccggccctgccattcccggggtccccagtcccgctgctcgactcaccacatggtgtgatggtccgagaagatgtcttcgggttggaagatctcaccgtcgtagtaacaggggcactgggccttgggcacacaggaccctgtctcgtccaggaagagccccggcgggcagaagcagccctccagacagacctcggtgcattcctcgtccgggtgggagagtgagcggcaggtgaggttgcagggggtcccacactgctggtacacctggccgtgtgggcagctcagtgctggaggagagggcggggccaggacagacacagcggaaacgttacgacgagcaggactgtggttcctaggaccagcagtcccacccgctgcctctgagacccccaaattatacctgcatggtcatcgccttatcttcccactgggagcaaaagtgtgtttttatgctcacaactgtctgttctttttattttttattttttttctatt

SEQ ID NO: 30205 - DNA, 1865 bp, Bovine  19866880660827
  misc_feature (1)..(1): n is a, c, g, or t
ncctcctcctcctcctcctcctcctgcgtcaccgccagcctcgttcctccacccacctctgcgatccccacttcaggacactgactccatgtcatgggtggccccacctctggaaatcaaactgcagaggccccgggattcggggtctgggtggggggtggaccagcaggggtggcgctggctgatgcccctcccacctaacctgcggcttccccccagaggctgtttgctcagcgctgggctcggcaggccgctgggctcttgcatgaaatggcttccaccctttggcacccggacagccggagcccggcaagagccagctgcgtttgcacagagcctggcaggttaggggagaggggagaggaggccaggtgtctgcctctgctcaggaaaataggacttctcccctgcctggctcctgatggcttttaccccctccactttgccctccagtggttatcaacaacaggtctgactcctgatgggggccccgggggcgagaggcgggattcctacacaggcacacacactctattcttttttttcaaaatggcccacagcaccattccagaccttcctctttgtgctccaacgaaaccactgctggtgcagaaccattttgataaacagcccttcggagggctgtcctcaccggaatgcttactctgctaaatgaagccttctgcggttttagacctcacccatcagtgttctcacgcttttcctttttgtgtccaaggtgaatcttccctcttacacacagaactgtgtgtccgtgtttgatgtgtcttgttttcctgttcaattccattttgcaaggaggcccgccttttgggatctgttgcacagtctcgggcttaatacccctgggacttaacacaagcaccttttctactgaagaacccaagccttgattggctttcttgggtacctctggctgtgagatgagggacctgaagtcacaggtcaccatggcttctgtggtcctgtagcctccttggtggatagtctggacagaggagcgtggaaaagtttctcgaagctgcatgtttatattctgtgttccccacctcccccagagtaggatcaggggaactttattgggagccatcacaggtcttttcaaccagtcttgcagaaaccatcattccctctaacctacagaagagcactgatttcatcatttggggacttgaaaatctggggaagagactatcggacccaggttcacccagagatcatcctttgcaaccaagggaattcaggagatcaaaagtgctaaacaatactttttttttttttttttttgaatttatgttttccaagtctaactgcagatacttgcctgcttcgttccgtggaaaaagtaacactggtccagggacatgttcgttttccgtcagacgatggcaggcagctgtggaaagcaacatcctgtgtccagatgagataattttattttaattacatccatccagtaattcttccccgccaccaaaaaaacactgacttctggatagtttttaaatactgcatgctgtcatccttgactggcaagtctgaatttttgggggtgggaaatcccatgaaatcagtaggaccttcctccaaaatcataatgatttgacatttgtataccctgaaaaaagcaccagagtaagtctaggcaccatctgtcaccaaagtcacagccttcttttttcttgagtatatactacatcattttatccatttacaattaggatgtttccatacctcggctattgtaaatagtgccgcagtgaacatcagggttcatgtatctttttctgaaatgagagcgactttcaaatttgcaaaacagtatcacgactacagttgccatg

SEQ ID NO: 30206 - DNA, 1677 bp, Bovine  19866880764775
  misc_feature (1)..(1): n is a, c, g, or t
nttaaattaaattaaattttattttatttttagtcatggcatttgggatctagtttcctgaccaaggattgaacctgggccccctgcactgggagtgcagagtcttatccactggaccaccagggaagtccctcccctctttttaatgggcttgggaagtgactacaaaaagagtaaccgcgtttgcaaggattcgtgtcctggcggcagggggagcaaggaggaagactgaggcatagtgtggggtcacttatcatcttcgtggctggtggaggctggatcataactcagcacggtccggagagaccgggaagatgggcaggaaatccctaaattgagctctcgaacctggacaaatccacagtaatgagtccagggacacggagtcctgagcacagatattaaccgggagggggatcttggaaggaagtgtttgttttccaaaaacaacaacagaggagccagtattttgtgagggacacgcagtgtccctgcacaggatagaggcaggaggcctggcctttggccccgagcagcctgggaaggtttgaagtgcgtgctttctcacctctgctctttaccgaggtggcctgtctagattgtggtcaatatctatgtttattttgcacttttcttatttaaaaaattttttattggaggataatggctttacaatgtggtgttagcttctgctgtgcagcaaagtgaaccagccatgggtacatcacttttttatacatatgaacgagtaccctgccacctgtccccgccatgctcacccctgacgtccacttctcccccacgagctacatcccaggaactggtgaggatgagatgatggagtccattcttgtgttaatgcagcaggttcatccagcagcaaacccatgtcccttgcatagtagcgcagatcttaatcactggaccaccagggaagccccatcttctcattttcatgaactgaaatgatatagaattgccattaagaattttctgatgagagtgagaaaattagtgttaccactgttggactaaataaaattccagttaaaaagcaaagaaatgtggcattttagttaacctgggtggccccttaggaggaaaatattaattctattaagcttcataaattatttggaagttgtgctccattacttattgctggctcttagaaattctgatttgtgacttctgcaaaagttccacaggaagaccctccccaggttcctgatgcccactcagccaggccagaacctctgccttcccagttattcagatctgaggcttgggttagtaaggtttctctagagaaacagaactaacaggattgttgtttgttgttcagtcgcccagttgtgtctgactctttgcaaccccatggactgcagcaggccaggcctccctgtccctcaccatctcccgaagtttgcccaaggtcatgtccgttgcatcggtgataccatccaaccatatgtgtgtacatatattatgtatatacatttgatatatatatcatcctcttctatggagttctccaggcaagaacactggagtgggttgccattctcttttccagggaatcttcctgacccagggatcaaaccccgggtctcctacattgcaggcagattctttactgtctgagccaccgggaaagcccctcctgccctgatgtaa

SEQ ID NO: 30207 - DNA, 1180 bp, Bovine  19866880796476
  misc_feature (1)..(1): n is a, c, g, or t
naaattaaaaaattttgtgaaagacccttgaatgagaattgcatttcatgcaagaagtccaatgttaaaaagctgtgctcactgaagaaagctcaaatttctcattttaagaagtctgggagtttttttccccacttcgggccgcggcgaggaggagccggagcgggagtgacaccgggccggacatataaaaaaaaaaaaaaaaaaagaagtctgggagattccattttaatgttttgtatcaattcaatatttaatatctttcctaatactttgttttacatcttccttcttattctcataattatattagatcaagaaaatagtaatataattgcctttttcccaacaggctttcaaaaggtatctccaaattcccttggtttgccccagtgtcatgtaccaaggtgaccaatgtcatgatgcactgggatttgaggaaggttaggaacctcccacctggctaatctaggatcatttccccatctcaagcttttcagcagaatcatatctgccaagtccctattgcaggtaacacattctggagataggggagccttggtggactttgggagcccattaccctgccgaccgtggcagggtatttggtagtgacttagcaatgctttgtgtcttcaccacttctcccctgaactccttaagcatgactgggtgtacatggagagcaggatgtcatagccccactcaaatgtttcaatgcattaacagcagacccaaccacggccactgctgggggtgtgcaccagctccttctccttctgccctctggagtgccgtctgggcacccatcccagtgccaatgagtcccctccaccttgaaagagttaagtgtcatgaaaagcagcatgcaaagggggcctctggagagcggatgctgtactttaggaaaatgcctcatttgcataggacagcatgagtgtgtgtgtagtgcacagcgctcatccagcaactagggtggggggcaccgagccatgagttagatggggctgccggggtggctcaaggactgtcaggctgttttatcagaggtatgagggctttaactgataaggacagagtgctattctcttctgcatcagtcaaactgtactggaggttgtacattgtgacaaaaaatggcagtgcccagcaaacatttcagggcttccttacaattccc

SEQ ID NO: 30208 - DNA, 1080 bp, Bovine  19866880806935
  misc_feature (1)..(1): n is a, c, g, or t
naacatatggatttgattgcatttccacaccccatcttcctctcctcttgcctggaaaatgaaaagggggaaaaaacagccaggcagggaccaaaatttgtagcatggctttaagcaagcttggagcatgccagggaaatagctggagctggtcaacacattcgaatggcagtggcagctggtcccatcagtaacactgacggccaggaacgtacccgccatcaggcaagagcagatacgcaggtctgccagagggcactgggagaaatggccctcaagtgccaaggccctcagatagccaaggtgccgtgtcatttccctgcagtttcaaaagcagtgtgtagggctgattccacttctgtcctcagactttatcaaaggggtggtatccagctgtgctctgtctccactggaaacaaaacagaaggacttccattagagcaaagggaaggcaattaagacatcaaaaggaatgaccagttgcaacgctgtcttatgaccaggcatagtaagcacatgcctataaatcatctatttacacatatttattgggtgcaactctcataagagttgcatgatgtgtcagagactaaactggatgatattcacatattattaccaggcctcacacttgcactacaggatgggtattatcaacccaactgtatagatgaggagtgagtcaagcaggccttaggaagtatcactacgaacaaagctaatggaggtgatggaattccagttgagctatttcaaatcctaaaagatgatgctgtgaaagtcctgcacccaatatgtcagcaaatttggaaaactcagcagtggtcaccggactggaaacggtcagttttcattccccccccaaagagaggcaatgccaaggaatgctcaaactaccacacaattccactcatctcacacgctagtaaagtaatgctcaaaattctccaagtcaggcttcagaaatatgtgagctgtgaacctccagatgttcaagctggttttagaaaaggcagaggaaccagagatcaaactgccaacatctgctggattatcgaaaaagcaagtagtttcagaaaa

SEQ ID NO: 30209 - DNA, 1047 bp, Bovine  19866880811242
  misc_feature (1)..(1): n is a, c, g, or t
nttgtgtgaaaagggggcagggggaaatgaagctaagtttggctgtgtgactaaacattatctctagaaggaggcgcttaaccactactgttgctgctccatgggaagggaactacgtggctagaaagcaggcttggaagagatttctcatttttaaaaaacatatcattaaagaatgtatacatgtgtataacagttactctgctgtacagcagaaattagtgcaacattgccaatcaactgtatttcaattaaaaacatatatatatatatagtttcccaaaggtgaactctaaacctaatgggtcacgagagaatactgcattctttctcatacttgtaactagctttggctagcaactgacggatgcgtccttccacctcttcgggggtctctgtctccgcaacgccctcagacatcccctctccttcctggggaagcatcagcagctgctgcagggtagctttcaactctggcagcatggcctcccactcctcagcggggtctagctctgcggctgaacgagaaggtttcagactcttgccttgagctccccactgtggggaaaagggtgtcaaggttgagagctcccccagagcccctactcacaaggcgctgtggctcgcctctgggccctcatctcttgtaatttctgggtctccttctgcagtggtccagcaaggtcagtgtcactaagctaccaagaaacaatgagtatcaggatcattgactcgtggaatttcacctgtttccatttaatccctcttctgggtgggccaagggctacgtaccttgcaggaaaagggattattggcaagaaagctggcgagcagttggatggcgcttttacagaccagcaccgacttgtctgccagacgccccacagctaaggccaccactgcctggaaacgcgtcaggggcagagcctgtggggaggcaggaggagaggatcagatcccagcccacactggccataatgtcaagatgatggtgaagtgcactctacatgtgcgagccactcagctgaggaaacttttctacgggat

SEQ ID NO: 30210 - DNA, 1756 bp, Bovine  19866880831819
  misc_feature (1)..(1): n is a, c, g, or t
ntactggagtggggtgccattgccttctctatgcatgtgtatatataggtgtgtatgtgtattgtgtgtgtatatgagtgcatgtgtgtatatgtgtgtataaataggcgtgtatatgtgtgcatacttgtgttcaaaacccaactgagatctactcatcgctgggactcagtgggtgggccccctctgcagagccaggtcaggtccctgataactaactcctccagggttcctggattacaaggatcccttcttgagatatactgaccttccctgaaccagactgtccgggcacagttcctctctctaagaatcacaactattctaccaaacaaacaaacataacaaaattcattccaatctccaagaaaagtctattctaggccatgaatgcaggaggccaggagaggcagcaaagatgccaggagtggacgtggccagtaagccctcagctctgccagggcactgagtccctcccggaccaggtcacctccctccaggcctgtgagcttcctcccagggcagctgtgggcagaaataagagaaagacctgggtacgcactttgcaaataaaaggcgtgggcaatatttcatgaggatgtgaagagtgaattgcatcgttcccaacagaacgggtattttgtgtgcctctttgtgccatgcaggaaacttttatggtcattcaaattaaacatgtgtgtttacaaatgttagctccagcgcagacaggtgacttcttaggggaagaggctttacaggtgaacggtgggctcttcagaggaggaggcaagggggagaagatgtgcagacacgaagagcaacagaacaaaagaaataaggattgtgttcactcacacacacacaaaatgctaaaatcggaaccagtggaaaacaggcaatctgggactgttaggtgactggtaggagcaccactgaacgtgaagtcctgagtaagatttggagaaagcagactgcagggatcttgcttccccagtattcagcgccactgagggggcttccctcgtggctcaagacagtaaagaatctgcctgcaatgcaggagacccaaatttgatccccgggtcaggaagatcccctggagaaaagaatgtcaacccattccggtattcttgcctggggaattccacggacagatgagtctggcaggctacagctcatggggtcacaaccagtcggacacgactaagcgactaacactccttaaatttcttaaaacagcactttcccagcaggtgatggtaaagtgtctcaagaaaagggtgtctttttctaattagaaagaacatcgcatagaccagctgcatcccctacccagcctcccggagccctgggcttcacactgcagacaggactccaggataaaaactaagatccctgtgtaaggttcaacccacgctgacatttcctaggctgtcagaatttttttttttttaagtgacctaaggatctttctaaaacgttcactgtgcagtggagttacctgcaaatgaataccaattatttgagtatctatagtttggcactttttattactaggtctgcaccctaagccccagacgccagcagccctgccctcggagaagctaaatagtactgcaaatctttgtgcaatcaaacaagccattatgcgtcccagtagagaggctccggttttgttggcataacaaggaaacattcattcccccgggtataagtaatatgacctggctctcaacgagctgactccttgctgcca

SEQ ID NO: 30211 - DNA, 774 bp, Bovine  19866880851182
  misc_feature (1)..(1): n is a, c, g, or t
natggactggttggatctccttgcagtccaaggggactcctatgtgtatgtatatatgtaatgtgtgtgtagacatgtgctatgtgtgtgtggtgcatatgttgtgtatgtgatgtgtgtgtgtaaggtcagggaggagtcagggcaccaggtgggtttggaagcatctttgggaagaagacagcctccaaccatccagccatcatctcagaaaggccaggaccagtgaccaggccccttacctgtaaagcaaccattctctgtccgggacccagcctggtggccctcgtgggggctgggacccgatctctcacaccttgcggggcaggaagcttcagctctctccttcctctaaacacagttgctcagctggctcaggtgggaggtgtttctccaacctaccctggagtctggccctggagatcggatccagaagttctgttgctctggcctgggttcctccccagcctgggccggcctgtctgggacagccagcctccctggtccaccggtttgtggggcgctgcctatggaaggatcagggcctatgcgggggccctggagggccaggaggctcattggggcagaggctaagaggcctcccaccaaactgttcaaagccttatcgcctcggaggtgtttctagtaccatttccgtccattgtttcctctgggtcattaggaggaggcctgtctcctgttgtggctgctcacagctactgtggtgggaaaagaggggggcaggcgggctgaccgcagacgtcacgatttggg

SEQ ID NO: 30212 - DNA, 780 bp, Bovine  19866880853687
  misc_feature (1)..(1): n is a, c, g, or t
nattgaagataagctcatccagagagaggacttgcgttgctacagccggtgcttggtggcactgtcgacctggaaatattttaagttcttgctattttgtttttaggaccaataaggaattcagacagaaaaaccacagcattgattataaagtgtctgcatatatttataactgtgttttttgataattttatttatcatttatttttggctgtgctgggtctttgttgctgcacgggctttttctctagttgtgggaagtgggggctactctctagttgcggcgtgttggcttctcactgtggtggcttctcttgttgcagagcacgggctctagggtgcttgggctttagcagctgtggcacgtgggctccgtagttgcggttcccgggctctagagcacaggctcagtagttgtggcacacaagcgtagctgctccgtgtcatgtgggatcttcccagatgagggatggaacccatgtctcctgcattggaagatatattctttactggtgagccaccggggaagccgtgtctgcatatatttaaaagaaaaaagaatagttctctagtagctgcctaggtttcagatgagcagattttctatgtagtcccataggggcagttcagatattagcatattttaaattcactctcaggtgaggatatagtcctttggggttctgactttatggtagggccttccattagatctccaactctacggaggccctgggttctgtctcctctgccacagggcaccctatgaggccaccatgc

SEQ ID NO: 30213 - DNA, 4518 bp, Bovine  19866880892157
  misc_feature (1)..(1): n is a, c, g, or t
natttgtgggctaggctgtctgacacaggctgcagtgatgctctcaagggggcaggattggtgacaggccgtgttctgtcaggcaggccgtcatccttcactcaggaagccatgggccgcttccaggagtctgaacccttctgtcatgtggacccggaagagtcagaggagaccaggttcctcagtctcttaggaaccatcttcaaaggtaaattccttttccttcttcagtcagcaaacaagacacttcagctagtatttatggcccattgactttatgtcagacactgacctgactcacagcctggcactgaaagaggccagagcggggtctgcaatgtgtctgcttgggaacggaagcaacccacaggcctgagatccgtagtcacagggagtagaagggtatttcaagccatagatgactcaagaaatcttttctgagaaatgaaccaagatattttagactaaattctaaatttatactttcctattgggagttccctggaaatccagtggtcaggactccacattcccattgcagggggcatgggtttgatccctggttagggaactgagatcctgcaagccgcatagcatggcaaaacaaaacgttcctatggtagaaacacattctcatggatgtttagaactgttgggtttccccatatacccttgaacaaaaactatcctgtaattctctaactctaggcccagcagctcccacccaggaggagaatccccaggcggctgcagggaacttgggcccaggagagactggctgtaaggacaagcccagtgggtcagagcctgaggaatgcagtgatgagctggtgaagcaggagttgctggtgcaatacctgcaggatgcccacagcttctccctgcagatcaccaaggccattggcatcatcagcaagatgatgtacgaacacacgacgacaggtgtgccggcatccccaccacagaggccagggcttgtggttggaaggacccatcccgtccgtacttgattgatgtccgtctgctcctttgaagggcccagattctctacttccatgtggctgctgtagccctgtggagtgtgcatatagcatttgacagggcactggagagaggtggggtcctcaggaaaaatggggagggtgtcccctcacatgttgttacattaagagaggttctgtctttaagtgttggggcgtttcgctgcgctgataggtgacatttgtgtctgtcctctcagtggtgcaggaggtgattgaattctttgtgatggtgttccaatttggggtacctcaggccctgtttggggtgcgccgcatgctgcctctcatctggtcgaaggagcctggtgtccgggatgctgtgcttaatgcctaccgtcaactttatctcaaacccaagggggactccgccaggtacacgggctgcattgcctttgctaacttcctgaagtcagcctctcccaggaggtgtctagtctcctgaggggaggcgggggagtgggctcctcctaggggacttgtagacccagaggcagtaggtctgtgatggactgggggagggaactcccagtgaaacccaacctaagcagttatttggtttatttttgtttctttttattgaaatataatacaacattatgtaagttacaagtgtagattgtagtgattcataatccttaaaggttatattgtttttagttataaaatattccccatgttgcacagggcatccttgtagcttattttacacaggatagtttgtcctgttagtcccctgccccgtagattgccgccccccagccctctccccactggcaacgactagtttgttctctttgtgtatctgaaatagttgtgtattgtttgacactggcgggattgcctaataacctatttgccaggtttagcttctccgtcttttaatgacccctgatctctgctgttcccatagagccaaggcccagactttgattcacaatctctctctgctgctggtggacgcctcagttgggaccattcagtgtcttgaggaaatcgtaagtatgctcacttccacttactcactcagcaaatattagtaagattatggtgtgctcagcaacttacttagcccctcaaagaaatataagattatttgctttcaactctagttggcggccaaaaaacataaaacattttagagcaatgcagcagatagtttagtggtataggtaacagttattgtagcgacagtaatataacacattatgccaggcactaatttaatcactttgctcgtattaacatgtttcatcctcacaatggctctaggaggcagtattattatctacgttttccaataagaaacttgaggtagagagagcttaaagaacttggctaacttcagccagttagcgacaaagtttaagattcaatctcaggcttcagagttccagaaaccatactcctgcctggtacgttatgttgacgagtagagaagagagcagtgtcaggtcgaagagttgagggcagagcttccgagtcaagggcagagcttcctgaaggtggcaggacttgatttggatcttgatgcatcagatttagagaattcaagagaggaggggaaacatttcagacagacctgagcaagagcactgcctgtgttgtacaaggaagaccgttgcgttctggcccaagattgttacctggaaaagatagtgaagctggaaacgggttggagctgaactgggaagatctgtgggatctaggacttgaaccttagcggccaggggccccagcatttcagtgtgacagagctactttgaagggtttgggtggtagggctcaagggagagatggtgctgaccacgagcctccactgggaggagcagcaccaccagcctcattttctcctcactgcggaaaagaaaagcctgctagaggcgcctggcctgagatggcgcagggcagcaactggccaggagcccatacagcaggccacagagagctgtttccatcagtacttggtgagcaatgctgtggcctgatgaagcagacgtctgggaaagcacagcacacaggctggtgggagccaaagcagggaatgttcctggaggctgctgccggtgtgcagtgacagggatctggacttccggggtgggaggaacagctatagagtggcacttcatggaagacaaattttaaaagggagaaaaggtggaatgagcgaccgatgcattaaaaatcaggtgacagaggtttgaagcatatgagactattcgtggtgttgtcactggcaaaatgaaaaggcaaagatgatggtatccattggggacacattgagttgatgttagcagtgagaaaacctactagaaatctccacaaagtgttgtccagactatagatgtgcacactcggcaaggtcagtttcagcacgtcatctaaagaaacgtttgcaggcaggagattagaaagtagcagaggtggaggtatctcccagaccccagctttacatcttcagctgcctaaggagtttcctctccacttcgggttctcagtgttctcttcagaggaggcagaccaggtgtcagggaatttgttactctggggcctgagccctttttcttttctctccagatctgtgagtttgtacagaaggatgaattgagcccagcagtgacccaggtgctgtggggagcgggcaaccgagaaggtgccctgctcccctctggagcgctgctcctccgtcatgctgcttgggatgatggcacggtgaggctcagatcagacaggccaaggggtgagcgagaagagaaaggttccctgaggaccgttactactgctccagtgagagcactcgggccggctgcgctctgcgtgtgcgtcgccgcctaaatggaggcagttccaacccgcccagcagagtggtcagtggcgcgcaagggatgctgagggccggccccacacgtagtgccccagggctcacgaagccctgggttgggacctggctcctacgctccttggtggtgttccccacacagaggtgtctgagtggctttaactctacggcttcttctcctagaggaaagccagagattgtgggaagcaacttggacaccctggtgaatatagggctggacgagaagctcccaccggactacaggttggcccagcaggtgtgccacgccatcgccaacatcttggacaggaggaaggcacgtggggtgggtgacgtccaacctagggagagtgggtgccccttgtccaccctcgacactcacccgcgttgtcttccctgcccttaacagccttctatgggcgaacgtcaccctcccttccggctgccccaggagcaccgcctgtttgagcggctgcgtgagatggtcacgaaaggtgagctgccgcgcagagcctggggcagaagggctcctctgtctatggtggcagcttccccctcttcctgtgcaggcagcgtccacccagacccgctctgggtcccgttcaaggaggcgggctgtggccctcatctaccagctgg

SEQ ID NO: 30214 - DNA, 2281 bp, Bovine  19866880944038
  misc_feature (1)..(1): n is a, c, g, or t
naaatcaaaggggtgagtggctgatgagggtaaatatgccaggagtatcattttttggttgctttcttgtctgtaattttgaaggtttgaaggcacaatatggtgatgactcctgccatttcatcctttatgtctcccttattactacacagtcatatgaatgcagagaatgaggaggcatcttttaaaagccttaggatactctatatgatgacctcaatattcactttcagccatactaggaaaacttacttttcatggagcaccacctaacagtgaatgtattagagcataaagtgtttggtatgtatgcacctatgtgtgtacacacataaacacacacacacacacacacacacacacacacagcatgaacatctcacacattattcacagtggaaaccactctaatcaatcaacctgattctatggcagttttaactcttaaaatcaatatctcctacataagtaggcacaaacataattcaaatatttaaatatttaagaggagaaaaatcactagaaaaccacgtgaaaaataagaccatcataaataagaaatgcctagcagtgatagtcttaactatgttgtcagtaacacttcaagctggagaatcaaagatgaacttaaaaataaatcataaacaagcaaacacacatcttctcttaatgttgttttaagttctttgaggctctaagatgttttagccaatgttacccattcaggatctccccttttaggactccagaccgaaaaagttggaagtctcaggaaatgtatgttttcgtgagtttttcagttctgcaattttaatgatccagcgacacaaacttctgacctttggttgctctctagatcagagcttcacaggtggagtgctgctttctgaatcgctaatagaaaataatgcatagtgtccctcaagatatgctaaacaaggtttttaaaagtattttatgttatagcactttagtcttttcaactagatttcagtgacacaatggtgtaaatgctgtatttgccataacttactggtggctcctgtgttacatacggttttaaataatgctctaaattgtttgttttcccaatgacaatgataaaatgttctgtggaatttgtaaaacgtgttgattaagtctattgaaaattgtgcactttttatttcatttgtgatactcttttatagttattagttctaaatgtgtatttgtatgagtcagaagtatgtgcttgtatgtggtgtgtgtgtaagtgtactatatcttgtacaaaatcaaacttatcctaaagaaaaagggcacattatgaccagccttaattcattgacatttttgttactgttgcaatttgggattaaaatttaaaaggagattatgtttttgttaaaaatagccttttttttaaccacatgaggaatgtgcattagtacttatttgagttcccacaagcaaatgatgcagcctgtgggatacccaatgctctttaagtttcaaacatcaattaatttattaacttcattactgtgcaaagaaactaaattcagactcacttccatccacaagacagccagtgcacttctaaagttgttcttccaaacatggaacccatttttcatggaacccatttttagggaacccaagttttctttaaaaaaatgtttctccaaaacattacttaaaaaaaaaaaatgagtcttctcaaatataatgaactgccttggctctgtgagagtcacgaaagacccatcaacattaggtggtaccaatgtgattccctttgcaaaaaagcaggaagcaacactcctgaatttttgctatctgcctaagtgcattcaaatactaatttaaggatctgcactggtggtcatgttcaaagcaaaactctgtaatctttaggtctgggatcttggtacaggatattaatctaccttcttttcttttactccatcttcagttgtgtttgtcccatatttaaggttgctagatagaatactggacacccagtgaaactcaaatttcagatacacatgaatatttttagaataatatttcccaatatttcatgagatgtacttatactaaaaattattcattgtttatctgaaattcacatttaattgggcatttctgcattttttttctaatcttaaatccctatgcatcctgtcttttacagtagggctacctataggggataatatcctacctctttccacactcctgtgttaagacagttcatgaaaatcagtagtcttaaatacccctcatgaaggaaaat

SEQ ID NO: 30215 - DNA, 2050 bp, Bovine  19866880949591
  misc_feature (1)..(1): n is a, c, g, or t
ntgcttaataatgtaagtctcctagacagaaaattcaatccaaagcacaacaggcaaatcaggtcttcattccaaggaaagcattacaaaggccacaggatggcaagccaggaagaaatgccttgccttctatctctaacgtctgtctttatctctaagccagcttccagatgggcgcccactcccagcagctgggagctgggatcccagaactcttcctaagtccttgagcaagaaaatccccaccagaaggaaaaaaacagcatgccagacgccagagcagagccaaaggcttcctgcacgtggcccgacggccaggaacccagcccagcacagccatcgcaccccagaccctcggccacctgcccaacctcacctccaagtccttctccagctccagcccagcctccatcaggttgtgctcaaactcctctcgctgctccttcctctcctcctccagggcatcgagcggccccagctcgatgtcaccgggagcccccgcctgggggtccttgcccgtctcgccattggagacgatagccagattgtggcccggggagctgtggccggggtgtgccccgcgtttccggtagtggtaggcgagcacgtagtccaccttcctctggctgtcatagaagtgcatgcggctcacgcgggcctccgaggacaccggctcgctggcctccaagtaattgttgatgacctggccgaagaagaggggacacggagcggtgacatccagtgagggaggggcgagaggcgcgggaggctgacctggcgctctgggacctgggacggggacgaggaggccaggccctcacagcgaaaggacagagaggcccgagttcatcggccaggccgccactcctccgccccagccccgggtctagccccggcccacagacgcagcacacatgcacgctcacgcacacagatgcacatgcagcgtcaaccctgcgcatcccaccaccggcctccctccgcgcaccaagccccattccagcacacgcgcacaagtcgagcactcagcctcacaccggcgcacactgtgcctacctgcatcacccacgcgctctgacacgaagggccccccacatgcaccacgacaccccttcctctttgcagaggtgcaggcctgcctgcaaacacgccgtactcaccggcaggttctctggatccattggaacaaaggccgatttctagccgcctggcccacccgactcctaccccacgagggattcactgtccactctgcgcctcacagcgccatatcctcctctacccgctctccgtcctccccagccactggcgaggaccctgccagagaggctgcggtccactcccgtctgctcctggaggcgatgggaggttgagaagaggaggagaaagaactaggtggagccgggggagggacctgcctcccgctttgggtgtttccctgtttattaccagtttgatacccagctgcctccgcagccacctgagaggtcacctgggcaaccagatgaagcgccaggcacaggggagagcctcagaggcgccccagctgaggtccggggagggccggggagcttgcaggccaggggtggggccacccggcctcttacacctgtcttccccatcctcctctgaccaggggacccagtgctgctgggacagtgtgccatcccgtcttggagagacaggagataaagagagcctaacagaaaccccgcccccacacacaaacccacaatacacaccccgtgcccccaagtggaaggcatcccacaggcctgcccatccacacgccccagtactcacagagctgttgggggcgctccctccgccggacgcctggccggaaccttgggggacactgccctgcagaccctgggctgggggacccggcgcctggaggcactgctgtccgtgtttggggccctgaccccctctgaccactgcccgcgggctcagccggcgtggggagccagggagcaaggggatgtctgtgaaagacaaggacacagagggacagcagcttaggggatgggaaagcatggacacagga

SEQ ID NO: 30216 - DNA, 1694 bp, Bovine  19866880976388
  misc_feature (1)..(1): n is a, c, g, or t
nataaacatacaggaagtgaaaaatctataaatttgtttgggaataagctccaatactttggccacttgatgtgaagagccattggaaaagaccctgatactgggaaagattgaaggtaggaggagagggggacaacagaggatgagatggtttgataggatcaccaactcaacggacatgaatttgagcaaactctgggagtcagagaaggacagaggagcctggcatgctgcagtccacggagtcacaaagagccaggcatgacagcgactgaacaacaaagacccagtgatgaggacaagccaagggtatgttccttcccctccatggtctatgggaggatgcgagtaaataaaaatgagatacagaggcttctttacctcaggtccaactgcctcctaataaacccaagagggggatgcctgcagctgtgcccacgcctgctcccccgtcacagcctgtgactgggaggagtcttagaggattcagtccaggtgtgaccttgacccttctgttccagacacaccccaagcccagactcagctcactagaatacaggacaccgtcccaggccaggggagagtgactgcacggccccctcctcaccctcagagggaggactcaccacaggtgaagctgggtctgcactcgccaggattggccagcaccggctggaggccgtcttcgcagttaggcaccgggggcacgtcacagctcaccaagtcacacactgagggccagaggagggatgggccctcagagtccagcaaggccactcctgtgctactgagtggttccctacatttctacccatgagacctccactgtttacacacatgatggcaatgagataaaggtagagctagagatggagacagagggggagctggagatgaagagagagatgaagatgcaggtggagatggagatgcaggttcagatggagatacaggtagagatggagatgcaggcagagatggagatgcaggtagagttggagatgcaggtagagatggagattcaggcagagatggagatgcaggtagagatggagatgcaggtggagatggagatgcaggtagagatggagatacaggtagagatggagattcaggcagagatggagatacaggtagagatggaggtgcaggtagagatggagaagcaggtggagaaggagatgcaggttcagatggagatacaggtagagatggagattcaggcagagatggagatgcaggtagagatggaggtgtaggtagagatggagattcaggcagagatggagatgcaggtggagatggagatgaagttaaagacggagatacagagacaaggagtgggtagggggaggtgatgataaataaatatatacataatagacagatgatcaatagacagataacagatagatccaagatataggacaaactcatgttaattattcccatcatctgcagggactccagatctaggccaagtatcttgaaccctctagacctcaggatcaccttctgtaaggtgggaagtccaccacaccaggccagtctaaggctgtcctgaaataatggcagcaaagtgtccagcacattgaagaagctttgtactgtccataaatgaaagccttgaactaaatgaccacctgttccctctactgctaacaacccaagacgacggcatagggtcccaacag

SEQ ID NO: 30217 - DNA, 1610 bp, Bovine  19866881053719
  misc_feature (1)..(1): n is a, c, g, or t
nttaaagagttgagagaaaaggaaaaccaactcacaatactatgtgaaattatgcttcaaaattgcaggacagggactttcctggtggtctagtggttaggaatacaccttacaatgcagggaacacagatttgatcactggcggctcatacagtaaagaatctgcctgcaatgcaggagacctaggattgatccttggattgggaagatcccctggagaaggaaatggcaatccagtccagtattcttgcctggaaatattcatggacagaggagcctggtgggctcacaaagagttagacacaattgaggaactaacactttcactgtcagggagttaacatcccaaaggcctccaaacaactaggcttgcgcactacaactactgagcccacatcccacgctacaactaagacctgacgcagccaaaaaagtgcaggtcaaacagaaactgagggatctgctgccagtagatttgcaagaatgacaagacttgttaaaacaagttctttagaaacgtccatgtctgtataactgagtcaatctgccatacagcagagactggcagaactttgtaaatcaactatctttcaattaaaaaaaaaaaacagttctttagcgaggagggaatcaggaactctacataaaggaaggaagaacataaaagaaggaataaattaagggaaataaaaactttatatgtgaagtagtatgatgttacttgaaagtagacttggattagctgtaaatgtatattgcaaactctaaggcaatcactaaaaaaaaagtaaaaaggaagaagtttaatccacatactaagaaaggaggaaaaaacgaatcacattaaaatctcagttacaatcacaagtggcagagaagaaaaagactggaacataaaaacagggaaaaaaaggacaaaagatagaaaactgtaacatattgtagacatcactccaattatactcagaatcactttgagtatcaatggcctaaatgcatcaattaaaagacagaaattgtcagagtggattaaaaatatgacccaagtatatgttgtgtacaagaaatccattttaaatataaagacacatagattaaaagtaaatggatacagaaaaatatactatgctaaatataaaaaaaagcaggagtagctatattaatttcagatagagcatacttcaaagccaggaatgttatcagggataaaggacattatataataaaaaggggatcagttctgcaggaagatacagtgatctttaacgtgtgtgcacccaacaatagtgtcaaactatgtaaggccaaactgcaaaattgcaaagagaaatatatgagtccactattttacttagacacctcaagctctgtcagaaatggacagatacaactcagaaaaaatcagtaaggacacagttcaactcaacactatcatctatcagctgggtataaatgacacctaaacaaacttcatccaacaacagcagaaaacacattcctctcaaactcacatggagcattcaccatgatagaccacaatctgggccataaaatacgtcttaatagatttaaaagaatagaaattatacaatgtctactttcagacaaca

SEQ ID NO: 30218 - DNA, 1226 bp, Bovine  19866881068047
  misc_feature (1)..(1): n is a, c, g, or t
ncaggcaaagacatgggggaggatttggccttgatgaaatgacactgtggatttgctgtcatttttcattcatcattgttgaaggacctaaaactgtagggtatttattattccaggtactgagatgggaataagatctcataagctaccagcctgtaaaaatgctaaccagcgcctgtgtgcctggggtacctgggtcttagagattctgcatctgtcctctctgagtatctgcaggtgaaaaaaccccaccccttccagaggtgcctgggaggatgatggactggacacccagcagccttctcttcctctctgttaaaataacatcacatttcccctttggattagtgtctttactgtcctacagactaactaactgctttacggtgtgattgactgtcccagggctcctgagtggggctcacgtgtgtttctgacttcagaggggctagagttcccagggaccttgcatcctagctgaatgctgagtgcagggctcagcgtggcaggaccagggcaccactttgtgctgcccctcagtctgcaggaaggaggaatgcccgaaggggtccccaccctcctgccccccgcaccggatgcccgcccttcggaagacccggtgctgtgacgagtacgagtgtgcttgcaactgcaccaactccacggtgagctgcccgctggggtacctggcctccaccatcaccaacgactgcggctgcacgaccaccacctgcctccccgacaaggtaaggctgcccggctctggctgggatgatggccagacacgtgcttctcgtggaagacgtgccttcctgcccggatgagtgctgtgtggcctggtgggggggcatcagcattctctcttagcctgattcttgttagctcagggggtactcggagactaccgtgtctcagcatggctgcgtgctgaggttacagacgtggtgtaagatacagtcctgcctttaaagagctcctgtacagaagctggaagactgagtgggtgtagtgaaagtgttagttgctcagtcacgtctgactctttgtgaccccatgaactactgtagcctgccagcctcctcggtccatgggattctccaggcacggatactggagtgggtagccattcccttctccaggggatctttcccgacccagggatcaaacccaggtctcctgcattgtaggcagattctttagagcaagtttaggaaaatggttttaac

SEQ ID NO: 30219 - DNA, 1730 bp, Bovine  19866881098511
  misc_feature (1)..(1): n is a, c, g, or t
nccaggcctcctggggcctaaggactggtcatgttcacccttatgacaccacctgctccttcactcagcccattggagaactgtgcaagctgatcacatcccttgtgaccccctccctcacctggcttttagaaatacttggccgaaacccttaggagatcttggggatttttagggcaagagcggcctatctccttacacagccctgcaataaacctttctcttcctcaaactccaatgtttcggtttgtttggcctccctgtgcattgggcacgtgaacttgtgctaacaataaaagctttaaaccagcaagaattcaacccacaattcccccggcagactgtggttcccctttctctagagtctgatcagtcttcactggcaagaatagagcatccccaagtagttagtgggcaggccaccacaaaaagaattaaaaactgaattggggggagggttccaactcccagttatacctcaaattataaacacagctcgacttctgtacttcaaattataaacctggtctgaaaaatcaccaaactacgtagaaacatgatgttacactgacagggaaaaaaaaccaagccctgttttctaggctattaattcacctctctgcttaaaccgactccccagccctctggcctcaagaccacatggctgagatgaccgtcagctgagaagtgttcacggaaggatgacagagccatgctcgcctcatgcctctttccgttacccggccccactcccctcctggcccctcccctctggccttgaaccagagggtcctaaagggacttccttgcccgttcctgggatccccgtcccaaccgcccccacactgctcccccttaccggccggcagatgtccgcgcagggtttctgggagcactgggccacgcgcaggcccatcacagcatcctccagatccgtgcaggtgcaggtatcacagccctcctcccagaactggcccacggggtagatggtgcctcggtggacgcacacctgtagacgcaaggtttcctgagtgaattcactcggttcatctaaatgagaggtgagtgggcatctgctgggatcttccctggtggctcagacggtaaagcgtctgcctataatgccggtagactcgggttcaatccctgggtcgggaagatcccctggagaaggaaatggcaacccactccagtactcttgcctggaaaatcccatggacggaggatctacgtgttggaagctaccctaggtgctaagactacagcagtaagtgaaacagcatggtctctgcccacactagagtctggcctcttcccacccctgcccatctaacttaggaaagcccacccgtggactggccccctgtgagtctttcatggtccttgggtggggatataatacactggctgacctgactcactatcaccgctcccttcgctgcattaaactccttcctgtgtccctcggaaagctgtaccctagttctcagacttagtgatgtccttgcactcggaacccacccatgaatagccctctgtcccgtgaggagtggctgaaagtgaggggcggctgggcaggggctatgaacgagtgctcccttgaggcccacaaaggacgagggatggatcaaacaaaggctcgggcacggactgcgagctgtgtttgcggcacaggatccgtttggaagaactgtagactaggaaggagcctgggacatgcgatcccagcg

SEQ ID NO: 30220 - DNA, 1171 bp, Bovine  19866881216672
  misc_feature (1)..(1): n is a, c, g, or t
nctcatctgtccataggatttccctgtcaagaatactggagtgggttgctatttcctcctccaggggttcttcccagcccaggaattgaactcctgcattggcaggcagattctgaaagcttgctgctgcaagctatgtgttacaccagaattcgtgacctctggaggagaggatttctatccgggctcagagatgaggcttgactacttagagctttttgtgtagcgaagttctattaaagtataatagagagagagaaagcttctgacacagacatcagaagaggacagaaagagtgccctgttgctggtttttagcaaggcattttgtgtctgttagcaagctgctaatcagataagagagattcctcaaggctgagggagtttcactaggcccctctcccacaatatgcatttttgagatagggcggcacaaagtgtgtcatccctggccgtaaaacaattaacatgaatactggtttgttgagccattatcaccccaaggtttgagaagagaaaaaaaaggttagtcttaggtgaaactattttgaagaaaggcagattccaaagcaaatacatcatttcactaacatagcttaaaaaaatatttccataagaaaaattggttagctcaaggcagaaccaggtgctattagaagcccctttaattttgttgtagagaagggcaaaaaggctgccacttgcagcttatttcctcctgccacttgggcacctctggccttcctctgttaccctttcaattctttaccatctgacccaccagggaagccccctgcagatgttagatgtcaacttaattcttgccgggacctaagtgattaggttacgctgctctggctgtgtttattcccctgtgtagagagattggacagaagtgtccccaggagctgagtcgggaccctacgggggcaaagggttttgcagccttcctgacggaactagcagagcgcatcccagccatcctgatgtccagcatgtgcattctgctagaccatctggatggagaggtaggtggtcgcttggtcagtgggttgtgagtccatttttgaaaggctgtttcttaacatgaaggtagtaactttcacatgaagtcaaattgtctcggcttatcactgtggcaattccttcctgtagagaagcagataagttt

SEQ ID NO: 30221 - DNA, 1921 bp, Bovine  19866881246719
  misc_feature (1)..(1): n is a, c, g, or t
ncccctgccctggctctgcctgcccagtgaagctgcccaggtgggcagtcgtgcccccacagagtctgtgccccttggggggctactattcctgccccacagccagtgctgatgtcccttcaaggatgctcttcctgggtcccctccctgactccccttcctcctttgggaggtgttctcaggactaaaccctccccttcagaaaaatctcagctggtgacacagcgcttctacctttgttccctcttacaactttcacaatcccattaacccaaccctaacccgtttaacccggcaatcccactaacccaacccaaacgcattaacctgacgaccccattagcctgagacaaacccgtttaacctaagagtcccgttaggttggctaattccatcttacagaggggcacgtcctacgtgtggtatgtatgtatgtgtgtatgtgtgtctatgtatgtgcagagtgtgtattgcatgtgttatctatgtatgtacacgtgggtgtatgtgtgtatatgaatgtgtctgtatatgtgtgtttgtgtgtgtatgtgtgcacttatgtgtatatgcatgtgtgtgactgtgtgtgactgtgtgtgactgtgtatgactgtgtatgaatgtgtacacacatgaatgcatgtgtgtatatgtgtctttgtgtgtatatgaatgcatgcctatatgtgtgtacatgtgtgcatgtgtgcatgtatgtatgtgcaaaagtgtgtattgtatatatgttatgtgtgtgtctttgtgtgtatatgaatgtgtgtctgtttatgtatatgtgtatgtgtgtgtatgtgtgcaagtgtgtattgtatgtgtgtgctgtgtgtgtgtgtgtctgtatgagtgtgtgagtcagagaggtaagtgacctactcaacatcatcccagatgtggcagaaacaagcccgcacctagcttttctaagttgagtggttttccccatcacaccacagtgacagccacgatgggaggtgtttgccagaagcgtgtccctttctgctgcttttctgtgtagaccccagcgaggaccagtgccttctagaggtggcagctcagctggtgttgctgggtctggcggtctttggttacagtcctggccagccgcccaggggactccactggagcttggatctaccaagtgtcgcatgcctgatggtgtgggtccctgctgaggctggcccaacaggctccggggcggggtgggggatcagcaggctgatgtgtccaccttccgctgtctcccttcttcctccctcctgcccctcagcccttctccctgcctgactgtaggcgcttgctcatggctggtggctgaggatggcagtcttgtgagtgtcgtctggctcatgaacacacaagcgcacacacacgtgcatgtggtcatggcagcctcctgtaacactcccttcaaaggcctgggagcaccgaccacgggtctgctggtctgggcaggggtggaaggatcgtgtttctctcctgacatccacccctttccccaggaccactgtggtagtaaccccggcaccttccgggtcctggtggggaatgaggggtgcagcgtcccctccctgaagtgcaggaagcgcatcaccatcctggtggaaggaggagaaatagagctgtttgacggggaggtgagtatgggctggtgccccaccctcagtgcccccgttagctgatggggagcagtgcccagcattagttcaggacacgtgcgggtggagcacgatgctgctggtggagagacctcaccacgtcccgcgaggggggcgggtgcagatggtgatggatttagtaaaaggaagtgcagacatgtgtggaggagggtgtgtaactgtatttgcaccagtgtaggaagagccagggcggacttggggggtagtggagggtgggagga

SEQ ID NO: 30222 - DNA, 1443 bp, Bovine  19866881247707
  misc_feature (1)..(1): n is a, c, g, or t
ntcatctctggattcaagctggagtgcaggaagaccacctgccaggcctgccctgcggtaagagaggctgtggctggggggaccgggggggggagctgggcacttttaggacccaagcaatgggacctcactaggatctttaaataaaaactttgatgattttctgattctgtccagtatctgacaactgtcaggaagggactaaaagtcacctacccagattgcatttctcagaaattattataatttagttttgtacattttaaacattcttttagtgtatttgcaaggctgagaccatattcacaattctgtattctttttttaggcaacattttaagtaacatcattactgatctttgaaagcattaaaaatcagtcaaatatttatccgacagttaccagttagcccacaattatttatcagacacttgctatgtgcagatttctacacaacgttctctggagcggacctgcctcaaagtgtacttttattattgcacattgttgtccgactctttgtgaccccatggactgcaccctgccaggctcctctgtctatgggattctccaggcaagaatactggagtgggctgccatttccttctccaggggatcttcctgacccagggatcgaacccaggtctctagcatttcaggcagagtgtgtaccacagagccgccagggaagctctgttggacactggggtggtctaaaatagttcaccccgtttctgccaggtcacgatgatggtatttgctttgaatacctctgcaggtgggatcagggatgtggaatactcatttctagtggagtagaggagagcatgcacttcactggtctaatcacgactcttagcaaacccttcctcccccgcacagagctgcaccagtgctgaggaggataccctggcttcttctgcaggctgccccctgcatctggggctcctgctgtcctagaaaatacagttggtcagatgagtttgttgtgagctggatgcacagaatacataatgtaaccactcttttaggtggtggagcagtgggtaggggctggacggttcctggagaggagtctctcatcagaggagcaatgcactggccagaggggaggtgcgatggggcgagggatgaggaacgctggagcccgtgtggtcagcactcttgaggacaggctgtgttctgcacctgggcactgtgtgaggctccaagggagtgaagggaataggatacacattgtttctgatagaacggctcaaatagaacatccttgcctcagttaggaagaagggaccgaaatacgtgtttttacttttttaaaatttaaaatcccagttgttttagggtttccagtgcaagtgtgtgtgtgtgtgtgagtgtgtgtgtgtgtgagacaactcccctgatacatttgggcttgaatataggaaggaatgatgctgt

SEQ ID NO: 30223 - DNA, 924 bp, Bovine  19866881265424
  misc_feature (1)..(1): n is a, c, g, or t
nctccactcagtagaggccaatccgccaatctctcaagtctttaggctgcattcagctccctgagttgtgttcccctctcaacctatcacaggcaggggtcttttctccacagcaccgaaggacaagggagactgtgagaggaaccatctaaggaggccagagtagaacaaatagaacataggagtccgacctcccagcccacacactcctgccggccactcccccagcttctagactccagctttccctgggaaccttgcctcccagaggggctgaagtcaggccctggggcagtggctggtggagattggatctcagcctagagggaagtgaaagggttaacgccctcatgtccactgggccagtccagccagctctccccagagcctgtaagtccgggcttgcctctggtctctcaatttcaattccattcttactccctccacttccttcctggagaactgggagggcatccttgccaccagcagtgtctggggtgtcatttaatactgccagtaatcaccacctcctgtttactggctgtctttccctcatggctagtcttgttatctctgggtctctctctccatctttcacacgcacacacacatgaatgggaaaaaggcttctctccatcccagttcctgccccatcctactgctctccctaaaactgatccgaatcaactggaaagcaggaaacaagaagtaaggatgtatagagctggagataccaacatctcttctgaactacaagagcggggggggacagcaagctcagaacaagagaatacttggagggcaataggagggaggtggactaaattagaaagtatcaaaggataaagatccctcttccacatcaaaaagagccgtcacagtcagcgaggactggaacacctgaaattactggtgggttcaata

SEQ ID NO: 30224 - DNA, 806 bp, Bovine  19866881311549
  misc_feature (1)..(1): n is a, c, g, or t
naccacatttgagccctgggatgaaaaataagagcaacatactttaaaaattatttatgattttaagcacatgaaaggcgtatcatgtacccggggagggcataatggggaccagctggtgaacatgtgtcctgccatttctgaagatgttcttcattctcctatgtccaagaataacagtaataatgatgcggccgctgatcatattaataatactaaagtggatcagggcgcctttcctggaccctgtggaacactggggaagagctgggctgctgggcttggtggggggctgagagggagctctggctcgcttccttcttggggaccacggagcctttccaaggatcagaggtttgagaagagagcctggatgcggaagtcaggaagcctgggtcctgagggctgggttcaccccccatgctggcagttccccacttctctgaggctcagtttcctcatctgcgactcagtgtgcaaatgcagctggtgggactggcttgcagagtctttgtggatcctgctgacatggagcctgtgggattccagtgctggttgcatggctgagcattgtgtgtatgaagtgaggaggggtcctcctcactgctgggcttcttcagcccttggagcaatcaacctctaaactcagcactggtacccaggagatgcccagatgtgtgtatgctatgaacaaatgtttccttttcatgaactgtctagagccatagaaggttagacttggacagtactttaaaagccatttagtcaagttctgtcttttataatccgtaagggattcggagagg

SEQ ID NO: 30225 - DNA, 1642 bp, Bovine  19866881311571
  misc_feature (1)..(1): n is a, c, g, or t
natcgtcagggaaaccgcacaagcccccacccccctcgggaaggcagtgtccaccctggggcccacctgatcatgcagaacttgcccagcgcgagtgaagccgctgtggagagctctgggttgctatagagaccagggttgttgcagactttaagcagaagtggaacaaaggcagccagtgtctgtttgcctggttaaagaacaagtcaaggtgtgggacgggctacctggctggggaaggctcacccagcagcccttctcaccttccagcagctccagctcacagatgccgcggatgagttctgcctcagtatcgtcagctgtggccccacccagccccatctcctcctccaaggtggactcagactttgaattctgatgggaaagcagccagggatcatgggtgagcagacagttttgattccagcctacccttcatttcacatgaatggatctggggaagggcaaattctgcaaagctcttcacaggcttgtcacgtgtatctgaagagcaaagcctcatgaattaaataggaaaagtactaaatcccctccatttgtgtctaaagtggccaaagcatcccacatctcttccgattcatcctcatagcagcatataacttcctgaacaaaataaatcgatggaacctgccagacaacggctcaaggtcacagagaaggtcagactttaccccactgctgcagggctgtatctcatttgtctgccagacatcactgcctctagtggagagaacacaaggtcccatcaggggccaggcccagtctccaaggctgccagcaaggcggtgggagtgtgcagggtctagcaaacactgcctcgggcacagcctggattttatgctgaggcccctacctcgatgttctggatttacctaaaacacctcgtgggtgatccatttatgttctcactaatcgtttccaggttatcaggagcaaggaggcagagcccccatgagctcaatgaataggagagaagcagagctccccagaaggaacgtaaaggacctgagggccagaagcgagtctgggcaagacttggggcaggaactccaaagtgcaggcgcgccgctcaccttctccttgggctccttcctcttgtgttcctgttcctcccgcaggactcggcgccgacagagctctccgctcacagcctgctccaggtgcaccagctgctgcagagccacgtccccggccagggacagcaggttcatcaacaggaaggtggggagcacgggcgtctcctctgcaggacgggggcaggaaagcagggagagaaaggccatcaagtctcacaggcccccgcactgttttctctgatggtccctggctcacgtgctctatacccaagcaaggagcaggagggcttccctggtagagaatggtaaacaatccacctgccaatgcagcagacgcgggtttccatccctggcccggggaagatcccacatgccttggagcaactgggcccaggtacccgcagttactgagcctgtgctctagagcctggcagccacagccacggaagcccttgtgccctagagcccacgctccacactaagagacgccactaccaggagaagcccatgcaccacaactacagcgtcatccccactcactgcaa

SEQ ID NO: 30226 - DNA, 1525 bp, Bovine  19866881349369
  misc_feature (1)..(1): n is a, c, g, or t
ngggtggcagtgactgcctgagcgaaaaacagttacgagagagcttcgactgcatcaaaggtcagcctgccaccaactcgggacgactctgagaagacctgccctggaggtgctaagaagagacaccaagcacccagctgggaaggtgccagctgcccccaaccctgccgccccaccccgaggctcgcagtcagcagctggggtgcaggaagagctacacccagggcaggagtcatggcccggctacctccctgctggctgtgggttctggggaccctggcggggctctcggcaaccccaggccccaagagttgtccggagaagcactactgggctcagggaggatggtgttgtcagatgtgtgaaccaggtaagagggggccttgccaggggccagctgcttggggagagacaagaccaggcctgggactggagggaagcggggaggaatgctgcagaggccaagaggcagcccttggagagggcgggggagtggttttcctggggccttgaccctggcactctgctcacaggaacgttcttggtgaaggactgcgagcagcacagagaggcagctcaatgcaatccgtgtacaccgggggtctccttcatgccggaccaccacagccggccccactgtgagagctgccggcactgtaactctggtgaggtgggccagcgtttgggggagcagggcagagagctggtgtggagaagcaagaaggttggggcggggggagtctgagcttctgtggcttcagtggagcccatggtgggaactggggtgccctgggcaaggcatgttgatgtacagggagcgctgagaagaagtggttcagggcaggagtgagcaaagtttgacggactgatgaggaggggtctgtgactacaatcaatgcaaaacaggaagcggctctgggaccctagatttcagatgagcaactcaccccccgttcctaccccctccccaactgatgaattggtggtgttctcagagggcacatttgttctggaacttggaatacatcttcctaaggacgtgacaatacaagctagtgaaccacaacctttttttttttcccctccaaaagccaatgtaggaaagagaatgtgtatgtggcttgacttttattttgtaatttcatcatttttacaattaagaaatgaaatagcagctgcgttgtgaacactgtcatgctttccattttagctagaatttttgaaatgacgtatgtgccagtgtacatagatcgggagcttgaaagtggttcctttgaacagacattctccagcaagatacgattgcgggctatttaactcaagtatgatattacttacctgtaaatgcattgagtccagttagctttttcaatactgtattctttaaaataaatacaaggttttgccactgcaaaacagtcaaatggcaacatctgtaacacacaagaggtattcctcagtctacttacacataggactgtcatggggtgtgtctctcttctgggccaaaacccccagcaatatt

SEQ ID NO: 30227 - DNA, 1332 bp, Bovine  19866881370564
  misc_feature (1)..(1): n is a, c, g, or t
natgctactgcttcatgagaagctttatttttatttttaatttttttctggactaggtctgtatcagcctgaaacaagcagaataaacagctcttaagcaaatgaatacagtaatcctagagaaggctccgtgacgaataactttttccatgagtcagaccgaaggctaacatccacttgctttataaaggggaatgctttgtcatttatcaccggcagcctctgctaacaagctccggatgcagactagaaggagcctgtccaaaggggaagccccagatggccttttggagcagcagcctcgccctgcagtggatcaagggcttgctgctcacagctgagccgccctgtggcttgatgtatgtgctcggttgcgtcctttgcaaccccatggactgtagcctgccaggctcctctcttcatgggattttccacgtcctccgtgggttgccacgtcctcctccaggggatcttcctgacccagggatcaaacctgtgtcctgcattggcaggtgggttttttaaccactgagcctctgtggcctgatggccgttgccaaaactcccatagatagctaccagggaattgctcctcttcatccccacccagagagggtgaagccgagacacctgagatctgcaaactgtctgagcgagattgaaaaccgagacccttggtactaaaatctttgctgagcccaggaatgaatatttaatattaactgtcaggcccgttagggaaatgctctctctgcatgggaaatgattttgcctttagtggctctctgaggctaccggtccagcgccccatcttctgccagggtcacccgggcttgtggactgggagctggacagaaagaaaattgtctgatcatccccactcgactctattttatgggcctgtaaatccttttgatctcttaatttttgttattcagtcgctaagtcactttttgcaactcaatgaactacagcatgccaggctcctctgtttactgtctccaagagtttgctcaaattcatgtccagtgagtccatgatgccatccaaccatctcatccttctcctcctgccttcaatctttcccaggatcagaatcttttccatcgaatcggctcttttcatcaggtggccaaagtactggagcttcaacttcagcatcagtccttccaatgaatattcagggtttgatttcctttaggattgactagtttgaactcttaatatgccctatttattcagaccctgcagtgggactcaaaggggtgacctcatcctttcgttgtcacgccctgatggggagagaggaggcgatagggagagacgggccag

SEQ ID NO: 30228 - DNA, 2376 bp, Bovine  19866880388488
  misc_feature (1)..(1): n is a, c, g, or t
ncctaaaagagagagattctgtcatcaagagtagaagtctagggggactgtaagcaaccttgtggaaggagcagagcccagcttaaagcagtgtgtggcatgacctttattcaccagtagattcccgtttctattgaaataaatttttcaaaagtttttttaaaagagtgttcttacatatagtaataaaaaatacacttactatgtatttgaaagaataaaagcattcagttccttggcccttgaatttaaactattttggtgcattgaaatctaacttctgatcctaggtttgaggctgacaagctgtatgacatatgctaagtcttttaacctttctcagtctcagtttccaactctgtaaaatggaaagcataatgtctgccctaaggcctatctctttaagactcaaaaccaaggggaaaaaagaaaatttcactttattttaaaaaacccagcatccttcttcatggtaaaataaataaaatgtatacctagaatcaacagatttatgactgagcagcttacttcatgatttggttctagaaatcaagatcaatccatttggggaaaaagacaaaaaatagacataggaaaatgaacagtttacaaacaatgaagtgcagatatctcctaactatatgaaatgatactcagtcttgctcagagaaatgtaaaaatgtaaaaaccatgctgttataccatttctttacccatcagatggcaaagacttgaaggtttgatgtactctgagggtacagggaagaggcattccagtaccactgctggtgggaatgtaaattgctagaatccctgtaaagggcagttagtaatagacatattgcaaactcacctttttacccagcagttccaattctagaatcatctccttatacataaactaacacatgtgaaaaatggcaattgtacacagtccttcactgcagcattaattataacgtaaaaaagattgagaccatctcaaatatctatcagtggagaattgtttaaataaattcaggtatacccacataactgaatattatatatctattaaaaaatctagagatctctaaaagagatctatgtactaccaagaacgatctccaagatatattgttaagtaaaacaaagcaagaaaaaagaaaccaaaccaagaaagtatgcacagtatgtgtagcctgcttccatttctgttctaaaagggaggtgagaatgtatgttaatgtttgtttatatatgaataagaaatctctagacggatgcacaagaaactagtcacggtgggctacccacggtgggtggggtaggaaggaaacaggtagaattgaagacaggaacgagagggagattttgccccaaattgctttttatagatataattttttgaaccatgtctgtatcaccagttcatagcacagtgtcatccctcactacttccaagtgatgtttaagggttgggacgtttcttattttacaggaggatattctgaatatccagtctgtacatgtgcagttctggtagtaatgatggttccattttttggcatttatattccttcatcttttcccttaatgtctcaggtttctagaagaagggaacttagaagaagctgaaatacaaaagcagaggatcgaacagctgcagagagaaaggcggcgggtcttggaagaaaataaggtggagcaccagccgaggtttttcaggtgtgtaaatggtggggtcctacgggtcattgttggcaggtactggtgacacccgttgcttctggactgaggagagtggatgggggtgtcccctccccgtgagagtgttctcagcactttccctgcttcacagtggtgacgtctgtcctttgccagggccggtctttgtgtggacactgcctccgccctcagtcgtcctgctttttttgcatcccttgctctttccctatgcctctcagcacctcccacaggactttgcagagaggtgctcagtaagagtttatgggagaagcaaagagaccaaccaaacccagctcccaataccaggccaatctgttcagacgggatctaagattggtttctctgcatcccctctcatgagtatagggcttccctgatagctcagttggtaaagaatccacctgcaacgcaggagaccccagttcaatttcctaggtcaggaagatcccctggagaagggatagactacccactccagtattcttgggcttcccttgtggctcagttggtaaagaatccacctgcaatgcgggagacctgggttcaatccctgggttggaaagatccccaggagaaggaacagctatccactcgagtattctgacctagagaattcaatggactgtataatcctggaatcgcaaagac

SEQ ID NO: 30229 - DNA, 3267 bp, Bovine  19866880430161
  misc_feature (1)..(1): n is a, c, g, or t
ntccatggggtcacgaagagtcggacacgactgagcgacttccctttcacttttcactttcatgcattggagaaggaaatggcaacccactccagtgttcttgcctggagaatcccagggacgggggagcctggtgggctgccatctatggggtcgcacagagtcagacatgactgaagtgacttagcagcagcagcagcagcaacagcagcatagctcagttggtaaagaatccgcctgcaatgcaggagaccctggttcgatccctgggttgggaatatcccctggagaagagaaaggctacccactctagtattctggcctggagaattccatggactctatagtccacggggtcgcagagttggacaggactgagcgactttcactttcacttttcggcttttgttaccagcgtgtgatatgctgtgtcaccacaggggcccacaggggcttgtgtgactccagccctggccgctgaggccttggttgtcccgtgcagatggactggtggtgggggtgtcacttttgtcaggccttttggaaacttggccttcaaggaggatatgcccatgagggttctgagaaccctttggtttggggaccaacgggagcccctccctgtttccctgaggaggtgtccgcgctgttggtggccgcccaacagaggggtttggaaagacagtttgcctggggaagctctcctgtttggatttccatttcaagcctttcattttggcttgcttcctctgtcttgaaaataaactcctctttgtgctgctgagcagaggtgccctggggagttcttgggttccttaggctcacttcttcataccccgggccttctcccgccgcctgccctgcctatgcagtgtgttggtcaggctcttgttctgtgcaactcactgatttttaagccggttctgcttctttttcccatctgtgttttttgttgctcttcctgcacaacattctaatctggtttcataaacacccctgcaggcgctggtctgactaagaggctgtctgatctctcctcctaccttcagggtgtgagtacatttgacaaccgtcctgtcttttgaaactttgccaggaggttacttcctctgtgtcccttgggggagatatcagtgagcctgtctttgccaaggggttccttcagccatgacccctctctttgccaacagctcccctcttatgtggacgttcagaaatatcatgttctcgtcttgaattttagtccttgctttgtagaattaagcgtttaccaatgtcctttcagcacaaactatttttttttttaaacttatcttgtattagggtatagccagttaacaatgttgtgatagtttcaggtggacagcaaagggacacagacatacatgtgtatgtatccattctcccccaaactttcttcccacccagcctgccacataatattgagcaaagttctctgtgctatatagtaggtccttgttggttatgcattttaaatacagcagtgtcagcatgaacttaccgggcacctgtggacgagaacctgtgcattccaccctcctgggtctgtgcacttctctgcaggtccggaggctggtatcaacaccccccgccctgttcccatcataggcctttactggctcccccgcttcgaatcttccccagtttagcagtgtagctaatgtgattatttaaaaatgcatgtctgctcatttctctcacctgcttgaatgcccttctgaggctccctttgtcctcagataaagtctgcactcctaggcacgttgtgtccagccttcctgctcatctctggcacctgcaaagttaacccaccatctgggaactctccactcttgcttgctgtgagcctttgtttggagagtgctcccttcttcttggcccagctaattcctaccaggcttcagggggctacttagtcactgcttcatataagaagttctttcttcatccactggttctttctctgcacctgccagtctggcttcagtgacccccctccaccttttccacttgtatcttagtcattgtcaaagcctaggttgtagcccttttgcatctctggctccgtgcaacatgtctgatgctgcagagtgaaggagttggtactgcccgcagaggagctgtgcatgtgtacaggaagagcactgctggggctgtggactcccaaaatacagttggccccacagggctctgggcagcatttgaggctgtgttaatggtcgtggtccttgttcttcgggagcatgacctgggggttcacactaacccaccttggtgcctggtgtagcgggtggagtcagccggggcatcctggatgcccaggagtgtgggtaggttgagtgagtaagtgaaagcttgtttcatttgtcttttgacaactgtcctgtcttatggatgttattagtgcccacaccaattcaaaatgtgttaatacccgcaccttccacatgttatgcaagtactagctcagccacatcctcattccatagcctgtacacagattattaaatagaagcataaaaagaaggcgcattcttttttaaaaaatgttttattgaagtgcagttggtttacaatgtggtgttagtttcaggtgccttctaacaagcagattcctgcccccatccatgatctactgacacctactctccctgagaatatgatttttttaaaaacatttttccctctgtgtttatgtgtatatgtattcattttaaatttttattggagtgtagttgatttaccatgtttcaggtataccacaaagtgattcaattatacataaatccattctttttttagattcttttcccgtatgtgtcattacagagtattgagtggagttccctgtgctatatagtaggttcttattagttacctgttttatatatagtaatcactatatgttaatcccaaccttctggtttatcccctcccactgttttcttccttgttaaccataaaattgttttctctatccgtagctctatttatgttttgtaaataagttcatttgtaccatttttacagattttacatataagcagttaccatatatgtcctttctctgtctgacttcactcagtatgacaatctctaggtccattcatgctgctgcaaatggcattattttatttttaatgcctgagaagcactccgttgtacatatgtaccacatctttttctgttcctgtggaggacatttaggttgcttccatgtctgactatgtaaatagtggagcgtgc

SEQ ID NO: 30230 - DNA, 1026 bp, Bovine  19866880461268
  misc_feature (1)..(1): n is a, c, g, or t
naaatcccaggactgatctcctttaggatggactggttggatctccttgcagtccaagggactctcaagagtcttctccaacaccacagttcaaaagcatcgattcttcggcactcagctttcttcacagtccaactctcacatccatacatgaccacaggaaaaaccatagccttcacaagatgaacctttgttggcaaagtaacgtctctgcttttgaatatgctgtctaggttggtcataactttccttccaaggagtaagcgtcttttaatttcgtggctgcagtcaccatctgcagtgattttgattaaaagcatttccaaaaacactgtatattcttaccaggctcttcagttctggagcaagcagccagagagaggcccagggtgcctgcagcccctttaagatgcctgctcttccttgcacaggggcctgtgggagggagcaggtttccagggccctcttcagtctgggaaagtttccagagcaccgggctttcttgaatgctggcagtgccttctgctttcatggaaacatctaggtggggaggtggtgtcagaatatatgcaggttactttatgtcactgccttattggaagggagaaggagagatcaactttccaacctttaccctgacactcatttattaaaaaaaaaaattatttatttctggttgtgctaggttttcattgctgggcacgggctttttctggttgtggccagcgagggcttctctctagttgtgcagtcattgtagtggcttctgttgttgcagagcacgggctctaggcacgcgggcttcagtagttgtggcacacgggctcagttgccctgtggcatgagggatcatccccaaccagggatcaaacctatgtcccctccattggcaggtgtattcttaaccactggaccaccagcgaagcccaccctggcggtcatttagtttagaaccttttgtttaattttgtgaaagatgatgcttgggtatttggctttgtgtttgagggtacaggattcacgcta

SEQ ID NO: 30231 - DNA, 1049 bp, Bovine  19866880542047
  misc_feature (1)..(1): n is a, c, g, or t
ntcatcatcctctcttatcaggcttctgttacgctttaagaaaatatagaggtacctgttctcgctcttagtggcattccctagtcatcttaacatttttcatatctaaatttaatagaaactcattgctctatttaaattacacttggtctttttgacaattttgtttcataacaattataatttcttcttacggtttatttcatatgacttaaaatttcttctttggaggtattcctttaaagtgctgctaattgcatgataacatttactacgaaatctgtatgttacctctgattgaaaggttcaatttcagtagatcaaaccatcaagtaatatcttttaaaactttcaaaagttttcaagaagaaaaccacagtctgagcaaagcagtatgtgttgttattttaatatactggtattttttcaggctcatgagaggctagaagattcaaaactagaagctgtcagtgataataacttggaattagtcaatgaaattctcgaagatatcacccctctaataaatgtggatgaaaatgtggcagaactggttggtatactcaaagagcctcacttcccaggtaaactttctctatcctcttctttccaagtcccctgtattcccaaaatactcttttagtagtttctgtttaagatgaagtttttgaaagatttagggccatatgttgcaaattacaacttagatgttttaatatcctcatacgcttatgctacataaacagatacacttactatacagatgtacagtgtctgtcaaagaaatgcattagaatgggtttttctttgtgtaattaaaaaaaaacaacaacaaacctatttcaccatcagaccacatgcttgggacacttttctcatggtgataatggatttttcttccttaataccactgtttcccagcccttcttgtgaccagtgatatgccttttcagtattgcttctaagactgggttgcagctgatgaccttagaacaagagagagctgtaggggagagaaacaagtgacatacttttccccagggacaaaa

SEQ ID NO: 30232 - DNA, 1105 bp, Bovine  19866880592810
  misc_feature (1)..(1): n is a, c, g, or t
ntacaagctgggatataaatcagaatgctgctaaagatagggcagcacaatatggaagctagcccaaggggaaaccattaaaacatagataacactgggttaaagctacagaaaaatgaaaagggaaaaaccaaactgtttaaacattaaacatttgtttaaatattaaagtaaagttaggatgacagcaaaatcgatattaaatcaggcctggaaacttttatgacctcaaaccctgggcttcctaactgctagtgtcataaatgatgtcacttttcagcatagtcgtggctgccagcaggcaggtcagaaatgccagctttcatttaaattgtccatttgtgatgtaatttagcatttactcccagggacaaatgtcaccactctctgggcaccagcccctgaaagtgctgctgtaagcaaaatacttcccctcctaattccattctgcccccaggagcatggtttccagagaggcctatgagttcttctgggtttgaacaaagatttgaggaccatataaatgagttaagactcttttccagttggtgaagacagagattttgaggaaactcttcctgggatgaaaaggaaagggagttgtggaaagctgtacctgctatagaacatttcatgagcaggctgggattggaggcctgtgatgtggacacatggggtttcaaccaggggcagccttgaggtaccagctgcacaagggaacttgctggaaaggatggacttcttttgttcccaacctcaagccccttgattcttagtcccatcttcctcctctctccaagtacctccccaggccctgttatgttgacttctgcaggctaagttgcttcaggcatgtccaactctttgcaacctagtagggtagcctgccaggctcctctgcccagggaaatctccatgcaagaatactggattgggttgtcatttccttctccagggaatcttcccaacccagggatcaaaccatgtttcctatgtctcctacattgtaggcagattctttactgctaatgccacttgggaaggcccttgaaacacagaaggacctgctaaaatgctaacatgctctgggaagagcatcatcagc

SEQ ID NO: 30233 - DNA, 1296 bp, Bovine  19866880606752
  misc_feature (1)..(1): n is a, c, g, or t
ncttgcctggaaaatccatggacagaggagcctggtgggctgcagtccatggggtcgctaagagtcggacacgactgagcgacttcactttcacttttcactttcctgcattggagaaggaaatggcaacccactccagtgttcttgcctggagaatcccagggacgggggagcctgctgggctgccgtctatgggatcgtacagagttagacacgactgaagtgacttagcagtagcagtagcagtatagttgattaacagtgctgtgttagtctcaggtgtatcccaaagtgattcagttatacatgtaatatatgtattgattctttttcaagttcttctcctatttaggttattacagagtattgagcagatttccctgtgacttactcctgaatcttgagggaagtttggcttctttaatgctctttgtccctctcctcctccagagccttagcacaagtcaggattgtcagatagtggcagatttagagggactgactcaccatcttgaaagcctttatccacctgcaggcatcaaaccaaatggacaatctgattcatttgtctctggggccaaaatgaacactatttaaacccacaacttgaaatcaaattccatttgggtgtcattaagccagggacaaatctttgccttttttgaaataaacaggaaagagagaaagagaagctatattttgctcatgtctttgtgaaaataaatttctttgtgatggaggagtaaccaggttcttgccctttccctaggtgtatgtggcagcctttgcggtgtctgcatatgcatctagctactttcgtgccgggagtaagccttttaatccggtccttggagaaacatatgaatgtattcgtgaggacaagggcttccggtttttttcagaacaggtaggtatacaccctttttttgtttgttgggagaagttgcacatgtctcccattaagcgtgcttttgaaatatttatttcccacctgtcactggcttcccagtaacagagataattacagttcttctacacacaaagagagagatcagtttccttccactgaaaccttgccaccacccatgggcttaaaggtgctagccaggctggggctcgcttggctgtgtgcatcaccacagttctttctgtttaaacgtgtagcagagaggaatttttaaagcacgaagcatttgcccaaactgcaagttaagagatttaaagtgtgcagcctagctcactgacatcaccattctaaaacaggagcactgccatcagaagcaggagcaccaaata

SEQ ID NO: 30234 - DNA, 1166 bp, Bovine  19866880633516
  misc_feature (1)..(1): n is a, c, g, or t
ntccctggcgagaaacatcgtcaggaagttctcctcaggggcagtgcactcccctttcctacccttcctagtgttggtgcccatcaatgtgccaggatccatcaggatatatttaacttaccaaactaaatgctccactacaacagaataaacctaaactcacattcaacctacccatgcctgactatccacgtaaaggtctcagtctgcgaaagtcttcgatgtaaatcctcaacaagacaaggtgaagatgttatgatttcagaataagcacaaatttaaggtctaaaaatgtgtaagtcttagtaaagagaaaattctggtcggtgggcaaaacaggaaaaaataattaccaagcaacttcagttttaactcctatttccaatactaatgaaacatttactcatttatttagaaataaaatttcctgagcatctgtgagataaacaaaaatacccctatgatctgcacaagcaaggtcctgccctcacacaattgacagaggagcggaagaggaaacaagggaagaggacgcatcaatgagaagagccatgatggaagaacaaaggccattgattggagtgtgaagtcagaagagacttctcatgacacaggatgcctcagctggaacccaaacaatgaatcagtgtaaggagagggaagtgggtgcataacccatgcacaggaaaaccatgggcagaggcctagaggcaagagaaagctcatctctttggaagaatagaaagaagtctgtcataagacagagttactaggaacttaatgagagatagtgctggagacataagcaggaaacagatcctaaaaaatggacttagggattccaagggaatccctagggattccactgaaaggtattaaggaagatatcataaatatattgtattttataaaaatttttctgagtgtatggtggagcaaggactggagaggatcaagacaaaggtctagacaaaagaaaatgaactgagttacaagcaacacagacggagagaagtgaacagaggtaagagctatttagaagtcagaggaaaacagacttgactgggcagaccagcatagggagtaagtgttcaggcagcttgggttcaaatcctggatattccacttatagggcaagttactactctttctgcatctagcttccc

SEQ ID NO: 30235 - DNA, 1950 bp, Bovine  19866880655947
  misc_feature (1)..(1): n is a, c, g, or t
ntcaggaggcaatttaagccccaaccaaacaaaagtgttttaaatttctcaggggcaagctgcactccatcttgaaggaaactgaaagagatatcaaacaatttattgtctgatgaccaccccctagttacttagcgaaagctatacgagaaaaaaacagcagccattaagagatgaagggcgtgcaacagagaacgagcttgagacatcactaattttgtgctttgggatggtgaatatctttgataattagtagttaattcattgttgcatttttagataagtcatattaagcaattactgtattccaggttaccatgattactttcgaaagggtaaaatgatgacctcactaattgtggattccatccaatacagttaagaataaacgtggctaccactctgcctttcacaatggaatcattaataattacttctttccactcatgaataaagtacattaactgaatgctagaaaagtagaataaatggtgcttttctactaaaaaagtactttcccgaaaggaaaaaaaaaaaaattttccataatacaaaatgctgtgttttacttctatcaaagtatctgcaaatatatatctatttcttagagtctccttcattattaaataggaatctccttcaataattgaagcagagttaactatttatatttcttttgttcaaacctccatgtcctaagtttacatacttcatgggggggtaggtttgcaagggtttattctagaaaggacattggactaaatggttctgatgcagaatattaacagtggaaaagttttacatactcactgataaataaaaggaatttttcaggatacctaatcacttttaatgaaggggcatgggagagagatagaacattaaaaagaaggagaatatctgtacatatgcctcatagacccacttcgaaattctccgcttggttaataaagccctgtttctgtgtttaattttctcctgatacaatgagtacaaaaataacccaccaagcccatccccatttccaccaaaagcctaacagctgttgaacttctgatttgaacaagatccactgcaggaccccagactggcaagacacaaaagtcgaaggccccatgacattttaatgcattgggttttcttctgctgacccacaacatgggtaaataaagataacctttaccaagaaacacaaactattcccagggcgccacagggggattccagcaaatgtcccgttagcatgagctgccaccacagtgactgtgaagagagagcacttcagctaaaagttacgggcgatgaattttagaaacctgactgctgatattagttatctgaacacagaaagtggctggagaaagccctacacaaaatctctttgttatccggttcagatgagtggttttctccactttgtttctcattaactgtttagaaagggattatcccaagttctgcctatttagttgtttttgttttgtggcttaaagttaccacacgttacctaataaaaatcacaccacattaaacaggctgtgttgagtatgctgcagttagtgtgactttactggtgttattttaagttgtctgttctctgaattcccttggaatttatgctgttaactcccacggatatgaacagacctcccaagcctgcagttacacacgctgtatatctatcagaaggcaacttaacttctagacgcggcacagacggctgcattttgtccctgaacacttgagttcctgaacacacttgtttgaaaatgtctcttagaatatatggtttagctggacagactaaaaattttgtgtaatcagagagaatgtttagaaaacgttgtttggggaggaaagtaatgctttaaagctacttccaagagaataaataatgcaattctccttctccagggccgtgggtctgctggctttagtactgctaataaa

SEQ ID NO: 30236 - DNA, 2952 bp, Bovine  19866880661234
  misc_feature (1)..(1): n is a, c, g, or t
nttggtaaagaatcctcctgcaatgcagaagaccccagttcaactcctgggttgggaagatccaatggagaagggataggctacccactccagtattctggcctggagaattccatggactgtatagtccatggggtcgcaaagggtcggacacaactcagtgactttcacttcacttcacatacattcattacaattacacaaaccttaagtgtacagtccataagttttgacaaatgcatacacctttgtaacccaaacctctatcaatatattcaacattaccatcctcccagaaagtcccttcatgccccttccaagtcaactcctccctcttcctcatccctccccccagtcatatatctattaataaccccttcaacatactcattgcttttgcagttaccagacatgattaagttcacaatatctgtcaaacatctcaaaaaagaagcacagctatgacaaacccctgtcagaccagtgtttctccaagcatagcatatcactggccttagcatcactcgagatgcttattaagagaacagattcctaaggcctactgcagaccctctgcatcacaatctcagaggaccaagcttgggaatcttattttctgctaattcagaagctgattctgagtcaaccaaccaaggtttaaaaacccttgcctgagtctaataaagaaggctttggctgagatttaaataattgcacgtaaattttaattaacatcatctgtgttggtgacagacatcatcataaaatatgacctgtttcattccaataagttcttttatatcttggaaagtctgaaagcaaagagttcctacatggaaaaatttctctatagccaagtaaaaatgtgccctttccttataaagacgtgtttattaggacccaaatttcaatgtctttaaacaaatatcagtaaacattgcagtgtttactccaacccatcctgtgtttgctcagatagtgaaaatgggtgtgggttttgacctgccatttgtggcaatatcctgacaatgctagatctattaattagttcattttctcttttttatcctaccaccacagcaagaaaaattccatcctgccttaaagcccaccagacccttggaaggacgaattgcccgactgattcagaaccaacgtcctctggaggctattcttgagcaaagaccatcttcctgcccagactgtacccctagagttctgtgtacttttcatacctttgtgcccagttctacagaaatgatggctctgagtgataacatacctgcagatgtgacacataaaaaccaggagattgaagaaaagattaaggaagaacaaagcttgctatctacctatgcactcccatcctgttacccaacaaaagatctggctaatacttacgacataaaaccatttccaaaaatcacagatactaaaaagacagaagatttgtactggagacagctgtcattaaaaccccaacttataccttactgtaacccagatcattacattccctatgaacatttaaatcagtataatgtgtaccaaaatcctgttagccttagtaagcctggtattttacaaagtaaaccagacctaaaaacttttgattttgaacactttttaagtaagccagaacagttgaccttgaatatggaggatgatgaagaaacaaaacctatcctgggttgggattcctagagctggagtggccaaacctcaaacggacctgctggagcttaagaacgctttttcaaaaactggtgcacaaaaacgtttccataaatcagttctagaagactataaagacctcaggggataaagagcactcggggaagaaacatcaattctatggccataattcctattatttctataattgagctattcatccttcccttcaaaacccagcttctagcaagaaaagaaaaaatataacagaatttcttcctcattgctggattctgttttttggagaaggcataatgagcttgttaatgaggtttatgttttcaggtatttaagttagggtctgatcagaagaacccagaaaaggtgatgttctgacttcttcaaaagtttaacaatttgacaataaaatagaaccagaaaaatttatagtctttaatctcattttcaaattatatgccaaggaatatttccaaaatcataataaacaatgtgtatgacaaaattttacaaaaaatatttgaaaaaaactcaaattcccgataatcgacaaacgtctatacaaactacagtagtaccttaataaaataaatatatggacactgtccctgtgtaggtaaatgtttgtataaaataacactaggtacaaagacaaaattcaaaagcccagttaactgagggactgacagctctacaaactacattaccttaataaatacgtgggccctgttcctttgtgtaaacacgtggacaaaataagttagtggaaaagacaaaactcaaaatgctctgcatgcgcacacattctaagttggatgtttcttttcctttcaccttctgatagagaaacaaccatttcttttatgaagaaaaaatgattttattgcaaagatctagaaatggttttaattagtaactgatgaactctatggcaagaaaggatggtgtcttagtctgtttgggctgctatgacaacataccatgaactcggtggcttatgtaaacaacaaacatcattctcacggttctggaggcggggaagtccaggtcacagcgctggcaggtttggtgtccggtgaggctctgcttcctcactgaccgccatcttctcaccacaacctcacttgataaaagaagcaagggatctatctgggcttcttttgagggcactaaccccattcatgaaggttctgccttcatgaactaaaggaaagtcgctgagtcctatccgactctttgcgacccatggtctatacagta

SEQ ID NO: 30237 - DNA, 1418 bp, Bovine  19866880721835
  misc_feature (1)..(1): n is a, c, g, or t
ntatctgtttctaagaccctggaaattgcacacgtgaatatccatctttaatccctattaattatacagtaggtattatatttacctcatctagatttcagtggctttcactccaggcaattttgttgcattatttagacaaggcaaatattccatgtacaggacgacttcaaagagacaagggaaccacatgatcagaaatcactggcgtcaggccctcctaaaggtacatcaccagcctctctttaatgaagaccacattttacaacaatgctcccatgcacatgcaaatttatgtagattgtttacttagactagcgcttttgtacatcaatctcgctgtgcaccctcctctcctttttgccttgaaagagataatgtggctattccagtcatctgtcttcgggttttatggtctggagtgcccataaagatgacaagggctgcgtttcacaggcagcagccttccactgccctggccatgttgtgtcgaactagatgagacacactgctgaaccggatagggtccgtgctctcctccaggatgtatagttgggtgacaagtgaggcaccaacttggacagtcatgcaagtcctggctgctgctgagcattgctggggggatatccacggaatgctcttctgtacccttcaaagttggccagtccgacacactgccggtccacgctgttcttctcacttagatttaccttgggttggggtggggtggggcatctttccatagttctgattacaagcccatttttggaagaaagggctaagacatccaaatgacaaattgtttatttaccacaaacctggttagaactgaaggggaccccaaaactacacctgctgagaagataccatttcaatgatttatttcatttaaagaagcaccgtgagtcccggttaagaattcagactgatgtcagatagatttgagtttaatcccaatggcttccactgtatgacaaggttcttaacatccctctgactcagtttctccatctgtaaattgggaatggaatctgccttgtgggagtctgtgtgggttaaatgcaatgaagcacataaatctcttagcataatgattagcatgttacaagaacaaaaaaagactttggcaatgatttcattttttaatagggtactgtgaaataaaggtacctgattttgtttggttgtttttttaaaaaaaccaaaaaacacaagactcggcaagcggagttctgactgtgtggcctctcccctgcatggagtctgggggaggagggcagtgtggctgaccacatcacatccacacgcagagggatgaaagggaacgtctataaccagaggtctaggtggcttggagacagaggccaacagggcaccctctctatacagaaagtgcaagcaccaaccactctgctcag

SEQ ID NO: 30238 - DNA, 1169 bp, Bovine  19866880729849
  misc_feature (1)..(1): n is a, c, g, or t
nccatacagctggagcaggaaccataaagccaaggacacagaataagtgccgctgggttatccatgctctgtagtgtagccccttcccagcaccagcagcccatgaaatccatcttcccctcctctgatgcaactttgcatttgcaccttcatcatactcagtcttgcaatacccttaggttgttgtttgatattaatatcattggagtcacaaattttcagtcaggctgaaattgatctaatttaatttctgggccaatccttcccctttagaagggaagtccaggagacccagaaggttgtgtgacttactgcgaacaccaaagctcactcgtggcaaagcttggtcttcagatgcagaggacagcagagttttccccaacccagtctcacaatattatttaacttctgtgttttcatgtgcgactcctatctcagcatccaccctgaatgcgcccacactggtttttaaagttccctccaggcatatctgctcacaggctgtcctgcatttgaagggagtaatcgaagaaaacttgctaaactgggccagtcaagagaaggaggaattcctagacatgtcagcagacaaacatttcaagtagcttccccttcaattttacagacatattgatctgaaaagtgatatggataaaattttcaggtaggtagaggagggttatcttgaaccaatggccactgcgttccttcctgagagagcagtgcccttgggaaggtgggagctgggctgtgtacagggctgcacattgatactgttactcagaacacaaaggaggaggatattcgaagtttttcctgcaccttatgacgaatagactttacaacagactaactgtccttggactcaacttagcagcagctcctaacctggttcactttcaagcatagaggtgggggatgaaggtacagataaagtgcggggataaactgggggataaagtgcgcaaggcactgcgcacattcagagagagaggtggacgcagggaaagtggaggccagtctgccaattaaggggagaagtgaagcagacgacacctgacactgggtggagaaggtgggggtttcagatacgtatcggattctgtttttaccaagagggcagctttaatcaacttcccagtgtaaatattaccaatataaaccaaata

SEQ ID NO: 30239 - DNA, 1419 bp, Bovine  19866880890826
  misc_feature (1)..(1): n is a, c, g, or t
ncgaacccaggatactaacttgctctccagatgcaagcggatgaggaggagccgccacagtagatgctctcgtgccatttcccgaagagccgatgtactgcttttccactctggtcaaacactgtaccttcaatctcatgggcgttagtgctccagtatttcgcctaggagtaaaaagagagtcatctgttagtgttttggggtcaatttattacgaatgttaagagaaaaaaggaagaggaaagaaacccgcaagaatgattctatgctgcatatggtttgttggttctggctttttaaaaattcatacttttaattatttaataaaaattaaaagctagctctttatttataggttgtagctcaatcatcaacatttgtgtaagacataattttctatctactttcacatcatgcactgcaggaaggaagggatcatccaccaggtgggggttgacccttaagccccttccagaacagctgtcccctgactgtcactgtggctctattacaatttaaaagaaatgtaactcatataacttactctctcaaggaactagacaatcctttgtaaacaacctttttttttttaccaagtttgtaaaccaatcaactttcagtttctactatttatttttttccccaaaccagatctgctcatctaacttatgggaaccttatgcaatccacattcccactgagtggtcctggactgagaacagctcagctagggcccagccttgtggattttacatatacagtaccacactgcggtcagcagagggagcgctaagtccctagagttgagtttttcaattttccttgcctgccctaaaaatctgcaaaagaccagaaggcattactccataaatcaaaaaattctactactattttcagccaaaatagaatccgtatctggaaaccaataaaatagagtgaaatttccaggccatatctggtagactagcttccccattccaagtccaaaataaaaataggaggaagggcagagtatagcagtacctcagagattaatcagacatgtaacagcgagttctctagtcaggttaaaaaggaaagcaaacactgtccaggcttttaagtttattctaaagcaggagtcatatttttctctgtagagatatttgtcagtaagtccaattacttactgggaagccacagaaagaagcagtcatgctccacacataactgctgctttcaaattatttttcaataccagaggcacatccagtgttctaattcttttcatctctcatagctatgaaaatatgttccctggtcctcagtagatgaataccacatggatggtataaatgggagtgaagcacattctttggggaaatttctgagagcagggtagcttgcaccggatcaatcaatcaatgtatctattatctg

SEQ ID NO: 30240 - DNA, 1418 bp, Bovine  19866880956774
  misc_feature (1)..(1): n is a, c, g, or t
ncttgcctggaaaatcccatggatggaggaccctggtgggctgcagtccatggggtcgctaagagtcagacacgactgagtgacttcactttcacttttcactttcatgcattggagaaggaaatggcaacccactccagtgttcttgcctggagaatcccagggacgggggagcctggtgggctgccatctatggggttgcacagagtcggacacgactgaagtgacttagcatacatgtatccattttctctcaaactcctctcccatccaggctgccacaaaacattgagcagagtgccctgtgttatacagtaggtccttattggttatccattttaaatatagcagtgtatacctgtcgatcccaaactccctaactatctctttctcccagtcttatcccagcaaccataagaggaacatggatttttatcacaattgtttccctattccaataaagggatgtgtttaaaataagtcaatctgcgtatcagatatttttctttgaaacaaagatgactaaagctgccagagctgtagtttccacttggaatttccattaatactttggtgactccttagtgtcaacggaaacatctaagtccccatactcctcctctctgtcatctctgccagcttctaattggaacagttccaggactgctactgctgaacaattcccaccttttctcacatttttacctgccacatccaatactctgataattttatagataatcaaaaagaagaagagctgccactgtgtttggtccttctctattccagacaaaattcttacatggttgaagcgacagcctaggtaacattttatattttgcatttaaatggtagttcaattcccatagagctccatagactttatgaagatttttcaggttctcatatcaggtcaagttgatcaatctccttatctagttcttgagacagtttggttacccacaatatttaatgatcctaaaaatactgtagcgaacctctttaacaaatattagtaaaatcaactgatcagtctgttagtctatccatttacctatccattgcctttctgaaaaaaataatttaaggaaacgtattcattaaatgtttaaatgaagctgtgaatattccaggataaaactctactatactgatcttcaatcactcaaatccttagtgtgtgatcaaaatccacaccaacttgaggggaaagaatattatactggggggataaaacataacttattgctaaaaccccagaaaaacttgttggaaaaaaccccagaaccatattgcgccctggcctgtagtcaagagagccaggcccctgtctgggacagtccactgggtccttccacagatcacactatgtcccctggtccttcacctcttctcagttaataagagaggaggtgaag

SEQ ID NO: 30241 - DNA, 1727 bp, Bovine  19866880986955
  misc_feature (1)..(1): n is a, c, g, or t
natgttctagctattgcaaatagtgctgcagtgaccaatggaatacatgagtctttatatgcctaggagtgggattgctggatcatatggtggttttattcctagtttttaaggaatctccataccgtcttccatagtggctgtatcaatttacattcccaccaacagtgcaagagcattcccttttctctacatcctccccagcatttattgtttgtagactttttgatgatggccattctgaacagtgtgaggtggtatctcattgtagttttgatttgcatttctctaataatgagcaaagttggtgaagttttacccgttttaaacttattcttcctctcaggatattcagattcctggcagcataaattaaaccctccactctgttctcccagtgctgtctgtccccccgccccccactttgatttggcctcaggaaataccattgtagtaggattaatatgatagcaaacacctaacaagtgctaacacagagaacagcatttattcctttccattccctctagtttagagttataaataaaaaggtattagtaatttaaagatcctgtatgcttttgtattttggtcttaaaatttcactaccaggtggcactctggttagatgcccattgattcctcagtactaaggtctttcagtatcctgacagtgccatgcacttaaatatcaaggtccgtttcttaagagcaaactttttttttttaactgactactgcatgtcctgcttattaaaatgttgtctcaaattttagtcgctgatatatacaattcattaatttgattctaggctagccatgtaaaagagggaggaagtgctggtctcattccaagccagttcctggaagagaagagaaaggcctttgttagaagagactgggataattcaggtgacgaactcgacacaataagtaacaagtagccctttgtggccacattttcttacctctttcatctgaattagcagatgaatttatttaaaatatatctagagtcaacatctgcttcattgtatcactctcaaaaataaactttttgatccctttctgccacctgctggtattatatcagaattcagtggctcagctcacccctgcccatttcggctctgtaggatgcaaccctgggaagataattctcccagccctatagaataccccagggcaatgtatatattccaacatactgtttaagttatatttgccttgtcatccttcaggacctttttgtggaacaataagtagcaaaaaaaagaaaaagatgatgtatctcacaaccagaaatgcaggtatgttttaaatactttgagaagtccaagtgaactatgaactagctttatcattagtgtggcatatgttctaaatgtataattttaaatgaatgaattcatattagtacccgattgcaaggaactgcaatatggacactcagtgcagtaatatataggcattatttaaatcctgatatacatgcttgtactatcaccagtgtgctttattttatgagcataatttacagtaaaatgaattcattaagatttatgcttgtattaatgaaggaacaatgtgacaattgaaactgtttttttaagaactttgacaggaacttatgtgttatttctgcagaacaaaatccctttttatgactatgttaaaagtgttatgattaatggcaaacatattctaccataacattatccatgata

SEQ ID NO: 30242 - DNA, 1355 bp, Bovine  19866881019158
  misc_feature (1)..(1): n is a, c, g, or t
ngtccttcctccctttgtctagttaactcctactcatccttcagatcttatctcaaagaccgcttattctgagaagcctccctgacactcccccagttcacttagaccatgtaggggttgttagtcataagctgcatccaacatggcaatgctttccacattgctcttacatggcccactgtgtatttattagtatggtgcttgagtctgctgccggagtgtgtgtttgctgagaataggggctttgtctgttttttccaccctctcagctccttgaacagtgcctagaaccaactaggtgcttaataagtacttggtccatgaatgtctgaatcccagagttggtggatagtcacccatttctccgtcttgcaagaccttgataagtagaatgtgacccacatcagggtactgtctgatggatccagaaagtccctagatttcctggaaataactgaatcagagcattttagaaatagaaaagaagtgggaattttattagtccaatccttcattttatagatgaggaaactaatgagcaacaaggttaagggcactcaactattaaattacagagttgaggcttggatacagtcctcagaatccctgccatctacacttctcattaaactattagttgtagatccccaaaatgccagataaatgcataattcagatatatttgtaatggtaaatggtccaggccaccgtcccctgcccctcttccccaatcttcacatggccagttcctgtcccttcctaagaaaatataaaccttccttacgttatcactatcccctgttctgataccacggagggccctccctttgaactgtgtgttgccatggcaactgctccttcacaaatatcaagattactgcccacaattgcctatgctgacgtggatggctgccaaacaaatcataggcgatttttttttttttttttttttttgagtcaagagggccgaaagcctcagatcaagttcaaattatttggaggatgtgtgtgtcaaggacacttagcatcagttctgatgggaaggcagataaaagcttgatttaggacaagggtaggggaggcacaggacagctcagcctcagagcttggagagctcttccagaagctctttgatgtgaaggagatgttggaagttgtgtaattcttgcaggcggcccagacacaaaggctgctcaaaaaatgcagaggggccaaatacgccgagagagcttgttctgtcctttattttcccctctactccatctccccttcatccttctcaagaaccccagatccagcatgcaggttttgtcccaaggagagagacattcgtgccacaggagtgcatttacagg

SEQ ID NO: 30243 - DNA, 2679 bp, Bovine  19866881131442
  misc_feature (1)..(1): n is a, c, g, or t
nttcatgtcatggctgcagtcaccatctgcagtgattttggagcctaagaaaataaagtctgtcactgtttccccatctattttgccatgaagtgatgggactggatgccatgatcttagttttctgaatgttgagttttaagccaacttaaacagctatgtcttatgttagcctcctgaagctgcaataacaaactaccacaaactcagtgacttaaaagaaattgattcccttatgattctagaatctagagatatgaaatcagtatcactgggtagaaatcagggtgttggcacagcctctagagaccctagagaagaagctcttcctgcctcctccagtttggatggctgccacaatttcttggcttatggctgcatcatcttaatttctgcccccataatcacatccccttctcctgtcggtaacaaatctccctctgcctcgttcttaaatggacatttgtggttatatctagggcccacctggatatccaggatggtctcccatttcaagatctttaacttaaccacacctgcaaagtctttaccatgtaagggaacactcagagtttccagagactaggacatggatatcttttgagggggccattatttaccctactatatgcctaaaaagatatgaggagagggatcaacagcatctaagaaaggacttttttagatgattaaagtagatgaagcagctcaacattgctaatcatcagagaaatgcaaatcaaaaactacaatcaactatcacctcacatatcaaaatggctatcattaaaaagaacacaaataaccacaaataacaaatgttcatgaggatgcagagaaaagggaacattttcacactgttggtgggaatgtaaagtgatgcaatcactgtggaaaaccttaaggaagaaagaatattaacaaaaagttatttatcactgcatttatctactgtctttctcccaacctgacaggaaagcagaggttattctctggagaaataaaggcaaaaaggcctcacagttatggccaccaaacagaatggaggagagaagtgtggcaaaggataaaaccagaggatgacaaggtacactagtgaatgaaggaatatgcaaccccctttctctgacccactcccaaaatgccaccatatagcacaaagtcaaagaaatgaagaattcctctctggagtaaaatgaacaatttcagaaaaatgcatctacgagtaataacatttatgagtgttccaatgaaaagaccaggtcttccttctaagacctgtagcagcacatctcaaattctggtgcctgtacctccttatagtcacaaaaattactgatggcttcaaactatgcaaattacaggtatcaaattgtaacattttagaaattaaaatgggaatttaaaaatacttattgattcatttcaaaataacaataacaaatctaccatataacataagtaacatttttaatgaaaaataattatttaaaacaaaaaatatttagtggaagagtggtagtttgaacaatctctttaaagtctgttgtaataaaatacatctgggctctcatatctgctcctgcatttaacctgttgcaacgttctggttgaagtatatgaagaaactgtagcctcacaataatatacatagttggaaaatggaaaatgtattttagtaccctttttggataagtgaagactgaaactccaccaaaacttgaaaatcactagtttctaaaggttatccttaggcagaatctgaaattataccagtgaactttttgtcctctgtttcattaaagtccattggtctatcttgcactttgaacgtatcttttgattttgtaacatcatgcatttatcatttagaaaaatctttgctcactgagttacagaggtcttccaaatgttgacacatttcattatacaatatccaaaaaaatcacatttgttaatattaccacagataccatcagaaaactctataagtattggtaagctgtcaagttccccatggccaatttaaatgtttcaaacttttatatttcttgaaagcttgaattttatcattggcaaaaaatagtatgagttgttttccttaaagtgacatgctcgctttattgatttttaagaaaatgtctggtaggtatccaactctaaatgatcatagcttgtctatcattcactcttgtaaataaaaatggttttcatgaaaaaaaaaaaaatcacttcaactttcaactcagacaagggcactaatgattcttcttgagacagccactgtatacagtgtgtggcagaaatgtcctaggaggacttgccattttcttgcacagaatgttaaaaaatgtgtactcaattcataaattttactatttcaccaaggttaaccttcatgtgaaactagcatgttatacaatagcttgtggtggtgaataatactggcatggctcatgtgccattacctttattcatggcaagaggtttcagcatgttttatccaccatgtgctttgcaccatctgtgtgaatgttaacacagtgaaaaagcaaacagctgtctgatacttaatatgaaaataattttgacctcatgaactccttgcaaatttctctgagatctcaggagtccttgaacaacactttgagaaccactaccttataaccaaagaacaaa

SEQ ID NO: 30244 - DNA, 1556 bp, Bovine  19866881239028
  misc_feature (1)..(1): n is a, c, g, or t
nagggccatttacaggcccccgctcagtctctgcagcttgcacatgttttcaaacataatttcatgcctgctttctgacagctcattaaacaaaggcctctcggtgcctatattgcccgtctccctgctgagagtgtaacgtatttacagcctctgaagattgctggctgctggcgccttctctaccccgtggcctgcctgccaactgcttatcagtctcccccaaaggtgacatcctcctcatttgtttaggtagtgatggtcccctgtttgaccctcggaggccagcagcagcgtgattaggagtggctcctgcaccagctagataaaggcaatcatgggggcgaagacagcactggcttctaggggagcttcgccaggctgagccctcccattcaggaacgcgctggcagttcgttagcttgacagctggcagtgtacagaccgtgtgggatttctgcctaggagaaagcaaacaaggtttcggtagtgttgaggagatatctggggctgtgtacaagggtgatcagagcggattgctcctaattacctgtctcttgactgccattaaaccctcattacatatccaaagccataaagggccctacaaatgcagcaccttatacttaatttttatcctttcctcctgtgtttgccaagagcattttgctggggtcctggggggacagatgaagacatcttggatggagggagaggctgtaggctgcatccatctgccatttgacgatctgaaaactggtaacaggtttctgccactgcagtgttctgggggtgaaacatcatttccactgagtaggaatggggagagagcagggaggggaggcaggaaaggagggaaggaaagagagcaagacctcttttttcctaatcaggtctcagttaattcaacctttagctgttgtaggttaatggccagactccagaagcaggatttttgttaaagcttcagatgatcttggcccctgaatggctgtgttgtgcctctgggatccagttggtgccaaagcagactagggttacggtgtgatggcatttgcctcctgggcaggtgacagtgatggctaccactgcttaagcacctcctacaaatgagacagcacataagcattttcctacagaaggtaagaatttaacacaatactactctgggtaggcagcagtaggactattgcaccataatgaacatgacatgaacttgggcaaactctgggagatagtgaggggcaggctgcggtccatggggttacagagagtcagacatgacttagcaactgaacaacaaccaataatagactgaggcttagagagatgggaaatctccatcaagctcctagtcagtcagcaactgaatgcagatctgctggttccaaagtccccacttctatctcccaccttctgcccaatcgatgactacactggaacaccacaacagttgctaagtctgcttcccctctgcaagctctcaaaccccagcatgtatgcccatcaaccagagaaatggggactaggggagactcccagacgtgctgcattag

SEQ ID NO: 30245 - DNA, 1188 bp, Bovine  19866881304663
  misc_feature (1)..(1): n is a, c, g, or t
naaatgacatttttcaaattttcccattcttagctggtcttcttatatagagtttttcctcatcagctgagctgtttagttaacctaccagtgcatttccaactgaaaaggtagggaaatgccagcttcttccctttgccaattttaacagtaaagaattgtttaaaaggtcaatctcaaatggtaacatgagatttttttcagtcctgttttttaagtagcatcgtggacttaaggagttttcattaattcattatgtttcggtcgtatgtaatcctatgttttgttttgatttttcaaattatcatgactcttggccagttgtgggcagatttttaatatatgagtctgaagctgatgagagagatctggatcaagggagttctcagtagtggttcaagtcacaggaatgggtaatattgcctaagaagagtgtatagggtaaaaactaagcagcctagattagtgatttaagtagcttccataatttataggaataatccttaatatattaatttgtgagttttttctttgtaatttttcttcagtcttttatactattttcatgaaatgactaaaaattaccaattaatgccttggaaatttttagtactctattgggataatgagctgctacttttaataacttattccatctgtaatcaataaccacaggctgttttgaatccttctagtcactcttggaggcccatgatattgtggcatcaaagtgttacgagtcacctccatcaagcccggaaatgaataattcttctatcaataatcagttattaccagtagatgccattcgtattcttggtattcacaaaagggctggggaaccactggtgagttgatcagtcggtgccttcttaaagctgaaatcttacatactcgtgactgagtcactactctatctcatttttttctttcataatttttatctttatgaaaactttactcatgtttgtttcatcagtcttttttggcttgtgtataaaatacacaggtgatactctcaacttgatttagcatgcagaattaaaccaaaattaaactgaaatagaggagagaagttgtttgcctatgagtagaaaaaatttcagaggataactttttttcctatacccttgaagaaagaattgaggttgcttactaattatatatagagcaaaagcagaagaacct

SEQ ID NO: 30246 - DNA, 611 bp, Bovine  19866881313291
  misc_feature (1)..(1): n is a, c, g, or t
nactcgttggcatgcaccacagctgttaagaggcagctcaggaagacaggaaaaagacgaaaatccaaaccctacaagccgaccatctgactttaattaggaaagagaacagtccccaaatgcacaaggatgggttcttttgtaggtcaaagtattatagtggaacttaaaaagaggtaatataataaccctatatatgaaggttagctcacactttaaaggatcttataatatggagacagtctccagctttctagacaagccatcctgtcctatagctgtagtaaacactcatctaagcacaaaaatccatgctttctaattaatgaaggcccattagacaacagcacagtaaactccatcacctgagaaggcaaagcctacatgtaaagcaagttctgtgcgtgaagaagatgagaatttcagtttgggacatgataatctagatattcattagacatctgagtggagagacagtgttgacaggtaaatatatggagctgttgctaagggggagtggtcatgactggagatatacattagagagtcattttgcagttacatgctactaaaagccatggaactgaagagaatctgcaagggggtgagta

SEQ ID NO: 30247 - DNA, 656 bp, Bovine  19866881371462
  misc_feature (1)..(1): n is a, c, g, or t
nagatgagatgcatcaaaaataagtactaagtaatgtgagttcattttttcccataggatcataaaatagaaaaagagttctgctgattaagagaaaatatttaaaatgatcatggagatgtctttttgttttataatgaaaaagctcagtatgtactattttttaaaaaattagcaaaagctatcatccctacaatcatcaaaattagtggggctattgatttatttagggggcttcccaggtggctcagtggtaaagaacctgcctgccaatgcaggagatgcagttttggtctctggtggggggaaagatcctctggagaagagaatggcaaccaactccagtattcctgcctagaaaattccatggacagaggagcttggcgggctatatagttcatggggtcacaaaggagtcagatacgactgagcgactgagcatattgatttatttagcttgatttcttggtttggattaattggttggtgagagtgtattgaaaggaaattaatctcttgataagaacagtgctaatgttaatggataaacgattacatacacactcttatccattaagggaagctggagaaacctgggtagaagtatattatttgaggggttgggaagaagcagctcttacttgaagccacccaaa

SEQ ID NO: 30248 - DNA, 759 bp, Bovine  19866881419134
  misc_feature (1)..(1): n is a, c, g, or t
ntttgtgacggggtctggagagagctttgctgctgactcggcatttcctggccatccttctctccttgtgccccttccttccagcctctccccagttttatctgatggcacagtgtgtcacatacctggtctgggaggatgtgctcaggggatcttgctctcagctaggttctcctagtcagactcttaccattgatgattttcttaggatttcaaagttgtttccataatcttccatgagggaaatgggaagttgacttatcttctttactcagcatcatagacctaactttactatctcctaaactctggattcttgcctttgtgctacaggttggccactgactttagaatatgtgtaggacatcatgaggccgacaaggattaaatcctgacccctgctggctggttctcctttccccccagttctgtgggcagtttcccggcacttcttgggcacagggccgaggctggttacatgggaggcaggagaagcctaggggagcctgagcgcacaggtgggagcatgcacccttcctgcaggtgtcggcgatggaggatgggaacatcatcaaggacagcaacgtggtgctggagatcccagctcccaccaccattgcctatggcgtcatcgagctgtacgtgagggcagacggccagttcggtgagtatgcctcagctcggggctctggaggtgggttgagtcattgaggagggacaccccattttaccctgaggctcatcttgtagaggattgcc

SEQ ID NO: 30249 - DNA, 782 bp, Bovine  19866881421985
  misc_feature (1)..(1): n is a, c, g, or t
ntggatattcttcctttgctcagaaaacaatagaactaactggaaatttcagtcctgtaagtataatcctacttcttttcccaaatgatactagatgagtcatttgtttctctactgctttaattcctcagctatatgtttcaattactaagaaatttttttaattctaagctctaattttacaagtagcttttggcccaatttctcacctaaaaccaataaaagtttatcatatgtagagacaattataattatataactataattcagttcagttcttgttacacaggtacatttttacactgttagaagcattatcttagcaatgaactactaatacagacatctatctatattgtgtatctgaatatgaacttgcatttattctgaagtgtaactcaagttgcatgaggtactgtgaagcaaagctgtgtaccagcacacagaatgatccgtgtttagaactcacttacccccagtaaaattatgcagagataaaagtacacactcttcaaaatatggagcagttgaatttaattacgttaccctcagtcaattaattagaaagaattcattggtgatgtcattatgtcatgcttgggacaaatacattagagtgatcagacaaaatgtggcagtcagaacttccagggctaagcagaggtagtatttttcagaaagaattcccaagttagagtggagaaacttgtgagtattttcaaccactaactcttctctcttctataagtgaatccattgccagcaagttcatagtagatcat

SEQ ID NO: 30250 - DNA, 2660 bp, Bovine  19866881455693
  misc_feature (1)..(1): n is a, c, g, or t
ntttcgggcttagccacggtgggaagttctaagaagggtggactcaggctgacatcttccaccaaggcaacacaggtatcccctttgttctccagtaccttctctgaagctaagtaccaactcagcccaaaggcaaagacagcccagaaatgtggaatattactggccaaggttacaacctcaaccagggggcttcatgggcagctgtatccatgctctagcctcctatctttccagagcaggagtctgggggcagaaccaagctccaaatgccaacagcagcaaccttcataacacactcttatattggctcttcctccctccctgtctttctccctgttccctcacttctgcttcctggaatccccaaataaacaacctgtgctcaagtccttgcttcaggctctgctctgaggggaactcaactaatgcagtggtcgtttaggttatttctaggcctctctttccccatctgcaaactgagaaaatggaattaaatcccttccagcttccacattctaagatgcctcctcttatacatcacaacaagggtgacctcttcaatctagagaagcaaacttgaccctttttctgaagctcagtgatagatcacaccaacaggttctggtattataagactaggtcattgaactttatggcaaatataggaccagacatttcaagcaggacaaagacgaagagagaagcactgagagatgtcataactggtgcatgttctacttcaaaatgatgacaatcactttaatgaactcacttgacaagaccttatcacagagaaacagcctcaactggaggacccagtctccttgaaccacttaaaagcccccaattctccagtactttggctcccaaagtatgtttgtaaatctgctgcttggtatttatgattagctttttcccacagagatgttgttagaaatgcttatgttcctaagccaggccattaagagtatttagtctataaaagagctgagcaccagcacaaaaggtcctaagaaaatatgtaacttgaccacactgcatttcgttaccagagagaatatttaacaatgcaatcaagattccaggaacaaatattcacccatgccaatagttacacagaaagatacatataaacatacatactggtaaaaggggatttctcaagaatcaaaatgtctacacagatgttcatttacttccttgtaactagtcttaatatcaagagagaccaacaaccaaaaaaacctctaaagctcaccaaaacagtcaagggttaaagtagaacaactgagttcaactcgcaaagcatgcagaacttcttggtcaagataagagtaaaaggagggaaagagggccattcagaataagtttgctcagaattaaagtggttatgtaatatggagctcagatcaacacaaaggacagtttaaagccaatgcccaacagctaaaagtcaagctgcaaaatcacaagagcccaaacttgagttgaagaaacaattgtttcttatttacataaagctaaagtcttataccttaataagtcaaagttgcatttatatgaaattgtatcaaagccccacagttagtatttgttcatttaatatttacatcaaccactaccactgctgctgctgctgctaagccgcttcagtcgtgtccgactctgtgcgaccccatagaaggcagcccaccaggctcctccatccctgggattctccaggcaagaacactggagtaggttgccatttccttctccaatgcatgaaagtgaaagtgaaagtgaagttgcttagttgtgtccgactcttagcaaccccatggactgcaggcctaccaggctcctccgtccatgggattttccaggcaaagagtaaaagaaagaatagattatatcaataaaaacaagcagcaacatggcagatttaaacccaagatgattaataaccatattaaatgtaaactatttaaacactacattataaggcagagattatgatattgaataaagtgcaagtcccaactatctactgccaaaagaaaactacttaattaaaaaaaaaaaaaaaaaacagaaataatttaaaatctggcttaaaatagtataccacactaatacaaatcaaaataaaactcagttgcttatactaatgtcagacaaagtagatttcaaagaaaagaataatactagagatagagttctcatagtgataaagaaatgtgatgtcatcaagaagacttgacaattctaattacttgggtccctaagaacagaacttaaaaatacgtgaagtaaaatttgatagaactgaaagtatatataaataagtctccacttacagtttgagactttcaccttcttctctcagtaattaatactgcaagtagacagaaaatcaggatactgcatacctaaataatgctatcaacaagtccaattgtgacatttatagaactctccacttaacagtaacaagatacatattctcttcattctcttcatagaaaacattttccaagatagactatttttgggctgtaaaatattccaatatatctaaaagaattcaaataatacaaagtatgttatctgatcatggtacatcaattctatgcaaactgatttatagattcaatgcaatctcaacaaaatcttag

SEQ ID NO: 30251 - DNA, 955 bp, Bovine  19866881467101
  misc_feature (1)..(1): n is a, c, g, or t
ntgtgaactgtgtattgaaggatcgttatctaataatcccaactttttggaagctagaaataaacacaaaaggtttctgctcagtaaaaaaaataggatgtcacaaagcctatatgctttctttcctcatagcactgctgcttccatccttgtctagagtacatttagtcttactttaccaaaaaagactctgtcttcagcctccactaaaactgctctcagtggacatcaatgccttccttgggaaaataacgttctttcttttaagaatgggttctctaggcagcagtttttaaatgttgacttccctttcccttgactttttaaaagttgcataatttattgaggtgaaatggacataacataaaatcaatcatttgaaagtgagcagtttactggcctttagaatattcccagcgttgtgcaaccaccacctctatcgagttctgaaactgtatacaagcccctgtgtccccatcttttgaagtaaaaggcttcatatttagtttcccaggccccctctgagactcaaatagctggctcaagagttaatgattagaaaatgtgaacatgttgaaacaaagagctgttgggccaggaaactggtaacaatttcaggctgtaagttggccacatagcagttacctaactctcagttccctgaaagatatagataacaaaagctgacacacattcctaagttgtttttcagaaaccagatctctatcatatgaaaactgctggctgcaagcacatagaccccagaccagttaaaaccaaaagatggatgatgcctgaaacttcaactgaatgccaaccaattcatgtatctcatggtcctctccctcatgctgcctttaaaaatccttccttgaaaggcatcaggaatctcaggtcttttgagaatgggctgcctgttctccttgcctgatgctgcaataagcactgtattttc

SEQ ID NO: 30252 - DNA, 1398 bp, Bovine  19866881686750
  misc_feature (1)..(1): n is a, c, g, or t
ncttcctaacccagggattgaagctgggtctcctgcattgtaggcagacgctttactgtctgagccaccagggaagccttatgcttagaaagcataattactcattaatacatgactttatccccattgtaaaggtcaaacaatggagaaatcagaggaaaacataaaaattatcctttaacatattctctcaccaattcttcttctccaagtttgatttctcaaagataagcaccaataaaaatttgtatatgtcactttacaggtattttattctgtatttacaaacatgcatacatatgtaaagaaatacacacacacagagattttttttaagtttgcttacaaacacagttaaggaagctggatactcccagttgagtgtcttgtttaactcacacaatgatttaaaatgttgcgtagttgcacaagttgtgtttttctataacataaacagcttagtacctattgtcatacacctgcctggcccttaagacttttgacacctgcttggcctctctagtctttttatgtgtgtgactctggatctcttttacatattgctctgtaaaatgctttctttaaaaaaaataaaaatgctacataacaagtatgtgatcctgacaatatatctgctgctaagtcactttagtcgtgtccaactctgtgagaccccatagacagcagcctaccaggctcccccgtccctgggattctccaggcaagaacactggagtgggttgccatttccttctccagtgcatgaaagtgaaaagtgaaagtgaagtcgctcagtcacgtctgactcagcgaccccatggactgaagcctaccaggctcctccatccacgggattttccaggcaagagtactggagtgggttgccattgccttctccgacctacctaattcttttctacatagtgttccatagtatacactacttttatattcaaaattttgaaaagtgcatattatcttatttataggcgtttaggtgcacattttcaatttgattcacgtttcctgaatgtgctcctgtctgctgattagctgtgatacaggaagtctttagtccctgtttaatttttcatcaaagatggttcgtgaaagggtgcatcgctgatgtggaaggctttcttacactgaacactccatcaataaagactcctgtttgcacagtggaaaagcagaattattacttagaaactcccttgaggaaatgtgctttttacacagaatggattatatgcctaaatgtcaaaggagttttcttaatttttgtaaatatccttcatgcccaggaaacagcagtaggctggagattttgtgaatcttaattgcctccattaccatagataaagcttaagtcatatttgtcctcggttctgtacattt

SEQ ID NO: 30253 - DNA, 868 bp, Bovine  19866881702678
  misc_feature (1)..(1): n is a, c, g, or t
naaagcggcatcctcctccgttctatttgagctgcagttggaacccactctggtcctcagctctggttatgggacaatgtggttttaagaatgtgtgagatttatagcttgaaaagtgccaaaaaatcaagaatttaaatcctccctgatttatgtctagcttgttagaggctctagggctttagaaatgctaaatgtttgagtgatgctctgaaggttgagctatattcctctttcagctgattattattaacaatggttgcctctaaagctttagtagctctcagctgtaacctttacacttggtacattcctgctttgtgaggggttataaattccatgatttaaaaaaaattaggaacatttttgaatttttgtagccaacagttccgagatcggttacctgggagatggagggttaagcatcctttatctctgctcacatatctgagctactttcctgttgaatgctgcaagtgtgtaatgagtgtttactaaagaacaattctttacccaagaagagaccatgataagcacagtcatttgttgtctgtatttgttgttgcttattatggatccaggagcatttggtgttgaaaaccaaacctgcatcccccacatggttactgtaaatgatttaaatcaattccttttacacagcatcaggaagtgcaatatgtagtaactaaatatgccatttaaattcttctcaggcaaatgttaaaaggcggggaggggaagctgagattagtgaggtaactgtatttaaatatttttgataggtttctaagatacatgtttctttttccaaagcaaatgcattcatgcctaagaaaaaacaaacaaacagggaaaaggctcttgtgtt

SEQ ID NO: 30254 - DNA, 1053 bp, Bovine  19866881782291
  misc_feature (1)..(1): n is a, c, g, or t
nacatcattttacttgatatcccatagggttgttatggactttagaggaaaatgcttaaaactcaagctttggttttaaagtaatacgggcagaaattggaactgctttgatcacagaattcaactactgcacatattctattattgtaattggcaataacacatttaaaaaggcaaagtttctccttttggtagttataatctgtatcattcaagactgctgcaaaactcacaaatgagtgatatgagttaagaagaaagtgtaggaaggggataagaagacatttaaagctttatcagaacacagcacaaaggaagaactcaactctctacatttttctataaggcagatggtcaaactttttaatacaagatctaaaatacattgcttattaagaggtagaaaataccaaaacagtatttaaggaaaatgtgttgagttacttaaaacaatcagctactttattaaacttctggaaagtcaaactgccatgtggaatcccctgtgtattttaacactaaattggatcattccacgttcaacagagatgtgggcaaatagtggggggaggttgggggtggagtaggaaaacagtttttttaacttgtaatgatttaactctaaggagaaatttcctactgtttgggaattcattatgatatttaaaaaatagggatttctcaaattatcaacactttctctgtatgattttgcacataggcaatgaaactatagggagggatgacttcaaatgtttccctctttgagaaggtaccacacccatcttatataaaaacatatctcactcatcttataccattctctccagtcactgaaatgcaaatacgagtattcttcagactccagcaccagcagaattgttctgtgtgagcaattcaaaagctgtctgaggcaaaaagatacctgagctaccaaaataaacctgggtagcttatgcatgggtgagtaaccctaggtattcttttttcttaatgcacctgggagagatggattttctttacaacctaattttataaggcataaatttaatt

SEQ ID NO: 30255 - DNA, 1316 bp, Bovine  19866881958819
  misc_feature (1)..(1): n is a, c, g, or t
naatgaatcggcctaaagcatgttgaaatagatggcggcccctctcagagtagaggctttattcctgggtggaagaggtcaaactgtctgttaacaatctagaatgggccatttcagcccacagtaaatacctcaggttctttataaatatttttatttaaatcctgtttacatctgtgtacactttctcccttaatatgaatagttcatgttttaattttttgcctttgcttgaattatcaaacgcttttttctggtagttcctaagaaaagctccatttattaatatttatgccttgatcactaaactttattgccatgagagacagaattcttatgcaaactgcactctataaatttgtacaataaatgaaattcaaacttcaccacacttttctgatggagatttgaggagatccaaagaccacagagaagatagggggtgagatatgaactgtttgcccctagggtcattaagagtccatggcaggatggaagatggaacaaatccttaaaacaagagaagccttgcagctcaattcagaagccctgtcagaagcagcccaaacaataatgagtatctgcaaactctgaggggttctttgtacatcttttacttcatatacacccacacatctctcccgtccctaggggatgccccccaacagcttgggtattggtgggctacttgcctcactcacccagagggcagccctgaccatggatcgtaccacatgtctgttgagtctgaactgggactcttgcctgaggcttgccagactgccaagcactgcaggaaacaccagattctaagcaccatcctgtaggacctgctaaatagacctgccacctctactatcaatcaagctgcaaagctgtccgatgctctgtcgctctttgtgggagacctacagtgtctcagaagcttccttgttgccagcctgaataaagctactaatttggacctaacttatttttcaaaactcctcccagctcttcaactttgatgtcaaactatgttaacaatggctggcttggaaagtccctgtagaatttgtaagaaattaatgttagcttcctctcaacagaaacctagggctttgcaaaacacaccatatgcttgtcactttgccaatgaatcaagatgcttttgcagtcttctgagtctaaataattaatggtaatgtctaaagattaccccaaggttcagagagtaaggatcaggcctttccagtgtccgaagttacccaacctcagcccagtccaatatttcatgtgataaatggtcaggcttcaggaccacacacccccatcca

SEQ ID NO: 30256 - DNA, 3065 bp, Bovine  19866880232908
  misc_feature (1)..(1): n is a, c, g, or t
nctctttgtgaccccatggactatagcctaccaggctcctccatccatgggattttccaggcaagagtactggagtgggttgccatttccttctccagaggatcttcccaacccagggatcaaacccaggtcttccgcactgaaggcagacgctttaccatttgaaccaccagggaagtctatatatacctatcagcaggctgttaattagagaaagaaaatgtctcaaaactcagagtggtcccaggcccctcagccacaacatactctttgagataatattggcacaagatgcgtcatcccaggccataaacaactgacatgaatcttgaagaaaggcaagtttccaagtaaatatatagttccattaacatagattaggagaacgatgtatgagtaaaacatactggtttgttgagcccttatcgaagaaagacagagtctagggtaaatatatagttaattaacatagcttaagaaaaacatttccataagaaaatcccattggttagctcaaggtttgagaaaagttaagttcaggtggaaacaagtgtcctcatggtaacatagaattttaagagaaatctaattttgcatagcgaaggaaaaaatctctgacacttgtttgtttcctcctgccacttaagagagagagaaaaaaaagtctgacacttgaagcctatttcctctgtttgaagaccccttgccttcctgtctgttaccctctcaattctttaccaactgagctccaagggaagccctgctaagtagattttgacatctgcttatttctctatttttcagttgcatagttaatttatttaactgcctcctcattacgagttcttaagaaataatatcaccatttaattgggtaggtttcatagacttggcaaaatccatctatttctattcattattatttggtcttcataatacttttggtaaaattgggctcacattattttaccaacaaagaacctaaaactcagagaaatatatgacttatttcaagtgtgtactgcctttttaaaagctgtaactaaatagaattttcctatttctcgtaggatgatctttctactctacaatatggctactcatgatgatatttctccatgaattgtacaaaataaaagtaaagataagagcaattaccatttttcatcatttgattttggctattagtacaccaatagtttggataatagagtaatcacctaatacatggattattataatttttaaaagtaccaaaaataatctgatggttgtggctagacactagtcagctggtatactagttaagaaacattcacaaacaagactaaagggaaactgaggctggaatactactgaagacacttttcttcaactacttgtcacccaacttcttatcttccccaactgttattctagcattcataattattttgaacactgaagaggggtagatgaggttccttcctgctccatcacagaatgtattttgtccctactaagaagtaagatatgtcagtaacaatttaaaccagtagacctttatttatgccaaatgcattctgacatacaggcttctgtggtggttctatagtaaagaatcaacctgccaagcaggagataggggtttgatcgctgggtcaggaagatcccctggagaaggaaatgactgagaaatcccatggacagaggagcctagcaggctaaatttcatgaggtcaaaaaagagttgggcacaacttagtggttaaagaacaaacaatattttggcatacattatctcatttaatccaaagaaaatctttgtgaaataagtgaagataaaaaccatatttgaaagtgagagaaaccactgaagcttggcaaagtgaaataatttccttaaggtctcacagctcatgtaagaggcaggtgaggaaaaataattcttttttttttttagctccaaattcagcatttttgaatcacatctgtgagaccagataatttatgaccttcccctgaaaatattttttgcttcttctgtcctctcaatagaagtgactaggagctcattgcccctgggatattgattgcataaagattttcttttctctctcaggtggacacaaatggaaagccaagacctcttatacattttcctttcccatcaactaaaatggtattatgtaggctccttttatgagaaaaatgcaagcatgaggccaagtgggataggaaacagattttgtactgtttgaagcctatacgacttgagtggctctttttaagaaaaataattcaaaattatggatacaaattagacattcaagcaaatgtttgtttaaaacaggaagtctcaaacatatcacaaattaaaaaaaacttgacaaactataatatgtggaaaacatatcattagtattcattaacacatgtctaaaatactacattctctggctgaatatctttcccctcttcagatgacaaggattttgtcatatgattttcaataaagaaagaaaaaaatgattgtgaatcttctggaatgttttttctccccactcacaaacttatgaggagccaaacctcatcaagcacattcataatgaaatatgccctctggcctccatcttggatgagtgggcacagtaggtaggatgacccttctacatctgctgctgctgctgctgctaagtcgcttcagtcgtgtccgactctgtgcaaccacatagacggcagcccaccaggctcccccgtccctgggattctccaggcaagaatactagagtgggttgccatttccttctccagtgcatgaaaatgaaaagtgaaagtgaagttactcagttgtacccgactcttagtgaccccatggactgcagcctaccaggctcctctgtccataggattttccaggcaagagtactggagtggggtgccattgccttctccgccttctacatcagaagagtttaaataaagtctagtcagttctcattacaggaggagctcagaaacagtagcctagaaaaccttgcaggtaaccatctaacctaactggggttcagaattgtaaaatgctc

SEQ ID NO: 30257 - DNA, 1056 bp, Bovine  19866880288210
  misc_feature (1)..(1): n is a, c, g, or t
natgcaacaggctgtccaaaggctgggaagaattttttttttttgagaaaccagagcttggaaaagcatccacatatatttgggaatttagaaacccaaatatttgtccaaggaaggtcagatgctcagaaaagaccatagaatgctctaagcttttacctctggctgacctctagtctcagtgcaagcaggaagtgaagtctaattcagagttgtaaacagcctagctgagtttgagggagtgactcatcacggagtcaatctctaaaaactgggagggttttgtgtgtgtgtgtgtgtgtgtgtgtgtgtgtgttttagctcctggtgaacatggaaattgctatcaaaatactagctgaacacaagacaaaagaacaaagacttaaatctcaacacattgaaatatattacttcatattcatttggaatcgtaaggggccctgaatagccaaaacaatctcaaaaaagagagtaaagttgaacaactcacatttcccaattttaaaacttcaacagagctatagtaatcaaaacagtgtggtattagcataagcctagaagtatagacggagaaggcaatggcaccccactccagtactcttgcctggaaaatcccatggatggaggagcctggtaggctgtagtccatggggtcgaagatagtcagacacgactgagcgacttccctttcacttttcactttcatgcattggagaaggaaatggcaacccactccagtgttcttgcctggagaatcccagggacgggggagcctggtgggctgccgtctatggggtcgcacagagtctgacaggactgaaagcgacttagcagcagcagtggaagtatagacagacggagtagaattgagtgtttaaaaattaaacccatacatctatgaccaatagattttcagcaatgtgccaaggccattcagggggtgaagactcatctttttaatatatgatgcagacaactgcatatccacattcataaaatgaagttggattcctacctataaatacaaattcacaatgggatcagtgacctaaa

SEQ ID NO: 30258 - DNA, 3168 bp, Bovine  19866880637871
  misc_feature (1)..(1): n is a, c, g, or t
ntggatatggaaattgctgtcaatctctggtggatgtttaaagtaaagtgctttctgccttccatggggaaattttattctactgggaaaagataaaactattctacagagggtgatagtaatgaggcagccacagaattgggtcttagaaacattgcaaagtaacctgtgacttggtttcccactatctgatttagtcccttatggaagtaaagtggtcataactcgtattgttgttaaagaaattttgaagctatgttttgttattcacaatcagataacctctaaagaaagtacttgggtcaaaatgggaaattgactatacctttctggaccactgcatagaggagtgagggtcacctgtgggtagtgtgaattttagagctggctgtatgcatgtgctgtttcaaggcagaggaagctagaggaaagccagagggagtggccaacagatgatagaaaggaccactgattggccaagtggatatcaaaaaacttggggaaattgtcaaatgccgttctttactaagtcatagtaaataatctgcaccctctctttcattttcccatgaaatgttcagaaaacctataatattcactaaactttggatgagtgtgctttttttttttttttaataatcagtgtacaggatgaatatattgggtggcaagattgatatctggtttgactaaatgcagcagttgggcccagactgggatttcaaatatgctgggctattgtttcagctttcatttgaagaaaagttttcataaaaatttcataaaacaggcataataaaaagagccttgaataaagaattgaaaggtatgggctaacattcaagaaccctcacctcttcattatgtctcatgtcatattactgatagagtactcctgaaagatattagaaggttttatgagttcaaatattaccaagagaataaaaagagtttataaaccataaagagctccaaaggttaaaggcagtgttttggttcacagtctagattatgagctccttttctttgcttttgtttcttaatatctagcacagcaatcataataacttaggaggtactcataaattgattgttgaagaaatcaatgtaggcttcaggatcgcatatgtattttatgtacatataaataaattggtctcaaaccattcattgacaaagagaatacaaactgtccttgtgtacttgggaacaaaggacaggaaatagcaatggaattgatttaagttaaagtcacatccaaatagaatggtagcaggggaagttgaataccccttccctagagagtctaaagagattgaattttgttctccttggagcaatttaagtctaatcttgatgaacttgaagatctctcagcatcttttctatctgtttaatcttaggattaaaatgaatctgaaatctttacggctgggatggcaattgatgtcttctgtgtgggcttagataactctgattcagtggggagtgtccaacaaatgcactgcagcatatatgtcacttggttggtttctcagttgactattttgagcatatttatcataagcatttctaatacataattccaaaaagcttaatacaatctgtaggcctttttaccatcaatgagtcacactgagcatgttcctttggcctttgatgtcagtgacagagagtgtgacttagtgctcttgtgactaattttgtgtaggttgcttctatatatggaacaacatgaataaatcactccctgtatttcagtggctttacataaatacataaacagtgcatcctggtttctgactgtgatagtttttaaagtgatggtaacatgtagaccagaatatatagcatctacacaagtttacttcttagttttccttgctcttagaactgctttcaggttgggataaggccctgcattttagagggccttgtgtatcatggaaacacacacagagtacatttatctaaaaaagtgtggttatttctgtcacctgggatgtaggactcatactggcacagttcatactgaaacaatgagcatccattctcgtgaccagtaccatttaggcctcagaaaactacttctccatatcttgtcctatattttcaaaatagacggttgtcaactccaagtgctataaagatttgtgagacatgatactgctggtgtcacagatggtctgtgctttagaaatcagagagaatttgagggcaaacttacatagataaaagaaaagacaagtaatttgtgtcagtctgggtttaatcaggaaacagaaccatttctaggtattatgagaaaaaacatcagtgaaaggaattaaggttgccatgattgtgggaagagctgagacagtggatgttggaagtctggagcttgaaggtcaggaaaatagtcattaagaacgagctggaggctctaagacatactattcttaaaggactgattgggaattgctgcaatctcagtagctctaagaaagcgtctaacaaccagcagacagcaacaatgcggatgcacctggtatgcctgggaagtcggtggatattctccttgtacccatgaatcttggtaccataaacccacaagaataatgacttcttttccattctgcctacaaaatatcacatgagtttctttcaccatctatctctcattcagaaccatacaaagctgagacttctaaaatatattgttcctggctactactctgcattgcataggagaggaataggggcagtgctgagctgacaaatggtagttcaatacaatcaccctttcatcaacgcaacatccaggtgcaacatttcttcttaaaattttaagttctgaataaagacaaatgtaacgccttgctttcaactactgtgaggcaacttacattaattcatgtacagacacatttattttccccaaagataaggcaggaaggctcatttgccactctatccatttctgataatccatgacttggatattaaaatacagagttgaccaccatgagcatatttttaatttcataattgagaatatatgagaaacttatacttatttataaacttaaactaaacttaaacttatttatacaaatacatatgtgtgtgtatgtgtgtgtgtgtgtgtatatatatatatatatatatatatatcaaagaataaag

SEQ ID NO: 30259 - DNA, 1946 bp, Bovine  19866880702899
  misc_feature (1)..(1): n is a, c, g, or t
natgagcgggatgcaggggttcctgaggaaggccagtgggcacctgtggtgggagaaagaaaaggcagtggcgggcagctcaggtggcaagaccagcacctgccttgttcaggtactaagccactattaagcgccacctgtatgcgggcctccgaggatggctgcgtccctgacttgtaggtgtcagtgatggagaagcagggcttgaggggggccccaaaaaggggaggcgatgtgctcaaggacccagacccccagccacagcgagcgtggggtgggggcagggagatcatgcctccaacgggtgaagttcccgccccgcctgcctcccaagatcccaatctatcacccctcgaatgtccccaggacccagtcctccaacagacgaacgcctcgggcgagccaggggccacccaggtcacagggaaggggacccggataagtgaggggaggaccaggtgatgtccagactggggccgcccatacggcagcctcaggctatacgtggccctggactcggcatggggctagtgggacttcaaaatgttgtttaaattttatttcacttcaataaatttaaattttaaaacccaaataatgtcatggatttctttagactcaactactttggcaggatgttgaacatggaacatccgaaccgagaagtgctatctgtaaaaacaacagagggttttggagaattaagggtgtgcaaaagaatgcaagacattttgctaatgatttttatattgatgatgcgctaaaatagtattttggatgtgtgcatgttaagtcgcttcagtcaagtctgactctgcaaccccatggactgtagtccgccatactcctctgtctatggggattctccaggcaagaatattggagtgggttggcaattcattctccagggaatcttcttgacccaaggattgaaccctgtcctgggggtttcccaggtggcgatagtgataaataacctgcctgcaaatgaaggagatgtaagagatgcaggtttaaaccctgggttgggaagatcccctggaggagggggtgacaacccacttgggtattcttacccagggaatcccacggacagaggagcctggtaggctacagcccatggggtcacaaagagttggacacgactaaagtgacttttcattctgttcatactgctcatggggttctcaaggcaagaatactgaagtggtttgccattcccttctccagtggaccacattctgtcagatctctccaccatgacccacccgtcttgggtggccccacacggcatgtgttagtttcattgagttagacaaggctgtggtccgtgtgattatattgactagtttcctgtgattatggttttagtgtgtctgccctccgatgccctcttgcaacacttactgtcttacttgggtttctcttaccttggacatggggtatctcttcacggctgctccagcaaagcgcagccgctgctccttaccttggaccaggggtatctccttatcaccaccccttctgaccttgaaagtggagtagctcctcttggccctcctgtgctggtgcagctaccactccttgtattaacattaatgatatcaatcccataacatataattgaactattcatgatgcattaatcttctctttagattactaggggtttcccttgtggttcagctggtaaagaatctgcctgcaatgcgggagacctgggtttaatccctgagttgggaagattctctggagaaggggatggctacccactccagtatcctggcctggagaatttcatggactgtatatactctatggggtcacaaagactcagacacgactgaacaactttcactttcactttgggattagtagaaattgatgattcatctgaaagaaaatcaaacttttattacatcaggtcttcaaaaaaaaatcataga

SEQ ID NO: 30260 - DNA, 1249 bp, Bovine  19866880941731
  misc_feature (1)..(1): n is a, c, g, or t
ntaccctataagataaagaattactgaagctgtcattcaaaatgattcaaatctcttaagagttatatctccaaagtcttataattatttactcagttccctcgatcttttatccaagtatggttttacctcaagagcacattcatctctctagtcagtggaaatatttattcctctttatatattattaaattaacttcatgacttagaaataagtgtctcatgaatcttgttatcatgaattaataagaattctgtacatttgtataatgctttacagtgttcttccacataaattatcttgtttagtttccatagatagcatattcaaaagcagagatattactttgccaacaaaggttcgtctagtcaaggctatggtttttcctgtggtcatgtatggatgtgagagttggactgtgaagaaggctgagcgccgaagaattgatgcttttgaactgtggtgttggagaagactcttgagagtcccttgggctgcaaggagatccaaccagtccattctgaaggagatcagccctgggatttctttggaaggaatgatgctaaagctgaaactccagtactttggccacctcatgcaaagagttgactcattggaaaagactctgatgctgggagggattgggggcaggaggagaaggggacgacagagaaggggacaactcgcagatgaactctgggagttggtgatggacaaggaggcctggcgtgctgtgattcatgggctcgcaaagagtcggacatgactgagtgactgatctgatctgatctgatagtatgttagggaaagctgatattaataccccaatattaactctgaggaattgaaaacttaggaaaacataaatcactttcttgagttcatatggctgtggattgttgacctggacttagatttaatccagctttttctttcccttagctggaatgatggtgaattcactaaggtgcaggattctgtgagatctagccccaaactatcatccaggtagcctcaaccatttattagaatttttttgtgtgcccagtggtttagaacttgggtgtgatagcacattagagatgaatgagattggtgtatataactaagaagcgggaaactttggtggactttgaaggaggaatgtagttttaatgggtggagacaagaattatgtcttactgggttaagggcagcaggaacaaagatactaagagaaggagaagttggaaaatattgagaagaggg

SEQ ID NO: 30261 - DNA, 934 bp, Bovine  19866880948981
  misc_feature (1)..(1): n is a, c, g, or t
naccaggattttgatttgtaaaccaaaacatgtcaccccaaaataatgcttctttgacataaagataatgttgagttgattatttcaagaaatagctggcacaggacaagctcttaggaaagaaaatgagtttcccttttgtaaaggaaatttacattttgtaaaggaaatctctctttgtacccggaagagaaggataactcttcttcacaagagactcatcaatggagaaagtaccactccaatctgcacaacaaattgtactcttttttgctatgcttctcctggttaccttcccataatttgcctcttcttgtccagaagtccactgccccctcttttttagcctaaaatggtataagcgtctcagtctgaaacatccctttaaactgtttatgactgaatttctcccatgtatatgtaaatagaaatacatatctcaaaattttgctgtctgttgctaatctcttttgttacaaaagcccagttgaaaatgtagacatctaaataaaaaatacttttcctctcctacagactcaaccaggaacttctgcttgtgtctaccttagtgcccattggtgagacatgtttcttctaaggcactttgcctggaccattgtttaaacttctgactcaaagtgcagacttatctgtgccttcattgaagctactttgtatgtgatttctacgtaacatttaagaacagttcatcccgccctgggattggtgcatcccagccgtccttagtctttctccatattgtactttcatcctggtactgtcctacttagcctctccaatctgaatgtgccactattcaccaattttcaaatttctagaaaccaagtattcacggaatatcccctcctcatagctctagctcgaggataccatttccccagaagctttgtgttaacattgttattttcaaaac

SEQ ID NO: 30262 - DNA, 1086 bp, Bovine  19866881220696
  misc_feature (1)..(1): n is a, c, g, or t
nagcaggtccctctagaataagcttgcttccactctccaaggctagtatacaccctcttaacactcacttaataagagtaactatattacatgaagcagttcttagtgccaagtttcaagccatgggctatatgaaaagaaagttactaagacaacccattgtgatttcccaatctccccagataggtttatcaggataacagagactataagagagaggcttgggatcattttgttccctcaacaaaccactgggagagcatttctgagtgtacaaaggacatctgagctaattacagagttaaatagaaagtagctacagctaatggtaaaactaatgaattatgaagtcatttcaccatcatttctttcaggtttaaaatgaagaaggtgggctaggtcatctctgaggcctccttaagctctaaaaatctatgtctgtagagagtacctccatttaaactgacattttatgttaaacatacaaaaacttattgacatacaaacaaacatataaaaactaagaatgcattctgtaagtaccagtatagcatcagtatggctaaagcctgaacttttaaaggaaaatagaaagcagacgcttaagaatagagaagccataacttaataatttgtgcagtacctatgagttttgaatgataaggcacttgaatccacaaagcatttgacaaattccagttcataaccatttgtttatcagcatatttgcagatccccaagtgtggtggagtttgtaaatgtagtattatataggaatgcagtatgtattattattcaggaaatgataccatggaataagaaattttacaaaatttatttcatcatttcaaaatttatggtcataaaggcaatttgacaatgtcagcagggtgaggaacacagtgctccatctccctggtcataaccaaatggccccaatttccagtcattcatgttttctggaacatgggtctccatttcaaaatgtcctaatagttatgaatgacttgtttccaatataaatactaatgtgtttttctatcagattagctcattatggaataatgtacatcaatttcatgcgta

SEQ ID NO: 30263 - DNA, 1104 bp, Bovine  19866881244044
  misc_feature (1)..(1): n is a, c, g, or t
nattatatctctttaatagaaaggaaaagtaccctaaagaatcctcccctgcagaaacctttcattgcttcaagatcctttagaattatggtgtctccaaagtgatttattattagatgtactgaaccacgtaaatcaatgttatcttgaagttcaaacagatcaggtaagaggaaccactaaataacatcaaagctgttgtaaagaacaactcaggaggatgataaaaggagtcctgagatttgatccatgtgtataaacaatactgtgcctgctccttctaattataaatacacaaaatttgattaatcataatgtgaagttttctcaagggaaaaacttactccactaactcaactattacatgtttcttgtcattttaacatgacagagcatccttatagctctgagaataagaaacactttggcatatggatctgagaatgaattattttttttttttgtatatacaaagctctgaaaaagccatgtgaaggctgaatgatgtgctgagtggttttaaaatatttcatcaagaatctttgaatttttcaagaaaagaaaatactgtttaccgttataaggaaagttgacagaaataacactcaaatatgaacaaattgagttccaatttatctgaactgattttttaaaaataatttcagacctacaagggcatttcttttatacatctctgattaagatattgaacaaaacatgtttttgttttttttcaacatctgggttctagtgtcagagaagtgagtgacgttttctgactgcctctctgacttccttttcacaagactcagagctcttgctgttgacattgaatgaagtgcagagcaaaagagacatgaaaaaactctcttcaaaaagtttaactattagtattcctcacaataattcaatccttacaatcagccaagtcttcaaatagatatactgtctgatattattcatctccatcttcttcacagttgagctaaccattttacaatgtaggtttcagaagtcaaatagaagcatacatgtcttaggcttttaaaaaatatattaagtcctcctcccaatagaaagttgtccctggtaaacttgaaaagg

SEQ ID NO: 30264 - DNA, 1503 bp, Bovine  19866881264596
  misc_feature (1)..(1): n is a, c, g, or t
ntaaatgaggggttgggataagaatggttgtggagaatcagagaatgaaagtgggtacaaagagaaaaaagattgaggaactgctgagacccagaaataaaccatttacctttcaagtggaaattgagcgaggtaaaccccacagggagacagcacgctgcacatttaaagtgaagagcagcggtggttaatggacagaatgactcacctgatgtatttttccagcaaacggaatttctgaatcaagcatcttttgttatgagcatcaagagaatacaaagacagtctaaatccaacaaaggaaatcattgattcaaaaagaatagatgaaaacttattgataacaagccccagagcaattcaacctcaaaaatatttggctgtatatactaaatgtggctcagctccttagggaatatcatgcccaaagactcatcccaggattttatcattagcaaatgctctttaattagaatgacttttatttgtactgaggtcacagttataaaaatgtattctccctagggggaaaaaatgtattgaagggctactcctagtattcagtcatgtgtttggaagttttgcttacatctaatattcaactcagcagcttccagatgtgtcatgttgctttgattttatcgatccttgttacccaagggcatttgggcaaactaaatctcaatctactgtaatcgagagaaattagggtctttgtcagcaatggtaaagaatcctccagctaagcaggagatacaggttcaatccctggattgggaagatctcctggagtaggaaagggcaacccactccagtatttttgcctgggaaatctcaaggacagaagggcctggtgggccacagcccattggtcacaaaagagtcaaacacaacttagcgactaaacgacaacaacaaaacaaaaggtctttatagtactgatgagtttcaagttaatttgagacagtggataattttcatggtttcagctgaacattacctcatgcttcatctagacctttacaatacagtgaaggttttcagactttgagaaacacaatatgtgtggattcaagttacatctttctccttttcctccttttatctatcagccttgagtttaaaaaaaaaaatgatcattttctgaagggcaatggagggggcatgtaggagagcacacataatcacaaaagaaagaacacttaagtagggatagttactctaacttccctggtggctcagatggtaaaccgtctgcctataatgcaggagacccagattggatccctgggtccagaagaccctctggagaaggaaatggcaacccattctagtactcttgcctggaaaatcccatggatggaggagcatagtaggctacagtccgtggggtcgcaaagagtcggacacgactgaatgacttcactttcactttcactctctctctaacagaagaaaaaagttccacagtttgtgctaagattgcttatgctgccatgttta

SEQ ID NO: 30265 - DNA, 2197 bp, Bovine  19866881363758
  misc_feature (1)..(1): n is a, c, g, or t
naatggttgagccagaacagtggttctcaacgatgaatatacagcgatatcactaggcacctaaaccacttcatgctgggacctcaggccccccagactatgagctaattgattcggtgggctcagacaccatgtggtttttaaaaatctccctaaatgagttaaatatacagtcaggactgagaatcactgccctggaggggaaataaggttagtgttccctgacactgggttatcaaatgcagcagattcttctatgaaagatcattccttaaagaacagagaatcagcaaagacattgtacttatgaaaatattctagcttaggggattttatgttcaaatatgggccctgtatctcaatcaatttgttcacagaaggtttgctgctgctgctgctaagtcgcttcagttgtgtccgactctgtgcgaccccatagagagcagcccaccaggctccccgtccccgagattctccaggcaagaatactggagtgggttgccatttccttctccaatgcatgaaagtgaaaagtgaaagaagtcactcagtcgtgtctgactcttagcgaccccatggactgcagcctaccaggctcctccatccacaggattttccaggcaagagtactggagtagggtgccattcacagaaggtttaggttgtccataattagatattcagaaaagaaagaaacaaggagttctcaagaggtcttctttgcctatttccagtaagcaggggttccctaataaaagatgtagactctataggattccttccccttgctgtgaagtagattattgttcagaggtattcacttctctccagtatctccatagccttaaagcacttttcttaatcttgccttcagccttagccacatgactctgccagtggaatgtgagcaagcaaaacatggtaaggtttggcatgtgcttgagaaatggaacttcatttaatccaccagggacatgataaaactgtcttgattatctttctggcccaaggaggataagagacacactgagtagagcagactccacccacccacagacctgcagttgcatcctctcagctcctgggacctgaagcagagctcctaggaaatcaatctgaagatggacaagctaaataaatgcttactttgtatgtggcttttactttttggtcatttgatatgtagtcatactgtggccaaagctatctcatatatttgctttccatgtcttcattaacttaaaatgtgctcccatccctaacatgtttttccaaattagctcaaaatctgcttgtttaaaagcatgttcctgtaacatgtgggaggtgattttattatctcctttcctcatcatccctgcaaacaaatatggtattaggttttatgttttggaggatgttccatgaaacacttccatcaacagaaaggactctagtccaggattgaggtcaaggtcttaccaaccaattgctgggttcatcacagaactatcctaagagtctaaatttagaagcaatcaatgtgactaccgttaggacaatacttaagtaatatttgtaattttcataaaataaactgttatctcacattttaaaaatactttaagaaatataagcaggaggcagtctatatcaacaaagcaagatatcaaactgccaataaggtacggtttcaatggtataaaataaaataaatatataaagtctataagtataccaaaatgttagtggagattatccctgaacaagggcattaagagtgattattttcttttttaaagcctttcctgtactttctaaattttctttaatgaacaagttttaacttcaggaaaaaacaactctaaaaagggtaagaaagaaaacagtccctgagggactcatagctctgaataacacataattcaaaaggggaaacagttgacaaatacaacttattcagctagcaaaatgacataaaactgacctgtcagttagtgacagtcctctacttgtaaggatccctgatttcttcttgggtctctctttctgcatggctactgctagaaataagtttgtttggtctctcaaatcctgcacagttctatatactgagttgccttctccttagaataagaagctgttcaatacaaacaaataaggtgttttatttgtatttgtcttcatttaacttttccagttccactaaaccgcatga

SEQ ID NO: 30266 - DNA, 1274 bp, Bovine  19866881392774
  misc_feature (1)..(1): n is a, c, g, or t
ntatgtacgtatgtatgtattctaacaggattcgggtagtttcttgtaaaggaaatgatatatgtctttattggtctagacagcaattaaagtcttcttcaaaactgaaaagacttttacagctaaaatttcctctgtgcccgtgtattaggggaaaacagatatcttatttattcacttttcctattctctttctccaccttttcctcttagaaaatttatctctgtccccattagtgattctctctccttctgcagaggactttcttaagttgtcagcagaccaagaacagcattaacgacttgatcagagaattaagaaggccataactaccctagtgtgaaagattaggggtgtgagaactgagaaggaacccaccaacctctctgcaacttctcaagagagcccagccttggaattcaggccatcaccctgtcactctgtctcaagcaacagagtatttgactcaactcagcaaacttttgtcgagtgcttgctacacatacctactctatccctcttactcttccctcccaatttaccagtaaaaatcgactcaaaataatatgtgtagtattgggtgttaatataggatacgcacacacacacaaaacatagtgcctggtgttaagatttcacatttctgccataaaaatgtgacatagtatacctttgtgggtccatctgtttagcagcaaatgaaggtatatgctatggataacactgaatttcacagggagcttcttcaatcaaggagaaaggtacattgtcactgggtgctcattttacttcagatttgtgtgtgctgtagtttgctaagattttaactcaacagtgataactataagaagtccctgataataatggcagtatttaagtcatctcactccacatgcaaaagcaatcttgtaggaaatgagacacagtattgtaattagaaatagatcgagtcaataaatattaaaaagtaagtatatatatatattcatttagccattttttcctcagtagtacctgcaatacaggctcatcctaacatctgacccatgaaattaagatgataaggagttattgaaagagaatatggagagaatttaaaagtcatggctttttgaaattccagtgtgatttttacagttgcaagttgatgcttcttcccctccccgcacctaaacggtaaacaagaaataactggcagaggacaaatgaatgcatttcagtgagtcccatttataactctatgagttacattttgttattttgatagactcaa

SEQ ID NO: 30267 - DNA, 839 bp, Bovine  19866881450055
  misc_feature (1)..(1): n is a, c, g, or t
naattaatacgcagtcctttccatctatagttagtgttctaaaactgtgtgtgtgtgtctaaagatagaaattcaataaaagatatcaggttcacaaacattgagaggagaactcatattcaggcaatttgtcagaaagtgttccaagagtaaccaataagagaatgaggagaggaaagcaggatagggaagatgaagaagccatacaagggtatgattcaatgtgaagtcctaacctcactttcactatgagcatcagcctcagtctgctagagctaaaagctctagactataaattatacatcacagtttgtcccagctggaggtaaaggagctagactttaatcaataattggctaagggccactccagaaggatgtgaactcctaggtactttcagttctgtgtgaactgttaatgcagttctagtggccagagagcaagtttccaagagaatcctgacataaaccactagaagttcacacaacttgggagggtagttagaagattctgaggcaatttggacagaggacaaataattgaaaagataatgagaattacagttacaaaggaatgacaaaatgctattaccattgcagatggtttgtttattaaggatatgttagtatacaaataatgctttacttgtctgaggatactacaattaaagtgtgaggactgaaatagaaatgggaatttcaaggttacaactaccgagaaatccaaattaatacatacctaggctcttgcaggtattgtagaacagaagtggtaagagtcgccatcactgccttgtttacatttttagaggaaaagatagagtgaaatttaaatcacag

SEQ ID NO: 30268 - DNA, 869 bp, Bovine  19866881502596
  misc_feature (1)..(1): n is a, c, g, or t
ncttgttgacttgaattcaattatattcatttttgacagtgtaattgatatcagagttaactctaaatgatctgctaaagtttcttttgtcttcctagttttaatggagctatttaaaagagcaaggcaattgttatctctgttatccttaaacaaaaaagtatttggtttaaatttattcgaactagagaatagaatactaattatcattcaccatgtttaaaaagatcctattaggtggtccacattaaagattctctgctaagcctttagtttctagaggtccaccccttgctaataagtgacctcaaccaaaggaatgcctccttataaaaggattgtaacctgctgtatcatcttcatgactggcttatggatatctctttctttcatagcaactagaattccttatcctatgaacattttgatactgaatgtaggcacggctttgctatcagttgtaagatggagtaaagttccaggtgagagcttttaagttctcttgtctcacagaaattttaaagcatatctttcttcttgaggtcagtcacactgccaaacattctacctcaatttctttttcttttcagagctactttttccagaaaattgccttgtggaaaaggagctgcctttcaaaactggtgtgaggggcatgaaagctatactattcatactaatgatggaccattggaagagtacatgctcacagactttctcctgtaatcttgaggaaggtgtattttccatcagttttcacttttaccagcccttgctctctggtgagttactttttaatgttctgactacgctaccctggttgctagtatccccatccagggcttcacaaagaccatgtgttttatggt

SEQ ID NO: 30269 - DNA, 720 bp, Bovine  19866881692619
  misc_feature (1)..(1): n is a, c, g, or t
nactcaggctgctgctcatgatggaacactcaaactctgcctttcccactttgcctgcccacatctcgtattaccctctttgactgtctttgctggtttttcatatttaagtttactgtcacttcctcctaggcttgtctgatgtcccatgtcttggttggctttctctattatgtgctcctgagcttgcctttctataaagttatcatgatgcacaagcatctctgacccctattatctgggagctccataacaaaaagccctggttggttaggtcactaatgaatttccagacctagcacaggaagtgacaaatactagaggcttaataaatattaattgaatgatcaagataatgaattaaatgagttatacaatccaaataataactaatagtaacaaaagtagctaacattttcatagtgcttactatgtgtgagccatagttccaggtatttgagtaccaagtactatttcagtcacttaattgttctaacattttcataattaggtaataacatgttttgttttcattttacaaaagaataaaccaaaagatgatgaaatagtgatttaaaccagtggttagcaatctactacctttgagccaaatctggccaactgcctggttttgtaaataaagttttattggtacacagccacgcctatttgtttatgcatcttctatggctgcttttcctctgtgatcaaagagttatg

SEQ ID NO: 30270 - DNA, 898 bp, Bovine  19866881881806
  misc_feature (1)..(1): n is a, c, g, or t
ntttctatttgccccagaagcagccaaatacaggcactatttaacaccaataatggctgtgtttctctgaatttgcatttagtcaattgctagcaaaccaaatcatatttgtagtacatggaagtaggatgtggaggtggtgtgctctttaaataaagctttttaagaatttaacaactaacaccctaatacacctacttttatacattgggctttttaataatgggttttagtaaaagtatttcaagttttacaaatgaagtcatatttcaaatgtactacaagagctttcttttaaaaactgttactttatcttgaatccttctatggatatgttttctgattcatttcatttttttatacttttgatagattcgaatttttataaatcagatttagtttttcttaaagtaggacacagctggattactctttatcctacagatgcatgctgctaagtcgcttcagtcatgtctgactcttttcggccccatagacggcagcccacgaggctcccctgtccctgggattctccaggcaagaacactggagtgggttgccatttccttctccaatgcatgaaagtgaaaagtgaaagtgaagtcgctcagtcctgtccgacttttatcgaccccatggactatagcccaccaggccctccgtccatgggattttccaggcaagagtactggagtggggtgccataacatagggtaattagttaatatccacagctttctgatgagatgaataaaacacgaagctctatatactatcagtctcctctctcaccttttcttctcacatgccggcaagttttttgtggttgaaaattggcagggaaatgttgcaggttaatttcctctatctcaagatagaggctctctttaagatacat

SEQ ID NO: 30271 - DNA, 3286 bp, Bovine  19866880388599
  misc_feature (1)..(1): n is a, c, g, or t
naatggatggtgatgatggttgcacaaaagcatgaacgtgcttaaggccactgaagtgtacactttaaaatacttaaaatggtgaatttaatgtcatgaatttcaccacacacatacacaagcagcacaggcttttctatcacaatgaggccgggaagttaaaattaagaatcctttgccattccaggataaagaagttgtggtacatagacatacaatggaatattactcagccattaaaaggagcaactttgagtcagttgatgtgaggtggatgaaactagagcctgtttacagagtgatgtaagtcaggaggaggaaaacaatgattaaatattaatgcatagaggatagaatctagaaaaatggtactgatgaatctatttgcagggtaggaatagagatgcggcacacacagagaatggacttatggacacagagtgggaaggagagggtgtgaggaagtgagacagccacgtcgacatgtacacattaccacgtgtggaacagatagctggtgggaagcttctgtaatacgctgggggctcggctcagtgctctgggacgacccagagttgtgcgatggtggtggggtgggcgggaggctcaacagggaggggatatatgtatacttacgactgattctgttggcagaaaccaacacaccattgcaaagcaactattttccaattaaaaataaatgaaaaaaaaataaggtgaataggaagaaatcacaaaaaagagaatcctttgctgttccacatggctttcctttctgctcttttacccagtgtatcctgcacgcttcctccgggcattgccaccccaaggcacccttttagataaggatgcagctgagcggggtgcctgggctgggaggcagaaaggttcagctggaggagctgtggagggatttcctgtcaagccacaatcacgccactgctgccgtcccatcctctacaccctctgttcgctttgccgtgtgaggacaggcgggctcgggggagttgagcaccagacccgcctaggtcctagggaccactcttggctcagccttctccccatcactaagctcccgcgtctgacattaagcagccaggatgactgacccagggcatctcaccctcacctccttggagggttaggggaagtgagagcctacagccttcctcctgggagacaaaatccggtggccgtgggagttgaagggtcaagaaggaagagaagggcaggttcccagggacctgctgttcccccagcagccatctgctgctgcctggggtcagagccacattttcctacacgcttctcgcttctcgcaactcaaatgttgcccttgaatcaagattgtggttaaatagcgctaaataattaatcgcactcttgaactggtgttctcggcctgcttatgcttttctggttgcttctgctggtctctctttttaattcagaagtggtattaataatttatgagcacgtccgtggtcacatatacccaggacccgccgtcactctgcgagtcagaatcaatactggggaagttacagcctccaacctcaggctgtctctttcctgctctttttggaacagaaatgagggtcaagtctatgtatagagagctggcctggatcaggctcaagagctttttattctgttcaacgacgttgacaggcgctgggtcctgacagactttaaatagatgtacgttctgtgacaaagagcacccagggagagaaattagaaaatggaaaatggagcactgctttttattcagccaggacttcaaaaaagggggagaaggggtatctgataagctgattccaggaggcagagttgcaggaggagaaggctctggaaggtttgggatccttattaaggaagtaagcggcccccaccaaaatgggaaacagaagcaggactgggacctggtgtaggagatctctgcggtgcatttcaggctggcggataaaggatgtcctaaaggaaccaagagggaaattgagcacaaagaatgtccctgggcttgcctgtggctcagtggtaaagaatccgtctgccaatgtggtagatgcaggagatgtgtgttcgattcctgggtcagtaagatccgctggagaaggaaatggcatcccactccagtattcttgcctggaaaattccatgggcagaggagcctggtacactacagtccgtggtgttccaaagagtcagacacaacttagctactaaacaacagcagcagactgtcctcgattacaaaatgtctgcagaggacaaacgagaacactctaaatataggactgctctagaaggggatcagggatgagggcggggtaggtgggagattcatttttactgaatatgttccagaatcttaaaaaattttgccatttgtaagtattcttctttggaggaatcaggaaacgaatccatgaggacatcaactggaggcaggttcaaagaggcttatttgtggtgaacaaaaagaaatcagaaacacatagactgagagggcttttttcctggtttgtaaatatttttattaggtcctgtaagtactcttgcctggaaaatcccatggacagaggagcctggtaggctgctgtctatggggtcgcatagagtcagacgtgactgagtgacttcactttcacttttcatgcattggagaaggaaatggcaacccactccagtgttcttgcctggagaatcccagggacgggggagcctggtgggctgccgtctctggggtcgcacagagtcggacacgactgaagtcgccttggcagcagcagcaggagcaaagacgtaaaacgcagttaaatgaggttgcactatgcaaaatgactttattggtattcaataggtcagatatggtataatattggcaattttacacaggttaatccagaacttttcaaccttggcactattgacgttttgataattgtatggtggtggtcggggggatgttttgtgggttataggttgtttagcagcatcatttgtctctattcaccagatgccaacagcacctcctcaagttgtgacaatctttgattttcatgtctccagcaggagtagcaacataattttggggttcagtgcaaaataaaaatgccccttatataaaaattattaagaatttcaagagagtgacagcagaaaattaaatgaagcatggggcctggggcccttctaagagtggtaccccattccactatacaatttacaggcccacaaagctgatcttggtctccagaagctgcccaatgtgggaaccaac

SEQ ID NO: 30272 - DNA, 2342 bp, Bovine  19866880569481
  misc_feature (1)..(1): n is a, c, g, or t
ncatgaagtgatgggctggatgtcatgatcttagttttctgaatgttgagttttaagccaactttttcactatcctctttcactttcatcaaggggttctttagttcttcttcgctttctgccataagtgtggtgtcatctgcatatctgaggttattgacatttctcccagcaatcatgattccagcttgtgcttcatccagcccaggatttctcatgatgtactctgaatataagttaaataagcagagtaacaatatgtagctttgacatactcctttcccaatttggaaccaatctgttgttccatgtccagttctaagtgttgcttcctgacctgcatacagatttctaggaggcaggtaaagcagataagataaggtggtctggtattcccatctcttttgtttgttgtgatccacacagtcaaaggctttggtgtagtcaataaagcaaaagtagatgtttttctggaagtctcttgctttttgatgatccagtggatgttggcaatttgatcatatataatatataatgtttgcacaatgtgtgcatatatgatatataatgtgtacatgatcagcagtgtctgttgaccccatgggctctcaccctctggggttctctatccgtgggattctccaggcaaaaatactggagtgggttgccatgccctcctctaggcggtcttcctgacccagggacagaacccaggtctcctgcactgcaggcagacgctttaccgccgagtcgccaggaaagccgtggaggggcacacacacacgtgaaccactgtcgtcactcacaatggctgcaatgttggccccagcccagctcagaggggcgtggcagccggatctcgggtggatgggtgagctcggggctgtgagcgtgtcccggacaggctccctttgggccttgcgtgaattcagtccctgctcatgactgtcttcgtggcaggcgtgacagccatgaggcttggcacagggaaccagggccggacccacagggtctggctcccacaagatgttctggtggatgccatctccgagtcaggacggctggtgttccagagctggggaacctgggctcccaggacactgcaaggggtcctcattgcgaaagtctgccagaggggaaagactcgctcatttttccgatggtgttacaccaaatgtaggtgcaatgtgctctgagcaaaatgatcctttctgtcagacagggacttgttagctgatagaggaggccgccttccctcctctgttttccctgtcgtgggctcagccttagaatcctgccctgccccgtaatttggaagaacagcagtaacaatgacaaccaatgccagtcgtatccgcagggagagtcctaggaggtgaactataattatctaaatttgactccgagggggattttgaggtttacaaccccgtattctctgccacagaaagcactgctgctaatgtctctttttgctgagggtgtggcttgcagcaaagtgccccatggccaatttcaggtgattcccagaactgtgctgtttgccaaaacccactcagagagttcattgtatctcagggtggtggtgtttgggagggctacttctagaaacttcttagagttgccatgcttcgtgaaggaaagtttaagctttctcccaaattacgtttccatcaagaagcatctagttcttgcactctcttacacttaatcacaccagctttcccatgaggggtgtgggtgtgtgtcctacttagtggcatgcatacgtgctaagttgcttcagtcatgtccaactgtttgtgaccccggggactggagcccccaacttctctgtccatgggattctcctggcaagaataatggagtggattgccattcccttctccagagtaaagtgacttttaaaaatggcttttatgttccttcacaagagttcctgctaccttaggaccagaggagacccaggacaccaagggtaattggggcagcctcaccagctaagtgcctccctcctgcttctaaggcttccacattctagatctgcatctcagcaaaattacaggtaacggccagaaacaagggttgaatttgggtgtcatggtcaggcaggcttgcatttaaatctaggctttgccttgttgctagtgcagctatgtgtgcatgacctaaccaccgaacagtaaattctctgcagcacaaaggacttgcccaaacgccacagctaggaaacttcagcccagcttcaatctgtgttagatcgccttaaggtgacccctgccctggaactgaattcttgctcaagtaagtgcaatgttgtcaaattgcaaaatccacattgt

SEQ ID NO: 30273 - DNA, 2870 bp, Bovine  19866880605872
  misc_feature (1)..(1): n is a, c, g, or t
ncctgcagtgtgtgagacttgagtttgattcctgggttgggaagatccccggagaagggaaggctacccactccagtattctgtcctggagaattccatggactgtatagtccatggggtcacaaagaatctgacacaactgagtggctttcactttcacacctacccccccgccccccccaaaaaaagacatttcttactgaagcatgtaatatgtaccagttgtggacacttttgccggcctgatcagcagggaaatgaacaagtcctcccacccaggtatcaaaggcttttaccccaggccaccctagcagcctaccacaaaatgtagagatggcaagaccaagcccagccaaggtcctcctggtggttcctggcctgagccccagtgcccacaaaccacccgtacttccagtggtgatggcagcaacccatagcttcaaagtcctcaggccggtccaccttggagaccctctttcactgtgctagaggaaacccagagctgccatctggtatctgtcagtttttccaactgacttgtgccttccccagcatcctcctcccctcttaattcatgacatcaaaacactggcttttccttatttttcttgagactcaggagggccaaatcaataggcttttgctcttttatttctctccctactacgggttgagggaagagagccatcctaattgttcagaggcagtaacttcctcccctcaatctagtagagaaggaaccagccagctcttacttcttcctggttgtttttcttcccaccacagtctgttttttgtttcccttctaccacatacctctaaagctattgtatgacttgtcatgtgtcacctgagccttcagtaaaataagcaaacaacactcttctgttaaaaaagacaaagataatttttcactggaccttgaatgttacaatttattacatgttgaagtatataggaggtaaactgtcatgatgtttgcaacttacttttaagtggctcagaaaaagcaaaactagacaaagaaatatggcaaaatggttcagttgttgaatctagctggaggagaggctatatggttaaacattttttttattaaaacgtttgaaaaatgaacacagaagggaacacaattgggagtgagacttcttagtgtacactttgttgtgtcgttttaaatattgacgcgtatggatggattcctttttaaaaatacagttaaggatttataaaataagtaaggattgattttaacataacaaagtgtttttaaaacgcagctttgatctctgtgttaaaaattgatagagtggtttaactgtgactgtaatatattgagtaaagtagttttacctcatagaagtaatagctgtgatttatagcatgcctgttatgtgatgggcactgtgttttccgtctcatttaatccattcaacaggcgagatattacacatgggcaaggccatgtagttaaaattgtggagacagaatttgagcccaggtgaggaaatatttaaaagtttttgattgattaaaagtgataaccatttggtttctaaatacatggttttatccaaaagttaacaagacacggtatttgtcctcaaattgctgatagtataatgtagatatcagagtcaaaaaatagcaagtagtattgagcattcactctgcctgggccctgtgctctgtgtcttacttgcattctggtatttcatttatgattctttcatctttgtgaggcagtcttttcatagttaaagaaacttgagactcaggaaggtctaatttgtccaagggcctcataacttagtatgtgtgagagtcatgatttggcatcaattaattgattccaaaatctaagatcttaacctttatatactctgatcacttattactatatgtaaagagaaaaatacgtgtggtaaaagaagtaaaatgttacaggaatttagaaggggttgggttgtacagctaacatacctgttttcaggtgtgagatttgtgaaaatgcatatacttgatagagtagataaatggagcataatctgatgttaggcagtttaggatggaggggacagatgtggcaggaaataacatgaagtaattaggttgaagagaatttttaaaagaattgctaggacacggtaactaagttgattttcttaggaaaggagttggcaaggaaagggtaatgccagaatttcatttttttaaaaaaattgagagaataccattactgaaaatagaagtaaggaatgaggagctctttgagatatgattgtgagttcatgttgtggaatttagtgcttgtaggactaaaataaagaagtccacatgcaagtaatctattttctgtccatgccttttgaccttgactgtgtattagagaatctgtggaatttaaagccagaacgcacagacacatatcccaggtccaggctccatctgctaaatcagaatctccagagttgaagctctgaatactgacctttctgaagtgccacaggaaacgagccccttccacgtatgcctgctgggagtataaattggtacaatctctggacatccacctggcaacagtttcacttctaggaatttattctatagatacagccatgcattgtgaaatggtctctgtacagggatgtaaactgtagcattattgacagttgccaaagatgggaaacaacttgcaagtttatcaggaggggattggttaaattagttatattttgatctgtacagtggaataacacacttgttaaaagtattgagctctcagtgtacaattgatgtgatagaatgacctgtatgatatattaaataggaaaagaaataggtcttctgtactcagaaggataaacaaa

SEQ ID NO: 30274 - DNA, 3063 bp, Bovine  19866880623738
  misc_feature (1)..(1): n is a, c, g, or t
ncgtttccaggaagatgtgattcatgagcttagtttgggggcggcagggagggttcacccagaggacatgtaggggacaggcgtatctatgaggagggcacagcacaggtctgggtaccctcagacccacctaggagctacttggacatttccccactgatttcattcttcccagcccctctctgggcaaagcatcaatggccagggaaaaaaaaaagtggaatttctaaaggtcttaccctgctaaagccttgcgatcagaaaataaacaaaccacaaatcccgaatatggcatgtggctgttgttaggcttgaatatctcagaaagtgagcaatctgtgagatgctcccatgtggggacacagcctgtggttcgtgtgtctctggataccatcaacagcggctgcagctagctcatttcagccctgacaccctcccccgcagaatcaccatggagcgcaaacagcccgggacacaggaggcgggaagccgcatttatccgagctctatgtgaccagctgcgtgagaagtttgcctcttctcgggcaggtcaccctggattctcattttttcctctgtaaattgagagacggaaacgagttcgatccaggagacccgtggattactcacagatgtggtctattaactcactcaagagggacgcatgtgattttttttttttaatgttttaaattagttgccaacatttaaaaatttggagaaattgcttgaaaatccagatttcggttagctttgaaaaaattagaaaatttgacaccagcacacaggacagccgtaaaaccgggcaccctattagatgctacagaccatgctgctccctgttgccttggcaatacagaggccagtgtcagttttccctccatacgtgtcccagctcgttcagttatatccccttgccaggttgctaagctggatgaggtccccaggcccagttgtctttaaagctctgtgactacgcctcatgcttacttttacccctctcttttctctaaacaagtctccttcttaggttcttgtggcagaactgcctgccagttagagcagggcttcttagccttggctgtacagttgaatttactgggggaggttttaaaaatctcagtgtccaggctgcacctggatggtgggaaccaggcctcggtcctcttaaagctgcaggcgattccagtgggcagcgtagggtgagaagcgttgagttaaagctgaaagtgcaatggactagctcaggaggggatgagctgctgttgctagaggtggttaagccgacgtagataagcacttagcagggaccagctgctctcttgtggattcttctccttgcactcgccctgccttcaccccacagggtccccccaagctcagctcagtgtcattgagcacacacattacacttacagggcttcaggacatccctgaccgtccaataattaagactccacacttccagtgcagagggcacgggtttgatacctgatcaaggaagatccggcatgccatgtgatgtggccaaaaaatatttttaaatcaaaaaaataaaggggctcagcatagggtaagtggaaggttttactagagagaaagaggttggaccacactctcattctaaatccaagcaggagaaaaaccatgatgggaaacaaaagtgaggacaaccagagtggccgttttcccacctctggattatatggaacttggaggctgtctttgttgttgttagtcgctcagtcgtgtccgactctttgtgaccccatggactgtagcccgccaggctcctctgtacatggaattctccaggcaagaacactggagtgggttgccgcttccttcttcctttgtcttagtatttatttttatttatttggctgagctgagtcttagttgtggcatgcaggatctttgaactcttagttgtagcatgtggggtctggttccctgagcagggattgaactcggaccccctgcaatgggagcacagagtcttagccactggaccaccagggaagtccatgtgtttactcttgagactccatggtgagagccgtaagctcagttaaaaactattacaaatttcatgggaatgggagcttgtagctcagggggagccggggtagaaaactgttggtcagagaaatctgggaggtgaagcagaaggaacagcaggtatcctcccctttccttcatcctggacggagtgctgagttagctttgcaggggttcagcatccatgccgacagcctttcaccccgtcacgagcaggaggggcctctcttccagaagggcctcctttacctccatcacatcagctgctctcagaaaggccttcagccacagcactctcccactacctcgtttccagccaggctacccgactgttgtgtactgcatagacccacagcctgcagttccccagccctggctccccacacaggtgcaagtctgggaacaacactagcaatttcatattcataatgttttattcttcttattgttgttgttcagtcacccagtcatatctggctctttgcaaccccatggactgcagcattccaggcctccctgtccctcaccatctcccagagtttgcccaaatccacattcattgcatcggtgatgccatccagccgtctcatcctctgacaccctcttctccttctgccctcgatctttcccagcatcagggactgggaaagaacagataacctttcagatgaccacaatactggagcctcagcttcagcatcagtccttccagtgaatattcaggattgatctctcttaatattgactggtttgatttacttgccgtccaagggactttcaggagtctttgcaggagtcttcttaaaagcccccaaactgttcaagctttaggtcctccaaacctgcactttcttccaagccagtcaggataggcaggggtctgattcccacattactttgttcctccctcccattcaatgtccctggtcatggcacaggcaggccataggaagcatcacagaatgatgtcagagtgccccagcccgttcctgcccatatcat

SEQ ID NO: 30275 - DNA, 947 bp, Bovine  19866880637985
  misc_feature (1)..(1): n is a, c, g, or t
nccctccaacttttttctagccgcaacatttgaaatcagccactcagctgtccaagatcactgggaccagccaacaccattttttgagcttaactccttattactgatcaaccatgagctcccaaattcatcagaattattccaccaaggtgaggccactgtcaacattcatttgagggccttctacacctacctctctctgggcttctatttcaaccacaatgatgtgactctggagggtgtggaccacttttttgtgcaaattggccaaggagaagttcaagggcatggagcttctcttgaaaatacaagaccagcgcagcagctgtgccctctttctggacatgcaaaagccatctcaagataagtggggtaaaacccaggacaccatggaagccatccttctcatggagaagaccccaaaccaggccttttgaatctgcatggcctacgctctgcccgcacagacccccacctctgtgacttcctggagagccacttcctagacaaggaggtgaaattgatgagttaccacctgaccaacctccacaggctggctgctccccaggctggagtgggtgaatatctctttgaaaacaccctcaagcacgatcaggaacccctggggccctgtggcctttgaggagccccactaatatcagagcttgtgcctaaacccctctctgctgccactgggcagctatttaacacactggaaacctctctcaagccttggagcaaatggaaacaataaagctttttgcagcaaaaaaaaaaagtttaagatggttaatttaatgttatgtatttatactcacaattacagataagataaaattaatatgtaaatctattatgacccatgcagggctacataccagaaaggaaattctggaaacatagctccaacttagccagtttaacacaaaacaaattctccacacaat

SEQ ID NO: 30276 - DNA, 994 bp, Bovine  19866880686838
  misc_feature (1)..(1): n is a, c, g, or t
ncatcttctgtcgtccccttcttctcctgccctcaatctttcccagcatcagggtcttttcaaatgagaaggctcttcgcatcaggtggccaaggttttggagtttcagcttcaacatcagtcctttcaaagaacacccagggctgatctcctttaggatggactggttggatctccttgcagtccaagggactctcaagagtcttctccaacaccatagttcaaaagcatcaattcttcggtgctcagctttctttatagtccaactctcacattcatacatgactactggaaaaaccacagccttgactacacggacctttgttgacaaagtaatgcctctgctttttaatatgctctttggcttagcttccacttttgcaggagctggtttagctgacaacctccccgatctcctcttgggctcctcctttgctgacccctcagtggagctgaccttcctcttgggcatcttggcgtaggggcaggcaagaacctgcctgagggccgcggtgagcctagagccttcgcaaagctgagtagcctgacctctgctgctcctcccgccgcccgagctccaaattgccattttatatgtatgtagttccaaataatattcagcagtttttgctgttgaatagttttagtaactgcatcagaaaatgtaagccttgtcagtgatccttaggttatttataatggcagattaaaattctattatagtataatgaaaaatcattacttctccttgtctgagaaacttcttcaacaaggaaaataataaaagcacaaatgcaaacttcattttaaaatctgatctctgaaatatagatcataaaatagaaaaagactctggaattagagaaggccagacaggtgtggaacaatgcaggaaaagggtgcccactactgcaaatagctgaaagaacccctatctctctgtgaatatagcctgtggtgaattatctgactcattaaaacaacaggaacggga

SEQ ID NO: 30277 - DNA, 1353 bp, Bovine  19866880695841
  misc_feature (1)..(1): n is a, c, g, or t
nggattcgagttgcatatggtcaacccatgtgcctgcagaacgctggcccctgtaccctgcccttcgcctactgcacataaagatttaatatacagtcagggagatgcttgagacttaagaggaagcacaggttattcagggcttccccagtggctcagtggtaaagaatctgtctgcaaagtaggagccacaggagatatagcttcaatccctgggttgggaagatcccctagaggaggccatagcaacccactccagtattcttgcctcgaggatcccatggacagaggagactggtgggctacagtccatggggtcacaaaagagtcagcacaattgaagcaacctagcacacacacatgcaaaggttattcaataagtagttgcgagacatgtgatgagctaactgggaaaatattcaagtcagattctccactggcaccacaccaataaggataaaatatgatctagccatgaagagttatgcttaggagcagttttatatgaaaattcattcaaccgtattttagtccatttgggcagccagaacgtaatgccatagcctgggaggcttataaacaacaccggttgatcgctcagcattctggaggctggaggtctgagatcagggtgccagtgtggccagatgagggccccctcctgggtcacaggcatcttgtatcctcacaaggcagatggggtgaggggtctttggagcctcttccataagggcactaaccttattcatgagggctccacccttatgacctaactacctcaaaggccccatctcctaataaccatcacattgggcattaggattccaatgtgtgaatctggcagggacaaaaatagtcaagccatcgcacttccatgtgtgtgcactactgacggtgcctttgcctcttgcaaaaccttaatggagaggtttggcagccctgaaagcttctcacttcattcatgtcacatggtgtggacaaatccgtgctctttaaagagaagcagaacgcccatcccacatgctgtgctcttgaacccacctcgttgggacttgaaaggcctctgccttaagccagcctttcttccctctcttttgttcacttcctgacggaccagcattcagaggccatgtccctattaacacagttgcagcctttcccgagaaaatccctggagggcccccgggttggggaggactttaaagtcactttccttccagatgtttgatgtgctcccttccccactctgctggtcccaaccagcagtcatcgctcacggaaacgtgctgtcgtctggaagggggacagtgggactatcaactagggggctggagttctgactcccatcaggct

SEQ ID NO: 30278 - DNA, 1095 bp, Bovine  19866880726379
  misc_feature (1)..(1): n is a, c, g, or t
nccaaggagtatacccatattacagtgtatccaggagtgcttgttaccaatacagagttctgagcccttttccagatactccgattcagcaggtctggggtaggattcagagatctgatctgcagcctacccctgctagatactagtatgtttaaaggaagctctgtgcacctgcggcatgtaggtctggaaagtagtgattacagcattaagtagcccagtggcaggcagtggaatgggtgggcagtctgaacaagggcccgtgactgtcaggctgtagggctcaccaggagtggggtagcccgtctgcctctgccttctgcattgatggagcccagggcatgtgctttacaccactattccaaacctgccttctgttataagaggtagatggaaagcggcccttacaataatccagacctcgattatacttagattacttgttaccctgctgtcttctgacgcaggagacgattgcagaggagaggagagacatttgaggctcaaaatccctgacttgctgaggaatatcgtgaggccttgatgcctctgctatttgtgcatgtactgttttgttttttgttgtgaactgatgatctttttgtttttatctttttctttctgcagaagtaacagtgtaatccttgctgatgaaatgggcctaggaaagaccatccagaccatatcattcctctcctacctgttccaccaacaccagctgtatggcccctttcttatagtcgtccctttatccaccctcacctcatggcagagggagtttgaaatctgggcaccagagattaacgtagtggtttacataggtgacctgatgagcagaaatacggtgtgtaaacaaaaagaattgggatagaatctgtgttataaatgtatttgggaaattgacctaaagctattatagtctttagtaaattgtgcttctgacactgtgctatgcccctgttactgggagatttctgtatcacaaaaacacaattctgatagtcttaaaaacgtatgcttactttgtaaagaaaaacaacagctatacatgaacgggaatctttcctagttggattgcagtattaagtttttctt

SEQ ID NO: 30279 - DNA, 1879 bp, Bovine  19866880735302
  misc_feature (1)..(1): n is a, c, g, or t
ntctttggtctgtaaaataccacttaccctgcagagctaagggggtagccacactacccagcgctggcacctgcaccaaccagcccagcaaccaccaagtattgttacagactaggctttccacgaaaagcctattttaaaaattagaagcatcatctaatctgaaatggggcatttcccgatttcagtttcttggcattggtaagtattctcgcagtgaaaaaaattaaagcacgaaactcagctgcacctatttttgtctcaaaggcacaattccctttacatcaaatcatattcccctgcaacttcaacatggatgacaactctacacgacacagcttttggttacaagtagttaattagttctccctgtggttatggaaagataatgtcacaaatatatcccttttttaacacccaaacttgcaaattacaggctaaacaccgtcctgcgtgtctacatctgcttagaactccaacgtcacagctctgcgttctgaaaaataagaaaggttcatcaaaaattactaggaagtggcgactggaaagtgagggattaaaaaaaagacgtgttaaaaaggggacaggagtgaagacatggcccaacagggccgcgaagcagagggaaatagctctgttgggagtggaaaatcaatttgccagggccgtgataagtctgggacatcacctacaccttcgtgagaacccaccatgactcccacgctactgtccgcagtcagagcgtgaggacacgagtagaaggtgggtactctcacaacccgaagaccaccgagcaaaccgtctgaaacgaaccgaagagttaatgtgtcaagagctttacttccgggaagaccaacatctctatttcgcccagttgtttccaggatggcttctagaaaatattgcttggtaaggggaatcgtttccgagccacagattgtatctcagatgttcacgttataaaaatcagaattgttatttattctttcataaaagtaagccagcgataaactagcgcttaacctgaaaatcagaagagcttgtaacatggagaaagttatttgacgactaacagccagaaaaaaaaatctcactgattatctattatactgtaaaagccgatctacaaagagaggataaatttcctgatgcccgctaaacctatcctgttgcttcttacacgtttattctgggttttggtagtttttaatagttataatttgtcaatccgtttgtaaaaaacgggttttccttgcttcggaacctaatcatttttaaactggttgacagtcaacgtgactatttacgaagttgtttcttgcgtcttgttcctgtgttagtagccctttctgcaccagagttcgatatgtaagatttttagttttcttttcttaacttgattaagaaaatgcctgttcattccgactttacttgcctaagtataaactagtactggcctggaaattgtgaactaaattttactacgtctaggaagataaaatggacacccccacttcacattgtagcttacaacggagatcagcgacagggttccaagcaatgtccgggcgcctttaagaggaagcgcggtaattttccaccgccccgctagccccgcccacgcggtagacggctgggcgcggcgaagtgcggctgcgtggcgcgcgccttctgttgcttggaaaccacctcctccaccctcggcgcccaaagtccttttgtttccaagatggcctctgagtcctgtcttaaagagccaggtacaaagccagttgaacatccttgagcttagcagaaagcaagagtcgtaatggctggctttaagagtattctgtgccaatagccaatatttatttgcttttataacgttaaaaaaatc

SEQ ID NO: 30280 - DNA, 1695 bp, Bovine  19866880796461
  misc_feature (1)..(1): n is a, c, g, or t
ntttaacgtaatagctgcctattaaacataaattaagtacagagttaaatgtctccaggacacaaaaagccccaaatgcctgccaaacccagaatggagcctctggctggaaggggctgggagggcggccgcctggcctgggtgtgctccgggctggatgcagtgggagccccgcgccctgcccagctgtctgcgcacgaagaagcagctttcccagggtcggggtggggagaaggaccggcttcgcagcgcacttcagtcccgattacgactcataaatctttcagtttcatagacattcctgaatatgccagaaatatagaaatgcttccaagagaacctgtgaggcctcgatggcctcgaaaatgccagagtgattgtgagttctgccccttctccccactccccctcccggccatagacaggcccttatcctgggcttggaccacggttggagatttccagcccctggactccttccagaccattccctaccctgcccttgttcagccatccctcttccttccttcctccttgcctcatcctctccctccccacttcttccctcccttccttcttcccttccccctccatctcccccttccttccctccttcccaactccctctcttccagaaatacttactttacacctactgtgtgctaaacactctggtagcagtacagtggcagcaaaaacagatcccagggcttctgttttggtgggagaagcagacagtgatcagcctgctttttctgggacacagcctgaactcagactctttggaccttctctctcctgatctctaaacccctgggaataaaggcctcatttatttccattctcatttcctacaacttcctccttcctcttcccaacaggccagccactaagtgcacccagttatttatgtttcttaggactccttctggggactgcctgcatagaatttacccaggattatagcttaaaatgagggcttccctggtggctcagacggtaaagaatctgcctgcaatgcaggaggcctgggttcgatctctgggatgggaagaccacccagaggaggaaatagcaacccactccagttttcttgtctgggaaatcccatggactgagaagcctggtccacggggctgcaaagagtcggacacgactgagcatgcaggcatactcagagatgactgggtatgaatcagtgcagagctctgttgatacagctgtgccctctggaacaggcgtccccgcaggccagctcctctgcacagccagttcccggatggctcatggcctgctggcccctgctcctagctgagtaaggcaagaatggcaatgtacagtgactaagagaaaaggttcactcctggcccctctacattctggctctgtagcgctgtggacgcaaccactaggaacgtgcttgcccaagtatacatgaggatgtggactgaaaaaaacacacagcctaaaagctatgagttacgttttatttggtggccacaactgaggacttaagcctgggacacagctttcggtagctctgagagcctgctccaaagaggtcagggaggaaccaggacataaaggagtttttgcaacaaagactaggtagttggaacatgagaagattctaattagagaaaaccaggcagctcaggttaaggaatttagcactttcctatgtatgggaagatg

SEQ ID NO: 30281 - DNA, 2312 bp, Bovine  19866880817267
  misc_feature (1)..(1): n is a, c, g, or t
ntactaagcgagataagtcagaaaaagacaaataccatatggtttcaattatatgtggaatctaaactatgacaccaaggaacctacctgtgaaacagaatcgtggacgtaggaacagatgggtggttgccaagagggaggtggttgagggggtgatgatgtgggaggctggggttagcagatgcaagcttttatatatagaatggataaacaataagatcctactgtatagcacagagaactatattcagtatcctatgataaaccataatggaaaagaatattaaaaatgtataactgaattcactgtgctgtacagtggtaattaacatggcattgtaaatcaactatacttcaattaaaaataagcctttgtctttactgaaaaactgcatgaaagaagagcgtgaagtgaagtcacacaagtagaatgacaaccgcacgttcactgctgaatgcatcaaaattacaggctttctgttacaccaagttacagcctgagatcccctccgtgaagtgccttgtggtctgcctgggaggaaaggctcatgcttttcttcacataatagaaagacaaatcttatcatttagccaaactctgaaagggctatttgaatggggtgcagacgacatttctttaaagagggccaggaagtttgcccagtaaaacgttaaagagataccatttcattgcaattataggtttcttcctcccaccacaggttacgtgggtgcatctctgtctattatggagtaaatctctttatttcaacctccccttctccacctacagtctcatgtacatcagtattaggaagattattttgccacttagattacatttttctttgttcaattcattctgcttgagatcattctgctgtcaagaattccttgtccagtggcagcgacagagaaataatttaaaatttcacttcttacctagatgcctgacttcccatcctctcttcctcaagccctcctggttaaatctgagccaagatttcccaagcatctatctttcagagtttcaaatgttcctctttttattaggaaaacataagatcattcattctgaccaatatttctgtatttttcaaactcagatatgtttgtaagattgagccaggaaaacagaaacctctctgggtattttgagcaggaagagatttaatgcagggagttagaggtttgcaatactattggacaaacggagatgataaagtcagggaaaaccaaaactaacattcaggaaataagaaagtatagagacccttaaaatggccatgggtgatctatgctgctcatcgccataaaatatatcatcttcaggggggtggtctgagaagaccctggcaaaagctcatgtctactgtttctgaagttcatgtgattgtccaaaaatctgcaggtgcagtaatgacttctgctttctattttctgcttctgaatcacattgaatgcctcccattctgagtctaaatcagaatcctgctgatgagggatgctgggaaatgtagttctcagaatccaaccccacaaatacagcagagactttataaggaaatagggatgaatattagtttcccacaacaaacacaccaagtgtccacatttttccaagtactctgttagtggagatagatatagatagaaagatagagacagctattctacattttccacatgaagaaatggagctcagatttgttaggtaatttgtccaaggacatacaaccaacaagtgagaattgatctcatttctgagcccacattctttctacaacattctcctgtctcatatgtttaggacacaaactttcataacctatactattctcttgcagtgtatcttcagaaactatccaggaataaatttctcctacttcaggagccagtttacatgtcttatttcatagcatttccatgcagctttgtctccctccctccagtgatattctgcctcagatggtcctgatgctggatgtccacatctcctctaccagtttcttttttaagaattaatttatttattttaattgaaggataattattttacaattctgtgatggttttagccatacatcaacatgaatcagccacaggtatacatgtgctcccccatcctgaaccccacctctctcaatttcacctgatccctagttgtctgaggtttgctcactttcaacttgatattgttaacttccaagctggtacataagggagtccccataagcccctacttcaacgtctaaggcacctcttcagaaggtctgtgatgacctctgaaaatctctgagtcaccagtacag

SEQ ID NO: 30282 - DNA, 1764 bp, Bovine  19866880829692
  misc_feature (1)..(1): n is a, c, g, or t
nattcggtacagccaataaataaatattttttaaaagcgccattctggaggaggccttgggagagttaggactgggtctatagggaaagtagagaatatattgcacaagaagtctgaagaccctggtttgagtcccaagactgctgcttacaagtcacttgactggttgacttccttctctaagaaaactgggtcaacctcagtgctggcctacatagtgtgaggcttgttattcagtcactcagtcgtacctggctctctgtgaccccatagacttcagtgcaccaggcttccatgtccttcaccatctcccagagcttgctcaaattcatgtccattgagtcagtgatgccatccagccatctcatcctctgtcgcccccttctcctccagcccacaatctttcccagcatcaaggtcttttccaatgagtctaaccattgtgtgaggctaaccattcagaattaacttggggaccaggggaggtaattctttattaagttgttaatttcctgattcagatgaggcttacagtaatgatcccttcaccagtgggaatggaaggctaaatccagggtagaaatagtctgggtcttaggtcattttatcactgacctcttctccaggcctggcccatcaactcggaggggggtttgtcccaaagccattgccaccatcaaacactggtggcttaggagtctcttttgtgtaacccccgagttactcatattctaataacaaggaccatccacagctgaagcgacagtgtctttgctgtcgagtgatagcaaatattttttagctccagaggttctgggaggtggtttaagctctaccaggcaatgaaggggcttcccaggtggctctagtggtaaagaacccgcctgccagtgcaggagatataagagccacagatttgatccctgggtcaggaagatcccctggaggagtgcagggcaatccacttcagtattctcgcctggagaatccccatggacacaggagcctggcgggctacaggccgtagggtcacaaagagccgaacacaactgaagcaacttagcacacatgcacccaggcaatgacaggttgctgcctgcaggtaatcccctcagcagcagagcggatgaagtagcatcattcaaagagaaagagaaaaggatgtcctcttgggatgctcattgcaaatacagttctggagcaaaggaacgagttaagcttgctgttaacctttagaagcaggaaaaaaatagatgggagagaaggctgaggtctctggttagtggttttttaaaaatctgtcagatttaattaaatcatcacaagtgccttttaaagggctctgtgtggttgtcctgcatggtcagaggaacgtgatccaagaggcagccggggccttggcggatctccaacttctgtcctttcccaggcaggaaacacaagtcagcccagtagcgctcgtcattgtgtggaccctgaaggccatcaaatgcaggtctggcatcggatccggaggctcagcacgatgctcggaactttgccagaaaatctgatgcccacatcttttgtccctgaactggctagactttctctacagtgcagcctctgctgtatatctgctgagtcccaggttccagtctcccctcccttttcactccccataccaccagaggcacaatatgtaggacttaaattctgttctcccatctaagagatagctattaaatgagaagtctccattggtaaaaatattcagttcagtca

SEQ ID NO: 30283 - DNA, 1324 bp, Bovine  19866880832655
  misc_feature (1)..(1): n is a, c, g, or t
nggtgttggatgtcctcctgtggacccaggagtatgggggctctactggtggcatggtcagacttgaggctagcctggctcactgagagcaccaacttgggtaagcatggaggcctggggaccaggcattggcctcaagaatccccagggtttgcccagctctgcaggtttaccccagcctctgaaacaaatctccaatctccacttccacaaacctggaaagccacatcctgagatccccccaagatgccagagctctcatgcactcccaaagaaaggacagtgatgagctgtggggtccctggaccaccgctggctgccgatgtagacgatgagagaccaggctgtctgagagccctgctcctggctttgctgctgatctgtgcaaagcatcaccaagagtccctcagcgaccacctgtgacacactgctgttccttagggatgatatgcgccatatcccataaagtgccttcagcttagagaaagccctcttggccactttttctgaaagtggcaaccaccgtgcttgccatgtactcagcacaggaacccagggagacagacaaaaaaggcgctttggcgatgatttttggccctcctcatttattgccgtccacgctcgtaaaacatggtgcttaatcgtcttggcaattggggtaaccgctttgaaaaataattactgccttcttggagattactttgccttctaattaaaacctccagactggtatatttaaaggtgcattgtcaatgcagcatcccagatacacccagctaacctcatttgggaaggcaaaattaattagtttgtgtttcaacacccagctgttatcctaaggaaaagaaatcgtctacaagtcggccatgcacactgtctctaaattggccagggtggctaaggagagataaaggaaatggagagtgatttgttcctgcataactccaccagcttctagaacaagctgctcgttagacggtggccccatgtccctgtcagacctcgctcgggagttctcgtttacccagagaggcagaatcggaaatgagagggtccctcctgccgctgagctcagttcactgtggagcctcttttgctcctaatacctttcgctgagcgatcctgtgcagcagatttgagaggctgggcatttctcttcctgtcccagccggtcagactcacaaagcttcgtgcactgctagccacccgcctcctttactaccacttccccttttgcaattccattttaagtccagcacttgccgagcaccgtggaaaccaggataatcaattctagtttatgctacaataacaatccccggag

SEQ ID NO: 30284 - DNA, 879 bp, Bovine  19866880834581
  misc_feature (1)..(1): n is a, c, g, or t
ngaagagctgagggttcttcctgaccataaacttaactctcaattgtgttgcaactcacagcttgcctggaaccgctctcggaaactttaagaacaagtgcaataatcagcttatgatttacaatagcagccaggcttctaaactgaccgttgccaaaaacgcctgccttttactggaaggagtagtctcaggcccctccctgctccctggcagggcccccgcacgtctggcatccgggcaagtcctcctcaattagcgccaacagaaaggtcacttactgaaacacaaggccccacagtttgccagacctgcggctccgggttccaacctgtggctcttaaaggagcagaaccagctgtgcctgaggcagttcttccatcaggttttgaggttggagaaccgctgggctcacctcccaacctgcatttgttctgctttgtgaagtgggaggaagatacggctcatctggataaacatctgtagaaacccgggcctgtggggccgcccccgctgctgctggtggggtcctgccctgggctgagtcttggggactccaggtcagttctgtgccccgtgacaggacttcgtgtggaatataggcaagtccctaacctacagacttctgacctccaagatggacagaatgacagccactttctgcagccagagctgccccacagagggttcacacctttctctgcatttcttttgtgacccaagaggaaactgttaccaaagcagagtccccactgaccccatgcactgagatggccttggggaaggggtggtttgggggtgggcagggaagccatccctcgtcctttggcccctactctgtatgctgtaagacatgggccttttcaccttcatttgcacag

SEQ ID NO: 30285 - DNA, 1847 bp, Bovine  19866880894171
  misc_feature (1)..(1): n is a, c, g, or t
ncttccctcggtgtacacagggtcacactccccacactaactgctcctctacagggacactccatgagtcaccatctactcactcgccggttcctgggcagcaccactcacgcctttactgtaacctcacacggtgaagcagggacggctctggggggctcgtgctctctgctccccggaacatctttggctcacctgtgccgaggtccttgtgagaggctgggtccacacagctggtgacgggagctccgtgggctcagcacctcctggtccacttctcctcctggtacttggaactcgttcagcttgggcttgtagagcacctgcccagagcactgcctgggggacctaaccagagccccagccacggtcaccccaccggggccatgcatgagtgctgtgtgggggagactaggaaactgtgtctctgctcaggttgggttccctccccacagtactgacactacccgggccagagaggaagggcaggctggcttgcaggcccccgagccatcaacaggccgtggggtccgcagagcaggccccagctcggcctcccctgtaggaggtcgggtcgtgaccctttgagttagaggggccagggggaggactggtggagcctgcgtttcagagttcaaggtttttgttttttttttcctctggagttgttgataggagatgcgagttattcccaaagatgtctcatcatgaggaaaaaggagcttccttttgttcacatcaggacttgtagtgccatatgccgccacaaaaggcagcatcagccagatcagtgttaaattgattacagaaagtacagtatcctcacaaaagcatctgttgaggtgccggagtgtgtgtgcagagtgggttggtagaaaaagcatttcctcatagtcagtcagtatgaatactgtatgcttctgtcaaaaccagaaatttgcacaaataggaattatctgactcgtggatgggagaagccgcccccaagtctctgaggatggttttccatggagactggctctgaaggatgtagttactaggtagagcaggggccgaggaagaggagagttagcgccaccaggaacctgaccaggagcacggattcacctgtgtgccctcgtctccgccgaggacgcggcaaccccagactggcccccccatcggctgctgccccgggctccccctcctttcagccattcctttctcacaccctccgacgggaatccaggacacctctcacgtcgtgctgcagacactctaacctgataacctgagggccgcatcagggcgcatgcgcacggtgcaaacgcaatccagttacgaattcacacagcgacgcggaaatcctacagaccaaaacccactcgtcagcaggagcggtgggcccccggctcgtctgggggcggccgtgtcggcgaggagagccaggccaggggtccaggctgctttagtccatctgcgccccacttggttggggacgggtgatttttctttattgtaaaattgtggacttttaaaacctgttgactaaacagtaattaatttatatttgtgaaaaatgccactgtcctagtgatttctgatgtaaataatgttgtttatatagtatgtattaaattttcctacattgtaaaactgctgtacttttgactcttgtatattaaaaagtgttactgaggatttttagaagcaggcgaacacgttgcattgcattggcgtgacccgtgaccggactcaccacctcatctcgcttcctcctgtcgctgggtcatcgggattcttggacagcttgtgaaatggagcttttcccctacccgggcccctgttgtgtcgtgggtccaggacct

SEQ ID NO: 30286 - DNA, 1066 bp, Bovine  19866880946253
  misc_feature (1)..(1): n is a, c, g, or t
nagaggggaaaaataagaaactttggagatatgattggatagcagaatgaagaatgaccacactttcccacggctgtcacgttcttgcctcttcccagagaccctctccgctccctgtccatccccgacttagcatttcaaagcagatgccactttggcagagctctcatggtgcaaattttcccaagtcagatttatgtctttggggtttttgcttatttattcatttcatgcaccatttcgcccgggcagtcggaataccgaaacgcctattaaagtgatccctctgcgcccaggtccctgcagaaaggagccattattgctccccgtgctaaggaatgttccaggaacacaggctcacacacgtgtgtgcaccagccgggccggtgtcctcccattgctctaggaaggtggaagaagggcctgcctgcggagggaggtgggggagcaaagccacttcacgtggattttgacccgggacagctgagcagaggagcgcagggctcctggaggcaggaccagaatggaaaattgtcatctctgaagtcagccttacctagacttgctcaagaggcgtgggttcaatccctggatcaggaagatcccctggaggagggcatggcaacccactccagtattcttgcctggagaatcccatggacaggggaacctagcgggctatggtccatggggtcacaaagagtctgacgtgactgagcatagcagcagctacctagactcaggaaaagggagtgtgcctcaaagcaggaagcccaaactgctcacccgcaagcttcatttatacctgaaaagtgacacttttgcccccaaaccatcctccctgtggaacccaggcttgctcagctctctgccctcctggcagggtggtcttggcatgggatcccacgcccggctcctgcctgctgtgggcccttctgacccagagaagccctgctgacaggcccaccgtggccctcttggctgcagatccggctgcgtgtggctccagggggagctggggggtggggagggtgtccagttgggaaagctgaggtgtgcccttttc

SEQ ID NO: 30287 - DNA, 1480 bp, Bovine  19866881013499
  misc_feature (1)..(1): n is a, c, g, or t
ntattcttggtgcaagaccagggttttcattctttaaatttctcactgattgcagaccagtgcacgaccacctgggtaactagaacgcagttcacaccatgactcactgtgtgtgtcgggggtccccaaatctcttcatccagaggagcccctgatgttgcaaatgtgaaattgctacagacgttacttagtgcttgtctttacttttctgtacttgtctcggcagggatccgtaacagacagtcaacacactggctctggtccatggaccacactttgagtagttctggtttagagttgatttcgaggtgaattgctgttcagaactcacctttttgtgtgatctcaattcaagtttcagtctccaaaatatgaaatgaagaaaatatcaatacttaactcaagaatttcagtgagaacaaattaagataatatatctaaagtacatggaatcctagcctaaagtgctcatcccatatggactttgatttatcacttaggataatacaaaaaaagaaagactatatataacgtgaggaggggttaatcgctggatggtgaaacttagggttgatctgtatttttctacatacttttttctgttttataaattttctacaatgatcgtaaatgactctataatcaagaaaaatgtcattaaaatttgttgtgcctattttctctgcactgaatttttttttctgccagagtttaatattctttctcaataacccaatataaacacacatattaagtaaagaaattggttttgcaaacaatttccaatctttctttgatgttttgtaagcatctacctaatattcacgttgcaatttccagtgaaggaaagcacagcctacaaaaacttgccccactaatcccgggagccctgggacgcttctcactcctgtcttctcacctgatgtcactgatcatcccttaacctggacttctctgttgattgttttgcgtcacagcccagccccagcttctggggcataggggcgattcagagagccacttgcagggagaggagggggtgccacaaatcttgtaactcctaggggccgaggggaccacttcctgttggccttgtgcctgcgtgtgtgctgagtcacttcagttatgtctgactcttctcgaccctatggactgtagccagccaagctcctccgtccatgggattccccaggcaggaataatggagtgggttgccaggccctcctccgggggatcttcccgacccagggaacacacctgcatctcttaggtctcccgcactggcaggcgggttccttaccactcctgccgcctgggaagcccccccaccccagccattgctcaaattctgctgacgatcgtccgatcctggcaacagcactgccgatctgttaaaatgaggggtggagggtaaagaaacgtgaagattataaaggcatcctttcttttcacatcttcacgaataaagttctggccaggt

SEQ ID NO: 30288 - DNA, 3070 bp, Bovine  19866881013532
  misc_feature (1)..(1): n is a, c, g, or t
nccatggggttgcaaagagttggacacgactgagcggataacactttcactttcactttaaagtgtcagcatctggaaagagctgagaacacccatttccctgctggcttcctgggtgctgtgcattcccagaagggatcagagcacttctccccacgtaagcagaacacccaaggtcaaagacagacaaaaaacaagattatactcctggccactcagtgtcttccaaggtggacctccccaccttcctgagtctgtgagcgcaggaggaagccgctgtccccacccagcctctgttgttgtcgtttagtcactcagtcatgtccccctctttgcgaccctgtggactgtagcccccaaggctcctctgtccatgggatttcccaggcaagaatactggagtgggttgccatttccctctccaggggatcttcccgacccagggatcaaatttgcatctcttgcttggcaggtggattctttcaccaccaagccgccagggaagccccccagtacctgtatttgatgtcaaatactgtggagtcctcgtcctcatcatcctcttcgttcagcggggccatttccactcgctcggcgggagtggtgatgatgtcatacttgcgggtcttcttcagtctcttcccagacctggacgaggggaagcacatgcctgagactagggcgatgcccactgaagtcagccacgctgccacccccagcccagctcccaggagacctggcaaaaccccatccagctccttcacttctggccatgggacctcgggcgggatcctgacctcagcatccctcgttggtcctcacccacaaagcaaagatgtgcccagagggctataaagcccagggatcaggatccataacacccaaacgcaagattttcaaaaggcaaagtaaggcaaagaaaacccacgacgagccaaagatcagaatgttcactgtggatggagctcagccacgccctgggccaggcctgaggcacctcgtcccctcaacccccagcccctcaccctcgccccagccctgctgtgtcggcaggtcactgctccaagcacaggcatcacagcctggcaccaccgtgtgcactgccccatgggccgcccagtgaatcagaacccaggctgggccactttctacctgcgtgatcacaggcaagtcggtcaatctcctgaggcctcagtgtactcataaagaaaatgggctgagaacaagatctgtgcctcacaggccagggaggatgaagtgagacgaggcattcaatcagcccaggcagcaggctctcggcaaaaagggctgctggtgaaaagaatcaacagagagggacttccctcgtggtccagtggccaaaactccatgctcccagtgcagggggacggggtcaatccctggcagggaaactagagcccacatgccccagctagaacatcctgtgtgccacaactaagacccagcacagccaaataaataaattttaagaaaaagaatcaacaaaaaggagttaaatgggctatgcctctctcacatgacaaggacttggacaaatgagtattgtttccatcacaaggatttacgaccacagggagctgtaaccctaggcttttactctgggatggtagacggtcactgggggcccccaggaaactgctgagcaaggcttttggtctccagtgtcagaccttctctatgaagcatgcagcactgatcaggccacgctgagagtttatgatgccacaaggaacaatattgttttacaactactgatgctctatgcatttatttctccactattttgaactttttcccaaatgccttgtatcctctgatgtccttcttttgaaaataaatatttgaaactgtctgtgagaaaccagtcaaaccaccaccacccccaaatcataaatacggcgctgaagaatcatagtctctaaacatgcttcccacaggccgtaagccgtacctacatagagaccatgtcaaagacacatgtggggtctctttgcccccagcacacaaaacgcctcaagaagtttgcaaaatagtgaaaacagaagttcaccttcaagtaagaatttcttaggaacagcaacttgctcttttcttgaagaaagaaagcattagtctctcaattgtgtccagctctttgcgaccccatggactgtagcccgccaggctcctctgtccatgaaattttccaggcaagaagactggagtgggttgccatgccctcctccaggggatcttcccaacccagagatcaaaccaaggtctccagcattgcaggcagattcttcactgtctgagccaccagggaagcccagggaagctcttttcttgcctagtattcatcaaaaacatgatttgtgaaaggattatttacatagaaaatatatatatttatctacacctttgacataaagcaacctacatagcctatagtatttgctgcctgcagttctctgtgtagagattttggggcatcaggtatacagcctgacaaccccctagcctcattacaaagcaatctgccattgtgcttccatcacaagcactgtgtgtgtgtgtgtgtgtgtgtgtgtgtgtgtgagacaccacatgcatttcaagcacgatgcagcaaggtgcaaatgccaagccaggtgttaagaggggcacagccagtggcctccccggggccacaggacagcagtattttgcaagcaggtttgtgcgggagcttaaatgctaacgtgataaaccccgccagtccagattctcaccatcaagattcttgttttccctccacctcctgccaatggaataaaatagatcttttgttctgcctcagaggacttacaaaccctgaccaacttaatctccaacactggatggagatatttaagcccagaaatggctccatgtgccacaggcaacccacgacaaagccacaagaaaaccatccacccccgagccctctagactagggtcaagccccaaaagtatgctgacccacacaccacacctttctcaggaagtctcctatctccgccctgatgggtcacagctgttcagaggaaca

SEQ ID NO: 30289 - DNA, 1833 bp, Bovine  19866881023085
  misc_feature (1)..(1): n is a, c, g, or t
nggccaactaagcccgtgtgccacaacttttgaagtctgtgctctgcaacaagagaagccactgcaatgagaagcccacgcgccgcaactagagagtggcccccactcggcacaactagaggaaagcctgcatagcaccccagactcggcacagccagtaaataaatacaaagaatgggggtgggcaggaacatgaatgccactgggggcggggggctggtcaggtggcagtctcccgtgaggagatgggcacagatccatgtctccaggagaagccccagggtgagacactggggtgccatgtgcaagcagggaaaccatcccctgtgtctgagtgactgctggtctggggcttgtccttaagtgctgagattagtcactttcctgggcggcagctgggctggttttaaattctccccagtctcctgcaattcgtcacttggctaggaaactgcccagtgtcctgacgggacctgtttgtcctagtatttcttagcttcagctgtcgcagactttgcagtggcaaaggaaactgctccagaggtgtctgtattccatggtggcagggagtgggctcctcccagacacttctacacttggaatcctggttggctgctccgggaaacccggagtccctgtgtgggtgtgtgtttgagttcggaaattgctctttgagaaagaagctctctgctctgtcacagagttctccagcatttggctatcattattgcaggagcagggaggcacacagctctggttcctggtcccctttaaaggctcagggctgcagtttctcctccgcctcttagttgatggtaggaggttgaaatgaccctgaggtcagcggttcccaatgctgatctgcagatgggcagtgacccagaaggaaaaaggaaagagaaaataagagatacaatgtagccatgacgattctgttagtttcaagttttcaacctgtcattttctgagaactcagctatcttctgagatgatgttcttcttttgggtgttaatgtcctttctttcctgaaagagggtgatggtagatagtagtgttacatttttcctaaacttagccccaaactgtgtttttggaccagtgcagtgggggatcttagttccccacccagggatcaaacacaagacacctgtgctggaaacatggtatcttaaccacgggaccatcctggaagtccctcagccccaatgtttttggaaatgttattgatgggtgaaatctatagtttgggatctgagtttaccttgaagagtaaacagaggcattgcttctagaaacaggggctcactcctcacacttcttttctcagtggaggctgacggcagcaaagaataacaatggtcttatttatttatttatttatttattggtgtatctgtcacatgcatatgacagcctaagcaccttagctctgttcgcacctgtaatattcccagcagtcctatgaggtccatgttgttattacctctgttatgatgatgatcaacctgaggcagaacagttaagcaacttgaccagagtcacacagccagtcagtggcagagctggggtgtgaacccaggttccagtaaatcaggagaacaatctataactgatgtatgaaatgacatccagtgagggaaatatacatgctcattcccccaaaggataaagctgggaaagagagaggtccgcaggaaagagagaaacccagggaacagtcacgctccaggagagctctggagacaggatgctagaggcggggctgtaatggaatatggcagcccaggagatggaggcgattcagggtggccggctccatggcatcttgtttt

SEQ ID NO: 30290 - DNA, 1028 bp, Bovine  19866881054103
  misc_feature (1)..(1): n is a, c, g, or t
ntgcttgcagtcacttaataattaactgtctaccttcacgaggatgtaagttccatgcaggcagggatttttggtgttttgttcacatctgtattcctgggacttggcatagatgaatgctaagtgaatttttctccactgggactcatacaggctcagctccttaatactgacaacatgtctacggtagttcccggctattatgaaactggcatgttttatcttggactatttctctttgttcctatagcgtcttccctacagccctttccttacaatgctgatctcctgggacacacactgtggaatgtgataaaacatcagtgaattaggtgtctgagcagcttgggttattattatcattatttttatcagaaataaccttaagaaaatctgataccttttaaatttgttcatatcacataaaatataccaggttctagtgtttttagtgttaataggatagagataaggaaaaggagataatggtttaatcattgacataatacattttatgcctacatagattatgcattgttgacctttaagttaatttaggcttaatgagatggtgtcattatgtttgaagacttaatataattattttattatgtttttaaaaaattattctctgagcttgtgcatgttttatacctcataaaggcccatgtgtattgttttctcattgaatatattttttagatgtttcctgacttgaggtttgcagaagtctgatctcttgaaggatggttttactcaaatgtttaattttcccaggcatcctacaacttttgtttttcaatgtttttcaatggagacctgtatttccaaaagaaattaaactttatgttctgaaaatggattctttagatactgggatttctctcgggatccagtggttgagattcccaccttgcagtacaggggacctgggttctatccctggtcagggaactaagatcctgtctgttgtgcagagcagctccccccgccacccaataaataataaaaagaggggtttgcaacag

SEQ ID NO: 30291 - DNA, 1303 bp, Bovine  19866881078726
  misc_feature (1)..(1): n is a, c, g, or t
ngagggaagtgacttagcatgcatgcactcactgctccctgccttcctcatctccctgcacctgaatacttgggatggtgacatggagatcattcatccaactttcctttccctagcagcatccctttgtcaggatgcctccctctctgggcttgtctcattctctctcccctccctttaccatatgtacattatagcagactcctggacattcccaaacatagggaactctttccagtctggactcctggggaccaccacaccctcaggacagatgtctacctcaccagcatcttatccccacaccctgggttctttctctaactgatgtcagcaccatgcccctgtctccaagcctgggtttagggcaatctcagccccttttcaacagaatctatgcatcgctctcctctgacaaaaataggagaagaaatccaaaagatttatttccttcatactccaggttaaaaaattggaacagcacagtatgtgtatgcaccaccgggctcagtttagacaaacttactgatttaggagacttattttctcttaaggagctttacagtgggttaaaaagtgtatgatcataacttttgcattcattagcatcgtttctatgctgccaaatgcataattctgactcccggttcccactgaacctataagcaagaggatttattttattgtttcattttattcattgctttttcttccctctcagtacttccctagggctgtatcatgggcaaaatttcacctgtgatcaggttacagagctgggagctgggaatcaaggtaccagtctcttgttggctggtacctacacttgggtaggatgatgtttttcaggagggttgtggccccagccaaaatgatactggccaggacaaaggaagcctactttctagaaaaagtcacacctctgatgccagtgtctaaaccttagccccaaggtattgggacctcctccttaatattttgatagaaattgaaataaaattttaaaactcttgttccttggaaggaaagatatgacaaatctagacaatgtattccaaagtagagacatcaccttgctgacaaaggtatgtatagcaaagctatgatttttccagtagtcatgtacagatgtgagagctggtccataaagaaggctgaacaccaaaaaattatgctttcaaattatgatgctggaaaagactcttgatagccccttagattgcaaggagatcaaaccagtcaatcctaaaaaaaaatcaaccctgaatatgcattggaaaggctgatgctgatgctacaatag

SEQ ID NO: 30292 - DNA, 723 bp, Bovine  19866881151697
  misc_feature (1)..(1): n is a, c, g, or t
ncttcccctccccagagaaaaggaggggaaacagcaaaccggattccttgacggaggaggaaaagggacctatccatacagtattcgtgttctcacagttcacacacctgccatcgggtcctagtaaaaccttccccttatgtgcccagctgtgtgcccagcgctctgcttttcaagaaatggaaagcagaacttttccctcagagtctttgcagaaggttcctgattcaattagggggtgatgcttgtcacatgttgcacagatatagctgcgcccaacccctcattaacttaatggattcttacagtcagtcctccagggatgtggagtgaagctgctgaggttcacgacaagtgtgggtgtatttataaatgtatctgccatcactcccaggttctgaaagtgagagagctccgcgcctgtagcaggtaaggaggaagggagcgcagaaaagcagtcaccgtttgttcattcacttatgttttcacatgacacctacttttgcttcccaagaagagaatgcttattaattttcgagccctttgtccatcttggagttcctgccagcccatttcatctgacatttttggagtaaagactgtagggccagctgtatgaggcagttggctttgcttagggaatgcttcttttcatgttcagaggcaataattatttttcaacaagtatctttcaagtataaaccaggatcataactcacagcc

SEQ ID NO: 30293 - DNA, 1075 bp, Bovine  19866881327381
  misc_feature (1)..(1): n is a, c, g, or t
nctggtttaatctagtacaattggatcagcatatacacatgttcagagttacagagagagagtccatcattttttggtttgtttgtttgttttttaaaataaggttgcaggagatcttaagaaatgctatagcgggactccaagtaccaggaggtttggatggcagccaaatctggcccgccacctgatttgtaaataaagttttattggcacacaaccatgctcctttgtttacacattgtctgtggctgctttcccctatggccgcagcattgagacattccaacagaggctgtgaggccagcgaagcctgaaatatttattactggctttttacaggaaaagtttgctgatcctgttcttgatgattgagtttgcaatcagtgctggtggtgatggttgaggaacagatggaattagctagaagtccttgggtacgtggtcctctagaccttgttatccacacaagctagaacattgagtgttcttgtggggaggcgatggaaaaccaccctggacttttttaagcagaggtgaaatttataggaaggatattgggggtattcagaatcagtgggtggcttaattaatgcatgtgtggactgcataagatggaatgccttggattcttttcattcaccttccaggctcgtttggtaacctgagtgcatgtaagagaaaaatgaacaagatagaagctctttgagcattaacagttgcaggatgagcaaagatagcgtctatgtgagtttttattgtatccaaacaggtttattttattcctaatattcttttacatggcagttacttttatttttctttcatttttaaaaaaatatcacattgctcaggagacatgtttggcaaaacagttgaaaggaaagacgtctgatggaaactcaagtggttttgcatgagcaataataattattatgatgataggtttcctgcctaagccttctcggtgggtagtatttgcaaattaaacacaccatgaaatattcagctccttgccacacatcttgggtgatttgcataatccccctgcacgggctctggggtgagctactcccta

SEQ ID NO: 30294 - DNA, 719 bp, Bovine  19866881467003
  misc_feature (1)..(1): n is a, c, g, or t
natggttggatggcatcctgactcatggacatgagtttgagcaagcttcgggagttggtgatggacagggaagcctggcgtgctgcagtccatggggtcgcaaagttggacatgactgagtgactgaactgactgacttgcccaaagtcacattactagaaagtagtggtcaagacctgaacccatatcccttggattccacagccagtgttctttatatcacatgaattccacagctctttgtttccattttcacagagctgctccagctttttttttcccacaattgaccagctatttcatccactggatcctaaaacagcttggatgtatagactgatgctagcttttgagaaaacgatgccatggtgcatcagaccccaggagcgatgctgtcatggtactgctgcctgtgggaagcaggcagtttctgcaagttcattagacacccctaattgctgtgaacacattcaggaggtatagtaaatgcgacttaattgagaactaattaacttgttatagttatctcgttacatgccaattaaatgtctaaatattcttttcttctcagataaaggaatacaaaaaaggaaaatcaggggtgaaactggatctccatccaggtaccagggcagcaacaggggccttggtcctgcagaaggagtcaaactcattaacactatattaaaggcagatgttcaaaggcggtggggcagatc

SEQ ID NO: 30295 - DNA, 1503 bp, Bovine  19866881520156
  misc_feature (1)..(1): n is a, c, g, or t
naaaagcaaaaattaagctaaattaaaagaaataaaaatattacctctatcatctatttgaatcaccagaataagctaacaccaatgataaattatccacaaaaattataagaacaaatgcaaacctgcccttatatgaattaattggttatttgactatccttaaaatttcccaagatatctcattatattccatatttcctctggtaaatcccttgttaatatcacttgacattaatttccacattcagtgttaaggagtaagaaattattcctgacaattctgtacctatttttttaaattcatgtatctaattttaggatatcaaaaaaccatatacatgttgaaattattccttcctttcaagctctaaagacttactaagctataggtaacaagtctctcttgtcacatcattttagtttcctgtaaaataacttatttttctacctgtttgggaagaaagactcacaaaaataggtaaaatgactattttaaatccactaaataataactagactatgaaagggtctacttaatttttgaaatacagttcttttaagaattgtaagatctgcagatacaaaaattctacgccatttctaaaacataatctatatcaccaaaaaaatggctgaagaatgtacatttcagattgtaaagatgactcaacttctgatttaaccataaatctaaatcaccatttaactgaaaattactgaatgtctcacagctgatataaatcacatgtatcaactgttttaacattaacacaaaactgctttgatacaaggaaatgcacttgacgggcttttcctcatcccttttttgagattaagtctacaatttatgtcacattgacaacctttactgatattttcctattcaaatgttggtagctattagacttcatatgttgggtaaaaacatttacttacttgctatacaaaatacagactatcacaaagatttatcctcaaggacaaaattccatggtctcagtcttcaaaatggcataccttttggggggggggggggggaagaaaacaatattctaaacaattcattgatggaaccaccaaaagccaagtaggaatacatgtttttaaagttcttatttcataaaaggaacaaaaactaaaatctatgctcacaaaacgctagtttttaaaacattctcccctaaaatgttaatatgaatagtaactagattgaattttccaatgaacttatttaatattaaagattaaaactgtttacacagcatattaggcagcaaaaaagaaaaaccatatctttggtttatggttttcctgaaagtataatcagtctttttcttggtcccaaaattaaacaaaggcttaaaggaccttcaatattttaaactattcaaaaggcacattaagttacaatagctatgtacgtaatacttctcaagaaaaggtttaaagattttgtaaaattatttcagatacttactcaaatcagtatcaaaaatataa

SEQ ID NO: 30296 - DNA, 835 bp, Bovine  19866880346100
  misc_feature (1)..(1): n is a, c, g, or t
ngaaggaatgctggtggtgacccttccttctctttatcctgcatcggagttaagtgctggccttgcgcgaatctcacacagagacctggacctcagtaactccaaaacacacacccttttcagaaatttgtcatttcatcatttcttaaccaaatgactccaaccgcagaaagccacaaattttccattgggacttattccactgctcccttttggtgggtatattctttcctgcttcctttaaaaaccccattcattatatgaagtataggttttttgaaactgcttttaaagtgaactggttattaaatatccatatcttgtcttccagtctttctcactccactttatagatttgagaactgaaacacagaacggtctatggcttagaaaagctaagttccctttttatttggcccatggaccataatctgaactttgaagtctaaagatataggattacccaccctctcccccaccctcagtatagccagaccctgatgtaaaaagccaggaacctcgctccacaagggtgggcaatccaagacttccagtttctggttgcaattgaaggccaggaaatttggagaacaggatggaattgtttcttgtacaggcaaacaatttgtaatcattaagaagtacgaagctaatgaaaagcaattcatccaatggcaagcgttgccataaatttcattcctaaagggaacacatgatacaggcatgattcttgatttcagataaagagaaaaatgtggagctattattaaatacaaagtaaaacaacataaaaaaaaagccagatgatagaaggaatgcaagcaggaccccccgg

SEQ ID NO: 30297 - DNA, 3139 bp, Bovine  19866880488488
  misc_feature (1)..(1): n is a, c, g, or t
nactgattgaaaccttccctcctccaggggtgcccattttctcagcgtgcacgctggtcattatatgttgggtgccaccattttcacaccaatctcgttcagggattccaagggcacctcccctcgagaaagtgtgtagagttgcaaaacaacgcagttagtttgaactttggcaaaaaccatgacctgacatgctgctggctggccaggacgcagcccggccagcaagatcctactgggcagggtcataaagaccaaaccacacaacagactgcctgagcattcataagcatgaaggcaggtcagtccatcgaagaacttctttcatgagggcattctttgatgatgatgatagtaaaatacatgtaacctaaaatttgccatcgtcaccatttttaaatggatggtccaacagcattaagcacactcacaccattctccaaccgatccccagaactctttccatcttgcaaaactgaaactctgacaccgttaaacaacactccgttcctctctctcccccagcccctggcaaccaccctcctcctttctgtctctatgatttgtctagtctgggtacctcatataattggaatcatgcagtatatgtgtttttgtggctggcttatttaacttagcagaaggtcctcaaggtttatccatgttgtggcaggtgtcagaatttccttcctttttaggctgaatcatattctgttgtgtgtacaaaccttcatccaccaatgaacgcttgggtcacctccactttttggctattgtgaataatgctgctgtgaacacgcaaagacatctgtgcaagaccctgctttcagttctttcgggtatatacccagcagtggaatcactggatcagatggtgtttctaattttaatttttttttttttctcactacagttacatgcaaaaaactgtagatccctttacctggcttgcaatgcagctcttgaacaagtagaaacgtcaaactcctttcaagatgagacatctaattttaatttttttgaggaaccaccatactgttttccgtagcagctacaccattttacatttctaatttctccacatccttgccagcacattttctattttttttttttttcatggtagccatcctaatgggtgcgaggtggacttgggggaaaactgttaaagacatctcaaaatactcatgtactgaaattctaagttagggctttagaattcctagattccaaggagaggcactcacatatcccattttctttgctgcgtatgattcatgaagcaggtggggaggattaactccatctaacaagagggcaaactgaagctcagaacagctaagcagcctgtcccagatggcagccgggccaggaccactctcacattctcttccattattctctgatgggccgcattttgaggactagagcagcgcaaacaaagagggaaataatctcttggattgaacaatgctgtcaggcagaacaccaccccagcccctgagaagccaaacttccagaaaggctgagttctgaaccatgggactgacctatatctaactagtaccagcctgcaaggtactgcccagcacatccttaaaggacagtcctctgcgatccattatggtcaccttgacaaacagagggacacatccagaggggctgtttcacacaatttgtttgtggggacagtaaccccagaggaaggacagggattaaagagtaagaaccagctttagaggacttccctggtggtccagtgtctaagactctgtgctccactgcagggggcccaggcttgatcactggtcggcaaaccagatcccacgtgtgacaaccaagagtttgcatgccacaactaaaaatcctgtgtgccacaactaagatctggaacagccaaatatgcaaataaatttgtttcttaaaaaaaaaaaaaagaaactagcattagcctggttgatgagtcctcaaataacaaccgatagatttgttttcctttcaacgcaaaataagttttggcacaaaagggacaggaccgtacctgtggttggagccaaactcttggcagttacctcagaaaatccaaggtattctctaatgagctgactcagcttttggtaggcaacatccagatcatctacagcagaggagagaatttactttagcaacagacgtatgtaaaaacagccaatctgtggcaataattttttagctagatctaactgcatgaatatcgtggtaggcagaattctaagacccagtgacacttcacccttgcttaattacacacacacaccttgagtgtgggcagaacctgtgaatctgatgagctatgactcccgtggttatgttaggttatatggcataagggacttttgcaaatgtaattagggttattttattaagatcctaataaataatttactgtcctaataataaatatcctaataaataatttattatcctaataaataattagggttatttatgagtttgggctaatcaaaaaggagattatccaggtgggcctaatctaatcgtatgattccccataaaaggaggttttctgtctggagaagtatgaggacactcgaagcaggaggaggaacttaatgggctgttgctgccctgaaagtggaggggccacatgcacacaacctgagcacagtctctaaaaactgagggtcacccttgtcagacagccagccagcaatcaggaaccgcagtcctacaaccgtaagaaactgccttcagtcaacaacaagaatgtactttggagtaggtttttccccagtgatcttatacttcaaaaataaaactttgctgaaagttacttacctgcattgattactgcatcaaagtatcctggatatttctggttaattttaatataaaggtccactctggagacagcaaattcaatctctacacgactgaataatccttttctcctcaagtagccctcatatttttgcttgtccatgggtaccactaggatatatcgaggctcaaaatagcaatgttttaaacttcttacaccctatgtatttaaataaaagataataaattagaaacacagatacaatttagaaatcatttaggaaatatgtgacaacataggcttaataagtagtgctgt

SEQ ID NO: 30298 - DNA, 2679 bp, Bovine  19866880527161
  misc_feature (1)..(1): n is a, c, g, or t
ngtcttagatgaaataagacatagtacacagacagaaagaaagacgagctccttggtaatatcatttgagttgctggataaagccacagctgagcccagaggagctctatactttatagttaattgagccaatagcccacactttttcatttttggctcaagctggttagagaggcacctttctttcatttctaactgatcttcttgaggttagatggggccacttaactagttacagccaaggaatgttttgttttttattaaaaacacttaattgctagttcaagactctccagaactcttctcatctcatggtgtgcgtgcatgatcagtcgctcagttgtgtctgactctttgtgaccccatggactgtagcctgccaggctcctttatgcatggaatttttcaggcaagaatactggagtgggttgccatttcctcctccaggggatcttcccaacccagagatagaatgctcatctgcatcttctgcattgtcaggcggattctttaccactgagccacgtgggaagcccatcctgtggtactgaggagcttttaattggtggagcctctgtcggctttgttccctgaaagaccacgggggaaaagagatcctgtcaatccacagtgaatttgcagcatgagtgagatataaatcagtaggtttcagaaataattgccaccaaggaaaagtttgttctttcccatataccaatacaataccttatgttctaccctctgggctgtggaacatactttatacacaagaattactctaaacatataaggtaaaatacattaatgtctctgtaacaagtatttccacaaactgttgacatgtgaacacaaaaaggtaagttggattagaattaaatattttaaaaaaatccatttataaggcacacttacttggatattcagataaaccctgctgacacaagcaccatcctctataccccaaacacaaacttcccctgactgtgtgagtgtctgtaaaagaaagaagaaactcaaatggaaaacaagactgctatgggagcatgttctaaatttctttctagtatatcaatcactgatgatttaaaataaaatttcattttatttatgtggattaaaattactttgcaatctcaatgttaatacttctgatttaaacaaatattaactattacctttcagttcagttcagttcagttgctcagttgtgtctgactcagcgaccccatggattgcagcacgccaggtctccctgtccatcaccaactcccagagtttactcagactcatgtccattgagtcggtgatgccatccaaacatctcatcctctgtcgtccccttctcctcccaccttcaaactttcctagcatcaggatcttttcaaatgagtcagttcttcacatcaggtggccaaagtattggagtttcagcttcagcgtcagtccttccaatgaatattcaggactgatttccttcaggagtgactgattggatctccttgcagtccaggggactctcaagagtcttctccaacaccacagttcaaaagcatcaattctttggcattcagctttctttatagtccaactctcacatccatacatgactactggaaaaaccatagctttaactacacagacctttattgtaatgtctctgtttttttaatatgtaaagtaatatgtaaatatgtatttaatatgtattaaatgcatattaaacatgtatttaatatgtaaagtagtatctctgctttttaatatgctgcctaggttggtcataacttttcttccaaagagtaagtgtcttttaatttcatggctgcagtcaccatctgcagtgattttggagcccaagaaaataaagtctgtcactgtttccattgtttccccatctacttgccatgaagtgatgggacctgctgccatgatcttcattttctgaatgttgagttttaagccaactttttcactctcctcttccactttcaagagactctttagtttttcttcgcttaatatgtgttggtataaatttttttggcatttatccttctagtgttctctgagcttcccagatctgtagtttggtgtctgacattaattttggaaaattctcagccctcattacttcaaacatttcctctgttcgttccttcctttcttctccttctggcattcctattacatgtatgctacaccttttgcaattgtcccatgttcttggatattctgttctttttgattcttttttctttttgaatttcagtgttgaaggttctactgacatttcttcaagcttattgattctttcctctgcaatattcagtctattgatgagcccaccaaaggcactcttcatttctgttacagtgttttatattttgaatatttcttattttctttcttagtgttgccataaatctacttatattttctaatcattctttcatgttgcccactgttttcataagaccccttagtatattaatcatagttgttttaaatttctggcctgataaattacaacatctttgtaattatttgcagatacaatatctgagtctggttctgatgctttctctgtatcttctaactgttactgtcttttagtatgccttataatttttgttaaaagctggacatgatgtactgtgtaaaagtatataattaagtagg

SEQ ID NO: 30299 - DNA, 1622 bp, Bovine  19866880533137
  misc_feature (1)..(1): n is a, c, g, or t
ngtatctcggatgaagaaattatcaacattactcttcctactggggtccccattctcctggaactggacgagaacctgcatactgttgggcctcaccagttcctgggcgaccaagaggctatccaagcagccattaagaaagttgacgatcaaggaaaagtgaaacgagctgacaaataaagtttttcccacgtgctggctaggaatagctgcagaaggaatggcatgcggtgtgttatgagtgctcatctcccacacccccccttttttttttctgtcttcccacctgatttttccagatctaggctgtggggtagagtttgtagaggtaattaggtcttaacgttggcccagttaaacgctttaggatgcacatagccttatgtgctaacccctgccagcctccttttaattagtcactaagttaatcaccagtggggcttaatcaatgtcctaagtttctgagatggaaaagcaacaagtgaagcttaagttcaaggtcgtcctcattcagtaaatcagtattgagtcactattgacagaccttcacttcaataagacgtttgtatttatagaaaatttctgggatgataataaaggatattagattaaaaaaaaaaaaaagagatcagatctaatcagtgtcttttctttcccctttccttttcctttctttttttctcccttccttctttcctttttcctttccttcatttcaacatggaactgttttctcaaataaagaagataatttcagtggccttacacttttccttggttcttgttcctagcttttttggtgaaattatcattcacatagtgatggatggataatccatggtatagtccaggggtcagttaccttttcctataaaggtttatatactttaggctttgtgggccagttggccaagtgaaaaagcggcaatagatggtaggtaaaccaataggtactgtgctccaataaagctttatgtacaaggacagggggcaggccagacgtggcccacgtgctactgcttgctcacccttgggatagctctgtcagcagtctcctccattctagagccctgatgagaactccaaatcgagtgaggaagacactgagagaaaggaactggatcacttcaattctctacccctaactctcaaggcattcgcctcacatcctagattaataacagatgttcacaaatatatatgctccagagtgaatgttttttatttagaaacaaattgctctacattcatgaagggaagaaaggggaaagaccaaaaaccaaattgttgttgactcacctgatgagcaaattggcaaaccactcacctctgtcctacagggcccatgatgagtccagagctgagtcctggaatctacagatcctgccatcttctcccaccacaacagaactccacacagtgcccctctgcatttacatagggcttacggaataatatgtcaggttgttaattacataatgagtctgcctatgtgagaggagagattctaatgaaatcctcatgtgtacagtattttatagaaataaaaaaatacctactggaccatttgttcaatcctcattttctgagcattaatcctccccacttctaggaatcacatc

SEQ ID NO: 30300 - DNA, 1094 bp, Bovine  19866880576741
  misc_feature (1)..(1): n is a, c, g, or t
nagtccctcctctgctttgtgtgcgcttagtcgctcggtcgtgtcccactcttcgtgaccccatggaccatagcccaccaggctcctctgtccatggggattctccaggtaagaacactggagtgggttgccatgctctcctccaggggatcttcccaacctagggattgaacccaggcctcccacattgcaggaggattctttaccagctgagctaccagggaagccctcctttgttttaacaccccttttcctctgtcaaagtggttacatgtgtgctattgcttcagttgtgtctgactctttgcgactcccatggactgtagcctgccagggtcctctgtccacgggatcctccaggcaaaaatactggagtgggctgccgtcctccaggggctcttcctagctcagggatcaaacctatatctcatgtctcctgccctggcaggtgggttctttaccactagcgtcatctgggaagcctgtggctccatttgctgcttaccttttccttatgaatgaatgtcttcagtatgctctgtttcttggtggtatttgctttaaaatttttttatctctaatgatttcatagagattgtaagtcccttatgaaaggaatttcaggcatctgtggtggcaaaaaggaaagacactttttcttagtggttgggaagatcttgtcattatactaggtattcattcattcaaggtacccttaagtggactttgaagggcaaaggatgtatcgatatttcaaaggcagaaatctctacctggtcctctggatctgagtagaacctgcagtatccctggctgatattttttcaactgcaggctacctcaaaagccctcacaggtatatttgccagatgtctccctggggagagagacttaggtagcttgggtgccttcttcccccacctccgctcctatgctaccaaaaatctgaaactttgcctgcttctgccaactcccctgtggtctcaagtgttccaggaaatgaggagtcattctttatttcttgcttcatacggggagggccccacgtgactccctgggcagggggcggcggggtggggagggtgagggctcag

SEQ ID NO: 30301 - DNA, 899 bp, Bovine  19866880612267
  misc_feature (1)..(1): n is a, c, g, or t
ntgaataaaatgtgactaatttcattaaatgtgagaaggtatcacaacagataccttataaggaaccataagtggcagggttagacctgtaagaacccactaactacataaagagagcaaagagaggggagaaaaaatatttctgaatccctggtgctcaaataagaacagaagaagctagccaggattaagatgtagactcaaatgcaaattaaagaaaagcatccattaaaggggaaagaaaaggactaatccctctccactgaataaactcatagagggaaagaaatgggaaccatcaaatattcaggaagtattaaagaagtaacaatccatctctggaaaggaaagagcaaacgttccatctgatgctcttcaatatcactgagtgtgtctcaaccattgcataaaacagcatgtttgctgacctctgcatttttcttttctcgtgagtcgggtgcttttttttttttttttctcatggaaaaagtagaggattaatgcataaagtgatccataatagcatttatatcaagtttggtagtattaaagtatattgccctctgcaaagcttaaattttgtaataattcagtggtccatcaatttactagaatgacaacgacataccttcaattttatttactgaaagatccagcttctgtaggtgaacatatccacagaggatgctaacgtcagttaaatcaagatcctgagaaaataaaaggtaaacgactttaatgtggctttagcagatgagtactcaggcttttcaagatatctggaaataaaagctgacagagaaatccagaatttcctttgaaagtattgtaggagtgagaggataaaacctgaagcctattactagtaggatctcaaaacagactacaaaccccatcaa

SEQ ID NO: 30302 - DNA, 1454 bp, Bovine  19866880618642
  misc_feature (1)..(1): n is a, c, g, or t
ncatgtatctattgggagaaatatatacacactattggttctgtactagaacactgactcatacagagatggttgccaaagcttctagttccctgtagatgcactctggagctgccacccataattgttcataaggtgtgtgtggtttttttttaagataatggtgttattcatcacttttagatttagattttcaaagtctaagcattagaatcccccagtctgtctttaggcagccagctttgttctgtctgtgaggtcatgactcaaacagaaaggctccctgtgggtgaaaaggaatgtgtctctgatctcagtggcattgtcctgggaagaaattgagatggtgtgtcagaagacctgcatttgaattccaactctggtatttactgtcagtaagaagtaactttttctgagctctggctttttcacctgcaaagtgagcataacaaagcctggctcagaggggtctgggaaagactttcaagaggacaatatatgtgaattgctcattgtaactcaatagcattttaagaatattagttgttggaatgtattcttttacgttgaaaggagtttgggttttggacttgagtacttagtttagttaatctcttgagcctaaggatcttcatgtactaaacaataaaaagattgcaacgtacttttgctgcttcttgtaaggattaaagaggataaagtatgaactgcctctagcaaaaaccatggcaatgcatgtgcttcctgcaaaagcataactctttcttaaattaataaaccatcattatttaaatgttactcgaagtgtgtatttttaaataaagaaaaatcaaagaactgcccccactcaagttctgacaaatgatgtctacctgcatctttcactgtcacccgtcattatcacctcttccagctccacaaaacttcttgtcctaaacccttcttggcccattgtgaacttgtaactgtgaaacacaaggcccccagcctttaaccacaagaaaaagttgtcgagatgcacagctgacagatacgcattctcccagttacctggtattcaagactattacatagttacgagctttctttctgaagatttcataagaaagagaaagcaatttctgctctgaacacttaaatcagctagaaaaaggaagaagttctattaataaacttattacatattcatagatccctcaccatgagccttctctatttatagatcttataaacactcttcctgaaaagtcttaaggtacagatcattcatgttctactcctcaacctggttcaagctcttcgtagatcattttctccttggcagtgagataagagagaaagtaaagggactttctaaagtattccatctgggttccaccctccatttagctttatatggtcaggagcaggtcccttaacccctctgagccttaaagacctcacctgtaaggtag

SEQ ID NO: 30303 - DNA, 2911 bp, Bovine  19866880638078
  misc_feature (1)..(1): n is a, c, g, or t
ncattggcaggcagagtctttacctctgatggccctttaattaaagacacagaatagctttcctgactcatggtcggctacagagccatggacaagccatgcaaacaggctcccagctctacccaaaactttagagcttcttcagactgcaaccactccctacagcgagccctgaggaaactcaggatactggccccagattgctgagatgcatatcaaaggaatgacttcagtgagcctagatgcttgcatcttcccatacagagaaaagtactgaattccttaacttaggagatctggttttcctttaattaacaattatcttttgattttccgactacctgccctttgtcgcaaaacatctgtataacctgggtccccctcctcacctcctctgagcagttctctcacggttacttgagatgctgtctcctgggcttgaagtcctaaaagttcccactggataaaacaactctcaactaaaacaaaacaaaaccctttagatcttctttgcaaatcaacaacatcccttgagtagtccgtgcaggctccccccagccccgatcctaccccgtctgggcacggtgctcaagccagtcctggtccctctttgtccgaaatgactctctcacaggccagccagcccacaggacccctgacaggctggatggccaaactcattaggggaggctggggtgcaggcagagtgcattttgtagacatggagaaagcactgtcaactagatctggggagtccgtgaattgtggcagatttggggcaaagtggaatcaacagggacaaaaataatttaggagacgccctgctgggagctccaaagcttctaagaagatgctgcctgacggcacccagctcagcttgactgtcccacaaatcaagggcacacttggctatggtgatgatagtacctgggcagagggagaaaggcatagaaccacacgactcagatgctttgggccacttctagaatatttattgaagcaggcagtttggaggtatctagccaaattacttaatcattcaactattaatcatttcaactagatgtaaatatatccctgggaatggatggggttcactcaaaagttttagaggggtgaaaagtctttttagggacttctgtcttggttcagtggttaagactgtgctcgccatgcaggggactgtgggttcaatccctggttggggaatgatgatcctgcatgctgctcattggtgccaaaagaaataaataacaatttataaataaaaaaaattaaagaatatcagcttttttaaaaaaaaacaactttttagggggtggtaaaattgcacagctctcagaacaggtgtggcttgtccacatggagatccctgatgtctgggggccagaaaattccattgggaccccaaacacgggggagaccccacagggccttcagagacctacaggcagagcacgctcctttccaccagcaccggcagggcgtggagtcgatgagcaccatccatggcagaacttggccgggaaaggcgattccagaagagagcagacctgattaatgtgctgcagcctctgagaagattaatgtgcggacaaggggaaaccaatgaaggcaatttatttagactttcagaaagactccatgctaagggctatttttaaaagtcactgaggaatctaggttttaaaggactagctttttgagattaacgccaacgagacacccacattttcctgttgcctccactacgaaatatgaatgacttctgactttcaccccatggggcatttctaagcaggttccctcctctgctggcccctccagaagtagtttttgattcttctctctcttacctaacgtcttccactttatatgtaattatgtataaatgcatccctggtagactggaactcacctgaggacagggcagagtcttccccatttttgtatcctatccagcactcggactaggattccctctccctgattcaccctgacgcgtgacggcagaccagcaaacttgaccactacagtttatgtctggggctatgttcccacgcaggctgccctggtggctcagcagtaaagaatctgcctgcaatgcaggagatgcaggttcgatccctgggtccggaagatcccctggaggagggcatggcaacccactccagtgttcttgcctggagaatcccatggatccaactgaagcggctgagtacacacacatgtcccatgcacctcaagttcagcctgaccagccctgcagtccccagccccagcccgtcacattcagctgctcttcctgtgcccccttttggctagtggcatctgcattctcactgcacccacctcggttggggccgtcactcctgcacctgtgttacacctttccattggtctagtctttcgaaggccagtgagcagggttctctgtgtcccctccccatggcctctccagtctcaccttctgttccatatgtacaaaacccctgcaggtcctcacataccctgagaactcctgctgtcctcctgtgacctcccgctcctcctcacccggattcttccagcttcttcctgtagtgaaatcctacttgttctttatataccaacccaggtgctgtttcctctgagaaaatttctcccagtccccagtccgggtttattgtgtttcctatgtgctcattcattcataacaaacatttcttgagcaacttctatgtaacaggcattctcttaggcaagggtgatagaatggcaaacaagactgttggtctctgctttcatagagctcagcattgcatgaggggtggaggcaattttacaaggaattataaaaaatatagtaagtgttcaaataaatgcccccttctgccacacggcctttgcttatgccccgctctcccccggg

SEQ ID NO: 30304 - DNA, 1802 bp, Bovine  19866880727125
  misc_feature (1)..(1): n is a, c, g, or t
ntctgtgaaaaatggtactatgtgggtgacacaattctaggacatatccaaacagcctccaaaaaggagaactaaatttacaacaattactccataagaggggtagggttaatcaccactaccagaactataatctactgattaattcacagctcaatgggccacagacacagccatctgtgtagccatttgtacctgctcccaggaggaagaggaaaagaggtatacctcttggaacaggtgagggggctgccatgggaagagtccaccctctggacacagctgagtgaatttcattcagaaaacatctgctggtgtcgactggctccgacgtgtaccgcttccttgctggaacagttgggaagtacacgtgtgcctggtccccggacacagctggggtgctgagtctttcattaggtaaacaagcaggggcaggtggggctaattggattcaactgtttggtgacagcctgggcatgatgtttgctttcccagactgaatctttcagacaatttaaaaaaaaactaggagccaagctagagaaatgaaccccatcaaggctggtccaaatgaagccactatagttgatttttgaccatgaatgactggacctgtagcaggtcagactgcagagcgacattcagcaactcggcgatcatgacaatgaacgcagaatgcagagctggtactatgtcgctgagtgaaatcaagcaaacacaaaagcagatgcaaaactaaagattctcttaagaaaagacggagcagaataaataggaaaagagcagagaaacatcaggttgtctttcacatcacactcaatgctgctcagagagctttatgatgggtatgtatctccaccttggaattgtaactcaagaaacatctgataactctagagatgggtgatggaaagaaataatcttaagaggacccagggggaaagacttgaaatttcagagcttaccgaaattatttaggggataatttaataacaaccttcaactagataagctctcacatgaagggtcataagtgtttgatattttaaaaaccaagaaaaataattataacacagtggaccaagaatacaaaatctgcctcaactgtcagggctcagattttttttaatgataagccaatttaaatataaatataaagatctttataaaaagatctcagaccaggtaactcccagtttccaccctaaatgaacatgtctctctgatctgaaacattatttgagtttcccactttctcttctttgggctgtagagccagtcttagcttctcatgcctgtacaaccacttgcttacattgggaccttagccatggtatgaacctttctgaacctctgtttcttcatttgtaaggttgggagaatctaatcttgagaactgctgtgactgacaaaatgagtagataactatggagtccttgcacaatgaccacgcaccttcccaagtgtgtatttccattctagttcgggtccttattactttgcttcaaagtgactgcaactgactcctccttcatcgtgagttaggtgggggaaattaagactggctgcttgctagggaactcctgggagatgtgattggaagggcagtatctgtacttgacaagaaggcagttgatgggcactagaatatggggcttcccatgtggcactagtggtaaagaacccacctgccaacccaggagacataagagacgcatgttttatccctgggtggggaaaatcccccggagaagggaatggcaacccactccagattctgcccggagaatccctcagacaga

SEQ ID NO: 30305 - DNA, 1943 bp, Bovine  19866880754810
  misc_feature (1)..(1): n is a, c, g, or t
naatatatgttgccaatctctgttatgggataataatattcactttttccagaagtcatttgtaaatgacactaaaaatacaggatttacataggaaacttctgtggaatatatttcccacttggatcatcctagataaggaacagcttgcctagcataggctgtatctacctgatcaaaccataacaactctaaaaagacatttggaaacacctggatgattcactgtattctttcatttccaactgagtatttgcaagcctgcagtggtgagcagttttatttagctagtgtgtcaatttgggaaaagtaaaagcaagccatacttttctcattcaaaatgaaaatcaattcattgagttccatgaaaaatatacattctttcaacttaaaatatctactttatacaattgaacagatatttcaaacattttaaaaggcagtaaaacaacctgtctcccccacacacataccttcttttactcaaatgaagtatgtccagaaactcaagtttataaacaataaaatcagattggtagaatgttaatatcaaagttgggcaataaaaatggtaaaaaaaaaaaaaaaagaaatgaaaattagactaaatgtacttatgaacctagatgaaaaaattagaatattgaatctaacagtgcaaaaaaaaagggccattcaaatatgggacttacaagcacctctcacaggagagattatgggaggaaggtgggaagggcaggggtgggaagggatggggacacagcttctggcaccaaggacttaaccatgttggacccaaaaagtgggcctgaaaacctgaagcttaggcttcacagctgggttgtaaatcagacctgaccccagcaaacatgcaaggtcacggacagggtgcctgaggtggtgacagtgaacaacgtgtataggacgtgcccagtggtagcaatggataaaagtataccaaatggactttgaaggaccacaggttttaaaagtcgattggtatcaccccatactgctagggtagtgggggtgcatttgattttcaaattgggtacttttaacactttagtccttgactgctgttcttcactgacttgactcagtcactcgtagctttattggtctgaaccagctccttgttcccaggttgcagacctgcctatcgttccagtaatcctgtttcatttgaatgaagggagtatgtcttaaatgtaaagcttctggttctcaacactgtactctgaggtccaaatgactgtcaatgtataacctgatgtctcaaccccagtaagaagagtcagttctttggtattcaccaatgcgggaggcttcaccagaacaggctttttctttgggctctgctgtttgtttgcagaacacccaagagcgagcaaacatgctctcttcatagcagtaccttagggttttgccattgtaaatgggtctgatgtgatatatgacaagatcagagaaattggatgtaaatttacatttttgaatatgcttgttgtttcacatgatacatttagggtatgcagctccttttgtagtttttatttttactatttaagtttggaaatgatgccaaatttttgtatttctttaatcaatgtgttctcttcagtgatatatattgcattatatattgatgtgtgtatcaatatatactgatatgtattacacttacacaatacaaacacataagagggggtgaaaaccgtagcatttgcattctctatagcctctacagagagatcctaaacagcaaactcttggtgttgtgatgtacagaaatggagaagagtattaaaccatatttaagaatatacttcgtgtgcttgagattttttaggactgttctaagaaaggtctgagccgtggagacagtgtgaatgagctctccaaagcatgtgcaatttcctcagttacttttcagccataga

SEQ ID NO: 30306 - DNA, 2244 bp, Bovine  19866880811682
  misc_feature (1)..(1): n is a, c, g, or t
ncagggacacagtgaccattcgacagcatttcaagtgctacacatagtgtcatacaaacattttattacttttattactaatgcaggttaatcatatttcaaaaagtaaagcgaagtttgagtgttgtgctttttcaggcacggtggaatgtggattattttgttataaaattataatagcaaagcaccatgtttattaggcagtgacacttcagttgtgttaaaagaatacaatttattttcacattaccagaccaagcactcatcacaatattcccaactcacaggaaagcaacagtaagaacaattaaaactttaaagcagaatatcttatcacaatagaatttattcaaacacacaaaaaataagaatgaaggtgcaaccaaagttactttccaagtggctcatttgttaggcaagcaaagaaagttcttcactgacagtgagttaattaaactgtgtttgactgcagcagctacaaagtgtgtccagagaagataaacacgttgaagaccactagtttttgtgcaaggacaactgcttgaagacaccgactgtcaactaaaaaacaaggcaaatgatttggcttttcatgagtcaatacatgttaccaatactgcctagttgttgattacaagagaagtcagtatggagcttaaagtaactcaggaattggcctctgtgaatagactccgtgcaacaactcccaataagataattttttttaagagaaaagacttttaaagaacttgagaaaacatcagtgctaactgaagtggtgtctgcaaagatgtgttgtaacttaatggtggtaagggcatatggagtagaaaatggtttactgggcaaatttacaaagcttgtagaagtataaaatgtttaaaatcaatctttatgcattacatgattcatcagcaggtattctgggggaactatttgaatctgtcatgttactgaactagttaagtcagtggtgaatttcatttactcttgcagttttaactatcattacttccagtaagtttttgctaggaatggaaactgaatatcctgacttgcccagctacacagcagtttgatatttgtaggaaagttttattgcaatttttttttagctcagaaccaacactgaattttctctgaataggtatcatttttacctattattaatgaaaactgaatagatttgaaaattaggtttgcagcagatttgacatttcttagtaaatcaacttaaaaattgtaaggcaaaacagcacttatatgtgaaatttacacttgcaacaaaatcattatgacaaaactaatcttgtttaaatcacaagtaatgtcaagccactttatccacttcctatgctgtcaagttaaaacaagaagcaagatatccattcctacacaatttgcagtgggtatgtttttcaaactcaactgctgtttcagctacatttttggatccacttaactgtacaaatgaggagcatccatctaatcttcaatacaaagtaattaatctgcaatgtaatgttatgtccatggcaaatatcaagggcagaatctaagaaaattgtataaaacaccctcctaatggtgaatacactctaataaaatgatacgtatggactgatacagtatttggtaatatctatctgaagacattttcaaagatgaaatatataaaatcacattacagatcagcataacagacgatcaatttcaaactcctaagtgaaatattatcctctcaaaatatctcaattcttatcagtagacctgtattacaaaaaaattgtactcaagtattcatatgtattttgaacttcctcaatacaaaactactggaaatttgttttctcattatgcaagtatataaaaacttcaattttgcctttggtcccataaaaccaaagtttgtcaaccccactctagagcagtgcaggactgtttttcatattaagtcaagtcacagtatggtaaacattcctgtgaacaactgttccttctaaaaccattttcacatcccagcagtattacctgataatacttgtatatgtagtcctttctttggttatgatccatgtattcctatgaagtaaatttcctaagaaaataatgtgggtccatattagagatgggcagagaagaaactcatcatcccaaacatcagcaaaactttataattccatttactttttctctagaaagatcagcttttcactctactaatccaatggtaatcacaaaaac

SEQ ID NO: 30307 - DNA, 1497 bp, Bovine  19866880812357
  misc_feature (1)..(1): n is a, c, g, or t
ntatacattttagtcctgccactgatcgaggaaaaaaaaattcttaaaagagtttttgattggttttacggaatcaaattcaagctcctagaaagaaagcattgattactataaaatagactgcttaagatgaaagagacagactgtgaaggaaacgaaaacaaaggaattggggggaaggcagctgattactggactggccagagctctttgatgtcaaacgtaaataactcattgccattctctgtcaaatgcaagactcagagatttgggaccaccaaaataactgtgagttagcagagaacatggatatggtccaaccagggtcaagatggagccacgcaagggtgaccctgtcatactcactgataaagtcaggctgaggtagacctgctccgtcccagagcctgagcgccccagttggtagagcttctcagccacgacctcctctctcaggaccccatcaaattctccctgcaaaaacaaaacagacaggtggacaaagaaaggacttccattagaaaagaaacaatccgcttcgtcatatccagcacttatttagtatattacacatctgggagctgagacttccaaaatttactggcccccaagaaaattgtgttgaagacccatgcatattacacactattaaaaaatgtatctatccaatcaatgtctcactgctgatagcattgagtgccgtttgttgctaagagctctcagtgggtccactcactgatccgcctaatgattctgagggaggtactcttcactccattttacaaataaagaaactaaggctcacagaccaagactagcctgaaaccacaaagcccagaatacaaaccagaatctgcctgacctcaaggcagttctaaccaccaactgcacttgactgcttgtccacaccccaaaggagggctgcaccacatcaaggcagtgacttctctacatctggcattcttgttggagaaaatgggtcctcgggttcactttgcattggctaatcttgctggattcataccatttacaaaattaaaagggtaataatttcaagaaggaggctggtccttagtctacagacaccatgaaccagtggtggcccaacaccccctctccccattctccccaagagcagaggtaatagtgctgtgtttgtgctgccggcaactctataatgaccaacacattaacactaacatcagcattaggacacaaaatagagcaattttttaagtcacagcaatacaactaaccagtgtaactggtacgtggactatgaaggcaaaatactgtttcaggtgttttgggccactttacattaacttgggaatcaggagtgctgttcagactgcttgtactgaggacataagtatgtagggtggtgctattgtaaaaagttttatttcctcccgaatttcccctatcttgttgctatttttcagtagctcagtcatgtctgactctttgcagccccacggactgcaccgtgctagg

SEQ ID NO: 30308 - DNA, 1324 bp, Bovine  19866880838295
  misc_feature (1)..(1): n is a, c, g, or t
ntgaaagtgaagtcgctcagtcgtgtccgactcttagcgaccccacggaactgcagcctaccaggctcctccgtccatgggatcttctaggcaaaagtactggagtggggtgccattgccttctccggttaaaaccgcatgtagttccaaatcttggagcaggattttggctgtggctgagtgcatcaaaacatttggagggttaaagtaaaaaataaacaaataaatacagtgtatatcgcagtgtaataaccggcaaagcagttcataagccttctatgcatgtttttttaacttgcttaaaattaatagccattgtgagcaacagccgacattttacagccttagcagccaataaactcacccgtatctgaagtaagtgctgaactgtctgcagaggcggtgagcgagttctcgtttaccacatgcttgaggaccggccaataccagcatggggtacggggcatccagactaggcagggtgctgcaacatagggcagagcgggcacgcgcattaatgcatccggcgtggaaagctgtccacgtcgcagtcacggtgaatccggctatccggcacttgctatccgcagacacggtatggaaggacggtcctactttccagaagcaagttgattacaaaatagcaaagaatttactttaacaccattttttgaaggaaaaagacagtaggagagatactcatttctggttgatggagttttcccccaagaaattcaaaatgaaagaaataagccttgccctctcagaggtaaactttttcatatctttttaaataattactttaattggaggatacttactacacaatattgtgatggtttttgccacacaccaacatgcatcagccatggggtatgcatgtgtccccccattctgaacctttcctcccacctcccttcacaccctgtccatctgggttgtcccagaatactggcttagggtgccctgcttcatgcatcgaacttgcactggtatcttttttgcatatggtaatgtacacgtttcaatgctattatctcaaatcatcccacccttgccttctcccactaagtccaaaagtctgttctgtgtctcctttgctgccctcaatgtaggatcattgttaccatctttctaaattccatacgtatgcatcaatttacagtattcgttcttcctcttcctgacttacttcactctgtataataggctccagctcttatctgttgatttagaacactgatgtggggactttcctggtggtccaatggttcagaatcctccttccaacacagaggatgtgggctcagtccctgtcagggaa

SEQ ID NO: 30309 - DNA, 853 bp, Bovine  19866880840221
  misc_feature (1)..(1): n is a, c, g, or t
nactgaattgtatctttagaaatgatttttttttcaagtcagacatcaaaggctgcatattgcagaaagtttattttgagaggcttcagtcaaaacagtttggaaactatgaaatgagtcattttttcttaaagaaatgtaactttgtctattcccactgcatttttggtttggtaggagacatctttattccgcaggattttaaaagcatgtttaagattccataggtttagtattacatcactaatggtttctaatgagatccaggcaatagcaagaggggagaaaagaacagcacgaaaactgaattctacaacatcaagtaccatgtgaaacatggaaaagtccatgctttatctatggctgaagccatctggcaaaaaaaaaaaaaaaaaagggcgggggggtgtgggggaggattcacattctatcaaccagatgtagatgacaagatacctaatgtttgacaatttggaatcagtcatctaaagggctggattttttacttttcaagcagatgtgtgctgccctgtaaaatctgtgaaacatgcaaatatctattctgtattcattctactgagtgcttgctgttgctgtttagtctctaagtcgtgttcaactccttgtgacctcgtggactgcagcctgccaggctcctccattcatgggatttcccaggtaagaatactggaatggattgccatttccttttccaggggatcttcctgaccagggatcgaacccatgtctcctttactgctgagccatctgggaagcatattgagtgcttaagtctttagttacttgtttgattttgtcctcataaacaccttttatgtaagtattataccaa

SEQ ID NO: 30310 - DNA, 875 bp, Bovine  19866880890992
  misc_feature (1)..(1): n is a, c, g, or t
ntgatttatatataatgaatcctactaagtcgcttcagtcatgtacagctctttgagaccctctggattgtagcgcactaggctcctctgaccatggaattctccatgcaagaatactggagcgggtcgccacgcccacctccagtggatcttcagcacccagggtttgaacccatgtttcttatgtctgctgcattggccggcaggttctttaccactagcaccacatgggaaggcccttatgtataataatgggggtgcaaataatattcttgctaccaatcatgctgctagcctttgactgacattgctaattaaacgtagcattctttctcatgccttcagaattcttttcaatgcagtattctaggcagctgaagctgatagatgagaattgacagacaagtgagaacctggtgtaggacaaaagtcacagggtctgtacagtatataagacctataagtaaaattttgaaaaccccttcaaattttaatttcctcatctgtaaaaaaaaaaaaaaggcatggcttggaagttataagaactaaatgaaataatataaataacttagcacagagcctgtagaagttcaatacatattagttccctcctcttgtaaccttaatttttttttttttttatgaagatgatatatgttacttttagctcatgtcttttctatgagaacaacacttcatctggaacaaaatgtacattcgatgcagtacagttgtctatattttgactgtcagttttagtcatgtctgtcattgtttgttttccaacatgaaaagaaaggtttaggatagtagtcacattggaaaacaaagacaataagattaaaattccctcaaatcagctttggagccacaaa

SEQ ID NO: 30311 - DNA, 770 bp, Bovine  19866881001304
  misc_feature (1)..(1): n is a, c, g, or t
ncttatatcgttgtacactcatgattgaggtcatttaatccattctgacactttttctatagaacattcactggagttctccaggcagctactagccgttggtatagtaaaatactagtcagtatttttatttctgaagcaccccaggattctgaattggattgtaggaaacattatttgtagctggaattctaggtactctcccaagagtcttggtattttataatctttatttaatctttatttctgcacctagacactgggggtcagtatttattcataaatgcctctccatttgactgtaagcctagctctggctacttacaaaaggtgatgtctagagagtcctggagttgattgtgggatttctttctctgattatgtaactacagagcccagcctaggtaaacataaaatgtaaatataaacattgtggatccctgtaggactgtaaccagagaaggaggcagacagttttcaatctgaaatacaaactaacaccagatccttttcatttctggagacttgtctggcaacattggtcctatgggtgcactcaaatgctcaggcagaatttggccatcacccttaactttccttctgattacttattttttgttgattctctctcctcctagctgtcaaattcatctctgtccccaccactcacacccttgagtcacatctctactttttctgtcattatgagactcacatgctgccttctgcactaagaagggcatttttctctctctagacatttaagcagt

SEQ ID NO: 30312 - DNA, 3367 bp, Bovine  19866881007942
  misc_feature (1)..(1): n is a, c, g, or t
nttggagtcggaacggaatggagactgagcggaatgttaagcgggtggtggtttggtcaggatgctgcgaaagggctggctatgtgaaccggaggtggtgacaagagccctgatctggtgacgtcctagcctgccaggctcctttttctttctttctctctctctcccctcccctgcactctttttgttggcccccagctgggcatccagacatggccccagaggcagcgagttacagcagaagactggaattaggaccctggtagctatggatttcaatcctagctcctcagactggctcttggcaaattgggccagttccttaaccttcctgagcctcagcctctttttctgtaaagtgggcttaacatccactgcacagagtgaagtgaagactaaatgaggagccatcaaccaggctggtacctggaactaagcacacagtaaacactggtttttctcccagtttacccagaggaaaaccgtcaccctagccttgattgtgctttggatgttaggcaactgcttcctctgtctgctaagagggagtggccttatgttctttataatgtaaactttctgcttccaaccctggttgggactggagcgggcatcccagggtaagagtgtaatcttcccccctaagtctctatacacttgtacaggtgtgtgcgtgccaagtcacttcagttgtgtctgactctgtgcgatcctgtggactgtagcccgccaggctcctctgtccatggggcttctccaggcaagagtactggagtgggttgccctgaccttctgcaggagatctttccaactcagggatcaaaccagcatctcttacatctcctgcattggcaggcaagttctttaccactagtgccacctgggagcacacacctgatcatgtatggcagttacttatttgtgtgcttatctgcctggagtttctttccctcacatatctgcacactttctgaggacaggcactgtgttacccggtcacagtcagatgctcagggtctagtgccgtgcttggccctggaagggatggatgactctcacccatctgattggcccagagcagaatggtcaagataacccctgccagagctctgttctgtctcctcccacagctgtttctgaactcagatcacgggctgtacttccgtttggcctttggcacagattaccttggattcacatttcctggatctgttgtctctctgaagttgtgggcttctggaggagtggggcatttagaacttcaagagcaggacatgcaccatcgaaagatgatggacaaagatgtggaaatatatatatatatatatatgtatatatgcacacatacaatggaatattattcagtcataaaatggtgaaattatattattttcagtaacatggatggacctaaagattatcatactaagtctgaaataaatcaaagacaaatatcacatatcacaaatatcacttgtatgcggaatctaaaaaaaaaaaaatgacacaatggaaacttatttacaaaacagaaactcactcacagaggtaaggacaaacttatagttaccaaaagggaaagggtggggagggatacatttggagctggggttaacagatacatactattgtatactagtgtataaaccagataaacaaggacttactgtgtagcacagggaactatattcagtaccttgtaataacctataaacgaaaagaatctgaagtatattcagattggtgccagcggtaaagaatcttcccaggtgggtgcagtggtaaagaacctgcctgccaaggcccaagagacttgagtttgatccctgggtcaaggaaagtcccctgccagtaggaaatggcaacccactccagtattcttgcctgggaaaccccatggacagaggagcctggtgggctacaatccacgggtcgcaaagagtcagacacaattgaagctacttagcacacttgcgtgcacagcttgtcactgcaggcctccctgaaagcagagatggtttcagggagaaaccaaaaccaaagaagagagtggttgctctatcctttcttacaaacacccaccaaatcagcataatttccagcaggggctgtccaaacatctccctcacccctgtgaccacggagagttagaaaggctgtgtcacctatccttccttttaaaggaatggtcttctttaaggtcagaactgaaaagaaattgtgggcccaggcagtgaagggtaaggagttggtagtgaaaagagaagcagagtgtttggtgcctcagtcccagaagttcctgggaactctcctgcccacttcacccttttagtacagacgcaaaggctagcccctctgcagcagccttttaaagtgctgtcaataagggatctttcaaggatagttggaatgctcatcaggggaaagatttctgtttctctactgggaggcctcagagacgtctacatttcccagaacttcccagaagagaatcaaggggaaggaaaattactgcttagactgcagttggcagtggctttggggatcagctccccgccccccaggccctggcttggtgcctctatggggaagcatctttaacttccattgccaggggtgttttgcttctagtgagtggaggaggagataggagaggaaataaaagtacaaaaatgaaaaacaaagaattcctgaaggtctgataagttgttcagctatgcaccaaaacataaatatttggccaaattagttactccaaatgctttatatttctaaaattgagccatagttttgttatactttgaagtttttcagctcttgacaatcctgtgcaaatctaaggggagtggggcttggagttcatttccctccccgagatcccagcaaatacttagcttcttttctttgaggcctggtaaaatgattttgttttgttggtcatctctttccaaagggacatgttctgtgtttgtgcagtcactcaagtcagcattttattagtgaacaagcaacaagcaacatgtgctggaaaataatagcttggaactgatgagaaagctctaatgattattaaaatatctgcatcctaatataatctgcagtaatgccgcagcttaatttctgctcaccttttgttgaattcaccttttgagatttgcatgacttcaatcatggagtatctcattactgaaatcgaatttacttatgctatggcatggtagaaatcactgttccctcgggctgaagaatgaacatccataaattgagtgtttatatgatcctcaggctgttggttaatttccttagtgcagtcctattacctgaaaacttgggttcacctcttggggatgtcaaaccaaaagacaca

SEQ ID NO: 30313 - DNA, 763 bp, Bovine  19866881014151
  misc_feature (1)..(1): n is a, c, g, or t
nctatctctctgttttggagagggaccaaaatgtttcattccttttggcactgttttcttcatttaaaaaggatttatacttcaggggttttgactccagaaggaaaaaaaaaagggaaaagagcacatactttggatgtcagattctgaatgttttgaccctttcaaacaagaacccactactctgtagccagtggggtgagagaaccagatcggggatagaacatgtccacatgggcttctaaagtgacaagcaaagagggaaattggcccacctacaataacttgtttaggaaacattaaaaatagcccatccaagaagtagatcttttgtaaatagttttgtttaaatgtaacttaagataatctagctaagcatttccaccacgcccaagctatcagtcaattaaacgtcaaatgtgatggaaacacagctatgggtagttttatgaaattttcattaaaatgaataggagtaaatagaaggttctgaatggtgaatcttagagagccttctctgaaggttctcaaccaggatgagggttggtgggggaacgggtgaggataatttcagaatgtcctgagtagcacaattcacactatcagcctggatagtttgaaaaaactctccagccaattctgattgtacttggcaacccttctccccagttatgagtccccagggaggcagaataatacccagaagtatcaatcgtgtcagtgaacattcctgtcttcaattaactgaattcaattcagcatt

SEQ ID NO: 30314 - DNA, 1127 bp, Bovine  19866881026005
  misc_feature (1)..(1): n is a, c, g, or t
ngtttctctaggaaggtttctcatcagagaaggcaatggcaccccactccagtactcttgcctggaaaatcccatggatggaggagcctggtgggccgcagtccatggggtcgctacgagttggacaagactcagcgacttcactttcacttttcactttcctgaattggagaaggaaatggcaacccactccagtgttcttgcctggagaatcccagggatgggggagcctcatgggctaccgtccatggggtcgcacagagttggacacgactgaagcgatttagcagcagcaggaaggtttctcagagtgtgtgtgtgtgggtggattgtgtgtgtctgtgtgtctgtgttaagtctgctcatatatgatggaaagggaatatgtgcagggcattgtgcagagggtatgagcaaggtagaagagtagcatgggaattgctcgctgtggccaccttcgggtcgttgggcaagtctatacaacccaaggtttgtgtaaccacacacatgatatattctcaacctcattcctatttttcttatttggatgtcattaattttttatagtttgttatgaatgcattctaaaaattattctgttttttatgtcatgcaatgcttattttctttgtttaatgcaccaaggggttaaccatacatactgtattttttccttaatgttttacagcactatataaacaagcatttccacatggaaaagggtctctccaacacagaagacacatggtctcagccatcagtcgcccaggttccaacatcaaacccaccctccctccgatacctcagggccgcaagtagaccagtactcgatgtttgatcttaatgtggaaaatcctctctgatcatgtctggtccctctgtcttacctggccgtgcatcctggctattcctcactcaaccaactgcctacaaaagaaggttctatgtgcccttatcctctcaatcagcttcttttgtgattctctgaatagtgtctatcttttttgaaatgtaagttattcttagcttttattaacgtaatttcagtttttcccatagctatgaatgactcttccagctgcttcctgctctgaaatatcagaggcaaaaatctcctaagatatttg

SEQ ID NO: 30315 - DNA, 1309 bp, Bovine  19866881135746
  misc_feature (1)..(1): n is a, c, g, or t
ntggttcctttaatttggttttctccaatagggcacatttgcatttactgacttgtggctttttagaatagcaaatgcatctctctcttctctgtgtttcattaaatgactaggcggtctctaagctacactaacattagccagtactcctgagattcagaggcttgtccatctagctgggtggtttcttttcctccacccttcctcccccattatttttcattttatatccttctggtcattgggcctcagaaatgagggcgtgtgtgtttttctgtgggcttcccaaatggcgctagtggtaaagaacctgcctgccaatgcagcagacataagagacacgggcttaatccctggatcgggaagatcccctggaggagggcatggcaacctacttcagtattcttgcctggagaatccccatagggagaggagcctggcaggctacagtctataggggtgcacagagttggacatgactgaagtgacttagcacacacgtacacacgtgtgtaggtgtgtacaacatacaaatgtaatgggatagggagataagaggacaaagagtgtatgcaatcttgcttaggataaaaaaagactgctttggtccacagctgaagttagtaaaggcatagattttttttttattgttttacaatttagtgttttattaggctgtcactgcatggcacttaatatttggtgttagtgatgtgtgttaccaagtggatcccccctcttatccaacagtggggaggggcaattctgagcagaaggtctgtgactcctgtggtcacatggcccctggactccagcctgagcctgggggagcagcagggacggagaccagcccagctggcaactcacattccagagtgacacagctgaatgatcaaagggagaattctccatactctagcagagaagccaagacatcggggctgatctaacacaccctctgtggttggatgttttctttgctccagtgttttgcaactacgattaaggcagatcaggaatcactcgctggaatgaattacaagtagagagcaaaaggtttcccacaagaaactctgaaaattagacaggattccccaaaagacaagaaggctacaaaacaattccatgatgcactggaattaccaacatgcaagataataattttcaatcaaatcagtttgcatccacattgtcctttggattcatttaagtaagtttcttagggttggaggatctaaatccgtgcctgtggacagcatcttttgcctttttagtaatgtcttttaaaaagaattgttctcctctacat

SEQ ID NO: 30316 - DNA, 1333 bp, Bovine  19866881166108
  misc_feature (1)..(1): n is a, c, g, or t
naaaaatgccttgaactatacaattaggatgagcttccatgctaaacactgacacactgaaatgaacatgtaatccaagtgggataaataatttatcagtgcttattgaggccccgggaaaatgaaagcttgatctttatcatcacaaattaaaatagcagccatggcttccagggccccgcgttttatacaaggtggcactctacttgactgccgagacaggaccaggggaaaacatatttgatttagactttttctggctcatgacttgtagagcaagtttcttcacagctggtgatacattcagagtccgattgctagacatggaccaaatatcccattccagtaaccagagatccacgtcccccttaggggtggaacgttctgtgtggaggtggttctttcctgctctttttctcttgccttgctgagtgcctttgggcagtttccaagtttaatgagtggagggggagagaatgcaaagatagaaaagtgacgtcatatagacgggtctcacagtctataacatgacaacgtttgtattttgcttgggtccaagcagattattttttcatatcttcctcatatctcctttatccacagacctttcttccttactttttcccttattttattttaatattgcactgcaactttttctccccagtgattctgtcttaaaacattcataacagtaagcatacgaaggacattttggtaagctgggcaaatcttcttttccacgtgtagaaataaagtttgtttttctgtgattggatattaatacatgtgtcatagctgtccctgtggctcagctagtaaaaaatccaccctgcaatgcgggagacctgggttcgatccctgagctgggaagatcccatggagaaaggaaaggctacccactctagtattctggcctggagaatttcgtggactgtatagtccatggggtcgcaaatagttggacgcaactgagtgaattccactttcaatcatataaaagaaccagtttttgattttattaattttctcaatttttttctattccattgatttccaaattgatctttattattttgttctgcttactttaagcttaatttactcttggttttctaacttcttaaggtagaaagttcaaatcatttatgtaaagccactcatcttttcgtgctattaattgaatatcccagcattttttgctatggtttcttttcttttttttttcattccaaaatgttttctaatatctcttttggatgttttcgaatccgaagtatttcaagtttatctccaaatatttatgtcatttttaaaattagttcacattaga

SEQ ID NO: 30317 - DNA, 1716 bp, Bovine  19866881177211
  misc_feature (1)..(1): n is a, c, g, or t
natgcttaatttatgaagaaatctggaggattaaagagcatcaaatgtttttaaaatgtttttgacacctgcccctctcggttctttgtacaacttggtttctatgtaccactctactctccctcagtaaaatgattgagcatgagggcttaaggttggggatttcagagcttgcctgaaacttgccccgattccatcatttgaccccactatgccttagttcatccataaaaggggatcgctagtaggatccatttcatagagctgccatgaggttaaataagggaatatatgtaaaacgtttagagaaacgccttgcataaggaaaaactcagtcaatattacctgtaaccattgttgatgctgtaattattaggaccccttcattcatggagcctgcctagtggatgagacagactgtagtgcaaagctggagaaatgagcgtaatagcagtatgctatggatgcaaggcagcagacatctttattcaccaccttcgtcacctcctccatggagtcttcagttcgtcactgttccgacatacacagaactttacaggcataattcaaagacttccctggtgacacagtggatgagaatcacctgccagtgcaggggacatgggtttgatccctggtgcgggaagatgccacatgtcacggagcaacaaaggctgcgtggccccactgccgagcctgcgtgccacctgcagccctcacgccgagagccctgccagcctgtgtgccaccactcctgcagctctcacgcgagagccctgctcctcaacaagggaagccactgcggtggcaagcctgtgtatcacagccgagagtagccctgctcactgcaaccagtgaaagccctcacaaagcaatgaagacccagagcagccaaaaataaatacattaaaaaattataaataaaaataatacccaaggtttcatctgaggagcacacagcctaatgtgtctcatgatggtcccatgatgctttgattaaagcacatgtttgagaagccatatcacactgttggctcaaattgagcttttggttaaataagacccccagagccattttacaccaactgctgccaagttacatgttccccatcttgtatttttataattcatttttggaactaaaaacaagaccttgcatttatccttattacatgccatgttgctggttttggcccagcactgcagcacatcaagataatgaatcttgattctgtcagtgatcttatatctcatttctagcccctccagacttgtgtcacaagcacatttgatcagcatacttattacatcctcatgcaagacaccaataaaaatgctgaccaagacaaggctaagagaatagcccaatatttctggaattgcagaacatacttaaatgtgtccactaatcatctggggtataattgattagacagctttgagctcattgagtagtacccctatttcactattttgttcaaaaatgtcctgatgaggacctcccaggtggcactagtggtaagaacctgcctgccaacgcaggagatgtaagagatgtgcgttcgatccctgagttgggaagatctcctggaggaggaaatggctatccactccagtattcttgcctggaaaatcccatggacagaagagcctggtgggctacagtccacagtgtagcaaagagttgggcatactgtggcacttagcatgcacgcc

SEQ ID NO: 30318 - DNA, 1182 bp, Bovine  19866881183689
  misc_feature (1)..(1): n is a, c, g, or t
ntgcagctgcacatgtgccggtgacttcgagacagattgtgatgtccagcaaacattatcctcactagatgggctccacagcaagattttggctgtggtcctggctgctgccaggtctcatttgttcctgatcgatttctaagcctggttctaaagtctgtgaaatacacaatatccttttattaaatttttttttttcacttaaatcaaccacatctgtttcagttgtttgaaactataaaaccctgactaatacaactggtgagacaagtttttactatgatggctgggactgctagccatctgccaattttctccatttcatcttttggttgtagaactcaggatttcagctgcatccgcagcagcatcacgtcttgatcttaggtcccgaactgaaaaagtgaaagtcactcagtcgtgtctgactatatagtccatggaattctccaggccagaaaactggagtgggtagtccttcccttcgccaggggatcttccagggatcgaacccaggtctcccacattgcaggcggattccttaccagctgagagccataagggaagcccaataatattggagtgagtagcctatcctgtctccagtggatcttcctgacccaggaatccagccagggtcacctgcattgcagatagattctttaccgactgagctaccagggaagccaaaaaaagaaaaaaaggatgtatgctagtgctaccatctatgttttctgggtcagttcaatcgattgacttttcccttcgttatgtatttcccagcttttttgcatacctggtaatttttgcttggatggtaaacactgtgaattttatcttgttaggtgctgaataattttgtattcctataaatatgagttctgttacaggatgtgattaagttacttggtgtgttagtctcttgatgctgctgtaataaattacctcaaacgtagtggctcagaacactaaaaatttattctttaagccagaagtctgaaaccaaagtgtcagtggggacagctccaggggctccggggaagatttcatctctcgcctcttccggcttctgtcttgcctcttccggcttcggtggagcccagcatcccttgaccatgtcactccaatctcagccagttgttttcacatcgcccttgcctctgtgggctctactcccgcctc

SEQ ID NO: 30319 - DNA, 684 bp, Bovine  19866881218075
  misc_feature (1)..(1): n is a, c, g, or t
nctatattgtagatgagtaaattgcagctctgtaagtgtcaaaagcctagtaccttatgctttattagtctcttaaaactggctgagttaacagcttctcagggttatgtttcttcatttttaaattgcaacttcattatctccttcaaagcattaatatttacttccattgggacatcagagaaatataaggaagtctgagctactggagaagagtgtagaaaaacagaaagtagatttttttttttcctctcagtcttcttcttgctttggtgaatggacctgaattgtcagaggattaaaaactcaattcctctgagaggattggcattgaatggccctgtgttagaaagcttttaaaagaaaaaggggctggtccagtgagatgattcctgctgctgctaagtcgcttcagtcgtgtccgactctgtgcgaccccatagacggcagcccaccagtgagatgattagacctcagtgaaaatgagaggttttaagctttaataacttcaattatcataggcattaattttttatgtattgaatatacaggctttcctatgaatagttagaaacactgagaccttactattattacattattgattacacaattattacataattacataatcattacataattattatcactattattacacaagtttaaggatggaggcag

SEQ ID NO: 30320 - DNA, 1002 bp, Bovine  19866881300869
  misc_feature (1)..(1): n is a, c, g, or t
ncagctccagaaggagccaagcttcagggcatgtaatccagccagttttgctttctttttttttttaaagtaaaattcttgatatgaattgaagtattctctataattgatcaagataaagagatatgccgtaacttcataccaaaacttcaacagtggtgagtaataatttaagactccaagctttactgaggattgacagttttaaaagctaaattttaccagattcactagattttactatgtctgtaaggaatagtcttggttttaagttgcagagaagaaattattgaaaggattccgggtaagtcatagatgattcagaaagacggaaacatcagacttggaaagtgagcaggaatgaacaatgttagggatcaaggcccaagtcactccaggatcactcttcaaggacagttttctgaagagaccactactgttgctgctacacacagaaccccacgtctcgctctgctgccggcagaaatggatgttgaccgtgtcatggccactgccactgactcaggtgactgacagctaccactactgctgatgccacgtcacaagactccccatcacccctgcactcgtcccgggctccctgattagttttgagtaggtgcatccgtgacccagctgaggctgggtcaccacagagtgagcaggcctggcctttgtgtttttataatgggaaatgggccctgcctccctccccaaggagggggattcccacaaggccacattgtggggaattcccttaacacagcaagagacgtagaagctaggtggacaaaaaaatgacacgtgtcactcatgtatcactattgtattttcctttaaaagtgactgggttttctactgatacaacaaaaagacatagcctcttgcttcccttcctttctgaatatattaaattcattggaaaaaatcaaagtagcttcttaaaagctattttagacaacttcatcagtcactgtattaccaccacacgttaggtgtttt

SEQ ID NO: 30321 - DNA, 1194 bp, Bovine  19866881330710
  misc_feature (1)..(1): n is a, c, g, or t
nactgagtgactgagcaacaagcacaaaatgaatcaatgaataaggcctgtcatccatttcaactataatctactttcttaaagagattggaccctctttgcttttgaacagcttaaaacattttctagctgccaagttaatatggctgtttcatatattataatcaccttcaaaccatgtatatacttaacaccctaagctattattcagctttcatagcagaagaggcaagaggaaaacctacaaaagggcaggtgttgaagccatcctcaaggactgtcactgtataatcaggcccaccctggttggagtacaagcatcagggtcttcgttcttccaataactctttctcttacaacaggagaaagtatatgcatatgataatgccagtatatgtatattatgatgttctgacaaaacaaaatgtaggaaaaacagcatgctataagatagtgatgataacaaccatctttgctagacaagcattagaaagtcttgccccctctgtcttttccagactgtaagtaaaatgtgcttctgatttgttgtgcagggcagcatttggcaaggagtcggaagttcttattgggaacctgggtgataaattaatccctccacaagacatcctctgtgacgtcagcgacctcaaagccttggccaacatgcacgagagcttggaatggttagcaggccgaacaaagtcagctttctccagtctttctacgtcccagagtaagtattggtggggtggatcttgtggggacagctgagaaactaggctgagtacattcatttgaaatgagagagtgtctacacgtctccgtatgggcacatgtccaaactgtcagaagatccgtgcaaggattcttcttgtgctgagcctctggtacttttggggttctgtgaaatgaagaaatcttgacttctgtgtgttggggcatgggaagtcaaaaaaggtccatgttagcatagcttgacattaaaccctagaaacccagaatcatgtaagatagaaacaccatgtctcaagaacagaaagcagtatattttgtcctccttatgatttctcaaggggagaagctatgtcttggagctccaagttgtgtatttggttgatgttttcattttaattgatagaaaagaaatgaaaagtatctaaaaagacaattatattgatagaaatggttaaggtg

SEQ ID NO: 30322 - DNA, 1110 bp, Bovine  19866881400192
  misc_feature (1)..(1): n is a, c, g, or t
ntcattggctttatgacttcccctcaaaaggcttgttattgtcctttctatcagggttacctctctaatgttgtacttttattggcaaatcatcttaaagggagaataacagctaatttgggcatccctggtggcttagcagtaaagaatctgcctgcaatgcgggagacttctaggagatacaggttcagtcctggggttgagaggatcccttggagaaggaaacggcaacccactccagtattcttgcctgggaaatcccatggacagagaaccgtggcaggctacaatccttggggtcgaaaagatcagacatagccgagcgagtaaacaacaacaacaaaaagctaaattaggtcacacagtcattagaaatcagttgcattcaaggtatccaggctttcttttttgtttttttatgacggtttgtttttaaagtagattttgtgtggagatgtaacacatgcaatgaaaacaataaaaatgaaaatatgtattaatgaggaagatatcctcttgttatattcatatcaaaaaaattaattgaaggaatctacaaatcagtgagtgaaagtgatagtcttgactcaaagattgtccttaaaacctcctgataagaacattatcatcactgagtttgttatctatgtataaataaagctggtaagagacaccttccataaaggaaacgattgaactgactctcagataggaagacattaaagtcaaggaagagagtaaaagctaaagccatggagtggaaatggttactgggtttagccatctgctttggtctttcctgttccacatgtagctatacagtttacataaaaatatctctccagaggatcagaaagaacagatttatggaaccagatgtgagttagcatttctacaggtgtggctctgcagctgaaagaacatgttgtaccagggatggagtttcttattatgtaatcaatataaattacctctagacttttacagaggttgataaagcaaacatgtgtcatttggactggccttctgatatataaagagaacctgctctacttggggcacaacgtgaaaaaatgcaccatttagtatttatgaaagacttggtagcaa

SEQ ID NO: 30323 - DNA, 1351 bp, Bovine  19866881497829
  misc_feature (1)..(1): n is a, c, g, or t
ntgaagatttagaggaacacagaatccacatcccccacatatgataattttccaaacttatagtcagccttacagctgccagcctaggtacatgaaggctgcttctgtctcccatggccagtctccttactgtaccaaaagcagggctttcactgtgtttgtgttgacgctcagctctgcagagggttaaacaactagactctaggacaaggaaatgctccttaaataaataatgaatgagcatactgttatacactcatttctggattgcaatggtcctgcagcagacggcatgagcttttgaacctatcaactcataaacacgtgaaatatgactacataccttttcgtccactttaatcttcttctgatccaattctgttaatcgaagtagcataaaaatgacgaaggaccaatagtcaggtttttcctgtttaaaatgtcaagagggttattttgttaccttccttttcccaaattaaaaagcagtagcagtctgctttcataagccaaggccttttacccacgaatgctgtcattcacacacacacacactaggtcttcacattttcacaattgcagtcccctgatattaacaactcaaatgcagactctgccttgtaacttataaagcttttcaaatgtgtgatcttgttaatctccctgtgagataggcaggacaaacctgattatcttcatctctaaagagaaaaacacctaaggctcagggaggtggagtatttcatctgatgttccatggccagtgactgaaaccctatcttctaacttaaaggagtttcattattataatagtagcagtccttatgattaattcctcattatttctttgtgttgttttatattacttttgtatcattaattatgattgttttacaataataaaatgatattcatttataggacagttcccttaatactctatcatctgctgtgttaggactatctgctttttagaaatataattagttacattgtatcaagaagctacgtctctttgaagggaaagatattaagtgggtgatgcattttgtagataagaatacacatgaaatgaatatacaatggcatcttttgtgtacttcaaagtgcatatgtgggaggggcttataaataaatgaggtaacattgtgaaagggtttgggctatttatttatgcaaacacctggatgctctttatgggtctggaattgggagggatggccactttaaatcccttcctttccaggggacgcttttacagtgtctgccactattcccataccaagcgttgtttttactttcagactgtattttcatttttcatttgattttttgcctgcctagttagttt

SEQ ID NO: 30324 - DNA, 782 bp, Bovine  19866881579198
  misc_feature (1)..(1): n is a, c, g, or t
nggtgcagaggtggaactctggtcaattcacaacgctttagaggtataattttgaaaaagttaaagtcacaactctaatagatacttttttgtaaggacgctgcgtaacgacttttaaggaatcacatgtgctaatgaaaaatgaagggtgaggcaagaggctaacggaaatggggaagagaggaggggagtcccggagcagtaaggaagaggcactcttagaggcaaggagccctaggaatggggctcagccgcaggctggtgaaggggttctgaccgctggagaaggaactgaggggattaggggtagggggaaggcacacctcaaaattcagcatttcggattctgaggactcctcggattccacttcgccctcgccctcaccctcttccaggtcgtagtaatctctgtccacgtctgactcctgatagcggtgaatgaggtgctggagcaggtaggaggaggctttgcataaagtatttttcggtctctgacccatgggaaaaggagaccagcaagagtgacgatccttttctgagtgcagcacttttgactgcgctccagttcgtgaaatgctcttgcctccctggagagaggaaggcttcggaaacttgggctctctcccggaggtcgccatcttgtttacctgagttgcctaggagacggacgctagggcggaggtgccgcaagggattttgggggctgtagtctctgcccctcgtgcgttctccctttcagcttgctttgccactgtagcgcaacttagttttctgttcgcttg

SEQ ID NO: 30325 - DNA, 1006 bp, Bovine  19866881921189
  misc_feature (1)..(1): n is a, c, g, or t
ntcgcagatacaagggaattcaaagtgatttctacaaaatgattgactcaaagaagccacactcagaatctcaggcttgcccaggtactctctctcgggtcagggtttcttatcttctcccttttcctactgtgtttatggcctgcatgctctgatctttccgtgtttatccagcttgttaggactgggagctttccccataaaaaccattacatactatatgatctcaatcaggatgtagaaatcctgtaccacctacctctatacacacatatacacgcacaccagagtataagacatttcgttcagtgggaggagagcattttaaagtctttaaacacagattataactgttgttggactgcacaaagatacagagtaattaaaaagctcttcaaagaatggaataagtccattaaatccagttaaataatttttcagaaacactgcaagaaacacttcttgctgtttcattttctcacaatgaactgaaggaagaatatctcattttccaaatggaactttatggagttttcaataagacccctcagcacttatctacatctttaattagttctataatatactgatgatatcaagcctaattaaatttatatagataaggagcaatgaaattctaaccaagtgagctggaaagcatatattaagtagtaaatttaatggttcaagctgataactataattttatatcaaaaaattaaattcaatttacttgttgtattcaaattgattttgagtgtgcaaattattggaaaaatctcgtgatgatatcagtaaaattgctaatccagcctgtttaaatatcagttattaatgtctgcatttgcaaataagccacacacatttgcatttttactgcatatagtaaaaaattatctaaaccttatgtcattttattaagaatactaagtgattcttcttttggcttcatgcataaattaaggaggcaaagaaagactacgggtctaaagaagagagagtcagc

SEQ ID NO: 30326 - DNA, 1079 bp, Bovine  19866881998540
  misc_feature (1)..(1): n is a, c, g, or t
naagctggttggtcgtgagatgctgtggattactcttttataattggaatactggaaacaaaaatatgtgccttttcaagaattcctgggctacagatgcggactaacaacttgtagaaagtctttattttgtcacggcattttgttcaaccagagcaactgctttaagggcatccagagatgagacaagaaagatagtatctccattcagcgccaacaaagccctcgaggaggaatggggataacctacttctttgttgtgcctaaaatattcacggcaaagtgtctaaagccaggatgctaaaactatagatatgaccattgttctgcctcggtgccctggtctaggatgtgaagagcaaaaagtctaactccaggccctctttgccatcaactgatcacagacacatgttgtaattcattgagatgatgtttcaacttctttgagcttttccgccaggggaaaaacactccagaaattcaattattattgaatttataatcctataacatattttatccatcatctcctgctttttgattatctgaacccgatttctttttataattcaaagtgtttcagtgaagaaatcaagttgccctggtctccttctgtgaggaaccattctactgaaacccttttcagtggctctccctaggatccagctcagggcaatgtgggagcagcttgtggtctttgattgagaaaacttggtcagaaccactgatatctccttcctttggtctttatccttgctgcctttcatctctccccttgttactatattcatgtttcaaatgagaattaaattccactgccgtgccccctaatttgactcacttttcaataatgtcaaccaactatcaaacaaaaaaacggggaaaccaggcactgggtgtccttttgcgtgttacactaagaagaaatagaattaacaattgcccacatcctctttatgtttatactaggtacttctattggcagttcaatcatcctaaaatgtaagcagatcatttctatttagagataggacaactaaggtctccaaagatcaagaaagactggcggtatacagcta

SEQ ID NO: 30327 - DNA, 1591 bp, Bovine  19866880342272
  misc_feature (1)..(1): n is a, c, g, or t
nccatggactgcagcccaccaagctcctctgtccatgggattttccaggcaagagtactggagtgggctgccatcgccttctccgtgtttgttaggattgtagtatttctcatcctgaaatgcaagctgctctgctggccagcgtacggtgagcatgtgctgcttgtccagctcatcccccatcccaccagcatcgaacatctttccaggggctcagacacggggaccagtccagacagtgtccaattccagagttgtttttcctgttgcaatcatgcgcttgctccctcgttcagagaagaaaaacaatacaagggagtaggttctcgtaattgccgtggaggctgcaaatgtggagcgtttctgtgccagctggagaggagaagggtttggggaagggggtgaatgccaagtctccgcccgtctgggcttctcagttgcagatcaacctcagatggagggtaggaggagctgtgtgaaggcctccgggacaatctggggactggtctgtgatcagggaaggggtgggcaacgtgaaagccttgttgggctttcgggctttgcatacatccatccaacaacggtactggtttttcatagcccttttcagtcgcttaacaaacatgaagcacttagtgccaggcattgcgttagtatcccatttcatcatcagaattacccctggaggctggtattaccctcattttataggtgagaaaataggttcagagatgtttggttcaaaggtcacatagctgttaaatgccagaatggggactgaaacagaggctgtgcagggtccaaaccttactcgcgctcactcaagggtacatctcctcctcaagacgcggccgtgggggctggcgctctttcccatggaagatcagattgttattctgtgtgttttttcctcctggtgttgagaagccccgtctgcccaagtcctctgataatcccttcatctttggagagggaagcacgaattccagtgtgaactatggctctgtatttgtccgcaaactgccaagattttaaaaacatcccccttactttcacctctccgcggaagaaacatttgttaaagacgttgggaaatttacagatgggcagtaaaaggagagatgagtcctttttgagggacagaagcataagagagcaagccctggccttggggcagtggagaatatgttggtggttttatgggccagaaaaggggaggggggggatttttaggcaaaggggcctaagacaaagacatcagatgtatctctgtgttcttttatccaccctcccccggcccaatcatcttgaagtaaaagccaactgggattttcaagaacaaactttattttgaattttaaattaactcagagatttaatatgaatggtatgtagtaattcctaacactatgtgccagccaccaccctaaacacttgatgtgccttatctcattcactcctcacgagaacccatttcagaggtgaagaaactgaggcacagactaaataacttggcaataaccattaagtgactgagccaggattcacagccaagccacctggctcccaacgctctgctcttgcccacctg

SEQ ID NO: 30328 - DNA, 1206 bp, Bovine  19866880428177
  misc_feature (1)..(1): n is a, c, g, or t
nccagaatggaaacaacctacccaagaaactagctggaacattagttgtagctgctgctgctgctgctaagtcacttcagtcgtgtccgactctgtgcgaccccatagacggcagcccaccaggctcccctgtccctgggattctccaggcaagaacactggagtgggttgccatttccttctccaatgcatgaaagtgaaaagtgaaaagtgaaagtgaagtcgctcagtagtgtctgactcttagcgaccccacggactgcagcctaccaggctcctccatccgtgggatttccaggcaagagtactggagtggggtgtaattgccttctccgttagttgtagcagaccctatatatttgagacgactgcaattctttgatagtttacatgtgttgctttgacaaaaacaccactagcaaggcacatctcaatcacatcatgcctcctaaaaagcattagtttaaatgagctatttactcaaatcagttgtccagatagaatagaaactattcgtcagagaacactgcaagcagttgctgagctgtcacctgggaacagaaacagcaggtgagggctcagaaaatacacaaaagaaacaccgtcctaaggaccctgggagcatcctatcaacagccctcatcccaatttatttctgggatcgacagagtaacaaagaaacctcaggaaatacaatttagaaatgacctctaatccagcttactttctctaaccttgtggtgtgaaatctcatgccactgaataccttcctactagacttgcttgtttcccatggacaataaataccagaagggcagggtttcttaggaggataaactctgtaggtaatgatatccttatatgtatttttgtgaaacgaggcagcatggaaaaatcaagcaaaagctgaaaaaccaagaagacaggttactaatcttggctggctagtaagacatggtctcagggaagttacataaacctttgtacctcagtttcctcggaggtaaatttgatacactacatggatccaaaggcacatggatcagcagcagtgctggaaataaagtactccgtcattacgcttagtaacactgtaaaacgggctccccaggtggctcggtggtaacctgcctgctaatggaggggagagacacgagtttgattcttgggttgggaagatcctctggagaaggaagtggcactgca

SEQ ID NO: 30329 - DNA, 448 bp, Bovine  19866880542842
  misc_feature (1)..(1): n is a, c, g, or t
natgacaatggtggtggtttactcactaagttgtatctcttgcaacccaatggactatggccttccaggttcctctattcatggggtttcccaggcaggatattggagtgggttgccatttccttcttcaggggatcttcccaacccacagatcggatctgcatctcctgcatcgcaggtagattctttaccactgaaccaccaaaacatgtttttgtccagtcccaaatgcagacttgtggcaaatccaagcttgcagcagcctggctccctgctgttgacagttgggatcgatccatcatggctgcagctgcttaccctgcttttcaggccctgagccttgcggtcttcctccctttcactaccctgtttatatagagtttaataaagactctgccaggataagaaggtgcttttcaggccttcgtcactgcctctccatcatcag

SEQ ID NO: 30330 - DNA, 1556 bp, Bovine  19866880590703
  misc_feature (1)..(1): n is a, c, g, or t
natgatctgtggatctgtgggaatacgggactcctagggttcttttcattagtaacaaattagaaccattctgctcaatttactctcaggtatttctctaacttctctaagtgtttgttaagcactctcacagaagaggaacccagggaagtattaatagcttcagcaaatgttggagaaatgagataccctggccagtcggtgccacggtccagatgaaaggggagatgcctgacgtcatacctgttttcaccatctgtgggccagctttggagaaaaggaaaaagtgagcacacacctctggcacttatgtcttcccagacatccaagttgctacttacttcattttaattagtgcacttgagccactactgggagcaacagttggaggaaataaaagcatttccttctgctttttcatccagcctcaatggtgcccctggtacccactcaacctgcagccatactgtcctccatgtggaagaccctcaacctcctccaatgcgtccatcctatcctagtcttaataccgtctttccaacctgttcattctttgctgtccctctccaggtcataaaaagatcattgctatggtcctcattccaccattaaaaaaggggaaaggggtctggaggctgcatccagggcatattcagaaactgttcaagaaccatcacataggctgctgacggagagagtgagaaggtgcagaatgcggtagtagcagggcctccgtggtccaggagtaaggtggtgattacatacgagaaagaaatgtgtggctggtgctgtttatcatctcctcagctgaaaaggaaatgaaggggctaataatttcatttgatggcctcttaaagcaattacttagtactgtcccccatttctgcagaaggattctttaactttttaagtcaataacaaccacaacaaaatcaatggttggaagaagtgtccagaagcatctaatccctttgaaaacacatgagttcttaaaccctaaactttaaaaacactttctatgttaatagctaacacatacctatgtatgtgtatatgtatatagtaactctgttatggttcttactaggttccaagtgctattttaagtttgttctattaaaagtcattcatttaggataaagaaggtgtagtacatatatacagtggactattactcagccatataaataaggaaataatgccattttcagccacatggatggacctagagattgttatactgagtgaagtaagtcagacggaaagaaaatatcatatgatattactgatatgtggaatctaagaaaggtctacgaatgaactcaactaccaaacagaagtagagttacacatatagaaaataaacttgtggttaccaggggggaagaggtggagggataaattggaaggttgggattgatatagacactacacaatataaaaaagataactaataagggcctactaaatggggggactctactcaatactctgtagtggcctatatggggaaaagaatctaataaacagtggatatatgtatatgcataactgat

SEQ ID NO: 30331 - DNA, 1206 bp, Bovine  19866880598513
  misc_feature (1)..(1): n is a, c, g, or t
nttttggaattggtacggtgatgagaggcttgttcataagggccgacagagcgtagaaagagattggggccatgcacatgaagtcagtgaagatcaacacagccatccttttggcaattctggtatctttgtcccctgggttgtagtggggatttcggactgtgatgtagatcttcacgtaacaggcacagacgatgataaaggcaatgatgttgagtaacagaacaaggataatgtacgccagggcaagaggagtctcggtgtccatgggcaggcagatgctgaccttggcatagctgcttattcccaccaaagggagcagggcgagcaggaagcagcaaacccagccccccagcatgatgacgtaggcgtgccagaggcggatcttgcggtccaggcgcatggcgaaggtgatggcgtgccagcgctccaaggtgatgaccgtcagcgtgtacacagacaactcgctggcaaagacggtgaagaagccagctgtgttgcagccagggcctgtctgccagtcaatggcatggttgtagtactcagactgagtgtagaggtctacggaggcgatgaggagcagatacaaccccatgcaaaagtctgcaaaggccaggttgcacatgaggaagcgtgggacggtcagcttgtagtggctcgtgaggaggatgaccaggacgaagacgttgcccaggagagccagcagactcacaaaccacaccacaattctcaggaacttgtagcccatgatgtcctcacaggggttgaactcatccgacttgggggtacacaccatgtcctcactgcccccacacacggtatagtcgtaatggctgtcaaaggcctgcagggtctcctcctgggggtttttgagctgttggccaaaaccgatgatctcatcttcttgctcctcaaagaagacatagtaatgagagttgctgtgggtatcttggaacttggagttctccttgtacccagcactgccatcacccagatcctcatattcctggtagaagggaccattcaaagcacttgcggattttctctgacgcaggccccgaatactgctctcgttacacattaaagactgaaggattctgcaaggcagtggatagaaagtcaccacttgttggaaacccactaatggtccccaccacacttagcaaaatgtgcagactacatagtgtgatacacaggattctacag

SEQ ID NO: 30332 - DNA, 1047 bp, Bovine  19866880604587
  misc_feature (1)..(1): n is a, c, g, or t
ntcatcctctgtcgtccccttgtcctcctgccttcaatctttcccagcatcagggtcttttccaatgagtctgttcttcgcatcaggtggccaaagtattggagtttcagcttcagcatcagtccttccaatgactattcaggattgatttcctttaggatggaccggttggatctccttgcagtgataagttcatctcaccggaaggagttcacctgcattcctatatgctgagtcgcttcagttgtgtgggactcttggcaaccctatggactgtagcccgccaggctcctatgtccatgggatcctcccagcaagactactggagtgggttgccatgccctcctccaggggatcttcctggcccagggattgaacttgtgtctcttatagttcctgcgttggcaggtgggttctttcccactcacaccacctgggaagccctagtcttgtggaaaaccccaaatctagaaggaatctcttgttttttttttaaacaggctagttttccttcttttcttttttatttatgtagtctgcgctgcatgtttgctgcagcacagggactctctctagctgtgggcgcagtcttcccgtgtcggcggcttctcttattgcagaccatgggttctagggtgtgcaggtttcagcagttgtggtgggtggtaggcttagttactctgggcacgtgggatcttagttcttggaccgggatcaaacccatgtcccctgcaatggcaggtggattcttaaccactggaccaccagggaagtccctagaatgaatccaaagtggctgttcgcttttctcttgctgcatctctctgccctccttctccctgcagagtaagcacgggccaagcttgctgctcaggtgtgaggcgaagggtaggagggtgaaaggaaacatggggggaagtaccggttaatatttcaagtccattatcctgccacgccaataataaagcacccacatttgtgaatgatttatcttttttataaattggagtggtttcaaggttatcctataataacttccatcctatt

SEQ ID NO: 30333 - DNA, 1699 bp, Bovine  19866880638155
  misc_feature (1)..(1): n is a, c, g, or t
ncaataacactgatcacaattccatgcctatggaagatcacagagttgaatgagtatgttaatacatgctctgtgcttgattccctttcagcctcagaaaacttacatttcagacagaaacagaagtaaccagttacttacacagcatcttcctctttggctggaagtaggagcaatgacacaaaggctatttgcctccataaacaggattgccaagaagcactgggagagaggttcatgtcagagtgatgtaatcattctttcaatgtctttcattaacagtgtttcattattttctccacaaatgaaatgagcagaacccagtgctatttaggaaaattacataatttttaaaatgttataacattactacagttttagctttgggaaaaatccaatctattttagacatataattcaagaagggaaagcaaagcttacagacttcccagtgtgtttcattcttcttctccataccccatcattcacttttctcctcttaggccctttctgctacagacagacgcacggctccattaactcaaacctcccaggcttaatttgttttggtgtatccaaatcttttactgcctctcaattcagaccatattctcttttgctattcttgaccatttaaaagtatttttcagctccacggatattatgaagttaataactgggatatctgagcgcctactatggtacaaaatgcaccactttaggatctttatgtatattatctcacttaattctcaaaaccatactgctgtaattttatgtatggagaaactgaggccaaaaaggttaaggtcatcaatgtaggagcctgaattaaactgcaaaagtacaagatttgctgcaacaaagaaagcatctttattatgattgttttaatggttaaactttgcaagtttcctagataaaatagtaacaggataaaaaaaattacaaaaaagcaagcttcttaatgattcatttgaaataactataaataaaaatacttgctaattatttaatactttctaaaataacacaaaatatactcaatatgtagtacaggccttaatgatctgattcttttatgcaactatttacaaactctaaagtaaaataaaaatatatagctaaacagtgaaattaaaaaacaaggttgttctcaaataattttatcctaagtaatctattctttggagtagaaatactcacttaatacaatatgttatttatatcaatttttagttacactttgttggtgtggctttagcccaatttaaattcctgtgtgcctagaaattacaactattccttttaaaaagtactaagaatttataacagtttaatattcagactgacatcccaccccaattaaaggtatagaatttaatgatacctctttttgataatggaacttattaacaatgtgaagcattttcctttctcaactctatagttttattcagttatctatataacaattttataaactagtaagcaaagcaagcagcattactttttttaaataacatctttaattaaagtttttgcaaaggtaaaatattaaacttaaaataggtcttagtacatcaaaatactaagttctctaattgtattccaagatggtctttaaaacataatatcccgtatatcacagaagagcaaccttgatctgcaattgtacagaatgaattttacaaacata

SEQ ID NO: 30334 - DNA, 2263 bp, Bovine  19866880671024
  misc_feature (1)..(1): n is a, c, g, or t
nttaaaataatctgttagaaaaacaaccaaacaactaattcctaccatgccaatagatttattctagcaggtagagatctatttgtactctcggacctgtcaagctttttggaagacctcaaaggcaaatggagtgtaaagctcctccagatgatttgcacccacactcagcgtttttcctggctggccccagtaccctcttcatccagcatatgaacagcagggtcccccgggtggacacaaggtctataatagaaaacatagcttcagggtggtttatactaatgctggcttgagttcctggccccatgctcatcctcaccacttaatctgtgaccctgcagagaaggtaaaggcctttgatgtcagactgacatggccttgctttggaaaactgcaatcttgggcatgttactgaaccttctctaagcctcatgtttatcaactcttcaagggaattaacagtacccattttgtagtgttgtgagggtaaatgagatcaattaaggacagtgaatttaactagtccacagcacaataaatgttagcgatcatgataaaaatatgtaaatattatcattatttcagagtccttaagcaaaaaaaggagtgagttgggggggaagcagggagaaacaactgcctttggaagttttatcactatcaaaggaaaggggggagtggagaaaaaaagaagaatgtttgtctcgggctacaattccatgaatctgaatcttcccacaattattgcaaaggcttaggaattacaagagatgtgagagtctgcattcacaaagccaccttgattatcacaaaacagcactagaatcagctacataagggaagtgcgaagtcatgagtacactttgctcaagacaggacacaaaacttcctattaaccctctggtactaagaattgcctttgcaattgcaggctgagtctaagatgttttagtgttccagggcagcaggccccagagagggaggagtgcacccaagtatgtacacagaatgagccacttggacatgagaagaaaaataccagaacttctgtttttgttgactttttaacccatcctttaaacatttctatttttttgtttatattagaaaacatatactaaaaatatctagtatgtttgtaatttagaaatacatttataatatagtatatttataaatatacaaatattagaggttcatgatcaaacctttggagagacatgaccaaacatttagagaaggctggatcagtgcactaggcatattttaaatacttatcatgggtgcacacacacacacacagataccacctcttccctgtctctgtcagagtaggctactgtaatcagaaatatggtcttggttgtcagtcaaaagggaaaggtactttggcaaataagaaggatgtattactctctgaagctctccttttgtttgggcaataattgaatcgtagatgctccagctctctggtgggtgctagcaacctatatcttagccttttcacgttgcatagaacccagttaagcttgacttgatcatcaccccaccttgctctctaggaagttttaaaaccagtcttccacctcttcaaaatgataaaactcatctaaacaaataactgttggacttgctgccagggccaaagattgttcaacctcactaccacaatactggtcttttgatgtctctctcttggctatacacttagtgcccaataaacatatagcaatgctagaaagaggggctgtctcaaaagaccctgaatagccaaagcaatcttgagaaagaagaatggagctggaggaatcaatcctccagacttaagactgtactgcaaagccaccatcatcaagacagttcagtactagaacaaaaacagaaataaaatgtagggtaagggagttagagaaggcgaggttcagagaaagaacaagacgggcactttacaggaacagatcacctttaatgaggcgagaatgcgcagtagtcagattagtgagctgctgcactaacccaagaaaagagtaagtatatataggcacgtatgtggaaagctactgtcttaagggggcctgttcttctccaaggttgttcagagtagttatctcttaaacggctggggcaaggaatttttggagatcggccagaggctggactgtgggagctgggcgtaatcagccttaatgtccaattttttttttcgggttgagagagttctttgttttgcatagaatggtgaggaggacctggaggggag

SEQ ID NO: 30335 - DNA, 971 bp, Bovine  19866880689610
  misc_feature (1)..(1): n is a, c, g, or t
naacaagaactgcagagaagatcttgagcagcatgatcttgtaagaagacaactaactcagcacaagtgccacactgactcgcacccccttttgtgttctttggaccatgcaatttgcagatcacattctgttcccagactgctggaaatcaagtaaggattggtgcgttcatctcagtttttcctcctcatctctgactgccgcaagtgaaaatcggcttgctctaatcagtagaaattattgtaaaactaaataattgcttgtccaattctgcagtgttttcatcggatattcaatacgcccccaaggatcaggaggctggttgataagtgctacagtttaccagaaatgctgcaggggattttaaactgggaaagccagccagagtccaggaggggagcagccggatgaagagagggtgcagccaacttgaacggagatgaactgagtcttggggggaggctgccttctctaaaaccaaggattgtttgtagacttcatcccttagaaataacgaggggcttaaaaatgaaacccccactctgccattggcagtttggaggctgtcttcttatcacagatgatgataatgccacgaagtgttaaccttgggttcagattgcggattctaccttccttctgaagcaaagtggatggggtggggaaatacgtttgcagaagccttaatattcaagaagtgtggacttccgtcagccccatgtatcatataatgttcatggggaacatcagtttaaattgagtctttgaccctgacttatcctgattcctctagaatccacaatctgtaagccagcttgggtaagtcaatcacagatcttggcagggctacatgggtaacctactgcagacgattatttcatatggagggtatatcagtgtgatcagctaaactctctcttccacagaaggatgaatgtaaaagacgaaaaagagtagaaagtcttggagt

SEQ ID NO: 30336 - DNA, 1702 bp, Bovine  19866880750703
  misc_feature (1)..(1): n is a, c, g, or t
ntagccctgaagcataccggatgatttaaggaaacttaacttgaaatagtagttaataactcagtgtagttctcctcctaaaagaaaaaacaatttttcttgttcctcaaaataaaaatatcaagtactgtgtgttcttccttaaaccataaaaaatgacaaaaaatagactaaggcagacttaaaaagggaatacaaacttcagaataatttccatagcataatagattaaaatgcaaaactatttaacataaacccatgaggaaatatataaagcaactattttttaaccaatgaattaaaaacctgaaacagctgattcagatggataggtgggagatagatagatgtatgaaataaaacgaaaatgtacaaaggtggatcaataaaatattacattgcacaaaagctcaaaaaagttcaagatgaaataatctgaaaatacaggaattttcttaagaggaagaaaaagctaagatataaagggagctcccaagaaaattatgtctgatttcttatacaaggtttatttatttctgaaaagaatggtgacattattgctataagataatcaaaaattactcttagaaggagataacacttttcattcctccataaaagccagaaaaaaagcaaaccaaatccttgattttcatatagcaaaagaaaatctttatacaaaagctattatacttttatttttatgttcttgcagtctaaaccagagtctattagactatggtcttcaagaacacattttaatcgctatacacactgctcaaatcttgatgcatgccaaaaagaacatcatcaaggtggctttgattttaagagaggcaacaatataaatgtggtgctatgatggcatttaatagaaagaaatgtgaacatttaaaaaaatataaaagcccaatataaagatccccctcatataacagacattttagtccagaaactaattgcacattagagttgttttagccaaatgtggcactccacagaatttaaatgtgctctcagccattcaaatggtctgattatccaaatgaccaccaaaaaaaaaaaaaagagtacatacactgaaaggcacacattttcacacttaaacctagtacttttgtgtaaattttccttagcactgttgattgttttttaataaaaggtgccatcatcatctgtgcaaatctaaacaaatccttttctgaaaccttcacttatttcataataccaagtctgaactattttccttctttgaataaacgttatctttacttcaaaattttgaaagtgggaatccttgcattttcaaaggaatgacatttttaatggaacctaatgaaatgatgttaaataaaatgttaaaagcatgattaacaattcaagtacaataaaagataagcaagtggcattcttacagcaagccactataataaaactaaaacatgctatttgactgtaaaggaacacaatgcagtgatatataagagcacaatttggtatgcagtgttgtttggaccagttttcagaattttcacaggtaaaagaaaagcgcttaccaagtatgttataattgatatgcaatatacacaggtgcaaatataaatggttatttcctgcttcaaaacaaccctactaagtcacactgaaagcagtggttgttcatatttcaatgttataaaaacaggctagtatacaattctat

SEQ ID NO: 30337 - DNA, 1397 bp, Bovine  19866880770493
  misc_feature (1)..(1): n is a, c, g, or t
ngaaaaattatcgttatgcctggccagtcttttagaaatttttttttaattttatttatttatttttggctgtcctgggtctctgtagctgtgtatggaccttctctagctgcagcgagctggggtcaccctccagttgcagtactcaggcttctccttgcgttggcttctctgtgttgcagagcgcaggctctagggcaggggctcagtggttgtggcacacaggctcaggggtaccagagcaggtgggatcctccaggaccagggatcgaactcatgtcctctgcagtggcaggtggattcttaaacactgggccaccaaggtagttcttaggttttcaaacgagtcacagaatgggcgagagaccaggaatgacaaagcctgactctgttgctaatactttctaggctttgattttcttgcctgtaaagtgggagaaattctactaaataatctctgacattttttctaactttaatggctaaagaatccaaaccaacccctatgattccaaaccaaacatgaagacatccatttccagaggctcagggctaataacacaccctggagagggcccgtgtgccagccaccatggtttgagcattttatgcccactgttattttgttgagttccagttaaaatcttattatcagggaaaaaagcagagctttccctcttggaagcctcactttgctaggtgttgaatggtttgcacaaaagctttagtgagcaatttctatcttaaatcaaattagtggtgttaaatcactcacctgggaagctacttaacagggatgacgccatccttcacaggtggatccaataagcttatatttaaaatagtgagtaaattaattcaaacctgtggccagaggaactcacttctagtgagtaagccaaaaatctcattcaggtttttctggaacatctagcagaaaacccaaacagactttttggccaacccaacatttttcttaatttctttttctagacttgagtatctgggaccaaagtattttgaggcaagtttccccacctccctacccctgaggctgtaggcaagggcataatgctgatgcaatgtggcaaaaaaggagagaaataatgaaaaacatgcatcggatgcctccttcattcctgccattgtgctggagaccagactgtaggaatgattcaaacatggaaacatccttgttgccctggaggacctgagcctgtagggaaatgacttccatgcaaaagatccctctaccaaaggtagaagagacggtagacacacgggggcctaaagtaaagctcggagagaacccgcttggggtggctttgttggaatgccatacttagcacaaagtaaggacttcgtgtgaaaaaacatcacttgagttttattttaaa

SEQ ID NO: 30338 - DNA, 1052 bp, Bovine  19866880801814
  misc_feature (1)..(1): n is a, c, g, or t
nacctgtggcggattcattttgatatttggcaaaactaatacaattatgtaaagtttaaaaataaaataaaattagaaaaaaaaaacactttacaaataacaaatgataaatttataattttgccttcaatttgaccattttattattattttgtttttttttttaattgggagaaacctgacaggaaattactcatagtatcctagttagtgtttatttaaagtgtctggtttaaagtttgccctcaaattaatatgtggaagttatagctttagtctattcacacgatataaaaaagataaagaaagagtatagattgcctaaaaatggcctaaagtgtaatcattaaaataaatgctacaagtcaacagctcattaacttctacttctttctctacttgtgggggagaaacaaacaaaaaaacagagaattctgcctgctactattaaggagttcttggtaaaaaatgtaaaactgtgattttagcagagtgactattttatagaacaggtatctgacaatcatatacattttttcacctcatgaaaaagaacaatcctaaacagatggtcaaattagaaacaaaacaaaattaaacaatgctgattcattttttccagtcacagatatcttttatgtggaaatatcaggttttaatttttctaaaaaaattactgatgacttctaatccaaaatttatacagactaaaaacaaataagaaaggatatggtaatcttttgactataataacaacaaatttaaattcaacactaaagaaatcaatgaaaagacagaaacgtgagtcattttactggcagtaaataaaggggaaaatacaagaaatctgtgctcatatcctgtttccaacacaagttgtgcaatgttgggcaagtcacaatactatgctctcaaactcagtttccagcttatgtaaaaatggcatcatcattacacttgcaatctgaattataatgatctttttaaagatccacgttttatatacgaaaattatttcttaagtgtttttaaccaatacagccatagcttta

SEQ ID NO: 30339 - DNA, 801 bp, Bovine  19866880804857
  misc_feature (1)..(1): n is a, c, g, or t
ngcatcactgactcgatggacgtgagtctgagtgaactcctggagttggtgatggacagggaggcctggtgtgctgcgattcatgggctcacaaagagtcggacacgactgagcgactgaactgaactgaactgaactgtgcataatataacaggcttattatgttagagattaagaaagttcttttctgaaatggataatattttaaaatattttaaagtaaaagcattcttaacttatgcatccatgaattaatttatatattaaaatatttagttaaattttagtgattttctgaattatataacttaaaaaaaatcatataacaacttgtggagaggaggagaaaagagggacatgtactagagtaagagagtaggtctatgatactgaatgcaggcatggcaatcttgaaaatatcaaccatccaccctgctctaaccccttttgtttgttagtaaagcagtcatttttgtaagttgttacacgcttctgaagtacagagcttaatgtttaaatcagatttattgtttcatactgctttatgtttatgactgacagaaaacacagtttgaaagacatacattctcgttatgttagtaaggaagagaatttgatgataagtagcttcagtctttcagtcttctggaaattaaatttcgcacattggttagcccaggcgtagataaaatcattgcaaacacactgcctaagatattgtaagacaagtgtaaaaaaaaaaaacaaaaaacctacatcatgatacataccctaagtgataagaaaatatatttgttttca

SEQ ID NO: 30340 - DNA, 919 bp, Bovine  19866880807248
  misc_feature (1)..(1): n is a, c, g, or t
nttactctccgtcccttccaccccttcccacatgctgtctcttcaagatcctactccgcacccccaactctaatatctcctccacgtactttggagagcaagtctgtgttctcaacccctgctctcaacccctcaacctcaggctatctcttcatattcagatttcatatccaagcccaccaaggatccagcagaacaaagacgattctcctacaaagagaaacatccttacagaaggcaacggtgttgttttttttccacagggatttgtctctctgttatatacttatacatgaaagagaagtagtgttaagttcttactaaagctaggaagggtctcaaaggattccagacatgaagtcagcttatattctcctcacctgtttctccttcctctttcctccccttctcttctcctctctccatactttctgacctcagttttctgcagataacttcatctacagatgtgggggcttcctaggtggcgctagtggtaaagaacccaccagctaatgcaggaaacctaagagacataggttcgatccctgagttgggaagatcctctggaggagggcatggcaacccactccagtattcttacctgtagaatccctatgaacagaggagcctgacgggctacagaccatggggtcgcaaagagtcagattcaactcagtgacttagcacaaaacacatagctgtgaggaagacgttgtgtactaccaattagcaaaggaaagttccctcttgttccccttaaaagttcaacttccataaagtaatgagaatttagccatcaataattaagactatccctaggaaacactcccacagaagcaagctgcagtactttctgaataataaagcagattttcccagccacagtattttcttgtacattttcacaatccccaag

SEQ ID NO: 30341 - DNA, 966 bp, Bovine  19866880819321
  misc_feature (1)..(1): n is a, c, g, or t
naatccgcctgccaatgcaggggctagagtttcaatcctgggtccaggaagattccacataccttggggcaactaagcccatgccacaactactgaagccctagtgcagagcttgtgctcccaaacaagagaagccatcagtgagaagccctcaaaccacaatgaagagaaagcccataagcagcaacaaagacccagcagagccaaagaataaattaataaacaatacagagaagtatttttagtaaataaacgaaatgaaaggcaacttcaaaaattttttttaaaaaggcgcaaaaggctttttcacaatgggtttgtccccaggaacatgtgtcataaaaaccatcactaaatctaagccaaaatgggaaaggaaaagactcatatccacattgctgtcactggacaggttgactcaggcaagtctaccaatactggccatctgatctacaaatgtggtggaactgacaaagaaccatcaaaaactttaggagagaggctgctgagatgggagaggtctccttcaagtatgtctgggtcttggataaactgaaagctgaacgtgagatatcaccattaatatcttcccaagaaaattcgaggccagcaagtactatgtgaccaacattgatgccccagaacacaaagacttatcaacaacatgattgcagacatatctcagtctgactgtgctgtcccgattgttattgctggtgctgatgaatttgaagcagtcatctccaagaatgggcagacctgtgagcatgcccttctggcctatattctgagtatgaaacaactactcattagtgttaacaaaatggattctactgagccacgctagagccagaagagatactacaaggaaatcattaaggaagccagcacctacattaagaaaattggctacaaccctgacacagtacatttgtgccaatttctggttggaatggtgacaacatg

SEQ ID NO: 30342 - DNA, 752 bp, Bovine  19866880823440
  misc_feature (1)..(1): n is a, c, g, or t
ngagtcccttggattgcagggagatccaccagtccattctgaaagagatcagtcctaggtgttcattggaaggaatgatgctaaagctgaaagtccagtactttggctacctcatgcaaagagttgactcattggaaaagactgatgctgggaggggttgggagcaggaggagaaggggttgacagaggatgagatggctggatggcatcacagactcaatgaacatgagtttgagtaaactctgggagttggtgctggatagggaggcctggcatgctgcgattcatgggattgcagagtcagacacgactgagtgactgagctgaactgaactgaagaataatttccttaaatggggttcagaaattaagtttgaatttccatttttggacttctgttttatgcataactttcccaagcctgcctaagaccaggttatagactggaaagtctttctcactcaagttttaacgtgcatcaaatcatctatcaagttttctaattatgccattacttttttcagttatcccaggtggcgctagaggcaaagaacctgcttgccattgcaggagacttaaaagacatgggttcgatcactgggtcaggaagatccccctggaggagggaaatggcatcccactccagtattcttgccagaagaatctcatagacagaggagccctggtgggctacagtccacgaggtcacagagttggagagtactgtaactcttactcttacatactattag

SEQ ID NO: 30343 - DNA, 1741 bp, Bovine  19866880825658
  misc_feature (1)..(1): n is a, c, g, or t
natggactgtagcctgcctgctcctctatctgtggggttatcccagcaaaaatgctggagtgggttgccatttccttctctaggtggtcttcctgagccagggatcaaatccacatcttctgaattagaggtagattctttaccactgcaccccctggcaagcccactatgtgctagaaagggaagtcgctcagtcgtgtccaactcctagcgaccccatggactgcagcccaccaggctcctccatccatgggactttccaggcaagagtaccggagtggcgtgccattgccttctccgaacataggcacagtgctaaattctttataggcatcttctcattttatacttccccaaaccctctggggatgtaggtatattattatccccacttataaataagggactggggctcaggaaccagcccaggatgataccaggaggtggctgagctgggtgtcaattctaggctgtctgaaatgagttctccctttcaacaaaaatcctatagtgtctctttattctgtgtgtgtgtgtgtgtgtgtgtgtgtgtgtgtgttgggggccaggggatggggtcatttaattttcctctaaaaagctaaaaagatttcctatctgtcaaatgagacaaataaaaataactaatatttccacacatcatgtacattatgaaggactcgcgggtgtataatctcatttgaatgtcagcaaccttattaagatagaattacacatcttccaaccaggtctcagaagttccaaggtatgatgctctgtgacagcaaaagcagctaggttctttctttctgctctttcatccttgactttttggctttattttaggcttgctgccttgtgagcacaaaatggctgccacagctccaggtatctcatcttcagaaaagtatattcaaagaaggaagaaagtagactgggcagggaaagaggctttcatttaaatcagggaggaaaatctttctcaaacacccactcctccccatctggtaaactgcctcttacatctcatttactagaactaagccacatggccttccctaggggcaaaggaggctggacaaattagtccagtatatgagtttttcagcctcaacagtgaaaagtagctatatgactgacagtactgtctttacagcaggcagagggggtactgccccagactccaggcctcggggtcctgtttcagaatgccttcctcacaattttccactttgtgcctgagactggcggggctgaaagtgctgtctgggtaggcaccctgagcctgggtcaggccctgtctgtccccttttctccccttgtaagtgctcctgggggctcccccggtggtgctagtggtaaagaacccacccaccaatgcaggagacacaagaaactcgggtttgatccctggttcaggaaggtcccttggggaagagaatggcaaccacttcagtattcttgcctggagaatcccatggacagaagagcctagtgggctacggttcatacggttgcaaagagtcagacacgactgaagtgacttggcacacatgcacacaagcgccctggggctctccaggtgcacatggaactgaccggagccccaaggagctcttagcttcttcgtcctgctggggtctttttggtaccctgtagccgtcttctctacccaggaggctggccgggagcatggattgcttccctggcctgtgcactctttcttttgcaggattgcatg

SEQ ID NO: 30344 - DNA, 1850 bp, Bovine  19866880842157
  misc_feature (1)..(1): n is a, c, g, or t
ntgctggtctgaagagagcatttggacactgtgatgcctagttcgtactaatagtctaacatctgaccacgtggttttctgggatttgaagtctttgaatgagtgaaagagatgttctggtgcagagttgggcagtgcacattttttcataacggcagtcactcttgacaactgttcattttcctgtttgttacagatctggggcttctgagggagtgtttagaacggaagaaaactttctctttttcagatgttggcctttttatgtttctaagcatgggtggaacatccatctgattttgtaaaccctcagttagtagacatgtcttttgtattctggtaatacaaagatggaataggtagggacagatggtatttaaaaccacattagagttggctcttaaaatatttatgtttactgtttttatatttctattgacataatttagttcagaattttctgtgatataaattctctttaggaacaccagtagttcagaaatagctttaaaaatctgtagggtatttgtatttagaagtttaagaagaataaatctcctttcgttatattctttaatttagttaaaagaaagcttggaacaatcaataggccaactgcggagtcaacggttgtcgagaaactcaggagggagaagtatttctgttacaagtctgagtacaagtgaccttgatggtgtcactgtgacaggtaaatttttcagatgttctgaaaactttttctttcttttctttgtcttaaaaatcttcctgaagtacatattgaggacatgtagtatttagacaaatgtaacccatatttaaaatcctacaaataaggtgctagaagatacaaagttttacagtgaatattttgaaacatgttcaatgggactttgatattctgagtctgttactttggttcttctcaggctctgtagaccatgtaaagctttacctgacaaaactttgatttaattgtctgcctccagtcaaaagaaacacaaataggattttctgtgtggtgtactttctggattgtaagtcttctcttggcttcatagttcttcagatgtctcattatgaaatgccccgtgacagtggtaagaacaggggagttgtagcttttctgtgcagctagatttcagtggctgcacaaaaggtggtaacgctgagtttgcctgtaattaaccttacttatactttgctataagtggcaacccactccagtattcttgcctggaaaatcccatggacagaggagcctggtgggttacagtccatggggtctcaagttgtcggagacagctgagcgactgagcatacacatcctttcctacagctctgaggttcatgtttgaatagcgaaaacttgtaaaagtttgcagtgaagagaggcaattagagtgaactttagtagcttgcactgttaatattgttactggtcatgataatgactaaaaatcacagttggctatttttctttatgtagtttagttcatttatactgatttgtaaacaccattcagattttagataatttgttgtttgaaaatttctgtttttttagtattattttggggaatcatagaagttatttttatagcaacttactgtttttatgtaagagaaaatattctattgcttccttgaaaattatagccagttagaatttttgatatgttctattttcaggtcacttcagttttcattttatcggctttaagagcaacataagtgccaattttgtggaatgttacggccacagcaagatttgtttgtgattgtctgtgggaaatagtgtgggttaagggcacatgtgcatatccaggtctgttacgtatttcctgagt

SEQ ID NO: 30345 - DNA, 1924 bp, Bovine  19866880887209
  misc_feature (1)..(1): n is a, c, g, or t
nctgatgaaatcaagatgttaagtttttaaaaatgaatgataatttgaatgtagatagcatggaaggaagttttccaacccttggtttaaaaaaaaaaaaaatccaggtaaagcacaaaggcaatgagaattaaccaataggaaaaaaggctccaaccaccaatacgtacgcgatgccagcaggtgaagcggagctcttgagagggtgcagggctctcaacttgggtaaagaaggtgttagaatacgcttgaccttgacaactcttccacccatctcagtgcttctatgaggaatcctcaggagcttttagcacaacgggggaaggactatgccttggagtccccccacttgacaaagacctctagaggaacccaccgtatttcaaagagcatgaaaagccacttacaaactaaaaccaggtagagttcgagtcctattactgctgaaactaaacatctatgtagaaggtatcttggtaagaaccttgcctacatccaatcttagagtccctttcatggcatttaggagagatgggttattttagcttttgcttgggtatctatagcaactggaaattctactagttgagtccattcctctttagaataactcctattacaaggttctttcttgtgttgaagcaaacatctgtcatctattaagctcctctttttgccctttgaagcaacacaggaaaaatccagttcctctccccttttatagttcaatggagatttcaaggcagctattatatcatcctctctttttccctttgcagctatatcttctgttcttcaggggaactatttcctggttccacatataatcagactcttcatggtcctggccacctgactctggatataataatttattaatgtctctcttaaaatgcggttcccagaagggaacccagtcctccatgcagatgtggactgagctgtgccccgtgcagggctccctggatttctgtcaccacaggccgagtgtgtccgtttagccgtgagatacccctaactcaaagctggactcacatttccctacgaaaacattcctacaaaaactgctgtgaaaccaggactttctaacacctttcccattaacacacacatcgtacacacataggtgccctcatctatactcagaaggttgcatttaagaaactcagaatatggaagtctctcgttaatgcctgttcaattttatccttttagtttcagtcttatgttcacatatttcaaaaattataatgatttctgtatcccaatgtcagtacatagttagaattcagtgaatattcatgggatgaattaatcctgaatctactagtcaacagactagatatatgtgtctacttctgggtcatctataaatctgataggcgtactttctgccccccttactctcttcttcatcagagaactaagaaggcaagtaaaagctgcctttaaattgttgagctagtattccctttgggatgcggaggtacaggatgtgagcaggagcagacgaagagaaagaatactgagtgtcctagatccttggaatcaggatttaaggttcccgacattagaaaaatatggcttccccctatctctaccctcgagtcttctgcctttcagatctattagaatactgtgattatcaaactgtggatttttaggaaaaactcatacaagcttaattttgaaacagcttttaaaatgatcttttcaaattacatttcctgtaaagtctgagttagagacacacagctgtctattggctatgaggtataaaatggagttcccaaaatgcccttgacaaatgcctgagataatatgtatccatttatttcaggagtcagaaatggcatatattttttcagtggggaatttagaaaatcactgagcttgaagctggctcctgaattgaatattatct

SEQ ID NO: 30346 - DNA, 1002 bp, Bovine  19866880921123
  misc_feature (1)..(1): n is a, c, g, or t
nccacatgatgccagataacaactatcttcctgttgggtgtcagggtccagaatggcggggagttgtacctaggggatgttgttgtttagttgctaagtcgtgtctgatgctttgtgacccatggactgaagcctgcctggctcctctgtctatgggatttcccagacaagagtactggagtgggttgttattttcttctccaggggatcttcccaacccaggaattgaacctgcacctcctgcattgccgacagattgtttaccgctgagccagcccagggaagccccatgcaagggacacaaagagtgataaatgagatcctacatacaaaaaaaccatccagagtgccacttcctccttctcctcttcctcttatgctgagcaccctcctggacttgtttgtgtaagccccgaaggtttgcttgcactttggcaccaaaccgctaatgctcctagacgctaacacactccgattgctacagttgcatcaactaggatctgggttggcagccaaactaagctagtgcactgtgtcatcgcagacttcccacaccacggagaaggcacagaatgacttggagacctggtcgcagttcctgctgctattagtcatggtgtgttagtggaatgcaagctcaaaaaactatttcctaagtgctttccaaggacctggttcctcacacaggtagttttcgccaactgtaatgacagggagaaactagagtgtcagggagaacagaatttatgctttaagtttattttggatcagatgttccttaaaaataaatctccacctgatcctaattttgacttcaattccatagactggtgatctgagtgttgaggacagagagcttagaatctgtttatatggtataaatacagaaaggactggttctgagtcgaaggattagatcaacgtttgattataaacttaaaacctctctaagtcacatgttatttttgaagcatgaaatggtcttgcaaacgccctaaatcc

SEQ ID NO: 30347 - DNA, 1728 bp, Bovine  19866881072166
  misc_feature (1)..(1): n is a, c, g, or t
ntattgaagaggataaaaaacacagtcaccactggccggtaaatagggaattgggcaacttatataaaatctttaaaatatgtaaactagatcataagcacgttcactttcaaagacttcagccgtgatgaatgcatctaaagcttgcacaatcggaacctagaatattttgagtgcttaaggcagaagaagggaagatgttttctaaatccctgtgtgtgtgtgtgtgtgtgtgtgtgtgcgcgcgcgcgcacgctcagtcgctctttgtgaccccatggtctaaattcctaggaaacagttaatagccaaggagaccacactcacattttatcttggtatttatattaatttgcttaacctcacctaatccattctctgtgtgtgtgtctctctttccagttacctgaacaagaataaatacctgacagtcatcggccaagatgcatttgcaggggtctatagcggaccaaccttgctgtgagtaagacatatggaagagcatttgccttttggtgcagcggggggagggggccattaagacgattagctgatgatgtttatggggagagaatgttgtcttggataaaggtttctgctagtgcttttctgcccagccatatagggcagaaaaaagttcagaagaaagtccttgttctttgagactcagagggtcccacactccactgtgccatcctgatgcctgataccaccttggtgtggacattcatgaaggccctcttatgaaaaaaaaagacatttttgagcagctgacgtttgcaggcataaggtctacaaacaagcagaagatacttagtctttgccgagcaatgactgtgcgttgcacagtgcatggcagaaagaaggaagaatacaaatagcttggttcacatctgggaaatctgactagaaaagatgagatgtgaacatttttgtgaagcagcatagaaaaagttgtatgtgtgcatttgctctgatttatactgatacctctgtatctaatcatgatcaagtcctgttgattctgcctcccacaagcctctttctcagggccaccttcttcatcaccttggttttgtcttagtttagaatttcattcttgagcagtctttccatccttgccaaagtggaacacagccactcaggagaagcagaagacgatccatcagagacgagaagtttccgtttataaataagaggttccatcaagtaggtgcagcccaaggcaacagtgggtggcccacagtcttgaagacttataccctcactctttcatttttaacaatttcacttcactttaagattgaatgcaccccagttaaaagggtctatggccttactttcttaacacacagcctccatataacagggcagagtgaccctgaaaatctcttttacgtatactggggttcattgataattcatggcaaagtacttaaaagtattatgcatttttcttcttacaaaaagacaagtgaaaaaattgtattgccctcttctgtgattgttttttaaccttgaagatattttttaaagatacctttaactgttcctttcagataaaaggtgatatttcaccaatgaatgaggaaacttgttgcttttctaaagaaatgtgtgctttggaaagagtctttagaagcaggtatttggaaacatttacatgttatgtaattttcctgagaaaataggactatcgcttataaaaatatttttaaaaatcagaaa

SEQ ID NO: 30348 - DNA, 2990 bp, Bovine  19866881154887
  misc_feature (1)..(1): n is a, c, g, or t
ntggcagggcaacccagttggacagagtgggcttggaatggcttacctctacgggagaggagttcaagttgtaagttcctcagtcctaatgttctgacttcaacaagcagtcagctggtgacgtaggaagtgttccttaactagctcccagtcagcccaggtgaggccgttccatttgtaaccagagctcaacctgggccattctctcttaggtttggttccctgccaccgctcaccccgtcccaccgtagcagctgcctcttggcatggctgtgtctctggtgccttctcagggcgtgaaactgtttctcatgtttccatctctgctcttcgcctcacttcctctcccatctctctcaggcttcagtatctccgggccgcatcttcactcaggcctaagaaaattctcaagtcctgtcgtgtagagtgaggaaagctctctgtgctaccccttgcccttctagctgccacctctctcctttccagccctttccttcagtccaggtttctccagagaaggagctccgtgagctgctgccgttcactcctcagctctcagcagtcaggcttctacctcctgtcactgcgctgcacggctcagcagtgacctccgtgtcagcccacacggcgctggttctgcctccttggactctgtcctcctcggggccatctgggttttccggggccactgcgcctcactcctctgtgcttcttactcacactggaggccctggatcctcatcaccgtccccacctctgtccgatctcccaagccatgtattcttttaatttgggcccagactaagagctcggtagagtattctagtccgtagatattccctagcattaaagacagggatgtggtctcattctgatttccttctaatcattttagggtagtagaatccaggagtgtcatttgtttcatttttctctgaggatatgtatatttgaaatatgataataatgtttgataagctgttcagggaaggaactaataaggacagaataatttttcttatttaatgtttaaaaattcaggtttaaaagggtttgttgattaatagaaaagctgtgactgtttcttaatttttgatctgctgttttagtagtgttgttttatgttttctgagagcagacatacaagttgtttcacaaaataatgtatttgtttttctgcacggtcttaaatgttaatccaccatgactgaaaaaatattaccatctgtgtattattaaaaagaaggtcttttaatgacttcaggaatattgtgtgctttgtgaattctttttatgatgaatctcctgacttcagaatatgtcagcctttcgagccttctcatcgtgtgatcatgtgacctctttttctccagaattatgatttggcactgaagtatttccagaaagctgctgaacaaggctgggtggacgggcagctgcagcttggctccatgtactatagtaagtaatgatggatactccacatctaaattccctgttttcctctagatgtcactgtgatgtggaagtgagagctattgagtttctatctgatgaatgtccttccaattcagtaatttgtgtacatcttgtattgccctgtagaatgtattaatctgtattaatgtgcaaatctatgttaataagattcatatcattctggagtaagaattctgagtttcatttagttttattcctaggtagggcttctctgatgctttagctaaacctcacttaacactgttcctgacctctcatgtgattttccttacagacggcattggagtcaagagggattacaaacaagccttgaagtattttaacctagcttcacagggaggccatatcttggctttctacaacctggctcagatgcatgccagtggcactggagtcatgcgatcgtgtcacactgcggtggagggtgagggctcttctgcgctcgcccgggaggagagtctgcggttctggttctggttctcttcttatggtttcttctagagtagagacagactcggtcgactggcactgagacaatgagggaaggctctgactgtcgcacttactgattcagtttgtctgtccccctggaattagccttcataagagcggatattattgtctgcggtctctctggcacctcagacagtatctgagacatagcatcaaaaagtatatgttaaatgaatgttgcagggggaatgctgatatctcccagctggagcctttcctctttagctttctcatgattggcacgtcagaggaacgttgttcaacgcttagcacagtttctcagggcttcccaggtgacacaatggtaaagaatccacctgccaatgcaagacgtgagtccgatccctgggttgggaagggcccctggagaaggtgatggcaacccactccagcattcttgcctggagaatcccatggacagaggagcctggcgggctactgtccccagggttgcaaagaggtggacaggactgagcatgcacacacaaagtttctaaacctctctatgcctcagtttccttcctcgtaaagtggagctgttactggaacttatcgcataagagggtggcccctcacaggaggagtgagtgagttactgttcaaattagtatcccagatttatatatatatatatttttttttttaataaaactgccagagattcagacagcaagcttaacaattgcttgtagccaacgtgcaaaaaatgatttctgacacacctctcttttttcctgttctcacagttgtttaagaatgtatgtgagcggggccggtggtccgagcggctcatgactgcttacagcagctacaaggacggggactacaacgccgccgtgatccagtacctcctgctggccgagcagggctacgaggtggcacagagcaacgcagccttcatcctcgaccagagtgaggcccactcccgtcctgccttgggtgtgggaacacagggtgcacgtcaggttcagtgcagt

SEQ ID NO: 30349 - DNA, 1990 bp, Bovine  19866881157203
  misc_feature (1)..(1): n is a, c, g, or t
nctgccctcggggagctcgtctggggaaataagactggcacacttgagataattagccaccaattaaggactgacttcatgtgctgcgaagcagtggtaggcagtgtggtgtgggggtgggtggaccggaagggcaggccctggcttcctagttcctagtgctgtgccttgtggggagattgagcagtgtgcgcgcatgtgtgcctgtgcacgtgtgtgtgtgtgtgtgtgtgtagggggagatatgtatgtatgatatataaactacattcatatatacacatacatgtagcttttcccacatctctttttaaacttagatcagagttttaagtatttcattataaaacattattataaaattaaaagagagtgtaagaggaagaaaaggagccatacctaatcccatacactttagccgtgtcgactctttgcaaccccaaggactgtagcccgccaggctcctctgtccatgggatttttcaggcaagaatactggagtgggttgccattttcttcctccagagaatcttcctgcccccgggatccaacccgtgtctcctgtgtctcctgcgttggaggcagattcttgacccactgagaatccctcatccctaagataattgatttatcagaagtggtagctcgttcttagactccagcatcgagcccagcagctggcacagaaagggggctgcaaaggcatttgtgaatggccaggccaccggtcctaccccaggatccagacaagcgaaagtgaaagtcgctcagtcgtgtcctactctttgcgactccatggactatacagtccatggaattctccaggccagaatactggagtgggtagccattcccttctccaggggatcttcccaacccagggattgaacccaggtctcctgcattgcaggtggattctttaccagctgagccaccagaagaagcccaagaatactggagtgggcagcctgtgccttctccagcggatcttccctacccaggaatcaaacccaggtctccctcattgcaggtggattctttaccagctgagccaccagggaagcccagtatccagataaggactttataaagagcaccagactagcacctctcccaggctgagttctttactgcactgagtgtgagggggtggatggcagaggctccgcatggcactcagagctcagggctcaggtggcaggggctgggtaactagggagcgcttggcagcttctctgttaggccatcgagccttctcgaaacccgtcagggtagagaggtgggtgcctgggacacaggcttctcccgcggtgtctgaagtgtttgtgtttccccctttatcctgtggaagaggccatcagtatctcccttgccagacttcacaaagagcagtctcattcccaaggtatccatgtcagcaagttctgtggcttctgtctccctgcttttcaggtaaagcaggcttacctgttggtacttgcacagctccgatgagtcagtcctgggccccgctgatgtaagatggactaaaactggttccggttctcctgtccaggacccccccccttctcctcgcctctctttatcccactaaacggttggagccacaagtaggctgactggtccagatcgttggttgggtttcctgggtgtgttaggttgctcgagctgcccaaaaaagttaccacaagctgggtgtcctaaaacaagagaaatccattctctcctcgttctggaggctagaaacctggggtcagtgtatcaggagagacgtgctcgctcaaaagactgcaaggaagagtccttccctgcctcttctagcctctgatagttactggcagttctgggcctttcttgttttatggcagcataacttaaatctctgaatctatctctccatggttttccctgtgtatccgagtctccctgtcccttgtgaggacaccagggcggattaaaaacccactcagtccagtgtaaagtaaaagcg

SEQ ID NO: 30350 - DNA, 1448 bp, Bovine  19866881188397
  misc_feature (1)..(1): n is a, c, g, or t
ntggaatgatgggactggactccatgatcttagttttctgaatgttgagttttaagccaactcaaacatgtaccaaattgattgctatgtcaggcatcatgccaagctctgggtgtccactggggaatgagacacagatggtgtctgttctctagggatttaccaacagggagaccaagattaaacagtgtgaataatcaataagaagtgctataaaggaaagacacagggggtgcctaacaggtgcacctgatttaatgtggagacgagaggaaagtgggctgggacaaagggcagagggaggcaggcaggcagtgtgagacctgaacagccctgccgggatgaacacagcacatgcacacgcgcctccactagctgtcatgactctttgctgctgctgctgctgctaagtcacttcagtcgtgtcggactctatgcgaccccatggactgcagcctaccaggctcctcggcccatgggattttccaggcaagagtactggagtggggtgccattgccttctcctcgactctttgactagctcagctatttcaggtaaatggacgtgggaggtcttgttctaaatttatacacaggttggggtggtgacagttggggttaacttagaatcacagaactcatggaagccgctttggtcttcaaaagctcctggaggccatttttaattttgtcttttctagttagaggataactactttacaatattgaaagtcccttggacagcaaggagatccaaccagtccatcctaaaggaaatcagtcctgaatgttcattggaaggactgatgctgaagctgaaactccaatattttggccacctgaggcgaagaaccaactcatttgaaaagaccctgatgctgggaaagattgagggcaggagaaggggacggcagaggatgagatggttgatggcataactgaggcaatacacatgagttaaactccgggagttggggatggacagggaggcctggcgtgctgcagcccatggggtcctagagtcggacacgacttagtgactgaactggactggacaatgctgtgatgatctctgccacacctcagtaggaatcggccataggtgtacatatgtcccttccctcttgaaccccctcccgcctccctcctcatcctaccctgctaggtggtcacagagcaccagcttctgacaggttcccgacgtcatacatcaaactcccccggctatctatttttatctattttacacacagtaatgtatatgttgggcttccctggtggctcctgcaatgcaggagatgcacgtttgattcctggatgggggggaagatcccctggaggaagggtgtggcaacccaccccagtattcttgtctggagaatcccatggacagaggagcctggcgggctatagtccacgggtcacagaaagtcagacatgactgaagt

SEQ ID NO: 30351 - DNA, 1453 bp, Bovine  19866881195137
  misc_feature (1)..(1): n is a, c, g, or t
ntagaatgtcttttgttttaggtttgttgattttttttttcctcatcactagattcagatcttggacttctggcaggaaacccagagaactgttgttgtgtttttcctaggttatcagatcaggagccatgtaatgttgatttgttccatcactgattaaaactaaacattgattaaggtgttacttgccaggtttctctactgtaaagttactatattatgctttttaattatttgtgttatggggaaactctttgaaacttgaaaatagcctatatttcatcatattttcacctgcaaattttagcatctattgattctttcatgaaatagttactgctgtaagtgatactaaacagtgatttaaaaaatattctgtcatatctattacagttatcagttggaatcctactgtcaggaggtgctttgtcattttctccactcattcattcattcgttaatattagtgtagatttatgaattatcattttatcatcttggttatgttttatgattgttattataggaaacttgtgagattacctttaaatgtttcttagatatataaagcataaaaaaaaattagaaacaaggaaaccaaaaggtttaaaaacaaaaggaatgctttattttttcttttacaaaatgtttttctttaaaagtgatgttcttcagatatacttgtgtgttcttaaagatcattagcccttttagattgacagattaaatttttttttaagttttaggaaacgtgcccattgaaaattaggaatgaaaattgcaaacctgaaattataatgtaagctgatagaaaaatctgcttttgttttctaaaaatccatttttcctccatttcacaaaaggacgcatacccttgttagttggtaattactttaaagaggatactttgttgaataattagatacagatatgggtagcctttttaaaaaaaaaaaaaaaaacaaccttgatttttatatatttgttctcaaagcaaattgcatctggtgagcatagaacagcactgaagagacaattgttcttttttgtgagagaagattagagaaatttcccgtgcttattttctactctctttacagaatgcagaaaattacaaagaaagagggagagaaagattgcttcccacccctattcttaagaaaccagagcctgagtatttgcactgtaattgtcattttgactaaaagcttgaacagtcctttggaattccatctctgacagtacaatagaggatcactattgataagaaatgtttaatttcatattttgtcactttaatatagtgtggtaacctatgtgcttttaataggtgattttggattaaacagtgcagtggaaactggagaggattaatttagcctgatgcgttttcctactcccaagttaagtggcttagagtgttcggaaagatcatgtttaaggagagacaaca

SEQ ID NO: 30352 - DNA, 1492 bp, Bovine  19866881209774
  misc_feature (1)..(1): n is a, c, g, or t
nattctggaagcatctgtacaccgatcaataaggaattgctcaaataaattatgaaaaatatctacaatacactgcagccattgtaaagattggagtagatctatatgcaccactataaagagatattcaaggcagatagttaattacacaaaggctagctgcagaaatctgggtgtagtatgaactcacttacgaaaataaaaatgtgcttgagacgcaggttactgacatttctggaaagagccataggaaacatataatagtgattttcctctgcatagtgggaatttcattcgtattttccttcttttttactctctccattttcaccatggccttgctttattttcacagtgaaaatctagttttcaaaaataaaaaataaataggggctcatctactacttaaaattaatcaaaagttttactcaatatattctgaaggtagactagtaaccagaccctgaagacagaaagatgtccacaatgccagccccgtcctccatgagctcattttatgtctacagagatagaaagagagccaggcacccaaataagtaatcgctcacctagatgggcacgataggaaagatctcatcctttgcgatactcagtgctgcctgaagcaggactccagaatagcccacactggactcacaagcacaaaccacagcctttcttgtgatctcagacacaagactaaaaaccccaggagacaggggtcttcacagctcccccaggaactggaatacagccatcctttgaaaggtctttgtcagtcactcagaacgttaacctttggaactcatctctcaaacggcctgggtcaagggatctagctctcaaatatgagcccacgctccacgggaaccacaggtctattaagccttagctttggagcaattatgaggcaaagggagctcgaaagcctgaggctttcgtgatggcagaggggtctcagcgatggctgtgtaacgagtattatccacaaagcatcactgccccttccttcaaccccacttgcgtgctaacacccggcttgtcaggagaactcgtttgataaggactcactcagccattgagtgagtccccagctccccacccttctgaatggcaggactctaaagtctgtgttcctccccatgtgggccccgctctcagaggggaagactggggtcaaggaaccatccagcatctaaagaccaacctgaaaatcagcaaatgggactaatgagatggcatgggcccatccctgctgggaacatggccttgtgcaaagatccagatcaaaagatttcatgggctggggcagagattaaagatgaggaaacttccactaggttgggcagaggaaaatgttcatggcccacgcgtgagtactttcaggaacccgccctgggctcttttccgtcacactgtgttatctccacaggcctccagggggggccctctccatgtgaatagcatggaacaacccccaccttcacgacca

SEQ ID NO: 30353 - DNA, 1648 bp, Bovine  19866881236701
  misc_feature (1)..(1): n is a, c, g, or t
ntaaaaaattgaatattcggtttttaaaaaagtctgtgtggagtggtgcctggccatggtacatgattagcatacaggataaccagaggtggaatctttatttcacaagtttcaagatacagtacaaaacgaatctgtacatctctctattaacaggatttgtttacacaattatattacacttcaccagcctttatactgaatttaattaaatacaaaataaatttacaaaaagtctaccatggtgttctttccaatgtcagtttatggtcttttaaaatgtctcctaagtatcaatagtggttacaccttgatcgtatcaaatgttatgatttttttttaaatcaaagagaacagtgtcatcttataattccaaacaggaaaactggtgctgtgagatgactctacatataaccaagacatccttctcgtgcacacacaggcttttcacttgtgcaaatcatttttacgtggaatattttcaatcttcttgaaataccaagtggaaggagaaatttagcttctttttactacacatttaaaagtcaggtagtgcctcagacagtacagtattcagaaagtttgtattttcacttatatctgagaccaatgactgatgaaaaatactttcatgaaaatagaagttcttttgctttatttcttgcacagtggtagtcataatattgtataacatataattaaattcacttttaaaacaaacagtagctgttattggggtaaatgtagcccatgctgctcttcttggtaaggggggtgtttaacggctgaaaaacttttgttttgaaatgtgcatgtgaaaagttaatccaaacctctgaataaggtgtttgcagatgtagctagacactataatacacatgccacatacatgaagacctgtggtctccatttataggcttgcatgcatacttccaaaacactggtttgaagaacatgaggagcaaagaaaggaggtgaaagaaaaaaaaaagctcatacaaaattcttgagtttcctggaggcaacagcagctccttaaataaagcaacagatcatgggcagaagtttctacaacttcccagtgatagagagatacaatggcttagcagtaaaactcacaaattaaccgcatatgcagaaggggaacacatcctcaagagtattaggattaatgatccgcaagttaatctcctttaagtgctaaatcattttggaagaaaagaaacctgatttttctgtgccattgaatagaaactaagaacaaggtaagccttacccagaaaacagaaacaaaagctccaagaacaaaaaggaaaaaacaaacaaaacaaaacagaaaaccaatagcaaaccccaaacaccagtgccaccttcttagcagaaaataaaaagctaaagagtctccagactctggaacggttggataagcaacagaccaaacgcacaagagaacggaagctgagcaaaggccctgctgccgctgccccagaggcaggaagacagcctctcacagggacggggagcggggctaccgcggagaggtgaagcctgagcaaaggccctgctgccgctgccccgaaggcaggaagacagcctctcacagggacggggagagctgggctaccgcggagaggtaagccacactcta

SEQ ID NO: 30354 - DNA, 1083 bp, Bovine  19866881242267
  misc_feature (1)..(1): n is a, c, g, or t
natgccgctcttgcgtcatgctgaagataccaccacagcttctgaaaacacttccagaagatgcaagccaccacacctaatgttataattgcgtcagtgcaatacatgtatggctcaccatctttggggcttcccaggtggcactagtggtaaagaacccgcctgccaatgcaggagacggaagagacatgggttcgattcctgggttgggaagatccgctggagaagagcatgccagcccactccagtactcttgtctggataatcccatgggtagaggagcctaacagactgcggtccatagggtcacaaagagtcagacacagctgaagtgacttagcatgcacgatgcctggaccatcttagatttatttggagttgtaacttctatttctttttctttttatctctcttgttaatgttggcctgtgttcatattttgtgaaacgtgaagggtcaaagagagcaatctttgagacgattccccagacacccttccggtaataacagtgttcctacagattggcttttcaggataaatttgatttttagaagtgctccttatttaaacaatattccacccacagtattgtttgctcttccatttaaattatcagtgctcgttattatagctaccagtagaaaagatagcaattatcatgcttagacacagctgcagggctgcctttgctcgataatttaaggggtccatgccctattgtacctttttattgtcagctttattggagaacatccaggttttagctagatttccccttcttcatttccctaagagccaatgtgttgaaaatgccattgtttttcctaccgtggtgagtgtcaagtcagagccagctctgggatgtcaggaagctcatagtcttcaaaaattatactgaaactgggatttccctagtggtccagtggctaagactctcccaatgcatagggcccgggtttgatccctggtagaggaactagtagagaaggcaatggcagcccactccagtactattgcctggaaaaccccaggacagaggagccggtaggctgcagtcttggggtcgctaagagtggacacaa

SEQ ID NO: 30355 - DNA, 1906 bp, Bovine  19866881248347
  misc_feature (1)..(1): n is a, c, g, or t
ntaccaggaagatgggtacggattttgctgttggacacatacccttttgtgtttacagttttttgagcatcagcttcaaagaagcaaggacttttgcaggaacatagaaatagtcatctgaaaaggtagtgggccagccgtggcatccccacttctagatttcaggaaagttgaggttccctcattcagaggtttatcaaatgcctatcaggccccacactggatgcgagagaaagaccaggctccaatggagagggctgcttgtggtatgagtccttagagaaaaacgccaaaaggtggaggtaacgttctgtaaagaaactgagactggtgtttatgtatgatgcgtggccaatggcacaggggaagcttttacaggagatgcaaatggccctgaggtttgggaccgagccgactacaccccagtctctgctgtgtggtcaaatgaaatggctaaggagcctcttgtttctttaagaaagctctcctcctgtttggagaaggacgaactgaaatgctccactctgagtagagttccagaggttgagattgcctcacagggtcaagattgctggcccaagactacttcgaaacagtccttcaaagagttgtgtggagtcttggatcaattttgctggaggataattcgatcaggtttggatacattggtgaagaagatgcaatgtgacccaagaaaggaagctggataacaatccacaccaaacacccaccgagcctgaacgtgaacagtggtactgagaccagtcaggtggggatcatttgatgaggccccaactttactttgtggttaatttgaccaaagaagggaattctttatggcttgggaaattaacttatcttttatacccctatgagatctccttcctgagaacattttgcaaattttcccagtaaagcatttccttttgaacaactcaagagcagaacccattcaaactctggaaaaaatgatgatatagagaaggactatgttttctatccaatatcccatagtaggagcttagtaatagttagtgatgacacagctaaagtatgaatgcaaagcattaaaagcccttattaggagcactgttttctacttcagggaccttgggacagtcacttaaatttgctttaatccaattcttcctctgttcaattgagataatggatacaggatattgttttataacgtctgcaggccaaatgtggcccactgcctgcttttgtcaataaaatgtcgttggaacatagctgctgtgctcattaatctgtgtattgtggatggctgcttttgccttacaatggcagagttgaacagctgccaccaaggccatgtggtctggaaaacctgaatggccattcacagatagagtgtgcggaccacttctgtaagagactaccctttgtcttgctgcctaaaccactgtgtcagctgcagagctccgcaccataaggtgccactcttatttaactgtatgtaacccttggcagaccaaagagcaacatactgtgcggcagtgtggttcttggatggcctgcgggaatatgacagtgacccagataaaaattccagagttggcaggagtggaactggccatactcacagtgtcaaggtttcgttgcacaggccctgaaaagcattcgcagggattgaagtcatgtaagggttgtctgtaatttcactgaaagagaggaacaaaaacacttggtggaaaaaaaaaaaaacacctctggagctgggcttttgctgtacatatgcacccaaatatataacctgacatgattccattttatctcatttctttttaggtgttgttgactcttagctgttggtggctcagagctccggtgaggccgtgatagctcacctaggtggacatgcactcagagccccacctgtgca

SEQ ID NO: 30356 - DNA, 2301 bp, Bovine  19866881263273
  misc_feature (1)..(1): n is a, c, g, or t
nagtcccacttttcagaatcacagtcccccatattactaaacccaacgggcatttctcagtccttgcctgacttcattcatcagggcgattgtcacagatgatcactgcttcctccttgaaacaactgcttcacttggttccaaccatcatctacggctgcaccctaattctcgttagcaacaagtcaatactgccgaatattgcctgtgtgcacacttacagtatgaagaacacatcggtggaatagattttggtcaggtcggggaatactctaagtccagtgttgaaaatgccactacagtacatgaaaaagaagaaaaaaagagtagaaacaaggtaagaaaattaacacataggaagtagaataatgtaacagctgaatgtgttctgacgtcagactaggatcaaatcctaactccttcgtcaattatctgagagaccatggcaagctccagcccttggatgggacgatgcttctcaaagtacaggaatttacccagtccaccagcgtcaatacatctattctatttaggaaaatctggggattgtttgagccatgtgggattcctagaaataggaattcaggtttctttgtgtgtgtgtgtgtgtgtgtgtgtgtgtgtgtgattaccttgttttaactggagggtatgatgcatgtgtcggaggaagggagggtggaataagggaaggatggaacaggaagacaatctaattaccaactccatgccaggctcccttttgcaaactctaccttatattgtgttggttattttaccaagaatgatacgcctatggcagcctcttgagaataccacggcagcagtaccataaaaatatgttcagacaaagaaggaaatcagtcaaagacaatgtcttcactttccaaagcttgtatcatcagggcaaaatgtcaagataaaaatgtgcataaaacagcatgactataaaagctcaggctccagatgcctcccagacttagttggtctaactctgttgtagctactagaacacgggcagtggagttacgctttgtttgagagccttggcgtgccatgctaagagctcgtcactgccagtaaacctttatagaatgtctccagcagagaaagctctggtgtcccttctaaggcaaattctgacctgattcctagaggggaaggcacatgatttgaagagaaagcaggagcctgaggtctcaaaaaagcaaatgggaagctccaaataaccaaggagagaagtaacattccataaggaatatctgaagaacggtaaataaacccattcaattgcaacagcgcttcatatggaagagcagggggcaagagcctgagagttaagtggggactgtattggaaagggctggaaatgccattttagggacttggaccaagatctctttattcttcaaaaccccaaatgagtccatctcctttttgatgtctcctgtaattacctggacccccagataaaggtaagtacctcccatttgtcacttcccactattcttctaggggaggaaattttcaatttcatagataaatcttcctttaaaaaatggtaagcttctttgaaggcaaggacaacgttttattatccaacatgttccccaccaagccttgcacagactagggaacctgatgtctactaatcaaagagttactaaaggactgaagctcagagtccacgcaggagcaattgccttgtgctgttaagtttttattgggcttcccttgtggctcagcaaatttttattacttcctagatacccccgtcagtatcccatccgtgtcctcttctgttcccctggcgtctcccacccttacctcttcaacactgaactgttttccattccccaaataagccacgtggttgcacacttgtgtgtctttatcatgctattccacccacccgtatctctcttctccccttcctgggtaacctctactcatccttgaagagacttatttcatggaatatatttggatatatacttttatttaaagtccctagatggcaatgaactaatatgtgaatagtgattgtttctgggtattgggatgaaggttaactttttttttcctgtgtaatgttttcacatcctaatcttttacagcccatgtgagcaggaaaggaggcaagaaaggagggcgcccagaggacctgagcgtatgcacacacatccgctgaacacgctttgttgagcagacaggcagtgaagtacaacagaggacgaaaacgtgtggtccctgctcccactgagactgcagttagctcacaaggtgtcacccaagcagaaa

SEQ ID NO: 30357 - DNA, 1934 bp, Bovine  19866881348590
  misc_feature (1)..(1): n is a, c, g, or t
ncagtggtcatgtccgctgtgtccagctgtctttcttgggtcccttcagtcactctttcccgttctgtcagccgtcttgaaggtcttatgcattgacactagaactgatcaatgaaaaaaggaaaacccagttagttgcaaatttaaccttaacatgtttgaaagtctgaaaatagaacttgccttttaagttaagaaaaaaaaaaagtcctcaaagtgttccagaactgtgataaccaaggacctttgatcagtccatgtgcaagtatacatatgcagcgtatttgttcctttaaaagggaaggttgggcggtttcttattattggtgattgattgtcatactttataccatacttctctccttcaaagactgaaaggccttgttaaagagttttatgtgaacttcatttccttggagtggagtatatagaaaactttgtgaactgactccttgagctaacacatgaacttgccccacctactcactgtaatttgcttgtttgttacaagtatgcagagccttcatctggagccagaggctggactgaacgggagaattagaaagcaatattgaaggactctgggtggggtaccaggatcacagacacactttcccaaaagttaacagcttctgttcccaggattcattttattaatactttgcatttcttactgcaaaagaacagaccaccctcctgaattctttaaatgtgaaatatccttgccaggctatggcagacagaaactaccattacaatactaaaactctagcgagtcagagatgcattaaaatcagtggttgaagaaagctactaaagtctccttgttcagatagatttttatttctgcagcttgatgtaatgggagaaaatcaaccacctgcgtagctaccatgtttcatcaccatcccactgttaacaggaggaaaagcgaggctgttacacttcagaactgtctgcttaaggagtacggagaaaagccaccacggcgccagcaaagaccactgagaacatcacatacacaaatgaaacacgtcagccaaactcatactcctttttacagttggatggcagcgttcgccagcctgtatccagtctgaggcccgtttagcgtctgagcaggctttctgcgcttgctgacctccgtctgtttctattaatctttatactcttttcataacccctcatgtgccagaaaactggaagagttccttacctgtagacttataaaactttggtttttgaagtggggattgtatttagaactaggtctaatcagtccgtaaggaagctgagggctctaaatgtgaagttgtgtgcttttgtgtgtgtgtgtgtgtgtgtgtgtgtgtgtgtgtagagtattatgagaaacctggtgagcaaactttcctcctggatagttgcttctaaacctgaagaggtggtcacagcgagaaccatgtgtaaatgcacatctgaaaggtaggccattttaccctcagaaatgtaatgttgctttgggcagctcatgtaaatactgagacttctgttcgctctcttatgtgagagattcgcttgcatttggtacaggatgttcatgtcttcacccctgcctcttctccccacccttcaaaataagtatgatccacggtcagagccactctctgtttcaaagaaactgtttcattttatttaaatgtttaacaaataacttctatgtttttctgtcatccacctaatttctcctttagcagtattcttatctctttatctttccttccctcttagtacttggaaaaagacaattcttcaacagtggcctctaccccgaggcagacgggaaaggccggtcttgttctccaggtgatgacagacttcctgttggcgtacctcttgcccatgtccttttcattcatcttccaaatcgatcttttttctgtggccttgtccac

SEQ ID NO: 30358 - DNA, 1684 bp, Bovine  19866881490864
  misc_feature (1)..(1): n is a, c, g, or t
ntaatgtgaaaatattagaagtgaattcattttaccagtacacagactgttactattagaacataaattagatgtcccttgatatcaagagctgtgcttttttttttttttttttttttgaggctggtgacttgctttatgacttcatagtaaaggaagataagaaatgctctcattatgatacatcagacaagagaatatgaggtactttggggggagaccattaaccccccctttgccactcttactcttgtgaacatagtactagttatgtcttatcaaaattttgtatttcacttaaatataatctggacagtttttttttttttttctattttgtcccccgccccccacctgccctgaccatcctgcattattttcagggttaataactcttgagaacgttattttggaggtggggggcactgcgtggcttgcagaatcttaattccctgactagggattaaacctgggtcaccacattgaaagctctcagttataaccactggactgccagggaattcctgagaatgttgtttaatgtaaaatatttcttatttgaaatgagagtaatttcttttcagatcttatagatgagggcaggagcttcaaagtgttagccgctcatttgtatctgactctttgcaacccctggactgtagcccgccatactcctctgtccatgggattctccaggcaagagtatactggaattcagttcagttcagttcagtcgctcagttgtgtccaactctttgtgaccccgtgaatcgcagcacgccaggcctccttgtccatcaccaactcccagagttcactcaaactcatgtccattgaatcggtgatgccatcttatcctctgtcatccccttctcctcctgcccccaatccctcccagcatcagggtcttttccaatgagccagctcttcacatgaggtggccaaattattggagttttggctttagcatcagtaggtccccagaaattcacattcccaagaaatgtgactcgtggaggcaagaaatgtatcttattctttctttctactatctagcaccaaacttggaatataataaatttcagctaccttaaatccatgccaataggacaaacatattcatgtaataaagaaaaattattaggtattcagtaaatgtttgctgaatgaatactgaccctgagactccaagactacctaacccttccttatcatcaaacatcattaaccttaaagcatacaagcacgctttcatttcctggagcacttaagtaatttcttttcttgcctccactgtcaactaataactgtcagcacttaagcacttaatgtgcagctgaatttaaactacagtgaaccttattcatattgaaaaaacatttttgtgcccaaagataacagcagcacagatgctgtcaatagtctggattactgattcagttttgttccggcaaatcagagagctctgtgagcccgagccttgtctcttcgaatggtccgtgggagaaggaagcatttgctagaatcgtgggcagtcttgtgtgcaaggtctttcgttttccctaacagtaaccactcaccagtgtcgctgtttattttgttatcatagtaagaaggagacctgatagtaaggaggcctgagacagtaagctgaaacttgtcaagtaacatcaggatttcagaa

SEQ ID NO: 30359 - DNA, 783 bp, Bovine  19866881597783
  misc_feature (1)..(1): n is a, c, g, or t
ntgtcaagaactctgtttcagaagaataatcatttggataagttgactttctttcaaaagaaagcaaaatgtagggcatttacacctataaaatcaattgtcagcacttaagaatgatggatgcttgtttcatgacagatgagctgtcatggacacgatgcttgtatttttacatacgaatttcttggagatataaaatatggagaaaatgatcacttttcactgactgtggaatgcttttcactttaacccacctgacacttaataggtgactcgttgccccaaggtaaagcccttctgaagctttcagacttgaatctgaattgatttgatcccaggagattggtctaccttgattattctgttgtcagcctggtttggcaattggttcaatgagtctgcctataacggaggtagggagagagaagagtggttggggaaattgactgattgagagccatctggggattttacttaatgagaggaaatttagaagggtccatgtcatcagacagtaccttaatccaggagagttttctcgattgagctgtttaaatattaaaaattgttaaacaatcacttcccagaatactcctgctaaaattatttttatcacttagcattgctaatgataagcaaagaagtagttttaaagtgattgccacagttagggtagtattacaattatcacagcaggcattgtaatttccactttaaaagccttaaaaattaatgcagcatgtcgcagttagagcaatggttatcaaagaagaaagggtaaca

SEQ ID NO: 30360 - DNA, 894 bp, Bovine  19866881647572
  misc_feature (1)..(1): n is a, c, g, or t
ncccagaaaagagttatgactgaagataaattgacttaatggccccatctatgtggcagggcaaactactaattaccaaacatctacttttctccttattgtcctgtgaatggccctcctgttcttggaagtcccaggcccctgtcccattctttagctcaggatgacatctatacctcattttatatttctctcaccctttcatgcatatggtatctctgaccctctcatgtatgtaggattcccatatggatggaattcagtttgtttttgtcctattaacccatctcaggtcaatttaactcttagaccagccggaagaaactagaaacgttccttccctagaagggaaagttttcttcctccccaacacctactttagagcccaagaagtgtctgatgataccggcttctgccatttcagacactgagaagggcaaaatctccttgtccccaaagcaaaatgtcttatagaaattcaatctctaagaaaagtccttattttgacacaaattatatagaaggaagagcggaaggccttgaaaaacaaatgagcaactttttcaaaagctttcagaatcaaatgtaaaattcattaagaaaagtaatggaaattttatggctggtgcacagataaattcattgctgcctcttaattcatcaagcacacatacaagagtatatgccaaattgattggaactaacagcctcttagacgctctaaccagctgcagactcagggtaaactagttggaacaaaacaaagaatgcctcctcctttcccttcttctcccaggtgctgactgaattaagggttaaactttctcaactctaaaaatgctgaacaactctgttcttccatgacggccaagccctagcgctcttcaggcccaa

SEQ ID NO: 30361 - DNA, 1071 bp, Bovine  19866880421828
  misc_feature (1)..(1): n is a, c, g, or t
ngtttgcatcagattctgcctgccccattgtaagctcagcagcttcagttgatggtaaaggtaaaataggcttttgtcagagtccagatgagggctcagcttggggctgtcactgttttgagtggaacacctgtggttttgaatttttccagggctcccctgctgctcagtgccatcctgctttgggtatttttagagcattgctttgttttaggtaacgccatattgcaaaggtacttggagtcaaactggacattgtgacagtcagttatttggtatagggataaggcatttgggaagtactaagagcaattttgatacaatattcagtgaacctaatatattaaagaggagggagcaatgggttacctcataggggagatatttcaacaagggctgcattactatagggcaaacaaagcatctgcttttaaccggggcaccaaaaacaagagaacatattttttaaaacatttagcatttgaccatttataaaatgatagtattaaaaattacggagaaaacgaactctgtcaaatgtcattacatttataactggtagaactgggagcagagacaattccagaatatctacagagaagcagctgattagtagcaatctggtaggtcagtggtgctagagacatgtctgaaaaccacactgaaatgtttggagagtcctgaaaggaatactagatggggatttgatggaaggtatagggaaagagctaattgcctacacttctcatctgacccaccccaccctctctataagtcatatgatggtgctaccatggggaaggggcatcatggtctttctggtgctcagagtctctgatggtcttaattcaattgctaattctttggaataatgatagtactcaaagaaatctcagcaatattaggaacaggggaggtaaatctatgcttcatatttctctacacaggtgaagggcaacatggttatggcccagcagatgtttcaaccttgaagggtacagaaaggacaatgtgtcttacttgcctctctgtgcccaagttgtgaataactgacttagtgtctctagatca

SEQ ID NO: 30362 - DNA, 1535 bp, Bovine  19866880434697
  misc_feature (1)..(1): n is a, c, g, or t
ncttttgaagtattaagtaaagttatgctatctgaagtcactttatcattccataatattatggttattttttcactgctattaacttagagaaacactatacaatatttaattatggaagccacatcaaaattatcactcatgagattcattcaagatttgaatgagtttgctaacctatataaagagatgatttcattcttattgcttatctataatgagttaccaatgtatatatatgtgcatagatatatatctgtgtaactatctgcaatctgtattatcttcaattttaataattccagtttaatttggagaaatgatactaataaaatatcaaatttaattataatttcacttatgaataaagcttatcttttctttgaagagtatgtaattactgagtgacaatgataaaaacttccagctttggagacacagtcttgggctcacatctcaaccatgacactagctttgtcacttcagacaagtctaagtacaataaagccataataacacttactaaatgagagaaaaattcaccttacctagtgccatgctgacaattaagggctcaatgatgattagttatatcttaggaccagtaattgccctattataccatagaaaaattaaacttatgctgaacttttaacataaaaggtttataaaataaagttttttatgttaagattggtatctgtaattataagaagtatagctaacacatatggaatttaaaatatcgtcaatctatcaccattacaatttaacattatagtcatacttccccaaatgtggtcaaaacatctaggactcctttaaattttatccctcctagagttctagcctcttttgggaaagaaaatctgtatgtttaataagcgcctctgggactccaagggcttccctggtggctcagaggttaaaaggatctgcctgcaatgagggagacccaggtttgatccctgggtcgggaagatcccctggagaaggaaatagcaacctactccaatattcttgcctggagaatcccatgggcagaggagcctggtgggctacagtccatggggttgtaaagagtgggacatgactgagcgactgcactttctttcagggactccatggcagacatttttctgatacatctgtgcatttaacatctggctgctactagatattcttatactctttaacatcctatataattgctttatagtgttcctttgtaagaacgcttaatactctgttgtgaaacacaggtatttttaaactcacatatagtaatttaaatataacagctagcaagtacttacacacagaaggttctgctgtaattatcagataagttctgagaattatctgcattcatttacatgcaaacagtaaatgagcttaagttcttaaaagagtttgttctattaagtaagttaagtgaattcactgagcaatcccatgtgtgcagttagtttgccaaaaaaaatatgggataataagtactgaataaggaagttgaggtcagtgagaattgttta

SEQ ID NO: 30363 - DNA, 1501 bp, Bovine  19866880638692
  misc_feature (1)..(1): n is a, c, g, or t
ntgtagctttatctcctgaaagctctttgttcaccttgagtttagggattcaaaatacgaattttgcgggggatatggttcagttcatagtagatggattctgtaatcttctaggaaagcaactttggaaagatgcaaataggtagcttctcctaattgaagacagaaaattctttctgagaaggtccccttccaaaacttaggtgaaggaatggatggtatacaggggcttctcccatggctcagcaggtgaagaagctgtctgtgaggcaggagacacaggttcgatccctgggttggaaagatcccctggaggaggaagtggccaactgtactggaaacatccatgctattttcaaaacgaaaagcaattgagtgataagatcaaaatgccttcttagtagatagaaaggcaaagtcaagatttgatgctaatggaaaaatgataccaaaatattcaaagtggtttacctcaatctgtgtggtgccagtatgggtagttttattttcttctttttgataatctgtctttcaatattttctataataaacatgtattacttttgaaataaggaaaagaaatgaggcaagaaagcaagcaaacaagaagagacaaatgatacatggagtagaaaggatttctgggtgttctgtaaagttctgtaaatggcagtcaatacatcacaattgcagaggcagattcaagttttggaaaaaaaaaaaacagctatgtgtgcagtccccagaaaatggaccattgtggaggctagaagcccagttaaggaggctacgtggcattgtgggcgatgaatgatgaattcttgaaaggaataggacatggagatggtgcaaagttagcagagtagcaaggagctatagcaggagaaaaacgtaacccagtataaataagaattacatttaagacttataaaataaaaaaaaacaaagaagtaatgtccaaatggaatgagtttcagcctgaggccctcaactggctctcgatgttaagaaataaacaaacaaaacacacacacacacaagaagaaataaatggttatgtgttaagaatcttatagtgaaaattattcatgtctctggaaatgttcattcaagtatgggtatatctctagagaaaacttattcaatccaacctagaatgaattggctggaagtggaacctgagggtgccactccatgcctggatgccagcctttcggggaatgagcagaagaaaaggctggggatgtcccaaggtacagtatttttactttatgttgcctgcaatgtcgtttggtaggttcccctataaaaaggcagacctttctggtgtctctccccaactctcactcattccattatctgattagggaacatatcagagggaaccaactgtgcccagcaccaccccttcttctctattctttgggagccagcctgaccacaagcaacctcaggttttctgtgccttaaatttcacagtgggaggagtctacaggggaag

SEQ ID NO: 30364 - DNA, 1609 bp, Bovine  19866880651600
  misc_feature (1)..(1): n is a, c, g, or t
ntttccttaaaaattaaaaaaaattataaattttaggtgccactgtagaggaatttcatgactcaaaagattttccaaatacaaaagcaaaaccatttagtctttagaatatgtctctctgaaagcgaaaccattcttaaccactgacagccctttagatgtgccttgggtggtaagaagatgctatattagtttatgattttacaacagacaaaatggttaaaaattctctggagctagagagtctctgtcaactctttccccctgagttgcgtctcagacgttcacaaggcatcatccacagtgtcaacgtgcagatcagctaaaggtttatgtacaaagctccttctccctttgtgtacataaactgaaggacaaaactaatcattcgagccgtcatttcaattattcggaagaaagaatagttgagaaggctaaacaacgattaaggagaacactgttaaccaagaaagtaaagtttcaattttaatatgatagcagtggaaacttacaaaataaaagtgtatctgttttaaaaggacattctgtcagggcatatgaagatgctataaaatcttaaaagtggacccccaaatatgtttacctatagctatgtatataggacatagataatatttcatgaaatattactaaaatcaaatttcaaatatggcacattaaacactgtttttcttctatttatatagttcaaaacaaccaaggtgattatccttcaactttctaagccagtgtttgggcatcctgtagaattaattataggttccatttgcaatgatggagccaaggacaaagtattgaaccttattgaagttcttaaggctcttgctatagaaatatttttcaattcatactctttcatcattttaaaatgcaaaatacctttgggaactgttaatgattaatccaaaattttttaatactccacaaaaacctggatctgtagcaatgcagtacagtagctcccatgggacttagggtccgcaaataagaactgcaattgcagctctgttgcaaacagctgtgtgatcctactcaggataattaaagtaagttgtcagttgtttaaacaaaaagtggggatgataaaggaaactcatttgacgttggtagtatggatttgagagattatgtacttgtgaggtctttgaggtatataccagctttacagagagtcctataaatggtagtttaagaaaaaaaagatcactgatgtacagcatgcacgcagaatgtgcaaaaattatacattcacagtttgataaattaaaaaaaatcttttaacaatttttaaaggttactttccatttatagttactacaaaatgttggctatattctcacgttagacactacatcttacatctgatagtttgtgcctctgagtctgccacccctgtgttgtccccaacactggtaaccactagtttgttcactgtatctgtgagtgtgctgcttttttgttatattcagtagtttggtgtattgtttggattaccatgtaagtgatatcatacagcatttgtcttggtctgacttatttcacttaccatacatttgataaattctaacaaagaggatacactcaaaaa

SEQ ID NO: 30365 - DNA, 1384 bp, Bovine  19866880675418
  misc_feature (1)..(1): n is a, c, g, or t
ntttaaaaattcacatgggtgttactcgtcactcccagttggaaatactgaggaggtttcaaagcactgatttgggatgaagactgtaacagtctcttagtaactgtcacgcataaaatccaccaatggtatttattattttaactgatactagacgaaggtacagaaatcccggtgcttaaatttctcagtttatggaatccttatgttaattcttatgttaaatactttcattccaaacatatcaatacatctgaaaaattcttaagtgctatcagtgagttgggtaaaccagaagtgaccaattagatgggaacgtacaaataaattgttctgttcgccccaaacataaatgcagctgactctccttagtgacagagtataaatagatcatgttatataaggcacattgagttttttttaaccttccaaagaattagcattgcacatagcattactatttaagaatttcctccacacagaacatggtgtttgaaaatctacccccactaactctcaccagaaccaggagagcaaacaaaagattgagaatgtgcatcttgaggagtcctggtttatgaacatagactggtgtaggctttgtcacgaatatttgaacaatgctgaaagtaggtatctggttatttaaatttctatttaacagagttagcagcaacagcagcagcataaatcttagttacctgtcaccaaagtaaggtggagaagggagaaggcaatggcacaccacttcagtattcttgccttgagaacgtcatgaacagtatgaaaaggcaaaaagatatgacacggaaagataaaccccccaagttggtagatgcccaatatactactggagaagagtggacaaataaatccagaaagaatgaaaaacagagccaaagtgaaaacaacacccagttgtggatgtgactggtgatggaagtaaagtccgatgctgtaaagaacaatattatataggaacctggaatgtcagatccataaatcaaggtaaattagaagtggtcaaataggagatggcaagagtgaacattgacattttaggaatcagtgaactaaaatggacttgaatgggcaaatttaattcagatgactactgtgggcaagaatcctttagaagaaatggagtagccgttatagtcaacaaaagaatccaaaaggcagtacttgggtgaatctcaaaaatgacagaatgatctctgttcgttccaagataaatcattcaatatcacaataatccaagactatgcccaaaccagtaaagctgaagaagctgaagttgaatgggttctataaagacctacaagaccttctagaactaaaaccccaaaaagatgtccttttcatcataggggactggaattta

SEQ ID NO: 30366 - DNA, 1249 bp, Bovine  19866880740094
  misc_feature (1)..(1): n is a, c, g, or t
naaatgatagtaggaagtaggatggtattgtatcaccgaatactctgttatttcatgagtccctgtttataaaaggcacagtaagctattgcctataggatttaaaattgcttaaaatcttgtgcaggaaatctgacttttctgttgaagaggaagcttattagagaataagaataaaagaacagaattcttttttgaatggaaactctattcttaatatattgcattattttatttaaaaaatttttggtttttcaatgaacaaatgtttactgatttctgattttgtgtaaaacattgccttaaaccccaggggtggggttgctgagatgaatactaatttctgccactgaagagttgccagtgtgttgattacatgtatggcatgtgacagtcatgtgagggacagaaatgccagagaagcatgtggatgactctgaaaagttggggaaactgcatagaggaaatgacctttgacccaactcttaaactgtgaatagtaatttgcacttttcccaggaagaaagatgcttttttaaacttgcttctgactctcattgactgtgctagctcatgactgctagccttagcaatggatgctaaattatatagcgataaggaggaagaagagatcagaggtattttgctaaaaatgtctcattttatagaagaatctgatagaatggaaaaaaagaaggaaaaatatttgcttaatattatttcttcatatagaaagaacaatatcttcctacagaaaagctaccttgggagtcaattgaaaataaacaataatcttggggcatgaattagaagacatattcctactctagatctgctagcaatcttgaaagaatgtgataactgccttattattaaacaatgtcattccagggtgaaattactgcaataaaaaataagtttgattttagagaaacttattttattatggaataacacaaaatatgtagcacaaacttcacagatatatttatgaacctattaaaatgaaacactcatttttgccctaattatttcccatgaattctatagtcatttaggtgagtaaacacagttaaattatgaaaaaatgtgaaaattgatttgtataatggatgttgaaagcattgtgcttttgacacagacttatggatgaaattacttgtcctggaagtaaattataatcagtgttgataatttatgttagctctattccctccaaataattacatttaatcacagtagaaatcat

SEQ ID NO: 30367 - DNA, 3132 bp, Bovine  19866880791412
  misc_feature (1)..(1): n is a, c, g, or t
nttgatgtgggtggcatgggatatgggtgtttggagtgtgtttgatgagaggaggttgaaggtggaaaagggttaggagacagcttagcgtttcttttaaactattatgtttgtatttgcaagaaactttcttactcaacaactcaagtgccatgataggtttgttttcctctttttaaaatgtcagaagaggacagaaagcaatggtatcttgctttggggtttttgttttgtttcatttattccttcgggaattactttttttaataaagatcaacaaatattaatagggtaggggaagttgtttttccttcataacatgttgaagattaataaaagattaatataattatgcaattttgatgcaatattttaacatgaggatatttatccaatattccttgtcctattcagctcttctatgttaaaagcagtcactagtttagggaaaaactatgaatctcacagttcttatctctagatctagactgtccactttaacgcaccttacttatgtttcattgcttacattgccatttggaattatttttactaatataaatgatcccagagagtgcggaaagcatttgtgtagatgtatttaaaggcataccccattaaactatagagtgtctcataaaaaatatgctttaaaagacttgcaatccattaatcacggaccctcctgagggattcagggaagtgctaacaaattttaccttgaacattttcataactggaatcaattatagcacattcaagtaaagtcttaccatatcttctccttctccaggtagtgcacttatttttaaaaactaactgcacaaatagattataattttaaaaattctctaagctttccagactcctccattcttccagcatcccactaccaagtctaaattcagcaatcagacggtgattgattgcactttacctaagagggaaaaaaagattcccttattcatgcaaagcaaagcactccagtttccatctgtttgagatgaaacattttctagcagcaacccggcagaatccaagagggcttaaaagatatgtgtaggcatgtttgtgtgcatttatgtgagtgtggtttgtgtgtgagagaccagcacatggactgactataaagtgtgtcctttagccccacagaagcattagtgagcatatttaacaaggcaatcacaggcagagaattacaagcacgacttcaggattcaacagtgtatctcatgatttttttttttttaagataaatagcagttgcttctgaaatcaaggtgtatccagaacctcaagatgaattcagtcatcaaagcatactaacctaccccatcacagcccccagacatgctctctctgttgcagacaccagctgaagatttttaatgcacagtgcagttgtgggaactcaaatcagaaaggtcaaatttatcagatgataaacaagaggaaagtaattcaaactatactggaaatataaagcctatagaaaaaaacaacccaattttatgttgagcaatattatcacctgagagcatttcaacttgtattcttttacaggagaaattaagacacttatatttctgaatggagaaatggaagggaaagtggagaatggatggtccaggtttccattgcttccaatgaggtgtcatatcccagtgaggtcatttcctgacttcaaagcatttatctgaactgcctcagtcagccctagtggttataacctgatgtttcttgcaagagacattgatctctacttgttctacttttcagctgcacaagccggcaatgaagaaaagtccgggtctctctgactacctttgggcctggaccctctttctgagcacattgactggaagaaggtggggaccctttattttaaatctgcatgagaatttctgtaacttttcatttattctttcagagtgaagaaaattaaccttggataaattcatgactaagggaattaaaaaaacttaactgcaataaaattccagctaataaagtggaacagtatgaaaaaataatcatcttatttgcatgttagtcagaatacacttaacacgcttttgttaaggaatgtgttaattcaccatttaattcttaaattgaacttttcattgctcagttgtaactgaacaaaacatgcagtttcctaattgataaaaaaagttaccccaattaatatctgcatactatgtaagttggttttccaacaagaaaatttctaactagttgccaagatcatagagtaacttctgactatgtgcaaggagaaactttagaataatatttttaatttgaatgttataattctttataaatgcatgtgcattttgttttgaatctattacttgtataactaatagaagtagagtatactagacacatttaagaacagaagataaaactgaacttctctatttaagtttactgtggatacaagttatgagaaaaatgtaataatatgattaactatattcaaaatattagctaatgatcccatcgagcatatagatacattataatagcaaagatataaatgaccaagtatttcagattctcctttatctgcttttatatttctagtgtaatctattcctgtggccaaagtcttagccatactataaaaatccaaagattctccataatgtaatgaaaagtgaatccttacaagttaaggcagagagatggaatagtctggaaatataaggacttaggaggatttttttcaattgagttgtccatttttaatgtttgttattgtgcatggtgaataatgactgccagatgaacaggaaatgtattattgtcagatactcttaatctgaggagtaaaaggttcctcactgcttttgaaaaattatatgaagtgttactattgtgatgacctgtagatggagttagtgcacagttttttattatatagtggctcatacggaatcaaaatcaagtactgtatctgacatttctctacaaattataaattatatattcagtttaggagacattacattggcatgagtgtttaatagcaaataaataatcttgatctttatcttaggcttattctctgacaattacatagtaaagagaattaaagataagtataacctattaagaaaa

SEQ ID NO: 30368 - DNA, 1482 bp, Bovine  19866880809084
  misc_feature (1)..(1): n is a, c, g, or t
nttgcaaagaattggacatgactgagtcatgcacacatccccacacatgtattttcaaaggtcacaaaaatataactttataacaaaaatatgttcgtctgaagacctagttcaaatgagttgaaaattgtatttttcacaaaagataaattctaagtatttttgagaattattttgtttgtcaaaacatgtgattatgttacaacctgtctgtacttaacatagacacataactattatattgcccaaaggtcatatactaacatatatctagaaaggaagaagaactaatatttatcaaaataccatttaacagtgtcttatttgacaagtacagtaaaaataagaggagaaattcatgagaaaaagggcaagaaaagtgattttgaatatagtcattgatctgatatcgagacaaaaggaaagaccaacttccttacctcaacatttttaaaatatggattactgagaaggatatgatctcaaatccttggagaaagcacagagttatcattccctaagtctattattttaaaggtataatttattaataagatggaatttaagatctcaggtcttcatacagactatcttctaatagttcgaatatagtaacatcattaggctgtcctttggaactcgtataaacaaattggattcaaatcatctcaaagtacttttttccttgcaagtggactcttttttcctatgaaaaattatatttctaaacctggctccacttataatatttcaaggcaatgaaaaggagacttttgtttctgaaaggctaagtcaaagtataaaaataaaaaccaaaagtaaccaaacctaacaatataaaccttgtaagcatcaagaaataaatacagatgattgcatagaacacgcacattttatttatttatgtcaaaacttggcaattgccttttataatatagaggaacaaacataaattacgtatttggaatttatacagcacaatggtatattttgattacaaggccattttttctttcaaataccatgacatttaaaaatgcctattcagttgtaatcaaaataacattatttgggtaagctggacattgaaatagcaatccaatatggcaaagctgaaatgagattaagtgcttggatatttcatgtgattctaaattgtatgttttaaagtacacattgtttttcacaggaaactggttagaatgaatgtgaaaactttattgctttgaatttgaccttgaaatttataataatgataaagaaattcagacatttaaaatctagtactcatacctgaagagactaaatctaaatcttcagaaagtgttctacagattaataacctttctgtttttaaggcatttggaagtggactttatatttttagattttgagaagaaattctccagtgcttctttcccgcttatatgggatctttccatattggttttatatgatatgctatttaggcattagaaagta

SEQ ID NO: 30369 - DNA, 2108 bp, Bovine  19866880876350
  misc_feature (1)..(1): n is a, c, g, or t
nattatacttttcctatgaaactctttaatgcttttatcaggtaataccttgtaagtcatattctaaaattcaatagccatattagcatgtagaaatctcagcaagggttggagaaactcagggacttcacagagattgaagtgtgtattttatccaaaagagtaatcaggtatgtgcagaaatccaatagacttagtttattgaacattgattcattgattcattcattcattcattatttgtgccctaggactctgctggctttgaggttgcagagatgattaatacttgattctagttttgtgtttttttaagccctcaagtagggcattgtgaactgattttaaaatagaatggtaattatccttttcaaatgaatacttagtccttcatttagtcattcaaatgagggtgagagagcaattacattgaagccatgagccgctaagggagaaaacacgtcacgagatgtatgtaagtcctttattcataatatatagctttctgtagttcatagattacatttgagttacacatttaattgtcataataatcttttgatagatcaaagatatattaaaagccccatttatagttaatggaactgaagtaaagaagttatgtaaatttatgtcctagaaatagttaggaaattctggagcctgggactccagtgctcaatttataacaaccactgtttctccaaagtaaggagactcgtctgatgatccagaatttctaaaattaggggacgacagaggatgagatggctggatggcatcaccgactcaatggacgtgagtttgagtgaactccgggtagttgctgatggacagggaggcctggtgtgctgtgattcatggggtcgcaaaaaagtcggacacgactgagccactgaactgaactgaactgagtgaaatactaactgaacttatattgtttgataggtagaaaggtatatgcaatgtctcaatataaatgatacctccagtaggaagcgcaccttgattagacagatacagattttcatataaactcttataattactactgtaattaattgaccattttttgcaattgtatttatttcccaccaaaagcaatcctgagtaccctcttttagaaagacaaattacttactaaataattattccttaccatctttcttcctgagtgagtgaaagtcactcagagtcatgtctgactctttgcaaccccatggactgtatagaattctccagacaagaatactggagtggggagccttttctttctctaggggatcttcccaacccagggatcaaacccaggtctccctcattgcagacagatcctttaccagttaagccacaagggaagctcttttcctgagtaatatatagcaaatttcaaaagaatgtgctctcttcacttttgtacttattgtggtgcccagtgcatagtatgggctgagttagaatggatttagtaaattaatatttgccaatatgtgaatttgacacaagtttgagcaagctccgtgagttgatgatgggcagggaagcatggagtgctgcagtccatgaggtcacagattcagacatgactgagtgactgaactgaactgaatttgtaaatagtatatgtttatagtatttggttggatatattttcttgtgaatactcaagtgtttgcttatctcccaattccatttaggtacaaaataaccaatttttttttttttttttttatcttctcaatttcacaggattataccttgacaatgtactttcagcaagcttggagagataagaggctgtcctataacgtaatacctttaaacttgactctggacaacagagtggcagaccaactatgggtgcctgatacttacttcttgaacgataagaagtcatttgtgcatggagtgaccgtcaagaaccgtatgatccgcctgcatccagatgggacagtcctttatggcctcaggtctgtagtgaccgtttcaaaattgaacttttcctgagcacaatactttctgctctttattgaaggggaatattgtgctattttcctgagtcctcctttaattctgctgataagcagttaaacctcctattcaataga

SEQ ID NO: 30370 - DNA, 1590 bp, Bovine  19866880903026
  misc_feature (1)..(1): n is a, c, g, or t
nttatataatgtcaaattaaatgtttgtagagacagtctattataaatgaaataataatgaagtcactttcctacaggtaaagatcacaaatactagtattttacatcctccaagcaactgctgaaaaatgcaattacttttccaacttatttaaatattgagagctgtgaaatatacattgtaataaacttgcctttgatttttgcagataggtaatgtcataagtgaggttgtgagcaatattagaggataataaatcagattttaatactttttatacatttatttctctgaaagtacattttattcatgttaattaaagagaatcaataatagagtgctgagaaaatggctttataaagcacatttggttagtgttgaacaaacattctgtcagggtactgaacaagaaggaatggagtcaaatatgtcactctagatgctgctttccccaaatattgttcttccatcttgttcccacttactctactcggcctatggggtgaaataaacatagaggtaaatgtggagttactgcaggagaggaatactctataacttgaataaatggactctttttcttattcactacttttcttttactatggatgtcacatttcgttggtccagcctacggctaatgtgtcatcatgatgaatgccacccagtgctatgagacaatagtctagtgaaatgagggcttcatgatgagctgtagttcatttctgatttttgcatagattggttgagtgaccttgagtaaattgggtcatgtcagcatattggagtttttggcagcatccttgcttgcctcatatataatgaatgtattgcatgtggtaacctttcaatatgaataatcaaagttattaataagacagtaacgatattgtactatcttataactaatgttgctaggttactaaatttatctcaatagctagtttctttattgagattataggaatgcttttctacttgtgtgttgtataatttctttaaaatatttgaaaatatcatttttctttatgaaggtataattgaaagataaattataaagtattttaagtatataatatgatgctttgatatatgtatacactgtgaaaagattcctccctactgagttaattaacatatccatcatctcacatatttattaataaagtagaaagaggatatctttgatagggaatgccccattcttcttcagaagctctaactaaaataaataaactgtaaagggaaaaactggtaatttccaaagaggaaaacaggataacatgagagatattagaaacttatagaaagcctaaaaattagagttggatttagttgcaagtcatgtccaactcaggactgcagcctgccaggctcctccgtccatggaattcgccaagcaagaatactctagtaggttgctatttccttttccaggagatctttctgattcagggactgaatgtaggtcttttagtctcctgcattggcattcgagtcctttaccactagtgcttcctgggaaggccctgattagttgccaggcagtgatgcacaatcctatatgataggctttctttgggatggaa

SEQ ID NO: 30371 - DNA, 708 bp, Bovine  19866880904298
  misc_feature (1)..(1): n is a, c, g, or t
natgactgtgacatcaccctccggaacttttggagtcaagacccatgttttgttagaagcataatcttcatagtcatcatcagatttttgtctagtgaggctaagaaaaaaaaaaattgatcaagaatcacatagactccatccaagttgacttttagtcacagacctttggtggaaaatgagaaacgaagtagggtgatgggagtgtgttacaatggattgcagggaaattctcagccgagggttagtctagctaattaaacttcacagaggtagattaaaatctattcaggtgtactctttggttttacagaatgctctgtcctcccatctataaatatactacgctctaccagttatctttgccttttcttttgttgatgttcttcctgtccacctgcccaacttcacaaagcacttattaagaaaaaaatcacaagcattttgttgaaagcaatgcttaaatgatcataatctagtctaggcgttcaggcataatgtctacttctttctcctttgagaagttaacttgttccaacctattaatgaaataagaggctgataattagattcattcccacacaccaccagacaaatctcttcctcctcaactgaactactaaggagagcgtcagtcttgctgcattttcttcccccggggtgtgtgtatgtgtacttttctcccctcccttgcactggaagcaaggg

SEQ ID NO: 30372 - DNA, 1335 bp, Bovine  19866880967303
  misc_feature (1)..(1): n is a, c, g, or t
ntctcctctgtcactttcatcaagaacctctttagttcttcctcactttctgccataagggtggtgtcatctgcatatctgaggttattgatatttctcccggcaatcttgattccagcttgggcttcctccagcccagtgtttctcatgacgtactctgcatataagttaaataagcagggtgatgatatacagccttgatgtactccttttcctatttggaaccagtctgttgttctatgcccagttctaactgttgcttcctgacctgcatacagatttctcaagaggcaggtcaggtggtctggtattcccatttatttcagaattttacacagtttattgtgatccacacagtcaaaggctatggtatagtcaataaaacagaaatagatgttttatcagttcccccaaacgttttatgctctagagaaaaatattactcttatcatagaaagggagatgtggaactgattacagatgcatgttgatagaaataaccttcatatcaagttggaagtgctggtagacagagatcagccacattctaccatgtgacaatgtttctgttattgccttgcactgtgatttaagtgttgcatttttttccctagctgttcaggtatttgtctcccaaaatagatgagatgtgttttgatatcagcattgtgctttgcacatctttccatctgcaatggtactttgcacaaaagattctcaaatacaggctgattaactgaaggatagagaaatctaaactcacaagacattatttcccaaattcccccaccttcttgccacatttcagtgacactaggttatgtttttgcttactatttttcataaatcaatgtcttttaaatctagcttgtccttgtgcttagtcactaattcatgtcctcctcttgcaaccccatggactgtagtccaccaggctcctctgtccatggaattctccaggcaagaacactggagtggtttgccatgcccccatccaggggatcttcccaacccagggatcgaatccacatctcttacatttcccacattggcaggcaggttctttaccagtagcgccacgtggcaggcccaaaaacccactagtgaagtctctcagtcatgtctgcctctttgcgagcccatggactatagcctaccaggctcctccatccatgggattttctaggcaagagtactggagtgggttgccatttccttctccaggagatcttcctgacccagggattgaacccgggtctctcgcattgtaggcagacgcgttactgtctagccaccagggaagtccccccaccaaaaaaaaaaaaaacccactag

SEQ ID NO: 30373 - DNA, 2008 bp, Bovine  19866881117319
  misc_feature (1)..(1): n is a, c, g, or t
ngcagggagctgaaacattgtccaatgctgctgctgctgctgttaagtcgcttcagtcgtgtccgaacctgcgcgaccccatagacagcaggaatataaattgatggttatgtagtgagctcaaaatattttcaatttctaaacaggaccatttcaaagtggggttttaagaaatactttattataatgactaatgctagccaattcagaccccatatagtgactgcctctgtggattaatagcagcaaagtagcttgaaggaggcaataaacctccttcataagttacaagcacacagaactgggtccagtgaatattattctgagttcctattattctgagttccttagtagacagcatttctttttttttcccatggagtgcagcctaccaggctcctctgtccatgggattttccaggcaagagtactggagtgggtgccatagtattgtctacaaggcgataaatgctacagtacacctccttgcaatgtgtatattttttctgaaggtctagttcctttagagttctgcatagctaatggttttgtgcaccatctggtcttaaaatctttcatttggttttatttatttttttttttttttaactttacaatattgtattggttttgtagacagcatttccattgaaaatatgggcagtgccatattaaacaaattgttgtaataggaatccctaacaaaataccacctacaattcttcactattgattccctcttccatttaaaaaaaaaaaaaattagtcactcttacaatccactctttacaaagtatcagttgtcttcttaaaccacaaagtaacattatttcacttcattatcccaaagcttcttattacattagaacaaagggtcacctgcttctataaagagctctttaagtgtggaccctcttacctctagagtgccatcttataccatgatcatcagcatcaccaagttccagatgcatggactttcttaaacaaagagcatttattctcatctttgctttattctttcttttatgctttagatctttgctttattctttcttttatgctttagatctttgctttattcttccctctccttgaaatgtctttgcctggatctgttcatccttgaatttttctcaccttctaggtcacaagtcaaatgccatctcttctttcagagcatttataatgatctgacattaactagtgtaattcgtgcatatatgcttatacacaactatgtataattctatctacctacctacctgtttatctgtctatgtttctaacctatttacctaaaatatgtgctacctaagactatgagatatgctgcagaagaacaggaacaactgcacttttgttaaccagtgtattaactgttatctagaaaagtgccttcctagcacatagaaaactctcaataaacatttgttgactaaattaacgtacccagaaaatacatctatttgactttcactccaacagaatggagttgactgtgcacgtattatttcttcactgaagaagtaataaaatagtctaagagaccttaagggattgcctaaaatcacatagcttgttctctaggaaaatctgagttaaaatccaagtgttttgactcttaatccaatgtgcttactacttactatactacactgcttttctgatttttgcctcaagcgctaatcatctttttgaattatcacttcaaaacatctgttacttcaatacttatcagcgggatatcaacattgtaggaaatccctagtaaaaacagatctactgctgtctagctgttacagaggttataaccgtgtatgtgcatatgtgtatgcatatatgtgtgtttgtgaatatatgtgtgcacatatatgtaatataaataatatgtatatgttgtatgtgaaacatatctttgaaaggggtgcttgtttaaagaatgattttaatcatcataaacaatttacactgatgtactgtcttagatatccttatcactgtaaca

SEQ ID NO: 30374 - DNA, 872 bp, Bovine  19866881192507
  misc_feature (1)..(1): n is a, c, g, or t
ntttaataatttttttaaagaaaatactatatcttgttgctcttcacactctatgatgaggaaaattgatttcatggttcaaatagcaggcctaccagctataagaattaaaaaggtcattcaaaaataaaccaagttgtacaaagttcccagggtacaagatctgtggatcttatggatgcagatttttgtaatttaaatatgcaaattctctcagagttcctttcctaaagtgagttttatcactctaaggatgacattgcttgagtgatacagaggatagcggtaggaaggtttaagactaaacatccaggctactacatactagctgtgtattgtttttaaataaactaagtacctttatctttctgtgacctaatttctgatctttggttgtttggttatttttttctttttcctccctcacgcaccctcctgcccatatataaaacaaggggctgagctgaatgaccttaaagtcaatatggagtaatgaaaagacatgggcttagggatctggcaaatggggttccaattgtacaatggatataatacaattactatggggattaattagtaaatgtacataaagtgactattattatggataatccttaatgggaagtgggtgaatgatctttccagtttgcttgctttttattgctatttttgttgcttttaatctgttttctttcccatctctcttactttataattcttttttcaaatgatatcgaacctctagcatggtctccttgaagctttcaataagtagagatccatatgtacaatactctttatattgtaaagtaaaaattcatataatttaagggagatcactgatggtgattgcagccagaaattaaaagaca

SEQ ID NO: 30375 - DNA, 822 bp, Bovine  19866881235333
  misc_feature (1)..(1): n is a, c, g, or t
nccatgggtcacaaagagtcggacacgactgagtgacttcagtttcttttcttttttctttgtgtgattggggcagcaggggagagagtacatgttacaggcttttcctatttcttagttgtctcaaatgtaaaatgagggtgtctttaaatttcctctcagacctaaaaattctaagacctaaatcaggggttggcaaactgaccaagtccagccctgccttctgtttttatgaataaagttttattggaacacatccatgatcattagtttaaatattgtctatgcttactttcaggctacaactacagaattgagtagcctctgaagtaggtctcttttcatcctcaacattttttttaagtctgatgaggaaattgagacaaaggtcaactcacttgcccaggtttatagggcaagtaatgggagagccaagactcacattcagtcattctgcttgcagagttagcaattctaactagagcactgagctaccctgatttgggaaggccacaataaaaatgaatgttgaatccttctgatcatagtgactatgctgtgtttattttgtctttagtagcagggttaacattaacaggaacgcatgtggaagcatgaatggaggagagggaaggtgtcagcaggttcaacaaagttgttaggaaataacaccaagaataaaatatggcctgcttattttttcaccatcacatgcagtcctaaaaggtagttacatgttcttttccttttttttctcttatggtgcaaatcacagacacgttcacaaacaaatttacaactaagatgctgacttagtcttca

SEQ ID NO: 30376 - DNA, 1018 bp, Bovine  19866881539096
  misc_feature (1)..(1): n is a, c, g, or t
ngaaaattctttgatgctggacatatgttcgaaggatagaatgccaacgtgagtaagtggaggtcactaacattattgacttaacacctacataaaattttaggagggcttttcttcacagccatcattccattttcacacctcagatcccaacgccgtcttgtcagtgattattgtttgaaagcaaaatggcaaattgaagtttcagaaaagagtatttcttttctgcaagttttctggaagagaagacaatggaggattttatagctatgcaatttcttaggctgtaggtttcaccacagagttccagacaggtggtgtttgtattattaattactatataatctcttgtaatacaccactttacattcattccattatattgactttgatttttggtgcctttgaagatatgaattgaaatattcaacaacgactgtatgtttcctatgtgtatttgacaatgatgacctttaatctcagttgattattactgaaataaagaagaaaaatgaatttcataaatgattttcataaaaatcttttaatttcatggctgcagtccccatctgcagtgattttggagcccaaggtaaaattgctcatgaaggtaagctagaaaccaaaatgaaatgttggtatgttaaaatattgattcctatatgggaatcaagacaacaatactcagcagtatactgcttatggtatactttagagaagttattgaactaatataaaaacccacataaaacttatgaatttaattaaatgtgtaagttgcttattctgtaaactggaaatatttgactaatggtttgaatttagtagttgtattcatagaaaaagatgaacgtttattttttcaataatatgtatgcagactttagttcaagcattgaattgtaagttggcattgcttaatttacttatagaaatgattaaaaactttatgagtaaaaatcaaagtgaaaaaatataaattgaaggctttattgccagaaaaatggaaaaatttagg

SEQ ID NO: 30377 - DNA, 1239 bp, Bovine  19866881579171
  misc_feature (1)..(1): n is a, c, g, or t
naggtttttgagaatacatgtggagtcctgaaaaattacacttcattttaaaaatatttcaataaatggtagtgattcttattagtgttattaatcataataaaatatatcctggtaataggtcaaagatataatgcaattatatcttggtttccattgactttttaattaaactatttgtttacaaactatcaaatgcttaaaagaacaaagagaatccatatacactttgatactattgattccacatcacattaattcaaaaggactgtccctgattatatacattcttatatggcaaatcctagtagcgtattttaaatgatattcatttatactaaacaaaaacaagaacaaaatattttatttttttttaaaaaaggccttctgccatttctcaactactgaaaataattacaaactcctcaaggacaggaatcacgtatgtctctctctccctccagctccctttctgagtctttctcattctccctctaacagcagaagcagcatttaatttaatcaggttttgttcttgccatgattgcattatgcactaaaacaacaacaaaacaggaaaaccagagctccagaactgtggctattttttaaaatgagagcataaacacttaagaggtattatacccaaatctgggaattttacaaccaggacacatttctaacatttgccactttgactaaagcatcctatttaagaaagtttcatttctacctacgtggtctacctggtgatgatgatcatattctgttagtaaaataacaagataaaaccattttaaaacatggttctcaaaactggctcattaaatagaaaattggtttccaaaacctaaaatctcaaacaaagcatctaaaaaatccaaaggaaataaagaaactctatttttcatatggtctataattccacagatctttcacctgtaagcttggcaagtgcttaaaatattatgacttttagaacaaaggtatcattctctaatgaattcccttagaaaaatggtttgccatacaggcatactaatgggattcaagtaatgagcattcttccaacacacaagccagatgcaaatttacacagcctagcagatcagccctaccaatgtccagagagagtactggcttagtagtgctggaaagaggaatggtgtacacaactgatagatgagagaacatttcaagagattttcagcttattaacttacactctcatttggcaaa

SEQ ID NO: 30378 - DNA, 941 bp, Bovine  19866881712335
  misc_feature (1)..(1): n is a, c, g, or t
nctggagtgggttgccatgccttcctccagaggatcttcctgacccagggattgaacccagggtctctcacattgcaggtggattctttactgtttgagccatcagggaagcccaataataatatgactattctctatcactggcacctagcatgatgtctcaggaagagtagatgctcagtagaaattattaagggacagtgcccaaataaagccatatacagtcaagcacttttctcttggaaaatattttgcatgaacagtgatgtcttttctcttagacaaaagattctcactaggattttggatacactattaaccctaagattaccataaattactttttacaaatggcctttggtcaataatcaggtcagaagaagggaccagagtctaaaccagtgacactgttttgcctaaaactcttaaataagccaacatttgaattgttctgtcacagaagcaaattagccataagtatgcaactgatttcctaagtgactagtggaaactgtacctaaccactttgagaagattaatatttaaactacattatgggagaattatccataagaaagagtggaatgatttacagggtagcaaaattaaaaggcagaatgacaaagctatttttcaagacaggaaatatagtttttaaactgagtactactaaagaactaaataataataaccataacaacattaaacactatcgaatgcttatgttaggcactgtgctaaggattttctagatcatatatcttttaatccccatgccaaaatttttgctacatgttattattatccacattttccagagtagaaaagtaacccagctaggtagcaacttaaactcaggctgtctgtccttagagattccacagatcccaaagtatctgacttcatctggaatagaaaacaaaattaggacaactccttaa

SEQ ID NO: 30379 - DNA, 857 bp, Bovine  19866881730445
  misc_feature (1)..(1): n is a, c, g, or t
nttctcttattcctggaaatcctgacctcagtactagaacagtccttattttggtccccattaacagattcaggattgtcttagaacaggtcttccatctgtgaaagaacatatgtaaaaatattctctaagtctgcatgcttccagaacaagaaaaagggtgttaaattctgctgtgtattcatatctctatagttattatagcaccctaaaacagaacccacaaacttatgactagcagattttttgtttagtcatttgagcccagaatggccttaaaaccaactaatggtcagggaagtgttgatttgatatcatagggtttaatatcacccctccccaaagtctcatactgagaataatgagtatttactgtctaataagagatacttccaaaagaaaacaatctgtttacttaaagcaggacaagaaaatttatcaaggcatcactgaactatttttcttcctagaaaaatcaaagcaaacctgtattgatatcagagttgatattgaatagcaccatttaattgattgcatcaattccttatgaaatttaatatgggagttagcctccatcttggtctttttgtccactcccagttcttgctggtttgtttttttgtgtgcggtaccatttcaattgcctctgttaagaaaaaggaaacaccaatgctgaggggcatcttgattcttgtaatagttgactgtgtaatgatcaaaagtctgtgtgttactttgttttatttctgatgccattcttatcttcaaagcattgctccataactagttgatacctacaaagaagttacattaacaactttcttgggaagttatcagaagatcacagttatagattt

SEQ ID NO: 30380 - DNA, 997 bp, Bovine  19866880433851
  misc_feature (1)..(1): n is a, c, g, or t
ntttcagcattactttactagcgtgtaagatgagtgcaattgtgtggtagtttgagcattctttggcattgcctttctttggtattggaatgaaaactgaccttttgcagtcctgtggccactgctgagttttccaaatttgctggcgtattgagtgcagcactttcacagcatcatctttcaggatttggaatagctcaactggaattccatcacctacactagctttgtttgtagtggtgctttctaaggcccacttgacttcccattccaggatgtctggctctaggtcagtgatcacaccatcgtgattatctgggtcgtgaagatcttttttgtacagttcttctgtgtattcttgccacctcttcttgatattttctgcttctgttcggtccataccatttgtgtcctttatcgagcccatctttgcatgaaatgttcccttggtatctctaattttcttgaagagatctctagtctttctgactgaacaatagcaacatgtattaatacatttgattgcctcttcacttatgctgtagaagtataataattttatacttatgcatatcattaaaaaacaaaacaattatttaatatttagtgtttcatttggattaaaatattgatgtttctttactggtccaataagtatatttttcctattgagtgagcttaaagaaaatgattctgcagaataatagtgttcagaattgtaggcgattaagggagaagttaactgttcaagatataactccataaagatttactgcttagttgaaattcacacttttaactagcaacagcagggtggctagggtaatgtcctgtgaagtattgatcatttatcaaaggaaaaacctcccgctttgttgtggtactgatgaatgtgtggagaataaatgcatttgggcattctagcttctttctgtaagactggctttttgatcacaaatatacaggcacaattctgacatcttcattaataaatttt

SEQ ID NO: 30381 - DNA, 1369 bp, Bovine  19866880446466
  misc_feature (1)..(1): n is a, c, g, or t
nctgtgtaattataatttgaacattttccatgtgtatgctgtacttcaataaaaatgctaatttgaaaaaaaaaggttcctgacactcccaccaacaactgctccatgccttacacataatatttactgtagtcaattaacacttttgcatggcactgcttaccagccttcaggcttttttaattatcttttatttaaaaacagattgttttatgattcattttgtcaggctctgcctcttgaaattttcttcttcaaatctttctaaatactaacttgacagtatctttcattttcaaatatgaacaaagttgttataaaacatttttatgtccactaaggtactggtttttaaaatcagggactttgatgaacagaatcataacataatttaagatatagttgtcagtgggaggataaactaatctaagggaagtagttatatagccttatgcttttttaatgaagccatatttcttgatgctttaagtccaaaatattttaaaataaaaatatgtaaaccattttatgttatattcagttgaattcatggtgaaataaaccttaaatttctattctttaaagttttaattaaaaaaattaagttgtatgccaaatcatgcaaaaaatgtacatctcgcccactcaatccacttaaaactgtactgatgctgtgctacttaaacttgcacacgagtaaacattatttgcccatctgtaacgtttctcttcagaaaggaaactgttaacgcacccaagtatctgatgcttcacgactgtagtcagcaagcagatgactgtagtgaatgaggcctcccgccttcttactccctttcccatccacaagcagcactcagtgcacacagacacactcaaaagaacaagtacaaagaaacaattatcacattgcaattccgtatccctcctcctttttgagtatagatctgcacgtataaaagggtctgcaagcccacatgccatatgttaagtaatcttggcttgcagaagcttgggtggagtgctcggtgtaatctgtagatgtgcatttatttaagcttcgcagcgttttatggttctacaaagctccgtgggattgccatcacactacaatcacagcaagaatgtgactgactacctcttttagacaaaactcgcacctcaaattcattttcgatcttttctaatattttgagatccactgcaggtatctgtgtttccaaccccaatctgtgggcctcgtgtatgtctgtgagcagttccatcctcaggcgcgagcaggagtttattctggtgtagcaatactgtcctcccatcatccagccggatcacatcctctgcaccatctgtttgggatatatcttcgctgcag

SEQ ID NO: 30382 - DNA, 3104 bp, Bovine  19866880639154
  misc_feature (1)..(1): n is a, c, g, or t
nctcaaatttctactcttagtaagcctaatactctacaagacttacagcattaaagttactcacaaaagaagaaaaaataagtacataaattttcttcaacccactgacatttcttaaagggttaaaaaaaccccaaatcattgaatgagatgaatttttcaggatcaaggttggacagatttctgttattctgctgatgaaacttcttgtctttaacaagtgtattgagcaaactacaattctactgtatatggagtgtgttaatagtgtataatttggcctgcagaccaaatgataaatatggaaatacaaacttctgaatttttatatgacacccagtggttttcatagtaattagctttgactaaaaattaaagataaggacactttcagctgttggtttccgatatacaaatgtaagaagattgttcacctgttttgaatgtctgtttaattctagatcaatgctattattcaactatgatcatcaaaggtactgttatttggcaggccctcaacatttctttatccaggtttctgagtaattacattggctttcattaacatgatcaaataccagctccctgcagaaaaatttgagtctacacacaccagttttcacttggcaacttgttctgataacaaaactgcccttcaaatctaaaagcaacagccaaatttcatggcattgaacaaaatgatttctagagtgaagtgacctgaagtgacgatcaatcctagctgaaattttttgaagagatgtcagaggtttttttgttgttgttattattttaggagtgagatctatcacaacctgtaatgttgaaccaaggagtatctgtgaaaagacagaaatctctaagagacctagtcttagaaagatcattaagattcaggctctaaagctagaccaagatttaaatcctttttccagcagtattgggcatatcattttatctcagagcttcagtatctttgcctgaaaaatataggtagttaattttacctgacagagtgtttgtgaggattaaaagatgtcatttactaagctttttcacaaggattcttccatagtaagtgctcattgatagaagaaactctcattaacaattattaactcagaaagtaggcatactattcaaaattagatagctcccaaaatatagtttttaagtgattataacattaacacctttctttttagtttgttgaattttatctcaaagcaagaattaaagtgaaatcacaaagaaacttgacatgaagaaactatgaaagaaaaacctgggcttgtttccgggaaaaacaacaacagttaagagaagagtcctaagaaaaacacatgtatttgtagtttgcaagtctgttatctgcatccatcgtattttggaacacaaatcatatgtgttgctaagttatctgagccttctacataccaccacctcctcctccataaaatataggttagctggcagtattaaagacagaattatagatttatttacacttcattaaccctttactctaaaaggattgataatggcttttgaagttctgtaaagtatagccagatgataaaaatttcacctagtctataataaagttaaataacaaggacaaaaggagagacaaaatgggcatgatctagagctgaaaatgagattactgcacaaaatacaataaatatctatttaattattaaaattcctagcagaccaaggatatcatctccagtttcatgatttatgatttcttatgacttcttttccaaatgacaaaacaaacttgtttcttaagaggagtacaactattcccagtcttaaaatgattagaaatttcccttgaactattttgcagagaagcctccttttaatgtattatgcagtgtcctcaatagctgcattagggctaacagagcttctgtttataaggctgtttcagtatcttttaatacaggttggtatgctcacactaatgtgtaattctgcaccagcagttctataagctagcagcagagtagatgcgtatagcatgggcttttaagactctgtgtaaatagtatttcttcctctctgttgagccatcagtaggcatttgagggcccagtttctggaccacaacagccagatccatgtcaacagacagctgagctgggaaaagggttttcttcctagaaaaattgagtggccttaacatacatcttttaagtagcctatttaattaaatttctatacatctactcttttacaaataagtgattcctgtgtgtgtgtttccccccaaccaggctttacatatttctacaaaggaaaggagtactggaaattcaacaaccagatactcaaggtagaacctggatatcccagatccatcctcaaggattttatgggctgtgatggaccaacagacagagagaaagaaggacacagcccaccagatgacgtagacattgtcatcaaactggacaacacagccagcactgtgaaagccatagctattgtcattccctgcatcttggccttatgcctacttgtcctggtttacactgtgttccagttcaagaggaaaggaacaccccgccacatactgtactgtaaacgctctatgcaagagtgggtgtgatggagggtttcttcctttctttcttttctaggagtttgtggtaacttgagattcaagacaagagctgttatgcggtttcctagctaggagcaggcttgtggcagcctgattcgggctgacctttcaaacccagagggttgttggccctgcacatgagtggaaatgcactcatggggaagcttccatgatgcacagtatctgctgttcttcagtcctctgtctttctttgtcattcagttctaggcctttcctctgcacgctcaatgcccagttaattttcaggattacctaaagaggaaaaagaagaaaagattattcttagaggtttctaatattatgttttgttttgttttctgacgtctgagcccatttctggggggagaaaagcaaaatggaaaacccacgaatttttgcttcatagcaaggaaaaagaaaaggctaaacaaaaaacccaccattaacttcaggaaagtgtaagacc

SEQ ID NO: 30383 - DNA, 1745 bp, Bovine  19866880647968
  misc_feature (1)..(1): n is a, c, g, or t
nactgatttagaaaaaaaaaaaaaaaagcaagttcttaaaaacaaagtaaagggaaaagtccagatcatttgtagccatgtgtaaaattagtttcacattttgcccctttattttaaagaaacagatctttcttctgtgttccaaaggccctgcatttggctgtttggttttagagagaaaatattttcatatgtgtggataattctccaagtgaaataatattttaaccgaaatattgagccaactactattgagaaaatttattacttgatgtaaaaacaaaaaagtaaaatcttgtaaatatggtcaatatagtatttggattgcacttaacagaaaatattacacttgcctaatagttagcacttttagggttttcaaataaagagaagggaaaacttagtggatattccaatcaaaatgaaagaagattctgaaacagaaagatcatttgcttagctctaaatccaggaagatgccaatttctgatttctaatgtcaataaggtttgtctatgtttcatgtagcttatacatgttatataggatggaagtaatcgattttgttgtttaaaggaacatttattattctttatttacagctacattttcagatataagtactgcaaattacaggatcaatattaagcattcaagataaaaatcaggtcctttgacctaaagctgcttcaggatgaagatttagtgtaagctaagtatctgtcctatacatatatgcaacttcatttatcttcatttagaatttagaatatgctgctgctaagttgcttcagtcatgtctgactttttgtgaccttatagactgtaacctgcaaatctcttctttccatgggtttctccaggcaagaatactggaatgggttgccacttcctcctccaggggatcttcccgacccaggaattgaaccatcatctcctacatcttctgcattgcaggcagattctttactgctgagccactggggaagcctgcaatttagaatctatgatggaattattccttgagttaatgtgggttatatgcatatgtttatgctagtaaccagttctatagagctttttccctttctattttcccggaagtgatcaagttctcccaggtctgggataatgtgttattttgtggccaacaccagcaactacattgtcccagatccttccctattacatttctacctcctcaagggaattaagctactacttaatgtctttattttcacctgattttctcacgcaggacacagttgattccttctgtagcaataaatctctgcatgcccctaccatttctcaaccaaatcactttgcaagtctcaactaacttaactattgacagctttctgttttaaattttctcctttcatcataaacttatgtaaatcactgtaatttccacctctgagataccagtttttcctttgatatcacacagaataaatggatttcctctttcagaatagcatactaagaatagaagttttagaaccagactgtgtctattaaattcccaatctgtgtctcttatgtctcctgcattggtaggcaggttctttaccgctagcaccagctgggaaggccttaatagctataagaccttaatcatccttatacttacttgctaatatcttgtttgaatcctggatcgtttcatcatgcttgtattagtttcttattgcctctgtaacaaattgccataaaatctagtggctagaaatgacacaatt

SEQ ID NO: 30384 - DNA, 932 bp, Bovine  19866880785107
  misc_feature (1)..(1): n is a, c, g, or t
nactttcttcagttgaaaaaaaaaagtgaaattcaagttgaagttcaacaactttttatatagtcacagtattgtaagcagttttacagattagctagtataccctgtatcattttttagatcagacaacacagtgaaactgtcagataattacataagaaacaggtttcctgccaccttaccagggatcattttgtggcatcatatttctacccatctgacacccaattttcccaagttccctcctacaatggaataatggtcattttaagactttgaggaaatttgtcatagcagtatagttccatttaatgctgagatgatccacttagcagttcgtaaaaatataaaatgtgcctacctgaggtgaacaactgttttgctctttaacaggaggccctagagcatgaataagggaacacatcacagtctttttccaaccagttttttcatttggatttcaatcatgctgaatcagtggcaattaccctcaaatagctatttcatgactcttggaaaacttttctttctatgtttcctcacagaaactgtccatgttagttgagaatctagtaactattctacaataggccccaaagaaggaataacacaggaaatgaatgtgtgtatacacagaggatgcgtatataagtgctcctttatatgaaacttgtgggaaactatgatattattcttattccacactttcccatctgacccctgcctataaatatcatgaactttcatttgcttttacatagcaggaccagagggagagagccctaaaatttctacagaatgttatgaattgcaaaatgctttagaaagcatggccatctcattctcacaaaattttggcggtgatcctttgccattttacagctggaaaacgaaaagcagttcaaaagcttaagcaactgtctaagacacta

SEQ ID NO: 30385 - DNA, 1970 bp, Bovine  19866880978904
  misc_feature (1)..(1): n is a, c, g, or t
ncaagtgaaaatctgagactgtgccaattcagaagccagaactgtggcatcttggagataaacatgtaagaaatgtggcagctgtcttaaaatacctagagtgtgtcaggttacaggacattaaacctagttcatgtagtctcaagagacagtactcagactaggcgaggttttggttcaatatttagtcaatatctttctaataactcgagctttttggaagtagaatcgactacatcagtaggaagtgaatgatccaccacacaattgtaccttcacaaaccaaagcttccctgaaagctcagttggtaaagaatctgcctgcaatgcagaagacttggttttattcctgagtcaggaagatcccctggagaagggataggctacccactccagtattcttgggcttcccttgtggctcagctggtaaagaatctgcctgcaatgtgggagacctgggttcaatccctgagttgggaagattcccctggcgaagggaaagattacccactctagtatgctggcctggagaattccatggactgtatagtccatggggtcacaaatagttggacatgactgagcgactttcactttcacttcaaaccaagggtatattttctagaaacatttctggagaagacgttcttagatgttctctaagcctctttgaccgatcactcctatattacttttaagtagagcatgaatgacacatccatacatggcatccttattcattgattcatgctattctacttctcaggctttggggatgctgcattcttttagccgtgtacattagaagaattctgcaaattgcagaattttaagaaaaaaaggtatgttttgactgttactggtggtaattctataatgaaaaatatatcttattggtaccctgatgttaaagataacactgaactcaggacctcaaagtgaaatcgtgttaacacgatagcagcagcaatcattctcacagatccttgcaggatttccttctttccttgaaatatgagtgactaggattgccaatttgtgattgccaaaactacaccataaaattccttaaaaaaaaaagaaaaagaaaagtaagagggacaacgtctagtggctgagatggtaaagaatctgcctgcagtggaggagacccaggtttgatccctgggttgggaaaatcccctggagaagggaatggcaacccactccactattcttgcctgggaaatcccatggacagaagagtctgaccagctacagtccatagggtggcaaagagtcagatgcagctgaatggctaacactatcttttttgtccactaaaatctctaaagtattataagagggaggacctctgaaaatgcattttgtaataggtaggatctgttttgtttgaaatagctccagctcaaaatgttagcttctagaacatcagtgttcccatcaagagaaaaaaagaagctagataacacacacagatacacacaagcaacagaaaacaaggaaaaagctgtttgaaggccttggaagaacaagaaagctagacttaaaggattaagatgtcaggaagaaaggaaatatcttacggtgaatctcaaagtgtctgcccatccagaaaatgctggccaaggagaaaactgcatcgcagtgtcttccagtctcataagcctgagtagataaaaactaaagttccggactataaagacaggcaccacactaaaagacaagatttagaaaaaaaacaaattggtctatttttttccctcaagaaattctaccagttactacactgtgtacaagatgcttaaaacttgagcggaggtggacatatgagaggctaaaattgaccagggactgcagaagtcccacgttgaaagggggaataagaacaagaattcatgaccttccaaaaaaaacaggctctggtaatcaaacctaaattttcagttgagacttttaaggaccacacc

SEQ ID NO: 30386 - DNA, 1094 bp, Bovine  19866881105940
  misc_feature (1)..(1): n is a, c, g, or t
ntctgcctaaagctgatgcactgatattccatttaaagaataactgcctggagatttcagcggccagtctactggatctgaaaagttgaaatccctgcaggggacttgaggatatatatattgaatcttggaatctggggaccactctgcctcagtgaccctcattgccgtacagatgtgtgacaaaagagatgcgggttgtatggatgtatccgcctttttacattgcactgttggccaaagttgcatgcatcactgctgaatgaaaacgtcagataggatcacaatgctagcctcaggtttgtaccaattctcattaccctagtcttgtaaacttggtgtatatcccacaatatacagagtactaaattctgtaacaaagacaagtgcactatttatcagagacactataattttgagataaatgtattatactatgtcttataaaaattgactatatattttactgaggccattacagttcagagagtctattagtctttttccttgcagataatgatatttactggcaaaacaactcaccaaatgccttttgggtgacattttaagtttaaagaaactgaagatattttccccctattagttattattgggatctcttcatattaaggctgttttattctctcctccttctctctctccagccctctcttcctttattctttctctctctctttatttctgttacattcatccctcaatataactttttccctggttgaaatgcttcccttatgtcattgatttaatcttggtgagctaattatattcactaaatagataaaaatcaaatatgaaactagacaaaattttggcctagagttcagagctcattcaaaggaatcacacagattttcatttctgtttcaaaccatctgagattccatctagtagtcaccatagggggaaaaaatgcttattctaatgtaccaagtacattaatcccaaacattgtgcataaaaatataattagcctttgaatgatgccagttttccgaagagagaatctatgtttcttttggaaaacagttaaattagtgggagatgaggttcctgttaaaggtttctttatt

SEQ ID NO: 30387 - DNA, 1239 bp, Bovine  19866881302193
  misc_feature (1)..(1): n is a, c, g, or t
ngtgctgtattattactctatttacaaaacacgaacacacatacacacacatacacacacacacatttatcaagacgattaggttatagttttgcttccaactcatgtatcctagaaagaaaacatttttcagagcatttgaaatgcataagcacattgccaacagagcattctgccaattcctaagctaaaaccccaggctttcaaatatttgtttgttaaataagaatgaaacaagccattctgctacacctctgctgaaataattaaaataatatgagggtttttaacagagtatgttgactaaatcacagccagattaaaagcatttctattattaaaaagatatgtctttttctttttcttacattttcatcttctatttaggtttcatcactttaaaaacaaaccctgaataaaatagacaaggaagacacttaggtgacatcacatccttccacaggatttagaaatatgtttcaaaattttctatgaacactgggccaagtatgaatcttctgattttgttcacatgtgccatataaatgtatatattttaagttcactactttactgaaatatttttgaagagtcaattcacctaattctattgttgactgcacaaataagtatcaattttgtgattctgcattttaattttttcacatatgaatgataattactcaaatgaaattatgcatttcttatcactcttagaacacaaatatgaactcagatcactgttgtaaaataagcattgacgaaagtcaaacacatttacctttcacctttcatcaatagctataaataaatatatatgtgtatctatatgtatacacacatatatttataaaataggaagcttgttgtgtaaatacatgattatgtgaagagttaaacttatcactgcttttgcattttgcacatttggttgggttttactaaaagaaagtaggctagagaaggtaaaaacaggattgctttagagaaaaacaaaaaagaaatgcctccttttaaagatgaatgttaaagaaaacaccatattattgacccaaaataggttcttctgggaaaatgcttatgttaggtaaaaaaggaaaaaacataaattctaaatgaataattaaatttttatcatttctttactataatcactgctgcttgattatattttaatgatttataaaaataaactgacataatttgttagtaaatctctatacattgtgtatagagaat

SEQ ID NO: 30388 - DNA, 800 bp, Bovine  19866881410115
  misc_feature (1)..(1): n is a, c, g, or t
ngagacatgagacaggagtttgattcttgggtcaggaagatcccctggaggagggcatggcaacccactccagtattcttgcctggagaatcccatggacagaggagcctggagggctacagtccatggggtcgcagagtaccatgacgggagtgacttcacacacgcattcattgttagataaaaagatgaatgtaaatgatgcaaagtccttatcaccagtcccagcaccctggaagtatcatgatgaataataatattaacttagttaatagtaatatgatccctaaaacagttatatttatagaaatatggttatgcttttatataatagtgttgcaatttctgctctaaaatattcactttttgagacaaacaaaatgagtttcttttttgcaataattaatttaagaaacaaagaaattcactggcatgtcataatggcttggtaagagttttgcctattaagctttatgtgtttttgatgtaactctttacccactgacttctcacattagccaaatagctgactccagatgaaaatgtcatctctcttgagaacatattacattgcaagtgagaacttggaagtaacccaacactaatttttgtcaagataacctctttagtaaaatcttgtatctcatttcctaaaggtatgttataaaacagcatgctttctttggtggagtgcaagataaaaaggttctactttttaaaactgttataaaaatatgactatctctaccactcacccacatgacaaaatgggcattagtgtcttagaagaaatcatagag

SEQ ID NO: 30389 - DNA, 887 bp, Bovine  19866880566093
  misc_feature (1)..(1): n is a, c, g, or t
ntgtccatggcttatcacttccctaccagctgctacatgtacttaagtgaacagctgtcttctccatccctaggtgttgttgcgggcccgtgccattgaaacccagtgctacgtagtggcggcagcacagtgtggacgccaccatgagaagagagcaagttatggccatagcatggtggtagatccctggggaacagtggtggcccgctgctctgaaggaccaggcctttgccttgcccgaattgacctcaactatctgcaacagttgcgcaaacaactgcctgtgttccagcaccgcaggcctgacctctacggcaatctgggtcacccactgtcttaagacttttgacttctgtccactgagacctccattgtgagctggtggtgttgtgacttgtaggcgggacccaggcgcagcttccctcatttggagaaccttgtctcttgatggaacacaggctcagcttcttggaaaagaagaaactttcacctgagctcagatttcagtttcagaaaggtggaatttaatatagtcactgtttatttcatgaaaactgaagttatgctgagggctgagcagcactggcattgaaaaaaaatatataatcatcataaagtctgtgtctgaatatctcttttgggagctgaaaggggaggtggtattgtaccagctggactaggctccagttctaggcctcctggcttattcaacatgcctccctacctaaagaaaagtgcaacactcagtgcatgtcccagccccacgctcccaaacttgggagtgggagtgagggtagaggatggggaaagacaaggaagagaggcattgctaccgcatcacttcactctcacctgtgatgccctttgcccaagccagaagaaagcaa

SEQ ID NO: 30390 - DNA, 2138 bp, Bovine  19866880640000
  misc_feature (1)..(1): n is a, c, g, or t
nccgcctggttcctccccaagccttccgtcaggagatgctgcagcgccggcccccagccaggcctggccctctgcctactgccaaccacacagctcctcatggttcacactgactccttcttaatcatgaaactgactctttcccactttaatcatgaaactgaatcagaggggttatattttccccaccctcagctcctcactgctcttagagggatgtgaggaaatgaactttactgctgtgctaggggcaggggcctctcctcactgctggactggagctgggctcctctggccctggaggtctctctttctagggtcacctgccagggcttatgactgtgaatccttgatgtcatgacttatgtgatgactcctaggagtcccctgcccatggggtaggagcagggctggaccccaaatcccttcttcttccatggagagaagagtgatctggcttctcccgggacctctgtgaatatttattctatttatggttcccaggaagtgtgtttgaaggaagcccctccctgggtactttctgccagtaatggagtagctccctcttttggacctggctcagggggctgggattttgatatattttctaataaaggactttgtctcgcctccgctcctgctttctgcgtcccaggcactctttgcctatctttgctcacccacccccaccttctgcccttggatgacagaacagccaggccaagccaagctttagcaacttttattttcatgggtgagagaatccctgccaccaggggcaagaagaagtgggagctgaggatcaactgttgggttctgtgcccaagacacgggctgctgcctgacgcccgctctctatacagtcattgacagcaaccccctcataggaggccccagccagagtcaaaggcagcttctgagcagccaggaattgggcagctgactctgaaagggaagaaaaggaatattacagctggggtctattttcacggctcttctcagcccagctgctttctcaacttacccagtttttgccagtggcctaatgtatactgggggatagagttctggggagagaaaaagggatacagggaaaacattattattgatatcccaggcctgggtgctacattccgtggggtcacaaagagtcaaacatgacttagtaactgaacaacaacaggcctggatagacagtgcttccaagcctgcctctactaggtagctgaagagtgtttaccttgtgttaccaactcaccttgtgtagatggaccaagcagtgacttggtggctcattcagtcctaattgagtggcagcagctttctctgcctcctgttggagcagctcctgagataagacacagcccctggcttctagtgtctgtaaccaggaacctcccagcatcacctaaggagggaagatggcactgaccagcctggccttactgcactggggcagagaggagccctttggaaacccccactaagcatggctgccttctctcacagtcagtctgaggccaggcaggctcccatcctgctcagggaaagcaacggagtcatacacaattcccaggataactggatcttctgaggatggcaccaaatgtccaaatccctgaagaaaacaaagagaatgggtcaggacggaagggttccagttgagcccgtgtctgtctcgcctccttttctgagtcacacctggacaggcagacgagctcctcggtactgcagattcaccacagccacagacacagcagtgatggtgctcagggcacgggccagaggtgtggcctcagcagggagcagcttgctgagcactggaggagagagcagcctgcctcaggaggcgttcccagtgcagttttggccaccctccttaggataagatccccacagggatgagcagttcaagggcatggtatagtcccgttggcccaggaagaagctagggtgcctcaccctggctggggaaggggagggtggctatcccattacctgaagctggaatggcactaataatgtggtcagcctccaggctgctgtcctctagagacacctgaaaggatgaaaacattaaaagacagaaatcatgggaattgtgcctcagttttccagcacccaagggcaggagagag

SEQ ID NO: 30391 - DNA, 1113 bp, Bovine  19866880698901
  misc_feature (1)..(1): n is a, c, g, or t
natgcggccttgttcctttctccgacgtctatggagtcctgatcctcactttaagctgtacactgagggctaccaagttcccccaggagccacatacacagccatcgaggcgcccaaggtgaggcgggcagggggaaagactgtgtgcagtgggcgactggagacagatgtgcaattaaactctcgttcatcagtgaaagagaggacatgagagtgaatagaaaggattttgctggcagagaaaagtgttcttcccgttaatgaaggcaggcaaccttcttcggacagggagagtttggcgtgtacctggtgtctgatggtagcagccgcccttaccgatgcaagatcaaggctcctggttttgctcacctggtaagagccagcctcagtgattctaactcttcatacgtgaatccagtaatggttgagatctttatgaactttcattccttctcctccaccttgcttctcttgcctaatacttgctgtcttaatctctccaggctggtctggacaagatgtctaagggacacatgttggcggacgtcgttgccatcataggtacaaggcctgttgtgtagtggaggggttctagtcaaggggctttggaactctgatgggaacagaaaccaaacacctctgtttaatagactgcaggcatagacccagatcctcagtctcctgggcactgcagggactgctagatccttggtaacatcacttttttttctccttgccctgacctcctaggtacccaagatattgtgtttggagaagtagaccggtgagcgggggatcagtgtcggatctccctgccctctgtgcagcctctccatcgttgcaaatgggcctgtgcgtgcgtgcgtgtgtgtgtacacgtccatgaatgcttagctgtcaggctttctgtgcatgtactagaaaagggagaaatcacaataaattagccacgtctggccccacacccaaatttctggtttgtctttcccagtgtcttaccgtctttcactttaaagagaaacttagggcgtttgtcaaccatctacttctctgttagactcagtccttggcagtttttcctgttcatctccacccccgtttctgactcttgtt

SEQ ID NO: 30392 - DNA, 2763 bp, Bovine  19866880740508
  misc_feature (1)..(1): n is a, c, g, or t
ngagaaacatcataacctcagatatgcagatgacatcacctttatggcagaaagtgaagaagaactaaagagcctcttgattctgaaagtgaaagaggagagtgaaaaaactagattaaaactcaacattcagaaaactaagatcatggcatccggtcccatcacttcatggcaaatagatgggcaaacgatggaaacagtgacagactttatttttttgggctccaaaatcactgcagatggtgagtgcagccatgaaattaaaagacatttgctccttggaagaaaagttatgaccaacctagatagcatattaaaaagcagagatattactttgccaacaaaggtccatctagtcaaagctatggtttttccagtagtcatgtatggatgtgacagttggatcttaaaactgaacgctgaagaattgatgctcttgaactgcggtgttggagaagactcttgagagtcccttggactgcaagatcaaaccagtccatcctaaaggaaataagtcctgggtgttcattggaaggactgatgctgaagcttaaaatccaatactttggccaacttatgcaaagaactgactcatttgaaaagaccctgatgctgggaaagattgaggcaggagaaggggaggacagaggatgagacggttggatggcatcaccgactcgatcgatgcacatgagtttgagcaaattccgggagttggtgaaggacagggaagcctggcatcctgcagtccatggggtcgctaagagtcggacacgactgagaggctgaactgaggggtggggaatggaatcctgctaggagtcggtccaatgggggaagagaccctgcgccggttcccaaaacgtcgagcccctcgttgcctgcggcctgaagcgagccccaccatccccgcggtgctcagaccctgcgctccacgcctggacgacccccaacccttccgaggccccgccccgtgacgcgaggccccgcccccgcgacgcccgcttccaagatggcggcagcgattcctgcccggctgtccgggtggcggtgacgacgggcggcagaaggccaggtgtgtaggctggagatggtggggtgagaggccctggagaaaggtttgagagattgggaaggtgagaagttttgggtaaaggctgtaaacagccttgagcaaggagggagacctaagtgcaagtccggacagaggccggcggtctcactttgcaaggtagagcaatcgccagaggaggttggcgtgggatgagatgaggctgcttcggaagaactgggctgtaaccccttccagaccgctgaccacgcccctctaggtgagctagcccaggttcctgacaggttctgcccagccctccctctccctatctcatttcatcaataaccctgatccccatcctcgctaggatggagaaaggtagaagaaggtagaggacgccacccccatcctatttcctgccgcgctccggggttgtttgcttgcagctcccaggtggtcacctccctgcacctgcggagctagctcccataaatgtgaagaacggaaaggagccggtttcttccgcctccctgggttctcttgaggccacttcacagtcctgttaggactgcctcacccagatctccagtagttgccctgtccccactccccaaacaggttggtcctgttggggtgggggatggttacataccgagtgaatctgacacgctataggatggctggggcagagccggggacctagcatctcctgctccaccccttttctctccaaccactttccctcgctcgcttcccgagctgagaaaccggcttcaccctgttcctgccctctgcccctctgggggtggctggctatccttgaccacttctgttccagctggtcccaagattgctgttggcgtgctggatggagcctgtctctgtcctctgttacgtttccaattttatataatgcttcacatctctgctcctccgggacctcctggagtccccatgatcctgaagaagacagtttgaatctaggtgagtctatctctccccctctaaaattggaaggaatgttctccagagaatgctctggaatggccttgggacctgaatgatgtaagcattcttgggggtggggactgagtaggtggtgggaggggtgggggagagtgaaacttaggctgggagtgacaggtggtgcggcctgccgatggttacattctatttctttctgtatcggtgtgtgctcccttctgtgactctgttcttttcctttttcctctttacccctgcccaccaccttcatcaatacccaatgatctctcttctggcatgctgccttcctgcccactcccagaactttcctctctctctcatccagaccccagcacagaatgttgcggaggttgctggagcggccctgcaccctggccctacttgtgggctcccagctggcagtcatgatgtacctgtcattggggggctttcgaagcctcagtgccctctttggccgagagcaggagccggcatttgactattctcatccccatgatgtctacagtaacctcagtcacatgcctggggcccctgttgccccagggggcctcccagctcctcaaggcctgccatactgtcccaaacgatctcctctcttaggtgagtgcagaaggaaagcagaaggcaaggccaaggtgtggggacagggaggctggacaagtataggaggcagcagtgggtcttcaaacggagggtcaggaacg

SEQ ID NO: 30393 - DNA, 1226 bp, Bovine  19866880746611
  misc_feature (1)..(1): n is a, c, g, or t
ngagctcagggaaatgcattttatgccacaaagacctggaagccatggacagactttcacagaaggcttaacctaccaagagagggaaagagaatgctttcagaaagtgaccaggagccaaggcaagggtcgagaagagttggtgtctgggatgaggcacgtggtgtaggaagggtccatcccaacaggcactttggaacattcttttcatggtttgaagataagaggatgagagacctgggttcccagagagaagaaggtatgctatgtgggaggaatggcatgaaccaagactcagagacaggaatgagcaagtcattgaaggtagaaaggcccagggtcagaggcccagagggaagaggtcaggacagatacataacagggttagaaccatgaaccagaagcagaggactggaggtggggaccagggttgaaaggtgagtgttatgtgcattgataaggaacagtatgaagccctcagggagatctatcatgtagccttatcagcaaagaaggatgcatgtcctgcacttaaagaatctgagttcttctggggaaaagatatgtatggaaacatctatggaaatatgtgtgatggtttcttatttagtggttagtggtgtgttgcaggttagttacgggataggctagtcacagtggtcctgattcaggtaggagggcctcatgcatgaggtgggtagaatcaggaggggtgagaactggaaagggatcccaggtaagggcccaaggtgggcaaaccccagggaggtggagagtctggctggttcaggaagccaagaggagaggacacactaaggcaaggcgtgtgtgttgagtgggagtgggacatctggtcacagcaaaatcagccaggaccttccacaccaggcaaaggaattcagatttggccaggggaaatacggagtcactagagcattaagccagtggtcgtgtgccccccgactggaaagagagactgagggcaggagacacattaggaccctgctggcatccctgcacggtgctgccaagaggaggggacagttccaggagaagctcagcagggcttgctcactgaccagaaagaggaaaggctcaaagacaactcctaggtttctagaatgagtaacttatgagggaggtagggccagagaagctcgaggctgggaagaaggagatttgaagttgtggaataaagtgcatgaaacagggctgggggcagaggg

SEQ ID NO: 30394 - DNA, 1330 bp, Bovine  19866880758688
  misc_feature (1)..(1): n is a, c, g, or t
nttgtgtactaaactactttgagctatggccagtttgtcaaattaggtaggaattccagtggcaaaaaacaaaactctgttatagagcccttctcatttagattattaatgactgaatatcagttttaaatgaaatgggtgactacctccatgacagagaggacaggaacataaatgttctatgatggtagggtattattgcaaatcatggccatatatgtatttctttctttctttcttttttttttttgagcaaacaatgctttaaataaaatccattctatagtattatactgtatgactatcctgtaatttacttaattgttcactttttgctgagcatttttttttctttgctgtataacattaaattgtccttgaatatacatctttaagcttacctttgattattttcttaggttatattcctagaagctggagagagattaattttgactggggaaaggtataatggattgagggacactggcccagaatcttgaagagtgaatggtgtttcccggcttctctgctggagacgctgtgtacagtagttttgaagactcagaatcaggcagacttgggttaagattcccacctcctttgcagctgagtgatttggggcaactaggaaaaagcctcggtattctcatctataaagtgggatggtaacaataatacttgccttccagggttgttttctttctcctcgaaacatttttcatgagacaatccaatgcatatgttcacatttcttcctgccttttttctctccttgaaatttatcagactcatatacaggatcttgattgtaatctcctgtttcttactcatctgttacttcatttcaccttcaaagttttatttcattgtcctgtgcttcctggtgtgttcttgttactcttgatcattcttcctttgtttttgcctttgcttttgtttcccctttctggctatgttttatttttctttgcttcttgtgatctgattttttttttctttcctttttaactcccatttcccactcttttttctttaacttaaaatatttaatacatacttggccattacacaaatgtagaaaacatagaaacatagaaaagttgcctgtattctcacctctcagataatatgcactgtcaagggtttggaatctattcttagagatacctttacgtatatcctaggattatttttctgaataaattgatctaccttattgcatggcaatatggttagttttgtttgtttttatttttacttagttgtataatttattgtaccctggagccaggttaccggttagaatcctagctctacctcctactag

SEQ ID NO: 30395 - DNA, 1806 bp, Bovine  19866880779985
  misc_feature (1)..(1): n is a, c, g, or t
nttatagagcacccggggttgagctccttgcgtcatacagcaaattcccacaatctattttacatacagtaacatacatgttttaatgttactctttccattcatctcccgctccttccctcactgtgtccataagtctgttctctatatctgcatctccattaatgctctgcaaataggttcatcagtttcatctttctagatttcacatacatgtgttaatatgtgtttttctctttctgacctacttaactctgtataaataggctctacgttcattagcattgactcagatgtgttcttttttatggctgtgtaatattccattgtatatatgcaccacaacttctttgcccatttatctgttgatggacatctaggttgctcccatgtcctagctattgtaaacagtgctgcagtgaatatgtgtacatgtgtcttttcaattatggtttcaaatgaccagacccagtaaggttaactgctcaagctgaactcatagctccatcatctgtcctcccatagaactagaactagattcataatcctttcttttagcacttaaagtgttcgttttaggactgtgatcattattcattaaggtttgtcaaatttttagttaccagaaattatccacaggattgttccatagaaaacaaatcaagagagaaaaataaaactatactaccaaagtatatcccagtacatccctcccaaaggacaaagaaggggactaatgaccatgggagtgcgacatagagctgcttgtcattgcctatgctagagcaccccactgcaatcaacgtaaacaagtggaaattcctgtggccatttttgtcagggaagctatgcagcatggcccagtggatgcagggacaggtggatgcctgtctgagtgggttgaaaagggtcagggagaatctgcaggagagaacagaagatggaggtagttatacaaacatattttttcaaatggagaacattgagaatagagcattggagagagatttctagatgtccacatgcattataaacattcactcctaaccatacattcacactggcattttctcaagagactaagtaaacaattaaaagacttataattactatttggtgaatataatatgattctctgatttgacactcctaaaagtaaaacacatggagatcctattcatattcctatgacttgaactggctctgctcattaccagaccaaaagcagagactatgctatacacctccgtgactgtctcttgagatcctgccactatctaaagatcttgagaacaagggtgaacaataaaataattactaaacctacaaaaaggacatgcactgtactcaccaattatgtagcctttactgaatccctactgtacccaggcccctaaaaaggcagagcctcttcatgaataagatacgattcttgatgccagagaatttatgatctggaaatagaacatgttttcattctgcaccatacacgtcaacattgagataaataatcatctaagcaattctaattccactaatggaagactagattaagacatgcagccaatgcttccactgaaaataactagaaaaatgggcaaagtataaacatatgttgttaacagcatcagagagctaataaagtcatataaagttataggtccaagatctgtaggaaggaaattcagagaagtgagaccagcatttttgactcctgctccttagaggcatcttctgagtccataaaaagcagctgaaaagctgagaagcttgagcagagtttacagtaaacttcgaggatctaaa

SEQ ID NO: 30396 - DNA, 737 bp, Bovine  19866880942253
  misc_feature (1)..(1): n is a, c, g, or t
nctccctccccccgcctctgagctcaaagtgatgtcggggcttaggggcagtggcgagcagggaggacgaacaactaattccctgaccctcaagctctgcacctcgcccaccacagcagctttcaaccgggtccgcccccctcgagggcagaaaggccgaggctgctgattggctacggggtccagaggcatattctccacgatccaaggatgctggtccctccagcccagttctctcaggcctgccaggaccccagcggctttgcctttgtggagggcgatctctcgagtctggagcagtcttccctcggaaccccccacgccatacgccccggaccgtacctgtccccgagtgaggcggcgggggaggccaaccggagtcaggcctcagctcagggccaccccctactaccctcgcgcagcgcccccgcgggcccggctgcagctttagccgcagctatcgcccagctctctcccgccgcaggggccgccgccatctttgttggtcccgcccggccaccggccaccggcttcactgtctctcagggcgcctgcgcacccacactcagaatccacccacttgcatcctcggcgcttgcgtgaacccgcccccttggctccgccgctgacaccatggaaacacagccaactttaggaccgccagttcccagctctgccaaaaattttctttagaccatcattccaaagcaagtccctaaagtagagtcccatcgccc

SEQ ID NO: 30397 - DNA, 1507 bp, Bovine  19866880966912
  misc_feature (1)..(1): n is a, c, g, or t
ncccgccctcgacgggctgcccggcggcttcccaagtccccgctaacctgccggccgcgctttgaggcgtccttcgcagtcttgtgcaatttgcccttctccatggcactgcagggaaagggtgtgctgtggattcgggggcttcgtcttcccttccaccctcccacccatcgaagtagtctccgcccagagaccgggagtagtgggtcggggaaggggtgtcagactccgccctttacctgagcctcctctgcagggccgcctgcctgcgtagccagcagtaccgaatcaggtagaaaagcagcagcgccaacagcaccacccccaggacgcccccgatcacggctcccagcaccaccccgtacctcgtaggcactaaacggggcaaggaaaacacgtggggaatgagcagagacaagtgtctttggttcctagccacacacctattccctgcggctggggatctaagatatccgaacaaggctgccttctgcccactgtcccagagcgtgaggggcattagccgggacattttgccccttgccccagcctctcagccaggcctgatcccctctgtgaactgcctcccatactcccgtcccacctcctctcacacctttttcaaagacatagagcgtgacctgagaggtcttgcccactatgtctggggggtttttgacgtcacaggtgaaagtgccgttgtcaccatagtccaggttgtgtatgacaatggagccatccttccggtgagggtcccctacccactggatgcgctctttgaaggtccccacctcatcgatgtagggctgtcccttggcgtagtggaagatctgtgaggaatgaggggaagcatgcaactctcgcctcagggtgaaggattctgggctggagagggtagggctggggagggcgtgtcggtgttggtaggtcccagcagggagacaagacttgccacttaccttgccaaagttggggttacggctcaaaaaggatttctccttccttagcccaagttctctttcctgtggttgtttgaaaccccctttctgttatgcaatcccagtattcccccaggcactcaccgagatggcatcacggcccccttcgggctggtagcgccaggtgaaggagaggtcatctgaaacccactcactggaccagaaggagcagtacagggtcacctgggagcccacagcaccgtggacctccttgtctgtgtagaccacaatggcctggacaggggagagcactgcaaacatagaggggaaatcagatgcacgggtgggcccggcaaggagtatagaaggagtgagaccaatgggaagtcaagcctgagtcacagaccatagcgaagattggggcaaaaatgatgaattctgaggcccaggtctctctggactaattgaatagaagagtagaaatactgtgttggctcaagttcttcagcatgtttgacaacagtaccagagttctccggaggactttcagatgttggattcagtctcca

SEQ ID NO: 30398 - DNA, 2508 bp, Bovine  19866881075752
  misc_feature (1)..(1): n is a, c, g, or t
naatgggtctcaaaataattaaaagagggtcagactgtggaatgtaagaaaagcagcagcttgcactgctctgccaacatgttagccccatgcttcttcttaaggatattcccgttgtcctgtaatcttccatgatttttctgttgttgaatttggaagtggatagatttgggctaaagttctggttctgctatttgttccatatgtgaccttgagcaacacacccaacctgctaaaatgaggcaaagagtggtaaccaatataccacctatttcacatggttgttgggattaaatgctaaatagtagcatgtgtgtgtcaggcacatgtgtgttagttgctcagccatgtccagttctttgcgaccccatagactgtgccagacaggctcttctgtccacgggattcttcaggcaagaatactggagtgggttgccattcccttctccaggggatcttcctgacccagagatcgaacccaggtctcctgcattgcaagcaggctctttaccatctgagccaccagggaagcccatccggcacatactgatgctcaaaaaattttgttgaatgagaaaccaaagaaagttgtctttctcttcatcctctttatcccataacctgctttgacttccctccattcacttttatgcttcttctccacgccacctatagacctagttggtcctcctccattatcttccaggctggaaatggaacatttaacagggcaaagctgctgaatgttcggggtgccggaggccctgcgagatgaagaatgggactgcttgtttctgcatgatgtggatctcctgccagagaacgaccacaacctgtatgtgtgcgatccccgaggacctcggcacgttgctgttgccatgaacaaatttggatacaggtagagggcacaggagggtactggaagcagggtattccaccatccagtggaagaaggagggatggctcccaaaagacgtgtggaatccaaggatctttctttccccagcctcccgtatccccagtactttggcggggtctcagcgctcactcctgaccagtacctgaagatgaatggcttccccaatgaatactggggctggggtggtgaggatgacgacattgctaccaggtcagacttcttgccaccaccttcttccctgaccccagcctggatccctatcctctaagaccacctctagccctagtcttttaacactaatttagctccctggtcctgaacggtgcctattcctctcccttatctttgcggtctacccaggtcaggctttgcatgctgctcccccttctgttacctttcagtcccttagagctggttaataacattcccgggagagaagacaagatcaatacaatcaatcccaatagtatcatgggattccagaactggaaaggggcctagagattgtttagtcctgcctctgctaggattgcatccaaaccacttcctgcagagctggaagaggaaaggctctgctccacatagtccagaatcacttttttttttttaaataaagggcctgtgccattggcatgatgccagcttatttttagcatataaaacattttgaccttcagcctcagctgacccaatttcatatgtcatttgactatttgggcttgatatgctgggccccttgcttctcctcccgctttgtcctctgggaagagatctctatgaattcttgtcttctgtatgtgtgtaaagcacccagcaatttctaaatgtatgtattctttcagtaccttccccagccatcctcacttcttgcttctgtgtatcagaattggagttcatttctttccaggtcttgatttcctggttccacacttttcttaaatgtgggtgggggacaggagtgcatcagagctgaggctgctcagccactaatctcagtaagaactgctgagcttgggtctgtggttcccagttttgtcctaccttttttgacaaaatggttcctctccctgtcctttccagatagcaaaggcagctcctaggagccatttgggaaacaggtgggaggtgcaaagctacctctgccaatggtttatagcccccagcgtgcctgcactaggccctgagggtttggagacagccagcttttacattctcttcagcctttccttctttctgtttgacttttctgtttgcccttccagtactcggccctttgtcaagttagttattctttgtgtaaagaaacatgcagttcctccctcgctggccttagctcttcttgctcacctgtcagcagctttcttccactctggatcctccaaggtgccctcacttttcccatagggttcgcttggctgggatgaagatatctcgtccccccacatccgtgggacactataagatggtgaagcaccgaggagataagggcaacgaggaaaatccccacaggtaggacgggagggttgcctgggaattactagtgaacccttagggctctacagtttctagattccggctgttcctttccg

SEQ ID NO: 30399 - DNA, 1174 bp, Bovine  19866881125449
  misc_feature (1)..(1): n is a, c, g, or t
nattcccagactggggaagggaggctgatgtcctcttcctagatcagtattgattagggaggagttcaggctagaggagagattctctggctgagggctgcccttcacctgggcaaaggaattgccctgaactgtttttttcccccaactgaggaatgaaccctcacccttggaagtgaaagcatggagccctaaccactggactctccaggaattccctggccctgagccttcttattcttggaggagttcaccttgccgttctttgagatggagtagctttaggaacacacatctctgactgtgctcttctgtgtgcagaaatgcagaaatgctcccccagttccagggtctctccttttgagcaaactgagactgggaggtgctgcagaatgcccgtggcagccacggtggacaggttttcagggttaactcatgtccttgtcctcttccatcatgcttgtcccagcccagttctgaaaaacatctgtgttggttgtagcctggtaggttaaactctctgaacttcattattcttatttggaaaaaggggttagtgatacccactagctgagtttgttgtgaaaattaaataaattaacatatgtaaacttccttacacagtggaaggaagaccctgctgctgggaaagattgagcgcaggaggagaagggaacaacagaggatgagatggttggatggcatcacctactcaatggacatgggtttgggtggactccgggagttggtgaaggacagggaggcccggcatgtgcggttcatggggttgccaagagtcggacacgactgagcgactgaactgaactgaactgaaggatccaaaaataaaagacgtacctctggccttcaacattacatgttcattcttctgccctctttgtttccttcctctccattgctaccctctccatgatattgagccagaagccaaggactcacctagccccttttctctccctccttaaaaatgatcagatgcctgctctgtcattcctgtctcctggcctctacatgccctctacctcttagctgaattcaggccctcatcattttccacttatcagtgcaagtagtggaattaaattattaaattaaatgattctatctatgaccagcttcatctctttccaacccatcctccatgctgttgcta

SEQ ID NO: 30400 - DNA, 1090 bp, Bovine  19866881157036
  misc_feature (1)..(1): n is a, c, g, or t
ntagggggctgcctctcgagagcttggtacccagggacccctgtggataaacacggtacgctgccgggctgccctagctcccacaggcccaggctgttgctaacatcaaggagctgttgatgaagccacctccccacggaccagcctccagtgtccctatctactctccctacaaccaaagctcatgggaccctccctgcagggttctcaccctaggtggggcctgggaagctcgacctggggaatgctgaccaggattcagctctcgccgctccagccctgaagggagagtcgtgcgagatatggccgctctctccagcccggcaccgaaccagttaatctccagcttcagagatccgccttctacaggctggagcatccgcgagactagaatggacggagagtcggagaggccaaaaagcttgggggcggaggctacgggctgaaagcactaggcctagataggggtgggagggaaagcgctccagaacacccggcgtccagttgggtccccgagccctgcgcgagcagatagcgtgggcgtggcccttatccgcctcccctgtccccccggatcgccggcggggtgatgcgctgagacctctacctcctcctttcgcctcatttttctcgttcccctcgtgggtgagtcctaggccctgggaggggacctcagagttccaccaccccatccgccggctctgggtttccccgaaagcagcgaatggccgggggtggaacgcggagctcgcaggttttctggagagcaggctgcttgcagtcacgctgttcgtagtgcctcttcacccgcaggtttcttcatgggccggaccgtggtcgtgctgggcggagggatcagcggcttggccgccagttactatctgagccgggccccctgtccccccaaggtgagtgcgccacgctgccagagggagcgcctttaacacttctctcccatttccagcaggagcgaatgcgccgccccctttttctcctgaccacttatgccgccgaagctgtggctgtaggctgcagtgtctccctcttgccctcaggtggtcttggtggagggcagcgagcgcctgggagg

SEQ ID NO: 30401 - DNA, 1367 bp, Bovine  19866881227309
  misc_feature (1)..(1): n is a, c, g, or t
nccctgcagccggaggagagtgtagggctgagagccgagggccaccccgatagtctcaaggacaacagtagctgctctgtgatggtgaggcccccgggccccaccggtgtccccagcactctgctcaggcccctctcccggcccccgatgtggtgcgtcagcagcccctccaccagcccccttgctgagactcacgctgcccgcctgcctccccccacacccccagctatgcccttacgccttcgttctctagttgccccttccccacacctaacattcactcctgtccatcgctgagccgctgagcaaccgtaacccctgcttgtgcctgacctctggccccaccgtgccccagccagcccccttacgcgtggccgccccacccaggctcctgactcgccccctgcccttggtctccagagtgaagagccggagggccgcagttactccacgctgaccacagtgagggagattgaaacgcagaccgagctgccgtctccaggccctgggcgggcagaggaggaggaggatcgggatgaaggcatcaagcaggccatgaaccattttgttcaggagaacgggaccctgcgggccaagcccacgggcaatggcatctacatcaacgggcgggggcatctggtctgacccaggcttgcctccgtcccctaagcctggctccctctgctgacagggaagccttcagctcatccccaggggggcctccctacacactcttttcttgaggaagatgctccccatcccactgactgcttgatctccagtccttccagtccttccgttggaaaatggaagggctctgctggttgagtccctcccacagtgtgtgcaggtcgctgtgtgtgcatgtgtccttgtttgagtgtgtgctgcgtgtgtgtgcaggggtgactgtgcccgtggtgtgcgtcatgctgtcacaagtgagctgtggtacgtgtatcacccagttcggtggcaatatggggggtacgtcacggggatgggcttgtgtgtcgtgcggccgtgggacctttgcctgtaaaatgcaggtgttttcctcagaccccagagcagtattaatgatgcagaggttcgaggcgggaggtggagactttggccagatccaggtgtgcgggcatagctggagctggaatctggcctcctgagttggggagcagggctcccaccacttgggacccgctggggcaagtgtgaagcggtggccggggttcgccggaagctcaaactgccctctggtggtctctagccctgttgcatgtacatattttctgtaaataagcctgcacaggggagcttctttaaggaatattgccccaaactcattaagagaaaagactttttaaaaa

SEQ ID NO: 30402 - DNA, 1668 bp, Bovine  19866881258845
  misc_feature (1)..(1): n is a, c, g, or t
ncttttcctctttaagatactctgcagagagcttgattttgctaaccataatagaatggtagtaaaattaagaatgatttttccctgctcctcagtctcccataggggttccctagaaagagaagcaaatatgtctggggtacctgagactagaagttccaaactctggaattctaaagtggaaatcaccagcttacaaggcattattgtaaaacatcactccaggtttcaatttgtaaaagggattaaaagacagtgagagtcacaaagtgcacaaagtgatgtaatttattcccttcccttccttgttagcattccatttttccatctctgagggtctgggcttatgagctgggttccgtgcctcacaccacacagctctcagcggtagaacaggagcacagctgcctcagtgatctcccggctggagctgtaaccctggtgagctccgtatccattccagtcaaaggaggagaaatccccacactgcactggattgccctctgggaagaatcctcctccaccgatgcagtgctggggggcaggagaagacacagtgaggagttggctgtaaacacaccagtgagctcttaatggccgaatcccctgtaagtttggtcttcttcctactcgccttgacccctcccctgaaaaaacctttccctccagtggactctgaaaccatgctttcctgaattcctttctaccttccttcatgcttattctcaggcccctcaaccaccctttttcctcaatggatcccccaaaggctatttattgctcacagttctgtccacacctcactctcacaatgatggtctgtcttcacccatgacttttgctagaaccagcataatcatatattgccaagatatactcctaaatctgaatgaccagccaggtattttctgggcttgaaaccccctatccagctgccctgtgaatgtctccacctacatatcactagatctaaaactccacttaagcaaaacaaaactaattcactctcttgctgcccttgaatctatttatcttcttggtcacccatcttaactgatagccaatcacccaaaacaaaaccctgaagtctgttgcctctttcacttcccatcccccacgtccatttaatcttcaagaactgctgatttcactgtctatgcatccatgcttgctctttcaaatttatcaaagccaccctggctcaggtcctcactatttcacatctgtacctttacacctgcctcatggtctcattgactcttatttccctgctcttgaatccatgtccccctccttgctaaaccaaagtgatcaagtcactaatctggtcaaactcctctgatgtgtcccataacatcagattataggtgtcccatcacctataacataaactctgtgtcctggacataatgcaaaagcccctctttgccctacttcttgcaagtatttccagcatcagctcttaattctacaccatgtgcataccatgatacaatttacacaacagctcactgccccctcaacataccatggtctattaaatcccagtgattttgaacatgtcagttactcatgctcaaggacactactctgccccttgctgcctattgaactctacacgcatctttcgatattcagcaaaagatgtcacccttcctgcagaatcaa

SEQ ID NO: 30403 - DNA, 1615 bp, Bovine  19866881296413
  misc_feature (1)..(1): n is a, c, g, or t
ntccctcccccaaacctgcctaccgagagctccacgcgcccgtgaagttctcagtcctgacctctaacgttaatgagcagaggttaaggagagggacggcggaggcgaggggggatgctgagtgtctccatcttctggcttgtctttaggacctccaataagaaggtaatttacagccagcccaatgctcgaagtgacgtgagtatgcctgccctgggatggggagggccccctggctggggttgggggtttccagcccatgttcacatgtattctggggattatctagcagctagagaagactgacgagagctgacttggatgttttatttttccagggggagttcagacagacctcgtcattcttggtgtgaccctggtccagcttctctcctgtcctcagtgcttgccttactcaggtgctaccagactctggcccctgatgcctgtagtttcacaggatgccttatgtgtcttcgagccccctcaggggcccccacttttatcttaggttgtgttttataataatttcagcaatgtgcaccttcctgcctcccttcctttcccaccactgctgagtggcctgggacttgtttcaaaccttcttgtcccagccctacaagggatcagagagaagtcctgactgatgcctgctgaccacaagtagaccacaagagcagtggggtactcactgccccctgcatgtagtggttttcagataggaatctggagtctggcttcttgactccttcctgccgtgctgaggcctggtgcagctgttctagagtgggggctggagactggagcagctggaatggttgtttggaaacggtgtcgagtttctgccacctctgcaggccactttcttctgtcttccatgggaagtgccactgggatcctcctgcatcatcctcttcccgaacacaagcagactgacaactgtgtctgtagggaaaacaagacgctgatctgcagataagaaagctggagtgggtagctcaagctatcacccttctcttggttggaaaaactcgacctgcccttttaagatatgtctgcagggttatggaaatttgtgtagcagtcagttctgctgagcgtgtgagtgtgtgtgtgcgtgtgtgtgtgtggtcttggccctatgttgaaatctagtgttccagagtcctcttgcggtaggaggcgagcacctggctgaagtgatgctgtgctccaggttctacttgatctgactcacccagtgaaagaagaccacccctcccacctctgccaacccagatgcgctagtacacttcccagaggctacaggaaaagctgctccagggcctgaggcaggatttctcaaatcctttggagaaccacttctttactagtagtttaaagtagtactactactttatttagaggataggcgtaagtgagagcaggagtgagtgggctaggcacgccgggccctgcttccctcatcccatctggacccttctttgcccttgaatctatttctccctttacccagtagtctatttattaactagcaagagggcaaataagggatcttctaggattgattctgctaattttgggaggatactgagcaccatttcaccatattctg

SEQ ID NO: 30404 - DNA, 910 bp, Bovine  19866881320142
  misc_feature (1)..(1): n is a, c, g, or t
ntattgcctcccccccccaaccccaccccaatctgtcatttcctctttgtcctcttctctgctctgggctgtggtgcctgcagtggaggcagggtgacggtgggtcccagctcatttcctgctcttaggcccgcccctgtgtctccagatgcctccttccccttttctcctcccccagaggcccccatccccacaggcctcgcttaagggaaaacccgggccccaaggaagggtgtacaacagctgaagtggtttctctgcacctttctcttctcttggggcagagcccagcagccagcgcagggctgacaagaggaatcacaatcttgagaaagatggctcttggccgagggccacatgctttagctggggctgatgttcttctagttctctgcaaaccctcagttcagcctcctcatcctggcactgtccttccctgtacccccatgttgaagccaacctcatgttgaaacgctgaccccacagccaacccagatcccactcctgtaaccttcctggcctcagatggtgcagggcatgttctctggaagggacagacaggttgctgggtccagatcctaatgaatcccaaagagagagagagagaagcacctcctgcccttcaccaaagtccaagggtagaggagaatcttaggcagcagggcagcagcagcagccttctccccttcccccagctcctcctagcacagacaggtggaaagttgaaggatagagagaagccataaccgcttctctctttaagctaagacccagcaaaagtgaaagtccaggccaatggaaagctgtgtttctggttaatttatcctgattatcttgggttcccaaatccttgctgctgtgctccatttcagcaacctctcccagctctttgcctcaggtaggtctcttc

SEQ ID NO: 30405 - DNA, 636 bp, Bovine  19866881328713
  misc_feature (1)..(1): n is a, c, g, or t
ntggtgtttgcaggagtaaatgcagaagtaaagtacaccaagattcttctcgaagcccaagccctaaatgaaaaagttagagctgttttcttgagctcggctctggccgtggcccagagagcaagctggcggagaactattagaagtggggaaagcaaaagaagcgagagccccgcgacccttccgtaaaacggagtaaggaaaagataatccgccagtgactacgaagctctccacgatatacaggagcggctgggggagggggaaggggtctctaggactcgagaccgcgtcgcctccacccacgggtcctttccgtgcccaagcacggggtaaacagctatcagcaagacgtgagggggcaatacaggtcccctgagggccgccggcacggactcccagccccaaattaaagtcacctcaacaagagcgcagccatcttgggatccggcctgacggaagtgacgccagacggccccaccacctctgggcggggcttccgtcacgtgacaacaccgactatgttagaggcttgggcatctgtcgggttcagtttgttggctggttttatctgctctcatggtgtctgcctcttctctctcaactgacttctatttgaaagtgagaagatttcgg

SEQ ID NO: 30406 - DNA, 1200 bp, Bovine  19866881436909
  misc_feature (1)..(1): n is a, c, g, or t
naaagtgagtagggagggcccctgaatatatcggggggaaggaagacagagaaatgggggctatacactgagaagcccttggagcaccagaaggacactgggggcagaaggagatgtggaatggatctgatcctccaaagctgcaaccaggctttgatgggtctgcagcccactgagggcccagggatgggattcgtggccactaacagggcctctgctccacaggccatgtcttcagcatgctccatgacaactcgaagcaatgcactggtctgaatgggcctgagagcacctcccgccacgtcatggctcctgtgatggctcacgtggatcccgaggagccctggtccccctgcagcgcccgcttcatcactgacttcctagacaatggcttcggtaagcagatggcactcccctcgccctgtgcaggacacagttcctgccccctgcatagtacttcctcttctgccgtatcccacatgggccaaattgactctctccaacatgccttctctacgtgtgggatggggtgagaaacgttgctgcctttatgtggttcccacttcctctcaggatgaatagcacaactacaggaggcaagttttggcctcaaaagaattagaactgaccttctgagggccagaactgtttgacaccagaaggggccagttgtgaaggaggccttgtcacttgaggtgtgcagacttagcagtatgactatgatcgaacagtgctgttgatgagaagcagatcaagaagtctgtatttggttagactaggtaggaagatctagtgctgtgagctcctctcctgatcctactttttgatgtgtgtggatgtgtgactgtaagttacttcacttctgcatagccgatctgtaaaaatctgtaaaatctgtaaaaaaatctgtaaaatagcacctgcctcacaggtgctggccatgattaaacacatattgctggtcaagcatttagtcagtgctcatcaaataaacatcgaataaattacagctgctatttaaagcttcttccagtactagaatttgtaggatccctcagccacccgggaacccaagatttcagctgatgaccagcaggcccctctgcaacctcttgctgacttcataacgcccctgcctcttttcccagggcactgtctcctagacaagccggaggctcctctgcatctgcccgtgacctt

SEQ ID NO: 30407 - DNA, 1172 bp, Bovine  19866881974217
  misc_feature (1)..(1): n is a, c, g, or t
ntactattacgtgctggacccacgggtgaggaccagaatgctccagggccttgtctgtgctcactcacccccccagaggccctctgctttctgatggccaagatccaaaacagcgctattgctggagttcccacggccatgcctggccagcccagggctccattcagacttctctgtctaagggtatttggaaaatcagccctggactctggagaagttgtccatcaggatgtgctagcctgtcccatttccatcggtttctcggtcttcctctccccatcttccactgctccatttggtgagaatggaagcctgtggccttttgggcatggctctgacccccatcggatgggctgctctgttgaattacagtggtggcctcactgagctcatggggggccagtcccccactaaacaggcctggagagggtgatggccccgccccgcccctctctgtgatagggccctgggctgaagctgaagaaggaagaactagactagcagtcttgcctccttcaccctcttctggggagaatgcctacttgttgactgccctctagtgtctagctgggacactacaccaaagtttagggcttggtgttgggactcagacctgcaattcccgtgttgccatctcctcttgccagctgtgtaacctttgagcaagctcctaatctttctaaacctcagtgttccatctctacaaacctcaaatagtggttgtgagatttatatggcacttacgcacagtgtctaactcagcgtgagcttctgaaaatggtggcttttatcactgtcattatgattatcatcccttacagagcctggggttccttccgcattccatccacatcccctccctgatgggatatggtttttgtttggcttaccaacaccttttgatttaggaagaccctttcatcactccctctcttctcctcaggtggcagatgggaccccctgttccccggacagctcctcagtctgtgtccagggccgctgcatccatgccggctgtgaccgcgtcattggctccaaaaagaagttcgacaagtgcatggtgtgtggtggggatggttccagctgcagcaagcagtctggctccttcaaaaaattcaggtttgttcacttccaccttacctggggatatagaggtatcctcaacactgttt

SEQ ID NO: 30408 - DNA, 970 bp, Bovine  19866880343267
  misc_feature (1)..(1): n is a, c, g, or t
ncatgcgttcgcaccggcagcagtgcgtggcggcgacacacacgttcagccctggatgaataaaaccccaaacactccttgcgtttactactcagatcctttgttttgtcccaaacacactcctctcctctctgcgtgaggatttagtttttcctgcgtccctaacttgtaactatcagaagaggatagacgttcttcaaaacaatttttcaggaaaattaaattggattccgccaaccctccaaaaatgtccaggtaggaagacttctcaaaatactacagaaaccttctcttcacatttccccgtggtaatgtggtcacaccgccgagagaaagaaaacagcattatgccaactattttttaaatggaggcgtgaaaactgtttagagggagcctcgagctagcagttgggaaaacacttgtatttttgtttcgaaggatgtctttgtgggttccaaactgtcttgcttcactaggcacctattactacagtatcataaagactctaacagaaacagtctaaacactctgcgtataccttttctgccactctgcagattaagaaaaataaagttttggtgacaagaaacacacacacatctgactattccatttatttctttgcctgtgctggtggattcttctggggtggttttcctccttatctggacttgccattagctttgtttatcacttttagtgtctgaaaaatctgtaactcccacttaactgttatttacactgagataaccaaaacaaaattgaatcagaagtcatttgcaaatagttgcgccaagccgtgcaaggactttaccgtgctgtgtaaatccacaggctgcatatcacactgttaatcttagacgcctggcttgaaggggcatttaaccaaggcctgggtgagttcttccaaagtgcatatccccagactggcccaaagactacctctcattcctttcatttttttttttt

SEQ ID NO: 30409 - DNA, 1834 bp, Bovine  19866880344238
  misc_feature (1)..(1): n is a, c, g, or t
nagaggggttggttccaggatgattcaagtgcattacctttattgtacactattgctattattatgacatcagctccacctcagatcatcaggcattagatccctgaggttggggaccccctgtcatagagaaacttgcctactaaagactagtggcatttacagaaacaatgcagtagttaacagaaaccagtaaactgatgagaaaacagctaactagtgaagtcgagattcttggtagaatgactgacttcacctaggaccttttacatcattatccttaattgtggaataataatagataatcccatcccacattccattcctttgacaggaagggatgtggggaacaaaaaacaggtttgtaaaaggttggaagagaaagctgtagcagccacacccctaaggagagatgggtgtttcctgttctatagtcccaacccaaggttacatccaaatcacctagggcgagtgttaaaaaattcagatccctgggcaccatcttcctgcagatcagatttcttgcatctgggaatctgcttttttaacacacgttttaggtgattctacgtaaatgttcattagaccagaattgaggagctctgttctgagacactgtttgcacatatcttagttatatgcacttccatcgaaggatctgggcaggtatttatttcttcacatttcctctccaggcagttttcagataggaagcaggtgattcaagtttctggggaaagtccccaagaacatattccttaaaaatgccagagtggtggtatttccagctttgccttatgacatttatttagtagcagtagcaaagagccttttgaaaacaccaaacctcacctcatgggtgcaagggatttccaaaaacatgtttaaagtgccagctggtggggtttatggagctggatccagccctttcaccacccacccactgaaccattggttgtcactagaggtttgtttcaggtgtagttttccatctgtgttcattgtattgtgcttattaaatgctcgtggaagcatgactctgcaggaggtgtgcaagcaagtaagacattggggtcctgtctcctgggaacacaggatctaagagttccagaagtttcaagcttccacagtagatgccacctgtcacacagtgcttccccttgtctgagccctgacatcgacaggctctcaccccagaaggcagagatgggagacataattgagtcttaatctgtagttcaccacactgccctggttaatgtttagctgcatctgtctcagaggcaaagcttcagttaaaatgtaataggtcttcattttttattctctcttttgtttgaagctgaagtctgggtttctggtcaataagtttttttgttttttttttactattcactctttaagcaatcaacattcttctttattcaatacatttaaacactagcatggagttactatttgatattattttggtgtgtttccagaatcctcacagatttccataaagcattgagatctcctttactttactgtatgtgtctctcatctctttctcagatgcagacactagatcaggtagaagggagacttatgaatgaaaaaaagaagaaaaaaaaaatcaagtgaaatgtgcaaaattcatccaaacatctccagaatctttggcaaagaaaactaaagaagtcgtattgctttcgctgctctttgtggtttaagcatgggtctactcgccctctgatacactcctttttatacatttgaggcatcactctcaaaaaggactccatcgatccttcactttaaagcagcattctccaggcacttccttggcagt

SEQ ID NO: 30410 - DNA, 1594 bp, Bovine  19866880348488
  misc_feature (1)..(1): n is a, c, g, or t
ngctgcaatagtaaaattggagacctaaccttgaagacgaaggattctcaatgcaatgtcaaaacagtcaaaaaaaaaaaaaaaaaaaaaaaagatctatggtgcagtagaaatagtggattcctgctagagctttagcaccaaaatcaactagtaatcattgtgttcactgtcatacactaacagaaaaaaaaaaaaaaaagccagattcacttatgaatatttctgattaagaagtaaaaaaatattgatttaaaaaaatctcaatccttgggtacacatttaaaaagtaaggtgagatggaatgagaagtatacataaaacacttttgctatataatgaatggcttccctggtggctcagctggtaaagaatctgcctgcaatgtgggaaacctgggttcagtacttgggttgggaagattccctggagaagggaaaggctacctacgccagtattctggcctggagaattccatgaactgtttagtccatggggtcatgaacagtcagacacaactgagtgacattcactttcatataatgaagtacgatggtgtctagagaactgtttgagttgcaagccgaactatccacttttttcacagaacactgtttttacttgtaagaacaactcaacaaacaaattataaatagttagatatttggcagacactttctcaaatgagtgtgattagcttttcactttgaggaaaatagctgacaccttttgttgtccaagtgataaattcaagctttcaagtggaaactagaattttgtaaaaggttatctgccaaagtaaacagacatttttccagtagttaatgaccttttgatgagattattgacaaatgtaatttgttgaatactatataataaaattaaatgtgtcaactttttgaccgtctacattgcccaatgaaccagtgttttccaaatgaccaatgatagtatgaaattatgtatcagtaaaagatctattcaaagttcaagatagactaatggattttttagaaccatagagtaagaaaaatttattgatgtggttgtacattccacattgcaactaatcttaaagaaactaccactcatttagttttggtttaatatcaaagaagaatatccaccattgtgtgaaaaggctattgaaatactcaactccttccttttcaaccacatatctatggttatttttcatctttttgaaacaaagcaatatattgcaacagattgagtatagaagtagatagaagaatgtagaagcacatgcaaaccagacattaaagagatttctgtagtgtaaactaacacaattattcccacctttttataaatatagtgtttttttcataaaatatgtaacatgttatataacaggttattattattaaatgaatagtcatttctaaatttctttagttttatctttctaatattagaaatactaataaatttaacctacataaccaagagatctttgggaaccttaataacttgtaagagggtaaatggttctcatacctgaaaacaaatgtattaatcactgttagttcagtttagttcagtcgctcaggcttgtctgactccttggact

SEQ ID NO: 30411 - DNA, 881 bp, Bovine  19866880385773
  misc_feature (1)..(1): n is a, c, g, or t
ntaggaagtattgcactttgagaatttatttccttttgttttttaatatacttaatttctgggtaactttatatagttccattggtaataatgcttgtgtttcaacagcctggcttacaaaattccagaaaattccacaatcagctctctcaagccagtacatagtagacgttgctccagcacatcacaagttagctttcaatgctcctggacctaggcccccaaaagagtctgagaggaaagaggttaattctagaaattagtagatcatatgttgccggcctagagaaggaaagggggagaacatccccttgtgcagagtctcccagagtgactctgctgcccctcacccccaggcctggccgtgtcccctcctccccagggtggcagtcaaacagatgcagggagagcaccacaggccgcctcctgactcggcctgcacttgttttcccggagggtcacggcgtctgctctggagaaaaacattttcatatttcaagtgtttatctcttcagcatttgagtgctcagagagattaatatctgaagatcaccaccgccctgggcaacgggggagaacacttaccctcgtcccagccttaatcatcctccccccgccctcgttcactgcaataatgtttaattaatataatgagcctcctgcacgttggaaaaaaatacttatttttataacccagcctggatttttcatttcatttcctctcctttgagacttggcccaattaattggttgtttttcccaacccccactttctatacaaacgtaaaggagatttgcagggtgtgtgtctgtgtttgtgcacatttataggtgtgtacttgtgcattgtgtgtatgtttgtgcatgtgtttctttctcaa

SEQ ID NO: 30412 - DNA, 1834 bp, Bovine  19866880433079
  misc_feature (1)..(1): n is a, c, g, or t
nggtgctaggccagagggtcaggggagagacgccgcaggctttgtcgtgcgcccttgattctctgaaagttcatctgcagtgagacttatcagacactgtctggagcggcctccttcctcacgttgcaaggcgttcttggcagcctgctctgccagaaacaatgagaccggcaggccctttccctcatccctgggtttctgcggaaaaacaaccagtaattataaatagatgttatttgtagtttccattttcttgccttcaaggttttttgcaataattcctccagtttcttttgggttgttctctttgcatacttcctttgctgggtggtcggatttcctcccttctgaagagccctggtgacctgggctctgagcggattgtgaagaagctcaaaatatcagagttttggggtgggaagaaataaaggaagaaaatgaaagtgccaactaccggttttaaaacggcactcggcaccaaggcaaatacccaaaccgatgcagtgtgtgagtccgtggggttagatagcaaataataaaggagttagataagacataacagggatatgaagttagacaacagataataataataatgacagcagcagtaacaactaatatttgtttattgagcatttactatgtgcctggccctgtgctgagctgttgacatgtattaactcaccaaatctgggggttcagtgcctagttgttcaagacccagcacatgtgaggggcagcggggctggtttttgaacccagcctggctggctggttccagagcctgggctgggaaacaagactgaaaagaattctcaccagctcaagtgatgaagcactgtggatgggtttgtacaggaggagggtgtttagaaactaccctctatagcacggaggttgggtggcatagacagtccctaaagttatgacttttcatttcattgtcacctgttcagtttccagagcatcatgtgtgtgtaactcttctctcccccaagtctcccacactgttgcgtagaacagtaataatgaaaatagccagtgcctctcaggcagtttctaaggcatccggtgctatattgggcctgtgtagacctttatgaacctttcaacaatcccacaaggtggggaaattattatttccattttatagatgaaaaaactgagacttaaagaaatgcctgaagtcataacactagcatgtgccagaaactagctgaatctgtccacaaaacaagagtatacatacagactatgcatttcccagactatacacacccttgtagacagatatgtttctatgcagttgaaactttttttctctggtcacagaccccatccctaggaaaatgtgcacatacccaaaccaacaacatttctgcatatgattataggggttccccaatctactaaaattcatctgtggaccctactggaaattcacgggcttaaaaatgtatgctctagatggtacttaaaagcatgtaagtacacaggatactgttttctcactcgggccatatgttgacatatgggtatatatgtgcttataaaaatacttcacttacagaaattaatatgttatcccatctgaacacttagaagctggatttctactgatgagactcaaaaccacgaattccaaatctactccctgcttctgtgggtgatttgtctattaaatttggcattgttaaacaaaacagctaaattaaaagactgagattctgtgaagtctctaactgagatgcaaagggtgctttgcatctgcaccttctaatattgtagtgctctggcaatctggcatgcccactgctctctgatctttcctcag

SEQ ID NO: 30413 - DNA, 1077 bp, Bovine  19866880489813
  misc_feature (1)..(1): n is a, c, g, or t
ntagttgccgtgctgggcttctcattgcagtggcttcttttgtggagcaaaaggcacagggcacactctagggcacaggggcttcagtagtttgggcacatgggctcagtagttgcagtgcctgggctctagagcacagattcaatatttgtggcacatggacttattttcttccacggcacatgggatcttcctggatcagggatcaaactcttgtctcctgcattggcaggtggattctttaccactgagccaccagggaagcccctagatttgccttttgtaagtaatctcagggtcagaagtagtcctgtcacctgtctaatcactctttgcttttttttccattgcattccaacctacttttgatacatcagtgtcaaggaactgagctcctgagatatacccattcatatttttaaatactgtctgtccccaacttatgatgtttcaacttacagtttttttactttatgatgatatgcattcagtagaaactgaattcagattttgaattttgcttttttcctgggctcattatagtctctcatgtgatgccaggcagcagcagccaagtgatcatgagaataaaccacaaatacatttacaactatttttcacttttagtattcaataaattacatgagatatttaatatattgttataaagcaggctttgtgttaagtggttttgcccaattgcaggctaatggaagtgttccaagcatgtttaaggcaggctagactaagctgtgatgtttggtggattagctacatttttgccttaggatattttcaactgaggatgaaaggaagatctctagtgtaattcttagaatatttcaggaacaacaaaaaaaatggttgatgatatttatccctggagaaggggatcttacctttccttgaaaatttattaatatgtaatttttgtaaattaaggggggggagtatttccttacatatatcacctattttttggcaacccagaggaagtcctctgacatgatgccatggcagacatttgtagacagtatcattgtcatgcagcacaattaacatctcaaagagggcatt

SEQ ID NO: 30414 - DNA, 1994 bp, Bovine  19866880490132
  misc_feature (1)..(1): n is a, c, g, or t
ncgacttagcacgcatgcaatgttaaataaataatatccactcccttatgcaatgtaactctttcagtgtttcaaaatatgaaaatcaatatgccttttccatgtcttacattcctctccgctccatatactttctacagtctgcatttcctctctctttccgagttgcattccccttcttatcacacttctgtccacttttctttcctcatgtccatcatctctctcctttctgctgtctgactctcctcaatttctcacttttcctatttgccttggaaactagagtgcatctcctatgcaatgtcatttcataggtgagtacatatggtcattaatattcattagttttcttaatctctagtaaaaatagaaaaaagaatgctacctttctgtgtgtcagactggttgattagcagactgtacttttaaagtataaaactctccttctagagacagcctagaggtcgaaaactctgggaggtggatgctttccttgggtcaaccaaggaaaagggaaatgggcaaagttgagagataattttgggggcgaaatgtaagcctttcagcagtgaattaacctaaatgtttttcccaaagatggtgatcatattttcacctcctagactcactagcagttcaaagggattgctgcaaaaagttaagaatctgagactctaggacctaataaagccctgaatttttggttttgtgttgcctataaaagtcagtgtggattaggaaaaaaactggctgttatgactcacaccccacatgtactatcttaaaacccagaaagaagccaaaaatgtctatgtaaaaggtgaaggctgtgtaaagagtgaaaaataaaataaaaagatggaaaagtaaacaccacctcagatgtaaggaaattcggatatttaggacctcccataagaaataacttctttttttcttaagtcaatggatccataaataaatgaacttaatctgacttctaactagctcattcagtgaaaagctagtggactagaagtttatttgaagaactggggtctttcagcagctcaatggcaggcttcctgtttgactttggccaagttattcaactacttaatatctaaagttactcatctgtaacatgagtaaaacaatatgatagccatgttatttttggctcttgggctgctcccaaccttgactgtgtaactgaatctcacagaggaatttcatggaattaacgaatatctacaaacgctgaagggcctcaggtcaatgttgacttcatagagttatcattatggagtagctgttaatagccctggtaccacctcctgctctcctacacattactctttctgtctggtatgtcccctctgtttaagaatccatctgtccccccctctagaaggctttctttccattccaccatccattagagcctctatcacatcttttctctagaatgcataagaaatctcgttgaccttgacttgcctcgtcttccttcctcttttaacacctcataagctggtttctgtccatactgtatgtggttttctttgtgttaaactcagtggatcccccatgtacaaatttttctacaaaggtgtgttctcaccactcttcctggtgctgtgagaattgatgtctagacttcagaagttcttccatgtaataaatcaccgccaacctttctgatgactcttggcaaattcttatttctcttgctgtccaatgattatcccttctaattctttccagtaagtggctcatctaatcatgtagattttctatcaaccatctatctactctccagctcctgttctttatctctttcagatctgtatgaattctgttgaagatacatgtgttgcttacctatggtcacaataataatgcctaacaaaccatcataaaacttagtggtctaggacttccctggtggcacagtgggtgaggatccacctgccaatgcagcggacacaggttagatccctggtcctgga

SEQ ID NO: 30415 - DNA, 4007 bp, Bovine  19866880559590
  misc_feature (1)..(1): n is a, c, g, or t
ntgggcagaggactggatgagatgaccctccccccccgccccccccccaaaaaaggtccatttttaaggttctatgaaattgattacccagatgtggctgagatttctgcacctggaggatcaaaggctacttcaggtgaagaacactttagaggcttgacttggctttttgcataatcactgctcccaggagtttgggtgagtgggaaggggtcaaaaaaaggataagttaatcaacattttcaaaagcgcatctgttcatgaagccttaaagaaagaatgacccactggggaaaaccccaataaagggaacatttgtacaaaaagccatttactttgatagcaattttctctagtccctttgctaatattcttgatgtctgtgtttggttaagagctttctttctcagaagcctctttgctcttcatgggccactttccttttctgttgaggccaagagagaaacttcagcctgtttcctcagaatgctggcagggtgtgtggatgtccactgggtccctgtagttctagtaaagaaaaggcaagggtgggttggaaggaggaggagtgagccaggaactcaaggcagagactggaagcagcaccttcccaggcaggggacaataacagccagcgaatgaagacctggctggagaagagaggcagagcaaggacctggaacttaactttttaaatgaggaaaaacttggagaggacattccaggactcttttaggaggtgtgtgtgtttgtgagtgggttgacggagagtgcagtgagccccacctttaaaagaacgcagatcaggaatgcatcttaccacccacacgacttccactttcaacctttgtgcttacatgaccctgcttccttctgggcccccgtgtggattcaagctcaggtcagtctgactccaaaacctgaattctgactctcagtactgtactggggccagagaagaccctcttccttcaacccctccacctgcgcacacaaattctctggctatgggcagaacagtgcatttcacctaaatcatccctgtgtgcgtgtgtgctcggtcacattcgactctttgtagccctccaggctcctctgtccatgggattctccaggcaagaatactggagtgggttgccatttcctcctccaggggaatcttctctacccagggattgaacccaaatctcctgcattggcagttgggttctttaccactgagccacctaggaagcccctttcttttctctgccactcattaaatagcttttcccaaaggacatcatcttagggggttgggggtcagcaatcctactagaatacttccaacagtatgatttattttttcttttttttttttttaagatttttttggccacactgtggcatgtgagatcgtaggtccctgaccagggattgaactcacactcccaggcagtgtaagttgcagagtcttaaccactggaccagcaggggagtccctccaacagtgtgacttaaagaagtttttattcatcgccatgggacctaacctccacatataaaatggcttaaatagaaaaatatgttttgaaaagcaaaacaaagatgtaaaaaacgattttgaaatatccattcataggttgtgaactacctgtaagggttaaatcttgtgtttcctaccctgaacgtgccgaagtctgttttccaggacacttggttgacgccgcaggagcattgtcttatttggtgtactgcgtgtcccagagctcagccagccaggcagtagcaccaggaacagcaacactgaattttccctcctggtccctgttcatggaaccatcaaatgtgcccccagagcctctccatcacggaggcagcacaaatcactgtttttatcaggtccactgactcgcatagcctggtttttctgcacataaagaggtgcaacaagtggaggatttaatggcccagaattcagctatagatattcccttacgttttcattttactataatcagatggttttctgttgctgctgctactaagtcacctcagtcgtgtccgactctgtgtgaccacatagacggcagcccaccaggctgccccgtccctgggatcctccaggcaagaacactggagtgggttgccatttccttctccagtgcatgaaagtagaaagtaaaaagtgaaagtgaagtcgctcagtcgtgtcggactcttagcggccccatggactgcagcctaccaggctcctccgtccatgcgattttccaggcaagagtactggagtggggtgccattgccttctccagctatgggttttcccttatgttttcattttattataatcatatggttttctgagggctgagattaccttcatgctgttgaaagaacaaacactcaggaggtgaaagttcaaccaatccctgccttctttgcagtgcctgcacctccatgtctgcttgtttatggacgattctgaagaacagggagtttggcccaggctttggttgtgcttgcgaacatgcgtgtgtatgtgctaagtcacttcagtcatgtctgactctctgtgaccctatggcctagcccgccaggctcttctgtccatgggatcctcccaggccaagaatactggagtgggttgccatgcccttctccagggaatcttcccaacccagggaacaaaatcgcctctctcatgtctcctccaaaacccgtggagttctttaccaccacacaaatatagaaaacagctcttttggagttgttagccatcccttcaagggaaggaaaaatccattcttcacgggatatagactgtcaagacaggatacctttgtaatccagtgtcagtgggcggtgtattcctggtgctttaggacttttggaaagggagggactgagctcaccgtgggaacagtgggcccaatatgttagcaatgtctaattcagtaataattacgaaatttacctagtaaggataaaccacaactttgcctagcactggcttgactcttagaagctctttgagggatgtgggtatatgttaaaactggttaaataaaaatgttaattatatactcctgtagtattgacatgacatgatgtaaacctttatacaaaaacattgattttgacatccctttggaaagccatgaacaacaaatagttctctgcttatctcttgatccctttccagccccacatcagttctcgtatctgtagtttgggggttgaaagaaactgtttaagatctttccttcctacctctgagacctgttgattaactgcacagagtccctttgcatctgtggggtgttttctagagagaaggatggctggcctccaaaaggtcaccttccccaccctcatactacagccattcagaagttagaggaccagcattgtcagtccctgtcacctgctggtccatgcaactcttcgccttcggcctcagggcctttacacttgctctctccttgccctgcaaagctgtttccctagacactcccacagcgttgcatattccccttgcctgccgtattgcttctccttagcacttgtacagattgtacatgttgcatgttttcttgtttggatgtctctcccaactggaatgttagttccaagatggtaaggattttttgtgttaagtggtgtgtcattagcatctacagcaatacccagaacaggtattccttgataaataatcagacacaataataaataaatgatcacctttctaacccaaagcacccattagccagtttggatccatgttgaatgcaaagtctatcaggagacaaggaaatgactacttcacacacctacatgagaccccaagcctgacacccatgtgtgtttggggtcccttaggtatctcaagcctgaccaggccagaataatgcatgaccaattaattaattaacactaaattggttgaactggccatgggaggcccctatgtggatgctgccccaagactggattcggtaaggcttaattccttaaaatcttatgca

SEQ ID NO: 30416 - DNA, 1400 bp, Bovine  19866880568530
  misc_feature (1)..(1): n is a, c, g, or t
nccttcccagcactgactagtaagcatcccaccaaaataaagataatatcatatttaccccaacttatatgccctagttccttatcatttaaggtttttatctctgtccactaaggagaagagagaccaaaactttctgattgcatactctatgccaagcactatgtacatattagcttatgttggttttcatagcaatcctatgaagaggatataattaatttaactttattcttggaaaaaaaatttaaggctttgtaacttgctaacttcatggaatggggtggggagaggtgtgaggttgaagccaggttggagtccatcgaagcaaaactgtaaatgtgtcctgttgcccattccgtgtgaaagcagtctgtctctgagcctcttctgtaatggtgatgggaaagaaaacattcgtcagatcaagtgccacatatcatgaaccaggacagcataacaccaacccaggatgacaactctaggaaagaaatcacacctgatggggtggcttcactcggggtttctgcctgctgagtttatggctgttggtggttattctctaggaccgtggtccccagaccccaggccacagagcagttctggttggtggcctgttaggaactgggcctcagagcaggaggtgagtggtggacgagtgagcgaagcttcatctgtgtttatggccaccctctgtctctggccttactgcccgagctctgccttctgtcacatcagcaatggcataataaatataatcacttgaatcttcctgaaaccatcgccccccaccctggtctgtggaaaaactgtcttccacaagaccgatccctggtgccgaaaaggttgtagggatcactgctctagtatctgtctggcttttgcaggggccagactgctgaattaaatggagatagggttggaaccacagcttctgcatcctttagaccagtactttccactgtgtatataatgtgagccacatatggaatttaaaaatgtttaatagccacattaaaaaagcaaaaaatcagtgaattggttttagcaatatattttatttaactcagtctattagcaatattttcatatgtaataaacataaaacactattaatgagatattttacaatctttttttggagtacccagtgtattttatatttatattacattccaacttggatattaaaatttcatcagaaatatttaatctatatttaagtttcataaactttacaactgaaaaagtagacttgcatacttgagttgttccaaacatactgaaaagatttccaataactaactcgggtatgtttaaaattttttattaattaaaataaaaaaaattcaactgctcagtttcactgatacatttcaaatcctcaataaccacatatg

SEQ ID NO: 30417 - DNA, 1112 bp, Bovine  19866880630510
  misc_feature (1)..(1): n is a, c, g, or t
natgacaccggggaacttattggttcctctttgtccagttaaatgcacagcctgcatatatttgcacagcatctcagggctgccaattctctgccagtgaatgttaccaaaaatttctgttagaagagcttctttctaaggtataaagcttcctgtgcctctggctgggatacagaaggttggcacaaactgaagcatgctgtactcagagcttgggtctgagctcagagaaatttgactaagcacctctctcagatgagggccaaaatctgttatgcttatgccagcaaatctcccagggaaattgcagagaggtcatctcatgtatatgcatagtggcacagagagagaaaccaggtttttgaagggaaaactcaggagctggtgagcatggcttaaaacacgttggaagcaggaaaagccagggaaatatgcttctgccctgtttggggctgtggggtaccatttcccctcaggactcagccccagggatggggcgagcacaggtctctgaagccactggtggcagaggatccaagatggtatctctgactggagctggagtaggggaagcaggcaagttacaggttattctgaagtttctggtgcttatcatccataccaagtagcttcctgttcttctccccactcctccactccttgcttccagcttgaaccaaaaagttcatggaggtcagaaaaagatctttctggagtctctttgccctagtgccaaagtgtcagcaagactctgttggggtcatgctgcttcatccggtgcttacctctcttactcccccgccctttctaactggatttggttctcagggtccttttgttgtcgttgttcagttgctcagtcatgtccgactctttgcgaccgcatgggctgcagcatgccaggcttccctgcccttcactacctccctgagtgtgctcaaattcatgtccatcgagtcagtgatgccatccaaccatctcatcctctgtcatcccctcctcctcctcccttcaatctttcatagcatcaggatcttttccaatgagttggctcttcatatcaggtggccaaaatattggagcttcagcttcagcatcagtccttcctatga

SEQ ID NO: 30418 - DNA, 1350 bp, Bovine  19866880640193
  misc_feature (1)..(1): n is a, c, g, or t
naatattatagaaaagtgttgaattaacaacaggaaaagaatacacatatacatggttatggaaaaaaaggttacagaacagtgtactaaaatccataaatcatacactttatgggtgaattttatggtatgtgaattatattttaataaagccatacaaatcctccctcccagggtaaatgaataatctcatttatatttaaataaaaacatgtgtatatccctggttgattggccaaaatgttaaacatagttatttctgggatggtagtgtttttaccttgttatggtggccttaggtaagtattctacaatgaacataacttttacaatacaactaaaaatcctattaaaaacaatcttggatacaaactgtaccaaaaagttaaaaatatctatctgcttttagacagaaaattatttttaaatgtctgtcaactacctcataacctagatgttctatcatgtattataaaatctgtaggttagtctgcattccttaagaatattcttaacaatttatatcagaagcactatttaacatgtttcacattttagtgttttgattcttctactgtaattctcagaaaaaaccttcagttttttgtcactcaaaaaattatccccatattgctgtatagtaattctacatataatagtaaaagtttatatttaacatctgctaattcttactggattttccaactctacttacattagaaaagaaattagaaagaaaataaattagagtaaaatcagaatatatagttatattagttcaatatttgaaaaatcttgtgagattagacatatcaaatactaccactagcaggtgagaatcataacactaaattaggtgatgatattccttcccaccttccatttatggcagccatgctaacaactgcatacctgtcatgtagaagtcttttattgttagctgaggtggaacaagtggatcagcaagaagctgttggttcactagctgcaaaaaaaggaataagagatcagtaatagtattgaaaactagtactgctacaccagaggatacattattatgaaaactgcaaatagacaaggttttaccttggaaagctcacttgcttgctggaaataattagctccttcaacatcatcatatcgaacaagattaggagagacttcttccaatctgtttctcacttgatccagagtatcatatggaagagtcatacctgcaatctataacataacaggttccaaagcattaatactgataaatttcaaataatacatcattgcaactatggtaaaataaggcagtactagtatgaaaaatatactggggtccatttgcatgtatattaagca

SEQ ID NO: 30419 - DNA, 1440 bp, Bovine  19866880641473
  misc_feature (1)..(1): n is a, c, g, or t
ntctataaactgctcttcttaaaggcatcagtcttggtctaaagctgctctttgaggcgaaccttagtgatctctcttggagatcaactccggttctcagagacgcctagagagacctgtgctcctctgagtgaaggaaagatattacatctgggtgtttgctcagcgcccctccagtcaggactcctgcttcagcctcatggaatatgtgtatttgaagtaggaaaacagagcttggaataagtatgaaaaatgagataggtagtgtggatgagacctaaatcctgcaacgagccccaccttggttcctgaaagccatggaatcagaaatctcagcaggcctgaaggaatgttcacactgacagttatccactaagccctttttggaagtaggtcaatgggttcaagcagtgacatgtatagaggagcctggctttcacttctaaagggtttattcagatttgaagttcatcggtgtcaaaagttgccccaagtaggggacctatttcagattaggcagaggaagctcaataaactttctaactctgtaaatttgactttgatagagaaattgatggcttcttcattcctctctggattcttgtcacatatttctggctgatagttctgaattctggccctcctataccctgggcattatttttgttgatagctttatagccaaacttgactttcatgattatcttctaaatcataacaacacttaccatcaatttcatcctcgtagccctctctcccatgtatttctgggatgtccactataacaagaaagaaaatttaaaaaaatcagtcataacaggtttgagtggctaaaaggcagagatgccaccttgctgaaaatgactccccagcattgtgggaagctaaaaaatcgcatctgcttctagatcatttagtattgcagattactggatccgtcccccttcaaatgacttgactttacttccaacaacaaccagaagaacagaaacaataagaaaggccttaagtgcccagtagatgctctcttgtatctttataataactgttatttacaaccaatgtaggtctgagttttatctaaggcaacttcagtggtctctcatgtccatcatcagtcacatgactgtaatgttcatctggtatagcacacgacccctcctcatgaatgcatctaagtggacacaaagcataagagtataaaagtttctcctctggattgcaataaatgtaatttaagtcacatttcatcattatatgttttaatgtatttatagaactagaactggaaagaatgttataacgcctgtccacccccacatatccatgctaatacttttctctttccttcccaatctatttttcccattggctttcttcacagtttagaatagatcaaaaaaaaaaaaaaaaaaagaatagatcaaacataggcaccca

SEQ ID NO: 30420 - DNA, 1094 bp, Bovine  19866880669277
  misc_feature (1)..(1): n is a, c, g, or t
ngtctttgaaacagatgtcacccgctccttcgccattctctttgcgaaagggaggtgccgagctccagaatgggagacaataggcattaatatccattggaatgacagctgtttatgactcgctttgctcaggacacgtgtcccccaagcaaaatgattagcgctccggcagaatacaatatttgtggataatcaaaagcgaatggcgaatcgtttgggctaatgggaagcagggtcctcatcagcctttctggaagttctcaccaagaataaataataaagtgagctcctagcagtagcctccttcctactcataacatagtggatttgtttaatgtgtcctgggaaaacttacctacctcaccagggtgttatgaggattaattaatgtttataaagtgcttggaattccactgaagaaatgtaccttgtcgatgcaaattatcattctatagtacctttcattccagaatctcaaagtgcttccccaacaattaattaagtctcactacaaccctgtgagggaggagagcatccttctgcccttactaatacagcagagtttctgtacctgagttgcagagtctaatgttccagtcgccctccaggagggagagagaccccattagcaagcatccctaagtgcttcataatacatgagctgctaacaatgcgaggcaaagcactatacccaattctgatggccataaggacttgtttaattttgtttggtccctaattgtctgggctgcttgttttatttacatttttttctccctctcttgtaaagcaataaggtgcttgtcagatgagagcccaattagcagctgtaacaagttacagtgttctgactgtaccatctaatcctattccttagcatctgcagttctagtaacaggttgtacctctctcccaccgtacataccccagaagttgacttatcctttgcaaaaattttaatgggattattaacaggatggacagttagatgccacgttagccatctagaagctgcaggctcgtctaacacatgaacatctcaagcatgtactgtaattcctttttcattacaagtgcagtgattcatacgcaca

SEQ ID NO: 30421 - DNA, 1978 bp, Bovine  19866880769905
  misc_feature (1)..(1): n is a, c, g, or t
naccaggtgtgtgctctccagctcagctcagtctccttggctcttttgtctcctagacggctgttctgttcatatggataatgggcacccttgcttcataccatttcacctatgtattgataggaaaagcagtttaaatgtactgtgtaccgtccattcactatctctatgggagtgaccctggctcagcggcactgtcttgctgcagggcagaggccacgctgatgtcatttacaagttacggtcttccttctttcagcctgagacctgggtctgaagaagcagggagctctgctgtcagctcatttacctcctgaggctggaagctatttaaagctccaaatagatctgaagaactcttgataccctcctgatcattcaggatgaagatttttctgttttactttgtttttgagggaccattcaatttcctgggtcaatctggctttcggcgatcatcacagtcagataaatgttctcatgggtgaacactgtggggtcacaagtgcagcctttcagccacacaccaggacaagggtgtgtcctcagatgatggactggcaaaggggacctcagaagattccagcaggacaactattttcaggtgatgagggatcgtgtgtttcctttctcaccagaaaccaaatatgtgaccagtaacttgttctagtcaaggagccagagaagctaataggtttttgaaaagactgcagaagtataacattctaagacacacacaaaagagataaatagtaactttggtagactggaagtgaaattacacttggaagatgattttgatccctcatgaattcaaagacttactaaataaggctttaaaagcatttacggttcttatccatcccctcactccagatagagattagctggggacttttacactaagaaaatagggtttacaggtcagatcaagaagccctctttgtcattactgacagccccaaacactgaagattgatctataatatgctcattggtgggaaaatagctaaaaatattaggttttcatggagaaccttataataataatcatcatcactccagcaaaaaaatccagatatctggagcagaaaattaagcctgactattacagactattctactcccaaggcatttgtagacagacttctttccatcaacaaaagcgagccctggttaaacgtaacaacacatgatcacggctttaggtccaacggcacaggctctttgctcaagtgccacttcctcttacctctttgaactcaaaggcagagagagagtctccctcctctcttctgaggcacggaatttcttgtctcttagggcacttatcacattgaatttaaatgttgcgtcttgctagaagattgagagctcagagtcatagtgtccttgagacttggcacagtactgcagaatttttatagatcaagtttgggaaaggtaggaaggaaagaagtaaggaggtgggggagtgggagaggaggatggcaggctagcagaacataaggaaacgtaggccagatggaaggaaagagacacttagtgctacttacccagagtgtctgggctcctcttctttagtcttgaagcgtactaattcctaagccttgagtgtttcacagtttataagaccagtgaacttgacatctttcaagacaggtcaacactcattttcagcaagccttcctgcatccctttccctacaccagtcctcttatcttaacttcctgcatgatttagtttacttaccaccttgggctcagaggggtttttttgttttgttttgttttgttttagacacgttgtctttccatgctaaactgtgagcaccttagggcctagaattttattctgttccttcaagtcccaggtagagttcctggcacagaagcttaataaacatttgtcaaatgaataaactaatgagtagaaatccctaactttcataattaacctaaagggggcctacattaaa

SEQ ID NO: 30422 - DNA, 2176 bp, Bovine  19866880787974
  misc_feature (1)..(1): n is a, c, g, or t
ntcccgggtggtacagaagataagaatctgcctgccaaggcagggaatgtgggttcaatccctggtccgtgaagactgcacacactccaggcaactaaagcgcacgtgctacagctactgaagcctgcacacttagagcccatgttccacaaggagagaaaccacaacagtgagaagcctctccgcaactagacaaagctggcatgccgcacccaaaacccagtgcagcactcccccacccccgccaaaaaaagaaagaaactgcagccatttccactcactaaactttcagccctgctgcgtgcagacagtgatgggctacctacctgactggtctcctctagggagaaccctcacctctgggtaagaacagagacattagggatcttcctgtagctaaacacatctaaagatggaggggctgagctgggcatacctgggtccttctcccaaagttaccaagtcaggggaaggagagatgcacgaaatgttacttgaaactttctccacatagaaacacaaaagtggggagatgcggtgtccaccttaacctccttacctgcagtcacagattcaaatactttcccatagtgtggctatgtgaacgtaagagtgtaaggagatcaagagcagcagtgggcacatgtagggtctgggagaagagggggcggggctagaagttgtgtttagaaagcaggagcacccaccaccccacccaaggtagtgcccctactcatctctggccagttgtagaaccagcaacaggctgggcttctgaatgaggattcttttttaaacaatgaaacttcttgattgttcaatgatgacacagaattcagcttcacatggtccatctgcgagctgccagcttgtggcctactttatagtaataaggtaatggcctgggaaaggatgaatttcaggaaaaatggaaaaccaaacctgaaggcatttgctctctctagtaagagcagaagagaaaggagggctatttcctccataataaacaggaagagccagggcactgggacccaaagacagggtctcactggtactcccaagtctggggcatctgagagactgctttgtggccccaatgggaggattatagcccttgatccacaaatatgggaggatgaaaggctcccatccaggaaaaagggagatcctgccagaatccgccttgttctccaagaccacgccctctactgttctcagtcccttcaaatgcctaaggagaggcaaacccagccgccaagtgagtcacccagtctgggaggacgactttcttccgtcctcgcttccctttggctcccttcccctcagtaattgtttccagggccggcgctgggggcagacaccatccgaaaggcctgctctgttcccccctccccctcttgaatgggcctcacaggctgccctgtgttgctagtgcccattcatctggaactagctgttcacagccccagctaaaaaggcctttcatccactcattattcctctaccaaagcctcaaacgggaggagacttcaaagtatgagggccaagcttgatttccagtctgcggcagctctcccgcaagcaaaggtgggggaaaggcagcccaccgtccacgggttctacctggtccggcagagttgtcatctgtccctagtaacaatcagctgggtcccctccccttttggaccctcccattgttgtgtctcttagagaaacaaaggcttcagaggaaggctcgcccacagttctgagccacccccttgcttgttgagtatcacctctgccagcacaagctgaaatgctcggccttggggcgccctgtgagttgtgtcttgaaacaagaggcccctgacacagctcctggatttctccctcttgtcctcctcttcttcctctgatttcattcctgatcagaatcatatttctaaaatgaggccctgagtagcaagtggaatggcaaagtggccatttccccatcgtgattttaaaggtcatgccaaagccaactagtcttttttttttctagttattaaattgaggttggaatgtacttttgtagtttatgggtctttgagcatttgttgtatgatcctcaagtcccaatagaccccaaacgtaaacctaggcttcttccttcctgaccattgccacctcattttctttgagtgagacacac

SEQ ID NO: 30423 - DNA, 1186 bp, Bovine  19866880794373
  misc_feature (1)..(1): n is a, c, g, or t
nataatattagtgtttaattctctaatagttctgagatctctggtctctgtgggtgtgtctcatttctctctttctctttcttccctctcttttatatgaaagtggagaagacagctaacaacaagagtcctgtcatccctatggtgcaatataccctcatcttttcttttattagtattattttaattggagtataattgctttacaatggtgttttagtttctgctgtaggacatgaatcagctacatgtatacacaaatctcttccctcttgagccgcccactgctcccccatcccacccctctaggtcatctgagtcctgagtggaactccctgtgctacacaggcttccaactaaccctaacacatcattttttttttccaaatctattttacacatcttttttttttttaattgtggaattcttgattccccaaagtagatgttattatctccatttaaaatacacataacggagaaaaacactactgttattactcagactgtcatcgggagggggaataaatgagtgcctgtattatgggagctgggagctgaaatctgccacaggccctaaccggaaaccatcggatttagtggctgctaatccattcaattcaggcatttgttttttcctccgtattttttacagcggtgagagagaaatctctttttctctacagaagtcatttcagatctcaaaatctaaaatgcgtcctctccgatgcatgcccacccacagggttgacaaatgctagatttcccaagatagctgccacacgctcagtttctaatctccgtatttattccccgccagaatttctaaatccttccccggtacgtccagccatcctttctgaacgtttgagctccatctgctttccataaagcccctgggcactagtcgggcgacagaggccagggtggagggcccagctgggggacccctgcacccgaggtctgactctgcaaggcctctgggcgttctcgggccagccagcacgccacgcgccagcgtgcttcccagtcttagttcccccgcgctgccggagagctgaatgaggagcagcgctatttttaccttcccggctgcaatcctttagatatatttgcaggaaggaaataaataaaggattgagaaggaaaggcttggcctaagttttacactagaaggagggggttg

SEQ ID NO: 30424 - DNA, 1308 bp, Bovine  19866880820016
  misc_feature (1)..(1): n is a, c, g, or t
nttgggaagcttctctggacagttcatggaatgccctgtgtggtgtatggtgcatggaacaaatttgacactgaggagtattcctgagattaaaatgcaagagaactgtttagagcaaagcagataccacagatagagtttggcaggcaagacgtttcttactaatagggctaacaatttagaggagaatgtcataaattgtaatatgtttacttttcatctgatgaattttaacggcagctttcaccattacctccaggaatccataagaaacagaaaaaccagcctggaaacgtatttgatagtcactaaaacaaagtctgtggcattatctcagctctacttctaaaccacattattttctcagaaaacattttaaatatagcacaagaaagagtcctcatattgcttgcactcactgtaacttgaatacagtagttctttgagaagtctcattttcttgcctatcttattttgttattcaaatgatgaagcatattttgcgtgaagttacaccttctcagaggcagtttgttctggaaaattggtgcagcatttccatttctcacatctttacataactggtttcttgtcagcaaatgtaaccgtgtttgacacagtagccctggaatctggacccctgcaggccgtgagcaccggtgcgtctctgcagctctgactcggatgacacgccttgctcaggaagagggttaaaatggacagatgcgtctcaagagctcaaatatttctgtcgccaggtttttattcaaaatatagacccttgtcatgagaatgccaactctgtcctcaacttaagcttcaggtgtaaacctcactggcttcctatcgaggcgtgctcctcattagctgaaacagtgacatggccacacaaggcccacgtcgaccagctcatctgactgcagaggctcagctgaatgaagaaaaccccaaagtgttcctttttgttctcttttaaaatggagcttttgacattataaggtggcattttattaatacactcgttatctcataccagaatcactggatggctagagtggctcctgtaaaatatcttgtacagacattaccctggttatccctggcccacccagctctggtcttattcccttgtgatcctacaaggcccctctcactagcagagccgttgcaccacacaactgtaggaagcgctgtttacactgttttctgtacgaatgccaccctagggctatgcgagtgatgccccttaagttgtgtgtcaggggagccttgcctggtgcatgcaaccagggtctcccacaaccaggt

SEQ ID NO: 30425 - DNA, 1230 bp, Bovine  19866880841545
  misc_feature (1)..(1): n is a, c, g, or t
nccttttgtattcctgctgctgctgctgctgctaagtcgcttcagtcgtgtccgactctgtgcgaccccagagatggcagcccaccaggcttcctccgtccctgggattctccaggcaagaacactagagtgggttgccattgccttctccaatgcatgaaagtgaaaagtgaaagtgaagtcgctcagtcgtgtccaactcttagagaccccatggactgcagcctaccaggctcctccatccatgggattttccaggcaagagtaccggagtggggagccattgccttctccatttgtattcctatcaatcatcatttatagataaatccatggtcatggctcaacaacttggcagcttttgagaagacaacttaggctcttggtcctatggaatctccccacactgagaaggcaccagagtaatgtcctgaggctcctaacttattttgaagcaaccagtacttctgtctccattatagacttgctgcatccccaagctccctctgggagttagagatgcctgctcactcgttcaggaaacagccctgcagagtagcaacatctccatagcctttctgagcagctgtcccattggaaagaacagagcttcatatgaagcccacattccccaagggctatgctgggggcctggtacacaagcacaggtcctgtctgtcaccctcctctgcccatggcttgggtttaaggtcatagatgcacatcgttgccttagctgttctgatgtgagaggtaagtgatggtggcccccctaccgagcccagagagatgcggcaaacggaagcacatggctaccattgagcctccaccctttcagcagccgctggtgcacccactggtgtgtactcgtgcgatgcagacacacagaagtgaacggtggggcagatgggtgggagactgtgcacagccttgttatgttcccgcctcagttcctcaccagcgaaccgcaagcattcaacggcatactgctccttgcttcaatcaagccatgccctcgccacctgaaaggaggatgaactacctgctaacaatgcacttttggaatccagttccactgccggggaagctgccaggtgccccgagattccaccgggagaaaacaaggctgtttaattccaattaaacaccatattgagtactccagtctcagtacactctatttgtttagtttatttgaatgtttgataagagaagtgctggggggcaaga

SEQ ID NO: 30426 - DNA, 2928 bp, Bovine  19866880843657
  misc_feature (1)..(1): n is a, c, g, or t
nctagatcatatctgtcacagctctaacaaccaagtgactgtaaatccattcacagccacctctgcaacaaccagccattcctcttgggtagggggaccagatccttcagctcatgacacctataacacatgagctgtctgggcatggacaggctttggacaaggggaatggggaaactagtatgttggaatgccactgagccagatgctgtttaaatacaatcaggcctaaaaaaaatcccaggaagtaagtgctattatttccactttgttgatgaaaaaactaaggctcagagatgtctgtctggatctcaagccttgccatgtctttaggctgtaggcttgtggttttctcccttgcttcttgtctctcttacatgtgcagtgttcatgttggtgttaggagtcttggagccttgagatccccaagcgtgggtggaatggagggagagctgctgttgagtggtgtgctcccattgtttctaatcccaacgtagaaggctctgggaaagagtgaagagcagcaccaaggcttagagctaattaacagcgtggtctttgcttccttaggaactgtaactaggaactctgccatttgacaaccttgaaccttctatatttcccacttgctaaaggtcaaacgtcagagccattaatagctcacaccgatgtggcggtgaaggctaagagccatcataccttttgcaaccaaataaggggatgtggtctgttgaagagaaacgaagggaaggagaggacaaaacagtattcagaggaccactgtattcagctgaaaccccttgttcctggtactgagcccacctattccaggggagcactcccctccagccttgctgtttgctctgcttccctggggagcctccgctctggtccccaggccgccaggttcctcctctgctgcttcgctgactgccgggagcaccaaagcaggactgccactgccgggagcaccaaagcaggactgcctgccgcacacatccctcccagcatcagtttggctgcttcccgaatggtgattgaggacaaagaagagggagaagacaaagaaaacgcgccacaaaagcagaaggaaagaagttggagccagacacttgggagaaggccgacaggaagaaggaggtgcctgaacctctgtgatctaatcttggggaggaactaccaggaggaagggcaggaggtcggacagtccaggccttgctatgcccgtttcttggcttccttgccgctttggggaaagagatggagcaaccgaatccaagggaaagagatgaatcagttctcctagaattcagcatgaggcagaggctctttgtttgtttttttgttttgttttggcagggcagaagcaaagacaagccctctgcttatttcagacgggtgctgtgagcagtggggggggcccactactgacctgctccctgaggatggtggtggtggctgtgtggcctccatcaggagatgctaaggagttccaaggtggggggcttggtggggggtttgatttgccacgtgaatatataattggagtgttgagtggatttgaacctcaacacagctgctaattcacagtgtacacaccatgctggtaccgtttagaaacacagcacgtcttatgtgtttttaatatccaattttatcttatctgaccccttcatttctcagcctgggcagacaacaccaggaaaccatttctttccttcctcggtaagaaaatgactgtgtctttggactgtcttggggaggctggctgtgtgtgggcatggggaacacacacgcgtgggtacgtgtctgaggagggggctgctcttcccatggatgtgtgtggccacaggcttgggtaagcctcctggatctctgcccacagtggcatcagtcagtgagggaggcaggcacatgggttatctacctgagaagacctacttggttctctaattgaccttccatctgctattgctcactcttctcccacccctgaaccaaatgaaggctcttacaatgtgacctcaagtaatcattcctgtttctgagcccagttccttctcagtgtcttgtttgcccctgagcttgtgcttttaactaccttctgttcttgggacccttggctgacagaataccatcttttttttggaatgtggaccatttttaaagtctttattgaatttgttacaatactgcttctgttttatgttttggtattttggccatgaggcatgtgggatcctagctccccaaccagggatcgaacacgcagccctgcgttggaaggagaagtcttaaccactggagctccaatgtgtgattgtgctcagtcgctcagtggggtctgactctgtgaccccacagactgtagctccccagtctcctctgtccctggggtgatccaggcaaggatactgaagtgggttgccatctcctcctcctcggacctccagggaagttcccaataccattttattttaataaactttttatatacctcttactctgaggtgggtgtagtagaaaaaagttcaaacactaaggcttgaaccgggagccagactctgttgttaattagttcctgctgtgcttactcactcagtcgtgtccagctctttgctaccctaaggacagtagccagccaggctcctctgtccatggggattctccaggcaagaacactggagtgggttgccatgccctcctccaggggatctttccaaccccagattgaacctaggtctcccgcattgcaggcagattctttaccgtctgagccaccagggaagccctcactgtaggcaaatatctctacctcccccaggcctcaatttccttccctattaaatgaggagatcgtatgggttgatctgtacagtcccttctggcccccagattctaaggcttgcttcacaagagtttctcatt

SEQ ID NO: 30427 - DNA, 1380 bp, Bovine  19866880844552
  misc_feature (1)..(1): n is a, c, g, or t
nactgacttctctgcgtttaacgtgggatagcactgtggttaagagcatggtcgggcaccagactgcctggattcacatttgctttgtcacttactagctgtgtgactttgggaaaatgattgaagtgttctgtgcttcagtttccctaggcctaaaggaggattaacagtagtacttacttcttgggggttgttgcaaggattccattagttactatataaaattcagttactgattctgttagttactgtacaaaaagcacagtgcctggcatgtctgagtatcttacgctgttagccaaggactcttacgtccttgttggtgacagtccccactaaccctcctgggggcggtgagcatagaggagctgtgctgagcatcgaattgtaagctgggtgattgtttgcccttctagatggaacccttcatggggttaggtctttacttccatatgtatcatcacagctcttttctgccttgcatccttctcacttgctgttccttctacccaaaatgctgttcccctcacttaccatcagactaccctttactcagcccagaccttaagtgtcacatccttagaaaggctgtccccaaactgttgatcaacgctccaagaggttccttcagtcactcgcagagcacctcgtgctcttccttcacatagttatccccacacttacatttgtttattatctgtcttgccccccagcctgaatgctctgccatgccagggaccctatctgctcattcccttctttttcatctccagctcccagtgtggggtccagcacacagggggccttctataagtattcatgcagccactgagagagtggaggttgcctgaagacatggtacccagcaaggcagggtccagacttcgtgtgcattcaaaacccacacaggtaaaatcgagccttctgtgaaggccacgtgctgcaatcgtgctgttagcacagggctggaactggaagcagagcccaggactcagttcgctctccaacctcacagcaaccccactgtacctgtgacgcggcagccgaagagttccaggcggagggcgatgcccgtgtgccaggtctgcgggcggaccctgacgaagcgtgtcagcagcggcgagtgcagcttgttcagaaccacctctgtggcatcgttgttggcttggaagacctataacatcacacgccagtccatgttattgaaatctctgtgtgtagttgagccaggcagtctttgacagagtaggggaagctctgttcaatgttagttcccttaagcttaaaaataatcagtgggtttgtagtctggggctgtttttgaaatgccatggaaaaaaaaaagataatttctcacacagctctaacttgaaaacaata

SEQ ID NO: 30428 - DNA, 1355 bp, Bovine  19866880858578
  misc_feature (1)..(1): n is a, c, g, or t
nggggggttccattgtcttaaggtaggaggtttcgtcccacccgactccttccacccattatcatcattattatcattaaaataattaccgtaacaattacagttgatgagacctcgggtttatagagcacctttcatctaaaagttcaaagtgatttatctgtgcgtcatccctttgagagcggtaggagggtaggaaagtattgttattattttttttggtcttatctgctgggaaagcgaggtccaagcagatagaggatttagtcctagcctcagggtagactgctgttagggtactgactcttcttctgggcatctccattgccctactgcccataaaggcccttatgcttgtgtggcccccacagctcatccctgacactgatgctccctcccaagatgtgagggtcccaccggccactgcagtgtgatggccatctccccggccagccaactcctccatgcacacagcaaacagcctgctctgactgtgggataaaggtccttcaaggtctgactcacactgttcccatcctgtgaggagacttcctgcaatctggttccccttcttgtagaagctggtgacctttctagccatatttcttcccggtcttactgagccttcagccaagagcacccgttattctgaacttcacagcttctactcccccacaaatggcagctgattctttcaggatagagggatgtgcttctgtgatgcagagaggcgagcgctgtaatgtgccctgagtggacaggcctgcttttgctccagcagctacggggccttcagaatacagttgtcgaagaaagctgttacccagtggtggtttgagaggcggaagcggtcccagctgactggccaccgaatgctcttttcagaatctccaacccggcgtggcagctgtcccttcctgcctggacattagtgcaggcccctcatgtccacaccccagtgctttttgcacagtagtgacgagtttgcccctggagccaggaagaagctctgagctctgtaacctgaagctccaagtaaatgaaatgcaaagacagcactctcacgcctgcccggtcacacctactcctcagactgtcccctgcttggatttccgcatggcacatttttcaggcaagttttgtattttctgacttttgttatggaggctggaagccagcaaaggaagacagaaaaacctttgagagctcccttggttcctggaaaaaacataaaggattttttttgatgctgacagattccctggagctcagcactcctcgttcccagcaggctcccatttttcggacagatgggaaagggtatgattcactctcacaattagacccgctgggag

SEQ ID NO: 30429 - DNA, 2409 bp, Bovine  19866880876248
  misc_feature (1)..(1): n is a, c, g, or t
natgaatgattacagaaggagaaattattacaggctgctctcagctcctatcacataagaaggtgttacattaacaagatggaaggtccctgcggtcccctccccaacacagcccccactgccaccacctgccaccccactatttcaatttgtgtggcatggcaggaggggagcccaaaggcagggagcagggagttaattcagctatactcatcaaaaagggggtcacggtggcagccaaggccaactgaagcggattcaacctgagtgtcatgtgaaattcttcccttgcaatctgtactggctatgacctctgcggcccgacaaccatcgatgacattaaagcaaagtgaggccttttttcttagctgttcacatcatctgctttccagcctgggtgtgtgcatttccccatagatatgcctggccttgtctctgttggcccccaggttttctggtgtttctaacctttcctgacataagcatggacagatggagaaccaggcgggtgccagcctggaacccatgctggagactgggggagactaagttgaggaaggacactggccctggagccgctccggaccagcacaatctggggtgatggcaacaggaagtctcccttttgtggtggccaagtggacgcgatagattgagcggccttccaagtccttgctcgtcagtgtcacaggctgtcatcatctcattcctcgtcctcatctcttctccagtctccatgttaaagaatcacaggtcacaaatggaaggttagcagagagtcagaagcatgcagacagatggatcaatagttcttctttaatgagatttgtattccttcagattccattcacatgcagaggggccaatgccctagtctgcttttaaagtcaaatgcaaagccagatccagggacagatgggctgtgcctgagagggggatcgccactggtgccttccccaggaggccagaaaactcagttccttggcctcgcccctgcaccaagctccttaccactcagagccctggtccagttcctgttgcaaatgtgaacctaaagtggtgaggagccccagcacgctcactaaccaatacgatgttaaatatcacacctccctgcttgggcctgggctggaagccgcctcttcgttacacggctttctctgcacttaaggaaagagagtacgcctctcccagatatgccccacagagacctgccctcagcctccccagcgctggggaaaccttcaaaactattcagtttgtctaaaccccatccatctttaatgtcagagtctacattttctcctctcctccttttttcaaagctgccaaaaaagaaaatgtcactgcattgggggccaattcaaaagccaggcttagacggatgttcggtttcattccccctggcccctatgtctttatctcccgtggagtcttcagaggctgtgtctccacccacctccattcctgggttcttttgacgtcttgatgtctcccctgtctcttgcgctcctctcttgccttcttctaaagcacaggccttagaattcacaaagctgtccttgtgaccgcagcccctgctaagaggacagcttgttgatttcttaggggatgggaagggagcttgccagctgaggctgtcgccacccctatcaacaccctgccagggattcagaggttgaacagctgatgcaggtaagtatccccgatggtgccttttagtagccagattctccaaatttgtgcagaacacatggaatcatcccaggctgtgatgatttggttgggaatggtgtatgtacctccgttcccactgcatgccttagaaagactcttcaagccatgaagggcaggtggcagtcctgatgaagatgccagcggaatgcatccccgacagcccctggctcacccaggagcagggagctgaggccctgattgatacctgggggtgaggctgtcagctgggagcacacaggagggagataagggactcaatcagtgtcagacccatcttgacacacatcgctgtaaatcactttggggaaagatgctcagctgccaagagcagagaagggcgagtaggtgatagaaaaacagggcgagaagcagctgtgtgggctgccagctctgggatggaccctggccttggctctagagggaaatgtacaaaatacacagaacactgtccagccggccttagcccaagccgaggtacagcactgagttcactgcagtggattaaagcataatccagggtgaacgtttgaggatgtgaattgtctcaataacacttctatggaggcttcccaggtagcactagtggtaaagaatctgcctgccaatacaggagacacaggtttgatccctgggtgggggaagatccttcggaagagggcaggcaacccacgc

SEQ ID NO: 30430 - DNA, 1116 bp, Bovine  19866880890130
  misc_feature (1)..(1): n is a, c, g, or t
ntttcgaaagtatataaagttccatagtcctcagttcctgaagagattcaggctgatttgcatgcatgtgtaatgttcagtaggagtgggtgttaaaacacttccatgcatttgcttattatgccacgatgttaacattctataagaatcacaagcacacccctcacaatctatttctgttctccttctagttataaaaaggaaccattataaaaaaggaacgaattccacttttacatttagtcttttattgctttaaaattagtatgaaaaattctcggatccaccttcagaacttcaatttagagaatatttagcttctgacaaggagagattcattctttccaaattttctctccatgtctgtgattctcttaaagatctaaatgctgttttctcaagtgatgtgtaagtatgcctgaacagatgagcacagctgaagtggcttagactttgttctttttcataaggaattattaatttgttctctctcttctccattccttcactcacccatgcctaaaaaacttatttgaaggcataaagtaaacaagtacattctagagaagagaagatccctagctgccttttgttttgttctgcttttttcccatttaatgtggtgctggtcttcgttatcttttaaagataacctttttgatcattcaagtaatacatgtttattatagaaaattttgaaaatacagaagaggttaaaaagaaggtaaaaatccctcttaatctagtaactcagaggtaatcaatattagcattctggtttatttctttcctgttgcatattttctttgttacttaattcttaatgaagacagtggaatcatttgaataaacctacccatgggttctaaaattgttaaaatcttcatgagtctttaataatcttgattcatttgaaaaaaaaggtattaattgatataaataaagagcagttactattgtaaattatcagatttccagaaaaagtcaagcagttttagaacacctaataatggctctatctgtactgtccatttatatcttttcagcctctacagaaaattccattaatacactaggaaaatggaaaacaactgaaatgaaaatttaaacacttta

SEQ ID NO: 30431 - DNA, 1444 bp, Bovine  19866880943070
  misc_feature (1)..(1): n is a, c, g, or t
ntacatgagctgtgtttatctattggggtggtgggaccagcagatcagttgaatcttttttatgttaataatagatttcttcgtattctgagttataaaatattattgatcaccttttcttggtgaaataaagttgaggccttttgtaaagaatgccatttttaaaggggctcctttgtttaaagagttggtgggatcatttcaccatgcacatttcaaagctgggttgatttcagttatttccaaattttttttttttaaattactcagttgtgttgttatttatgaagttagcatgcccccaaaccaccatattttggctataggaaaattatgatacccttgactttttacctggtttatatgcaatttttaaaaaatgcattcctgtattttgagttttgtcattttgctatacattcattactgaagtgtctggtggtctaaaatagtcaaagctagagttttattaaatgctccagtcacatttatttttaatattaaaaaatcgtactttgaaacatgttaaaacaacttctgataaatgacgtctggatttgtcgttatctttgaagcctcattcattttagatatactcaagacctaggaaagctttttgtatgttgtttttacagttgtattttttgcagcatctcccagtttcattcactcttgctttatggattttttaaaaatctgcgtatttcttgtacatatgcatgcaaatgaaagaagggaggttgtattggtgccatttctcccttcagttactggttaatgggatttgctagaataaattcccctgattgaagggtgaagctaagcccttttgtgtatatctgtacagagatgtgtatatgggatgtggtggcactttgctgaatgtgaacttgccttgtcgatggaaagattgagaagtattatgtttatttatacatttgtataaatctatatatacacgtatgtatatgtgtgtgtatagataaatctatatacatatatttccctaaaagaaaaaaagtgtgtgtgtaacagataaacagcctttgttaagcaagattatatatctttggagaattgtggattattctataagcaagaagagggacagtctagtgtaattatcagagcatacaaagatggaagtccttaggattatagtcttgtttatgaattccttttagaactgttcttacttgccactcccactattcttcattttcatggacttctaagtcaatctctcaccacttaaaaatcacactactttgtgtttttttctcctttattaggtcctttttgccagaatcatttggcctaaccatatttcattaacacttcacttgtctctgaaatttcccggaagacacaaattttggcaatactttctaggtaattttaaaattgggcatcattgtctcaaaaacaaccaaccaataacaaa

SEQ ID NO: 30432 - DNA, 1203 bp, Bovine  19866880945945
  misc_feature (1)..(1): n is a, c, g, or t
nacaaataaaaaggatatggaaaatttaagtaaaaatgaattaatctttaaattttggtaatcatttctttatctaacttcatctgctttcttttttcctttttgcttctcattcagtcttcagccattaattgaatgattgaaagaaagttaaagctacaggttttcatatgtggaaaggccttttcttaatgtctttgttgatctcatgccgttctctcctgctgctcacattaattactttgcagatggctctaattgacccagtaaaagaaccttatctgtgttcagtccttcccaggctttaaagactctgcagcttctgaagacgtagaatgcagtgcttatgctcagctcttcctagtctgagtacttggtcctagagttccctttccttaggaggttcgaacttctctgcttaaacctgtgttctgtctggtcccgatcctgcttttaaacaccatcaccccatgcctgatgccctagccactggacttctagccactcccagaatatcctctctggctgcacactttgatccctgtctatgttacctgctctttcctgcctacttccctatctgtattttgtcctgaatctaccctggccttgttttcttttctttttcttttttttttcagatttatttctttttggctgccctgggtcttcattgctgcacatgcgttttctgtagttatggcaggtggaggctgctctctagtcgtctctcattgcagtggcatctctttttgcagagcatggtctctagatgcgtgggcttagttgctcccaggaagcccggaccaggggttgaacctgtgtcccctgcatttgcaggcggattcttaaccactagaccaccagggaagccctggccctattttctcattgcaaagctcccaatcatcttgaaagtgaaagtcagatcagatcagatcagatcagccgctcagtcgtgtccgactccttgcgaccccatgaattgcagcacgccaggcctccctgtccatcaccaactcccggagttcacccagactcatgtccatcgagtcagtgatgccatccagccatctcatcctctgtcgtccccttctcctcctgcccccaatccctcccagcatcagagtcttttccaatgagtcaactctgtgcatgaggggccaaagtactggagtttcagctttagcatcagtccttcca

SEQ ID NO: 30433 - DNA, 1551 bp, Bovine  19866880948298
  misc_feature (1)..(1): n is a, c, g, or t
nacgcagtcctggaacccagcaagaggagagccatcaggtttcagttaagaaccacagagctcttctctctgtgcttgtccatatttttctggcttgttaccttcacaaacatttctttttcttcgtcatgtcccaatggtaagtgttcgctctgtttttggacacatgcttttacttcttcgccaatttccctccccactagcactaatctgatcttcatttgcatccccttgcttgcgtgagagacatagttgtgcacgagtgtcaagcagacaaaaagactcatagggaaagtttatgtgtctttggaggcctcccaaaaggtaactgttgacccccatgcaccccattcatagagcttccaaatttgttcagcttgctaacaagtcagagagtgttttgagaggagggatgagtcaaatggggaccatgaacagatggaaaagagccagttgttatgctccaagtacatttcccacattggaacacgcgcatcaatgcctggcggtatatactgcatacaaggcacccacgtaggataaaactgggttaatttactaccaagcgctttgtttctccattgcataatcacaaatgtgcccccaaagaggcagtgttggaatgtaagccagggcaaggagccaaccagacaggagttcctgtcctcatcagacagcttcttctgctttcctgccagtcctccggggccattctggtctgtgacagggacacacctggatgccactcatgtctgttgacttgtcttccatgtaccaagctggtgatgtgtgtgtgtgttgccagccagatcccagagcaagctggtgacctataaagggtaagagacctggtgcctttaggtgtggaatgactcccagctcccccaccctgttgctgcctcttgtcttatgaaaattgctgctctgaaaatagaactcagtgtctcttgagaagggcctggaaaggacagcgctcatcgtgtttgcctccaaggccttaccattaaatctcccacaagcttgaggaacagattgtcagagacccacttagcaggccccaaacacctcagttgcctctactgggtgaggaaattgcgttcagggaaagatgcatctcaagaaagttgcctatagaatgggtttctataaagagaattccattttcttctggcttccattacaaaattggaaaatttatcacactgggggaaaaagtctctctggagactaaaatgaacatttggggtgaaaaaaaaatgactgtaaaccctcagcaatggcacgtctctcgttgcaatgaaccaggaactgctgagaaccacctaatggttcacttttcctttgaatcatttccagcattttgttggcactcatgaacctcacctacacatgccgtcaatctttttccctccctgcccaaatatatgagaactgtctccatgactgaaggtcccatttccgtgttcttgcacctctcaaaatgcggactgttcattcatgttagtctgaatctggcattaggctgcagcataagatttattcattcattca

SEQ ID NO: 30434 - DNA, 1545 bp, Bovine  19866880953305
  misc_feature (1)..(1): n is a, c, g, or t
ntattctggatcggttggatcgagattatggcattcagtttccaaagggaaaaaaaattgtcatttccactagcccctcttgctggaatgaaatgtcaggtgcgatttgggtgcaatctgtcaggcctctgagcagcacttctggtggttcatcttgaccttgtgcttgaggccgtcgtagagctcgaagttgtagttctccagcgtggtgcagctgcgggagctcaggccagagtaggaacaggtgcagtagagcagaagccccgcacatgtggccccgaggaggacgcccagcgagctcatggcaatgatggtgatgagaatggggtctagagtgtaaagccaactcttctctttgtcagccagaggggccccagacccggaggttggggaagaagagttgctccagtccacttcgtagtcatctaggatgtaaaggacacaagagactgcagacactgcttcttttagaaataactgagactccccccatcccagttcagaggtttttcagaacctgaggctgagctgttcgacactggtactatactgaaagtgaaagtcgctcagttgtgtctgactctttgtgactccatggactatacagtccacggaattctccaggccagaatactggagtgggtagcctttcccttcttcaggggatcttcccaacccagggatcaaacccaggtctcttgcattgcaggcggattctttaccagctgagccaaaagggaagccctgcttggcttcaaaacccagccccaccttgtcctagctgtgtaaccttgggcaagttatttggtttctctttgcctcagttcattcatctgtgaaatggcactactaataacctcacagggttgttaggaggtttgaatgaattaacatttgcacagtgcttggtgtccagcccaaagtaagtatggtctaagtatctgatacttaaacagtctgagtcagagtaagtgagcttagattttcacagggtgcctgcagagctcttggaatggccctctgttctgtacacccttcttcctttgtctccttaccccgtgtctccttacctccagctgcttcatgttaaatcaaagaacaggctgagactatttcaacatgacaagttctccaatttggcattcctggccacccaagcagtagattttttttttttttgatccaccaggcctcacgacctaaactttaccttactgctatgtgttacagattcagatgttgaattctgacccctagtacctcacaatgtgaccttaccttgaggataggtctttactgaggtagtcaagttaacatgaggtccttaggatgggccctaatctagtatgaccagtgtccttgtaaaaaggggaaatctggaggcagatacaggtgggagaataccatggaaacatgtagatggccatttacaagccaaggaaaaaggtttggtccacatccttccctcacaggccacagaagaagccagccctgtgggtaccttgatcttggacttctagcccccagaacggtagaaaataattt

SEQ ID NO: 30435 - DNA, 1087 bp, Bovine  19866880961685
  misc_feature (1)..(1): n is a, c, g, or t
ncctgccctgcgctccaccttattcaacctcaaaccacaggccctgccacctccggacttgggacagtttctcaagggatgtgctctattttaaaggatcgtttcagttcctccacccgagtatctcaaaaacaaatcgtaactacacactacccacccaaattcaattagaccctgacttttcaggccagagggctgtggctgttgatttagggaagggaaaaaaaaaaaccttgctcatgataataaagtaatccgtttatgtctgaatctggcctccagatgtcagtggctaagagacttcattttcatttcgaagctacatctgtaaaaggcatttatttgctcgggagggaccctgttgcgggggagctgctgggaacccgccgccttccccttgtgcggcagaagcctggctgggtcccacctccacccagcagcggccccagagcatctccagagtctcctgaacaggatgaggcccacggatcacgaccaccctccctgttccctgggaagcaccccatccatccttccgagtggggcctccctcctctgcaggcccccaccctcctcccgggtagagctggcacggatctcagctaagccagagtcgagcttgcgtgctgcctgccagacggagctggcgcgccgcaccagagacagcaggagctgtagtcaggacccgggccccaggtatctccattttcctgtctgtaaggtacctgtcagcagctcacccagcaggggaaggtgaaggattaataagggcatgtcggagaagtgcttctggctccccgggagaaaaatgctgcctgtgtgctgttaccgtggcgcccaggaggtgtcccgttgaggcgcgccggccgggaatccggccgaattagcctttctcacctccagatggaaggcagccccagtgaatgcattttagtgggaagacactttattccccatcatgaaggagtgaggccaggttccctgcagcccgctgagtgcgcctgacctgtcctcttgctgccgctgaaaacggccctccggcagcgacccaagcggctgctttggggccagcatcagagcattagag

SEQ ID NO: 30436 - DNA, 1776 bp, Bovine  19866880978782
  misc_feature (1)..(1): n is a, c, g, or t
ntgcgcgtagaacagagagccgctgggagcacgctgggtagcaggggacctcctcagcgctgtgtgtggccccagtggggagcaaatccaaacaggaggggacacgtgtgtccatacagctgattcatttgctgtacaacggaaactgacagcagtgtaaaacaactatactcccaattgaaaaaaaaacaaaaacaaaaaacagtttcacttagggacatccttgagtataagcttatacacttatacacttatatacacttaatttcattaaattcccactgctcagtatatacattttaaattatatgtgtaagggcaattggaaacatttctgaaatacatcatctgcctactaaagtacagtggttgtctttggcttatgcaattgagtgacgagctgaactacctcctttttttttttttttttttgtaagaaacactatttttacttgaaagaacagctgacagacagctatggttattcagactttggtatttggcagaaattttcttgaaaatgaaaaaagtaagactgtcagttcaaggaactaaactgacagtatttgctgccagtgataaaatttgagcttttgcgagaaaactggaattttggaagccctagattggccactaatgagcttaaattaacagtggtgaagatgtgttgattttgacggcaattcacaaattatggaatgatcgtatctatgtaaaaatagatctgtctacagtgctatcttattacccattgaatgtttttattgtaagcttgtatgaattctctgcatattgcaaatatttctctttgccctatacaaggccagaaaaacaaggtcccgtttgtttatgacttcaggggatccaccctttcttttgtgtttccctggtggctcagtagtaaagaatctgcctgccagtgcgggagacatgggcttgatgcttgggttaggaatagcccttggagaaggaaacggcaacgcacgccagtatccttacctggaggattccatggacagaggaacctggtggtctccagtccacggggctccacaagggtcagacatgacttagtgactcaacaacaaaacaaaatcctttaagtgcagaaagtaatccttgccacagtaattttataaataattatcttaaaaagtctatgactaagtttagatatcttattctttatttcaactttatcttggtatagagtatagtatttccacatctttttaaggccccccaacactaaatgaattgtcctagaatgctgtataaaataatcctttcctgctatctgacatttcctttattcatatacactcttacattgtgacactgatttaaaacagacactcattcttggatactcactcattttctggtgctttcttgaagagctgaatttatcttggcacaattaaaggcattgaaagactgcaatcaacacttgggcacatttacagcagttgctgctataacactgacatttgtagggtctttaacgccacacttcacatagttaattcacttcacatagttttcctagggcattatgccctctgagtaaaactattattcatattagttgcttaggattcaaaattcttttagtaaacatgtgcttttcctgtggcctgacagatgtaagaggcatcaccctgagagtaggtaggtatacacttatacagcaaaatcattcctactcactgatcagaatccagagcaactacaaaagctgcataacatttaacaacacaaacaaagctctgggaa

SEQ ID NO: 30437 - DNA, 1331 bp, Bovine  19866880980271
  misc_feature (1)..(1): n is a, c, g, or t
ntggacacgactgagcgactgaactgaactgaactcactctgttttctgcaagggttttttaaaaaagaaataaaacattacagagaaagttgaagtatcttttgatcaaatttccctcccccacatcccagaagcaaccactgtcatgaatttagtgagtagactgatattttaagtatagtgttttcgtcaactattttacagctccatttccccctgtttctaatttactgctgtgtagatctgcagatgaaatttaaggaagctgaccctctcagaattctttaccactttattatttgtgactggcttctctttctatagcacgcagtgagggggttattatccaggctttggtgggaaagaactacttctaggaagaggcactctataaataccgccccctcccctgacccctggtctgagcaaaaacaatgctatatttattctatattgtccaacaccttcaccatgaatgttatcatctaaaactcagtagttgtgtatttctaggctgtcatacctgtaattttggagctataggtatgttgacaccacagcattttgccagacaaaatgtgtcaacactggcctggccagcactcctggtatcaatgtctctttgtttctatatatgcatagtactggcatgcagttcaacaccctttatgctacagactgaatgtcgtgtccctccacccccaaattcctgtgatgaaatctaattcccaacatgatggtatttggaagaagggactttgagacgtgattaggtcataagggtagagtcctcttgagtgggattagtgctttttataaacgagaccctggaaggtccctcatgtgaggacgcagtgagtagacagctgtctacaaaccaaccaggaagtgaggcttcactggacatttaatgtgctggtgccttgatcttggacttaccagactccagaactgtgagaaattaatttctgttgcttgcaagccaccctgtctatgggattctgttacagcaactccaaacgatgaatacactgtcgtagtgattctcagctctaccaggtgcataactggtagagttataactggtagataactggtagatatcataacttgtagataactcctccttttaaaatgtttataatgcccctcatcctatatcctttatagataacccacctactgtgctgtgcttagttgctcagtcatgtctgactctttgtgaccccatggaccatagcctgccaggctcctctttccatggggattctccaggcaagaatattggagtgggttttcatgccctcatccaagggatcttcccaaccca

SEQ ID NO: 30438 - DNA, 1879 bp, Bovine  19866881011333
  misc_feature (1)..(1): n is a, c, g, or t
naatatatatatgtaaattagactagattcaggtataaatagccaatggtatctcaagggacagtgaaacttctccagcaaaagcagagaacagatgcctttaaaatctagttccacccttgggcggagggtggggggtcagggagaaggcaggttaaaaagaaacctcacatattcatttcatagtcaccaacttactaaactatccaatatgatttttaaccttcaagatctggtatttcaaaaaaattccccaaacttaaacctaaatacttaaaattattttaaaagtaccaaagggtgagtaagatttatgtctaatttccatattttgctttgaaagaaaattttaaaatgtgtatccttcagatattacatgtcacttcacaactggtacattgattctacaagtgtcatcaacattttacaaactttaccaaagaatcactactgtaaacatgaaaaatcccaaagcaaaagatggatcaaggagttcacagatcccatctctccaaaccaatcttgaactatcctgcttttcacatcaaaacattttctttaattacatcttgtgaatatattccatggaagagggattcagaaacaaatgctgtctaaaaaggcaatacaaccaaccatcagacctcagaattgcagcaacccctgcagtcctggccaagctcttcaccacatccgccgggcactgatgtgaattcagctttttgtgttctgggctaacttagcagaaaagggttgtgctactcacgccaccagactgccacccttctccattcaccaaggtcggctaactcagtgggaaagaacgaccaaccttattagggctctgagatgtgggaaaggagaagagacttctacttattaggaaataagaaaaaaaaaaaccaacaatgggacagctgcttcctgccctgcacagaaatacacgcgtgggtgcacacacacacacaggcagtcaaaagactaattctttttctttttaattaaacatgatcacaattaggaatggaatcctggcctcatgtggtgtttgctgagcagttggtgctaagacagaggcttgaatctgcctctgcacaccatttgccatttcttacacagaactcgatgaacaggctcattctagctagaaccaccctgtgtaaagacctggtattagaatggaaagcattgatctacgatactaagaaatagtaaagggcactggtaatctgaggtatcttccacttctaggacttgctgctgaaagtcgattctatccagtcactgtgctgagccgctaaggaaaccactgggggggagggtggacccgccaggagggaacgagcaccagtgccaaggagcacatgtgaacactgaagcgagggccaccgcaggggggaacttgtttaactggaaaaggggagttctcctctagtccccgtctgttatttttaaaatcttctttaggaaaagggggcgagggggtgggtgataaagagggaaaagaagatagaaaacaccaggttccccacctgcctgcaaacacacagacacactcagttaggggaggtaaagggagaagatgcgttattggtacttgtagctgtggcacctgttactgtgaagcctgtgggaggcgctatcgagctgtggctgggctgcaggtccttgggaatgccactgtgagaactcagctggtggccgaaggctgcgctgaactgagggagttgctgcttgggggaggtggaggccagcagttcagcggaaggccccatgccactgaagctggtctgcggtaaccccgggagcacactggagctgctgggggtcacggtggcgaaggcaggctgtgtggtctctgagttcgaagtggtgggcg

SEQ ID NO: 30439 - DNA, 1287 bp, Bovine  19866881079875
  misc_feature (1)..(1): n is a, c, g, or t
ntctacttactttattagggataaaatgtcgctttctatttttcagtcctgtatttcaagtgctctaattccaggcaccaaatgagcctccttcttcccttaaccagacgccgtctccagatttctgcaaccttctccacttaggactgccattcctcatgtctttcccctaactttcttctcttacacagctgtgtaccttgctgagggttaattgagactgctgccttggtgccctgtgactggaaagaaaccatctttggtcgaaaataaatcattgccacctcatttcacttttaatttactactgactttttttattttttttttttggttcagtctccccacagtctctcttttctcaccactcatgcattttcagcctcattgctctccattggacaatgcaaagctgaaaggtttatctgtaacctatttgtctctattataggtttctaaactttaattaaaccagagacagcgaggctctcaattgccctttccctgtatctacaggtgttgctggcgccatctagcggtgaggtgtggcatctatttttctcttgggagctttctcaaatctggaggcttatcgcctccaccaaattcacatcacatgggaggaaggaaaaggcatgcaaaaatttaaaaataacttttttttttaccttgaaaattctcacctgcaaaagctgagatgggttctggaaaaaaaaccaaaaaaatttgagttagatgagaggaatacataaggtgaacacagtgtatgatgaagatgagtttcatcaagctttttcatactaccccatgcccgccacaggctctgggtctaacacaccatcgtcatgggggccaggtgggaaggattctcaaagttgctttggaacaaaaagtcctttatagagtaatgggtccctgaagcattgtaatcagtcacttaccactgattactttctcagagcctggattagttttagatgccgggggcccagagagttgcctgaagggactagggcggtctcaggtgcttctgacatcatcaggcacacacacacccgggacccatgtgccaagaaaagcacttggtgagttattacagtcactctgcggagtgaatgtaggtctccttccttctcaggatttcctcttgcttttgggaatgtccatggctctgatgggaggtggtccatggagtgaactagatgacctggctgctcagtacttctgtccaaggagacagtgtcctttcggtgctggtcacttggcatgcaatgtttaatcttacaa

SEQ ID NO: 30440 - DNA, 903 bp, Bovine  19866881137067
  misc_feature (1)..(1): n is a, c, g, or t
ntgattggagctgggcgaatcctgcctggctgttgacagtttaccacacggcagcctggccaagggacgggtttcattctgggttttgttttttcttcaaagagctcatgaaggttgagagacaagagaacggtattgcaagttaaccgagttctgcaggtggtcagtgtggtcaccgagcaacagagtgggtttgatacctgagagagattgctggtccttatctgacacgtgcacacacacgtattgaccagtgtctgagggatcacgggaaggacagcaattaaactgacggcacaaggccagaggaagtgacttctgaggccagctgcccagacaggtggtgcaggctaatatagaatgacacgcatgtactcacagagaggactcccaaagacaggtatttattgctttgtaatgtctgtctttggtgccagaactcatgagacagttgagtgaaagaaagaagcaaaagtgcctcctgggtgtttattaataaagcaggcttcccacgacgtatcagcccacccaagtctatcacacgtttacctgttatttcaataatggtgcatctggagtttgggagcatccgtagcctgcagcactaacagttcttgtgctttagattgtatttttaatttctattatgattcttatttatccacagcccaatttcttttaggtcaaatttagttgctttcagaccaagaggggctgtcaagctctgtgacttggcatcattgtttgtaaaatgtgagtgtagaattaggtctttaagatgaaggagtgcctgaaaggactcaccccttgaagggagcagcattttgggcgtctcgggggtttaaggctatgagacctaacttctgccctgaccatctctacctgccagactttcagtgcaat

SEQ ID NO: 30441 - DNA, 1451 bp, Bovine  19866881182268
  misc_feature (1)..(1): n is a, c, g, or t
ncagggttgcagtcactatccacagtgatcaaataatttttgattatttgcaaaagtcagggctaataacggtaaatagcactgagcgtctattggcgaatacattgtcacatactctctacatcatcttatgaggtcagtatgatcatcaccactttagagacaggtagctgaagacacttgaagacaagagatggtcaatagctatctgggtcccccagcctgtcaatacaagagccacttgtaacccatccaccactgtgcctgactctcagatggtccatccccccaccgagaagtaggggagggtggagaggacatttgccaggtagtacacctcaaccttggtccaggatgactctgttcatcaaccccactccagtgagttggctggggcagggtgatggtgtaggatccaagtggcagagagcagtaacgccttagtgaagacccgggaggaagttgggaacacctctaaggaagggtggggatatcctgatgccaggtccttgggaaggagacctcaggcttctcagtagagcatggcttgcacttgtagccacggatactcaggtttccccaccccagcctttcatggcacaggcctggtttgtatcctggggaaggtgactgatattacggtagaggcaaagttctgtgttctgagacaaagccgcgtttcgtacaacagacacctataagacagttgatttacctgcaggtattcatatgccagttgctccactgtgttctctgctgggggcctgcatcctgtcgcttgattttgcagaacacagcctagagaacaggaggctttgaaagtgggtcccaaagcagtgtggctgcacctctctgaggcttcccctttaaaccctggataggaaaaaaatcaccatgaagaggcacagccccaggccaaacactgtcacactgagaaggtcaggagagggtcaggaaagaaacggatattgaaaggccacctggagagcagggctctgactgggtctccatcgccccctccctgccggccatctcacacctggggggtcgggaggcagatgctgggagggtacaaggcaaaggcctctttccccatcatcccaaatgctgtttatcaaagggatttggactcctaggtggtggaggtattcaaagcttgaaactgggaaggtataatgtgactaaaatgctgctttaataaagcacagggctgggtttgagctgctctctccataaatcaaagggtgacaccaccgtctctctgaagatcagcaagacagcgcattgtggggctgggacggctcttaaatctaatcaacggctctttgagcaaaaatatagccgtgactggaggacagaggtggctgcacgctggaaaatatcccgaggagcacgcacatttcccaggtgataagaatgctgaatgcttctgagccgagaaaccttggaaa

SEQ ID NO: 30442 - DNA, 964 bp, Bovine  19866881230976
  misc_feature (1)..(1): n is a, c, g, or t
naacccccaagggagctagttatggaaaacccttgtgatcagtggcagtaactcaaactgtgagtaatgtgttcttgacttttgttttaggttcaagtacctaaatttgcaggttaaattcctgcttcagaagcttcttcctttccatctttaagatctgaataattaattgctactagagaatatgttttcagaatgaaaatattttattcccttcaaaaatgtatgtaatcataaggctttattcaaagtattcagttcacaaatgacgtgggtatctgtagctctatggaaacctcattcattcacaatacacagagcctcttaattttgcaattttacaaaggagtttttgtgtttagaatttatataaattcagtacaatttaaatcaaatccagtgctaggaattgtattatgaaagggtggattcagttatcatattttagttagaataatgagaagttaaaaacaattacattcattcacagcaaatcaagatacgatttttgtgtcttaagaggaaatgagaggtgtgtcctccatcattggttaccaagtacaggcagagccagactgggaattatgttccagataaggttttgtaatacaggtgtcttctctggctcaagagtagacagagttactttcctcatctggaacattgcaaattaacgaattcaagatctatgttcaaatctattgtgataaatatttgtcaatgagaactgcctcagtgctaaatgttctcaaagctttctatttagacatagaatggatacaaatatgtatccaaatatctcttctactgatagacatgaattacagagagttaagttagacaaaccaatgaacagagaaatataagtgggacctcataaccagtgactgtattgccctttagctttgaattgttattatatagctggggacattcatctctttttttatttgcatggcagtgt

SEQ ID NO: 30443 - DNA, 1507 bp, Bovine  19866881255805
  misc_feature (1)..(1): n is a, c, g, or t
ntgttagtaagctttttaattttaatgtactgtaatgaaatgattatgagtagttacctctgctcaaaagtgtcatttagttcactgaactctttcacatcccatataaccatcacatgctaattgtccattcttagtgattcgattccgtctccactgtgtactaatcacaggttgtagcagagcagcccattgactttcttttttactgagctaaaagtggtacatacacattgactttcttatcagcccttctttgacagtgaagggaaagtcatgggatgttgatttgaatttttctggcaatttgtcccttgtggtagctgcttaaaattcttcagttatggaaactgagtttgcagtaagttgcacattttattgtttgcaattttctgttttctgtgcatttttaagccctttcctgctttctggtaaggaggcatgaaatgatcaggaatgttgccagttacagcttcacaccaaaaacttttgagtaaattcgtttttgtgtagatgcccacgataaatagctgaagaaagggcacccgtagaaagtacctgtgtagatttaagaaagtagcgaaaaaacaaatttttcttctcactttgtctacttcaaaataaatatccatgcttgcgattcactttactcttgctgtttcttgtgagtccctttttggaaagagaagaacatctgtgaacccagagataacccttaggttgctgttttagctaatggagcaattttactctcttagtagcaggtttgctattaccatggaaagaaagaaacgaagtatcttttactccagaaataggaaaattagtgtcttttaaaatagcacttaaggctccaataaggcaatactggaatcagaaacaaatttgatataaggttctatctaattacgtggatactagctttcattttagtgttaaaactcaactcatgagaaataatggcaaagaaggttcactctgtttctgcagttctttgggaccatttataaaggccagttagatcagtttacaaagttgctgcagttaatggatacattctgtgctctgagaatctgaattccatgctaatgtataatgctcactggctgtgatctatagcatccgaaggaaagatgtgtttttctcctttacactctctacataactgttaatattattttagttaaagtacttaagacattgattttcccctgtaaaaatggcttagcaatttgcacatctgggtagattatgtagttagtaaacaatccgcagtagtaaatagcaattacatttaacccaccaagtgacagactatgcaatggaaaaattttctaattatcaccacatagcttatatgacaaaggattcttttctctagtaacctaccatgtgaactagaactgtctcataaatgacttcctgagcaatttcatgttggcaggcagtgtgatgtgcctagagtccctccagaaaagagtataatttaagagaagcaaatagtagg

SEQ ID NO: 30444 - DNA, 1543 bp, Bovine  19866881283640
  misc_feature (1)..(1): n is a, c, g, or t
nattttctgctagaatctgattttacaaattttactgcagcattttattaggaaaccaattaatggtaggggagaagctgaagggaattcacctggaatctacttggatggggttgctgtttctctttcctttctgactctcaactggaattggaattttcttaaggccatataagtttaacagctgaaatgtggtccatttttcttgtaggtacatgaacactgaacagtagttaaaccaatatgttgacagtcctgacttttatctgtgaggctttatgtaagggtgcagtattctgcctcccatgatgaaaactgctttcagtctgcacccagaaaattgctatataagaagctgttgggccatagattctgcttctacactttcacttagaaattgagtcattaagtttaaacaacctctttttttagttagtcaatactttttttttttttcggttatatgaaaagtaggtaaataatatgacatattgaaggattatggtgaatataaacaaacaatttatataactcagagaccagttctttcaagactttatctgtcttgttcattgtgagcagttgctttactttggttcagaaagtgtcactgattttttaaaaaaaagcattcagtggaagatgaaggtgcataatatccaaagagtttaagggatcttttttttcctgcttactagtcattatttgagttaataatattttggaccccaagcagatttccataatggattatcagtacctttttctttattaacaacagaaaatagagtttctgtgttaaatattttactttggacttgtcgggaaggaagaaaactttcttctagctttctaggttcttctagctggtccaaatattaagttgacatgagttagattaacaagaaaaaatgaaatttactttcatatgtatacatgtgagggcctgaggcccctgcatacctgagagggtcagagatggaaagataaaatgaggcatatacaccatcttaagctaaggaatggcatagggccctggcgcttccagggacaggagggtaattcataaaatgataaaaagagtggatggttggtaattagatgtttgctggccatatagatggggccacttagctaaaatttatctctggtaataaatcttttctgggaaaagtcctcaatttaaattcttttgagtcgttaagggtgggagcagtgacttctcttgaacttgcagggtcttgattgcacctttagctcaaaataatcctgatgcagaagtgacacattttggggggaagtggttctgaacgcctgcagattatacctgttcagttgagaagagcagtcattttctaaacatctggaacttaaggaaagtagatggtttgcatcattactttccttagttttctaaaatataggtaacagtatttattcccattttccaaacggggagttagacatttaaggccatcagatgacttttcgtgactgtaaaaccaccagtataaaattcaggggacctgaatgtttaatatgt

SEQ ID NO: 30445 - DNA, 1716 bp, Bovine  19866881335041
  misc_feature (1)..(1): n is a, c, g, or t
ntgtaactttttattacactggcactttcataggtaatgaaacctatgctccaatgttaaattatttgtgtgtatatgtaaaatacacgagctttaagctatctgtgtatgactatgaaagacaatgcaaccataccagttgtgaacagtggattatagttatgtttggtggtattagtttatgtaagatcaaggtctgttgtattttctcttgcacatgccattcatttgctgattcttgtggtgtgaatatgccagtttattcatttgagctcaaagcacaagcatctgaccgtttaatgttacccagcaagagttagtgtaaagtgatgacaggttcccatttcacccgttaacgtttgcttcatgaatcggtgacacctggagaggagatgtgcgctgacttcattgctcaccctgggatactgcatgaacccatcgaattagagctgctctccctagataaatgagcagtacacataggtgcatgttccaaaacatgaatcacatagagctgtggagttttgccaagtggtatgtgtgtgactttagtttctgtttttctttctttcttttttaactatgcagagatgggaaatgcacaaacttctcaaagactagtgtctgaagaactttccaaacagtacttgaatcctttctttaaagtcattccaccatcctttatagccattgttgcttccactgttaacttacatttttagatggtttccagttctttaagtgcacagcctgaagttctgctggaagctaaataaattcattcgtatcttggttgtctatagatggagattcagtagtcattgtatgcatcttcagtcaagtgtatattaaaactttcgttaacattgaatgttgtagttttatactttggtcatttttcttaaaccccttttctgttctctcttgtgttgttgattcaatggctgtgcaccagataacttttagcgccggtctctcaatcaaaggctcactgaaaatttaatcggtcaatggagcaaaataaaatcctgattgatggtaaatatattgctgattaggattcagcttcagtggatttattggaaatgctttgatttttataagtccggggggtggcaggggggacacagtagagtcatgccattactatatttctttctttgttgtctctcttctgagtttaaacaggggatggctagtcataacatccacacttttgaccctggtaccattagaatcaaactaaaaagaaaatagaagtgtttggttgtctacattgtaataccaaaaacattcaaaggaaggtatttcctcacaccttacataggattgttcatcaaataataatccttttttatgaatgtctctcagtgtctcctctctcttcccactgccctgctttggtctggcatcgacagctgcgtgtatctcacataaaggtactgcagtaacacagagcctaatctgactacatcattcctctgatagagtttgtagcagttcttcattttctataggataaagcccaaacctaacaatatgacttaaagtgctagctgcctttcatgacctcaccctcgtttattttcctagtcttcatcaattcttatcctcccataatcaccctgcttagagtccccctcaagagccttatctgctcaagtctgaagagtctgatgtaaattttatgtccgatcaccatgggtcatttggttt

SEQ ID NO: 30446 - DNA, 1669 bp, Bovine  19866881425872
  misc_feature (1)..(1): n is a, c, g, or t
ntctttaaactccccccttgattgttatgacagattcatgtggttatttgatttacctatgtctctctctcgattgtaagctccctgaaggcaaggaccacatctattatgcatatcattgtctcctggcacctagcaaggtacatgtacttagatgttcagttgtgtctgattctttgtgaccccatggactgtatgtagcccatcagtctcctctgtccatgggattctccaggcaagaatactggagtgggtttccatttcctttgccagggaatattcccaacccagggatcaaattgagtctcctgcagtggcaggcagattctttaccactagtgccacctgcaaagccctagcaaggcacatagtgggcatttaatctattaataatacatgctgattacatgaatgaatgtatgcatgcatgcttcccataagagttagtgggacatagataagtaagcatgtcaatttctatgtaaatagctattagtgaagggctctgggaaaaagagcaattctgctgtgagggaatttggatttgggccagctccacaacagaatcaatcctgaagatgtgctcctggcctctcttcagggggcggggagggggatatctgcaaagctatgtgctcactgctttgaacatcacagattcagacaaccgaacagagctactccatcagctaagaggtcagagttcagggctcaaaattcatttaacccaaatgttcagtttacacctggaaaacatgagatatgcctgactttctcaaggtgacagaactagaggcaggactgaggaccctgggtgctgaactctgggaccagtgctctctcacctcctcagcatgttcaagttcaaggggtgaggagcactggtagactgcaaagccttctaaagttttctttgaactgtcacaggaattaaaaacagttggctggaaatagaaacgtgaatgctcaaggagaggtgagatgagggggtggaggagggaaaaaaggtgaagaaaaaaggtcgatccagaaaggccacctgccagggccctggagtcaaggcttggcaatgcggcagggctgccagcgggtgctcggagaggctgtgcctcaattcccagcggaggcagtcaagggcttcaggatggagatttattagcagagctgtgctccgcagtaacctggctatggatggctctgagaggctgggcagctgtggaggctgcagcctgctcttcgcaaacagagcctcctggctttccaagggaggtttgtttgaattagggtggggcggggggccactcctgaccacagttgcccgagcctgctggcttggtgaggggcccagaacagagcaccccaaaccacctgccccactcccgagctttacctctctgctggtggagggctgttctgggtgcttctgtgtatgtgtgggccaggctggctcaggtggcttctctgcaaagagaggagctctgcctacctggtggcatcagacagaaggcgggataaggaaccactcgcctatggccaacggtctctttctgttgtggcccttggaagccggctgtgatacccacatccggcacacacagttgtcctattgggttttctggctgggaagagagagcacccagttgtccttttcggagaagcacagaaacaa

SEQ ID NO: 30447 - DNA, 1431 bp, Bovine  19866881499354
  misc_feature (1)..(1): n is a, c, g, or t
naaaaggactaaatagaaaataaatattacacggatgcaaatcaagttggaaacaaacaaacaaaaaaaacaatgaaaacacattcaagaatcaatgataaaatgatacagcaataacagatgcagaagatagcataagtacattgttgatgtttccaaagaaaagaataaaacacatggaagaaaaaaaaggcaaaagtagaacataagtttcctaaaatcaaagaaagacttgaatttccagctcaaagagccaagtcacgttcctggaaaattttataaaacactattgacactaaagagtcatattaattctgggaaagttcaattaattccagtcaagcaaaatacaaatatctaggaagaatggagaaaccattgtaaaggatgcatggtggatgccgaatcctttaaggacaaatagtaacggtgaaaattgtggttactgaacaaaatgcaaacgtgataaaccttgacaacataaaaagtactataactaacaacagaaaaagtgtgttaattttaacttcattcaaatatacaatctagttgaaacaagtttttttctcatgactcagaacaatgttcttcacattagtagaactttttttaaaaggtaacatctcttgctatgaagaacttttttattttttattggggtatagtcaattaacagtgttgtgatagttcaggttaacagtgaagggactcagccatacatatacagatatcaattctcccccaaatccccacccccatccagactgccacataacactgagcagagttccatgtactacacaggagctccttcttggtggtctatttcaaatatagcagtggaacatgtccatcccaaactccctagcccttccccccatcctttccccttgttttcttttcttttgttaaatgtaatattcattaaatttgcatttcattaaatgtaatcatttatatttacaatattactataaaataaccctatttttgaaaattatctaccacacctatctgtatgcatagagagttcactaaaaatctatacaaataataataatggttatttctgaatggtaatttttaacttttcctctgtgctttttttgtactgactttaaattttataaagagacatatcattttatgaaaacaataaaatatttccatcagaaaattgcttttgatttaacagccagtcatctatgtattcattagaaggactgatgctgaagctgaaactccaatactttgtccacctgatgtgaagaccttgatggtgggaaagattgaaggcaggagaagaggggaacgacagaaggtgagatggttggatggcatcactgactccatggacatgagtttgagcaaaccctgggagatgggaaggacagggagcctagtgtgctgcagtccaggggcgcaaagagt

SEQ ID NO: 30448 - DNA, 1126 bp, Bovine  19866881520446
  misc_feature (1)..(1): n is a, c, g, or t
nataaagacaaaagtgctcagttgggtctgactctttgcaaccccatggactgtagcctaccagactcctctgtccatgggattttccaggcacatagacaagaatatcccctggaatatcctccaggggatattcctgacccagggatcaaacccacattgctggtgtctcctgcatttgcaagtggattctttaccactgcaccacctagggaacccaaagacagaaaagcctctgtgtaattccctgggatgtgaaatgtttaggatatttccttggtttgaacaaatgctgtagaatgattgtgatccctacaatcaaaattcttttagtgcttagcaaaagaaggtagttaaaaaccagggcatctgaaagggcagctcttagatgtattcactgctccatttctggcatgacctatcttttatgaaattatgctgagtgttttcatcataaccttcatgtcattcattcagacttgttagtaaatcgaggtaaagaaattattttcttcccccagatacctcttcacttaaaatttagaagacactgatacatggaatgtcttaattatgacggactaagaagtttaaacctcgtagagcattggattgtctctgctgcccgcttagtgttagaacactgtactcgttttcagctgctctactgaattctgttcctctcgtttcattgtgtatgctcatgagccaccagtttcagccctgtacatccagccccctttcctcaacctgcttttcccttttctaaaatgcacctcccatgtaatcaagttttgtgtttctctccctgtactttctaggtcggatgatgatgacatggagagtaggagctccagggtgacccaactttgcacttactttcagcagaaatataagcacctctgccgcctggagcgggcagaatctcgtcaaaagaaatgccggcacacattgaggaaggccttgctgcaggcggctagtagagaaccagagtgtgctggccagctgatccaggagctgcagagagctgcatgcagtcgagccaggtcagagctccacacagccacctgtttctaagagctcaccctgttttctctatttttgagaggatagtcaagacacagag

SEQ ID NO: 30449 - DNA, 812 bp, Bovine  19866881658715
  misc_feature (1)..(1): n is a, c, g, or t
ngaaaagagaaaagagcacaaataggaagaaaaaaatgccggagatgccatatcctgctaggcaaggaagagaaatatccggctttgcagagactagtctctgtgtgtgctgtattcgtgtgtggtgttggcttttgtttttccttctcgtcttggtcttttcctgtgtttctgccctcacactgccacgtttattaatatgatggtaaggatgacttaaactgtctgagtttttctagagggcgggaatgagggggctaaggaaatgaatggacggaggctgcttagtcacaggacctcactcccaagagctcctaggctggtcgggtgagggagaccatcggaggaagccgctggcatgagacagacaacaagcacatctaacacaggaaggatgcccttgagcaggcctctgaaccccaggccaaggtccggctcctgcaggcgtgcactttggcggtcaaggagaatgtgctgtgcttgtttagagtctgtccacgggggtctgagtaggggactgtctggagagtgtgtaagtagggacggtggccctcatttccagtggctctaggttttcctccaatacttctgaaattctgttaaaatgtaggttctgactctttaggtctagggtgccattggatagtctgcatttctaacaagttcccaggtaatgctgctgtaataagagtggctctgggccactctttggatggcaaaatgtgtttggcacaaacgtagaggtacagaagtgaggagttggggcttgaggccgcagctgtgagggcatgttttattcagaattgttaaaa

SEQ ID NO: 30450 - DNA, 2046 bp, Bovine  19866880422034
  misc_feature (1)..(1): n is a, c, g, or t
naatgtgatttgctccttaagtatcggacaccgaaactggatatactttctcttggcatctcagaaaaacgttcttacagagtcaagtctcatagttcagcaccggcagcaccaatcttatgcagttctcctgaaagttttcagcagtaaatctctagaaatgtccacttaagcagtagaggtcataaatacttagcgagagcaataaaatagaacagaattttggaagttataattttagtggatataactgcactataaaaggaaggcctctgggacccagaataaatgcgaaattccatccaagtgaactgtagtgctaacccatctgcaagtggtaaattattcccagtcccaggtgtgctgcattatcctatgggtgtccagtgattaaaggtaagaacgtggctaaaatccaagggagcagtgaacattaatgatggctggaaattgtcgacaatttctctggaagtctgattcgttcctatttgctcacattagccaggtccaaagttcagcaaattgtctacggtcagtgagacaggcccagagagtgaaaaagagactttgcctctgcatttgccccagaagaagttcatagagaatgaaagtagagccataatcctattatctgtaagcccttcaggtttccacaaagtatagacacttactgtggtcattgtcctaaaattcaactgatgattgcaaagcaacataaacattgctttccatctgtgctctctccggtggtggtggtagtttagtcactaagttgtgcctgactcttttgtgaccccaaggactgtagcccgccaggctcctctgtccacggaattctccaggcaagaatactggaatgggttgccgttttctcctccaggggatcttctccacccagggatcgaatctgtgtctcctgcattgcaaacagattctttaccactgagctaccagagaagcccactctctctggtacatcacttatttcatttagtacatatttgcataaatgttatttttcatttaactctgtatcaggatcttagaaactcccaaagcatctgctgctgctgctgctgctgctaagtcgcttcagtcatgtccgactctgtgcaaccccatagacggcagcccaccaggctcctccatccatgggattttccaggcaagagtgctggagtggggtgccattgccttctccacccaaagcatctaggatatgtttaattgatttcctaatctcttctcccaccccctccccggcaccatgtacacataaagaacattatacagtgttgaatgcaagtgactattatttcatgattatattcataattttttggtagtgtttgtggtcaaaaagtccccatctttaattctttttaccaagttcctgaattgtctcctatgtcccaaacttattttgattattgccatctagaaaactgatgagaacaatattgtatgaaggtggcaggaataagaaacttccatctgaagagcagatgaagaaaatttttatgcaaggaagcccaagcttccagtttttaatcatcatttgattgtggcctattaaaatgccaaatcactttgcaatattgtgctgtgtcttcacaacttaaaatagtcactgttgaaatagtcattcaactccagctttcccatctgaaaataataacgcattgtaccttttgctgttgcttctaattttttgttttctattattgtgtaactaaaatgtcaacctcctgtatctaagggtcaccttctagtttatttggaaaataaaggaacaagaggatttgtctcatgtcaactcctgagtcatcgacttggcagctgctgtctatgtcctgtgctcctcttagctctgctttcagcatggcctttggtcattgtcctgttccctgctgtttactacctgaaacttgggtcttctaggtgatagaatgcccatccacgagggtcagacttgccgtcactcacctgtcactttgctcccattaatacccaaccacaaagtttatggatgtctcagctttggat

SEQ ID NO: 30451 - DNA, 1846 bp, Bovine  19866880498920
  misc_feature (1)..(1): n is a, c, g, or t
ncaaaaagtcggacatgactgagcaattaagcacagcccagcaaattcccagaccctttacttaaagttagatcatctaatatactattatttcactttttgcatagcttacaagaaaagacaatgacatccttagttgcctaatttagataaacatttcaaatttcagaggtacatattgactacaaaaatatatgagaacaaaaatatgaaataaagatagatcttctgagttacgcttatgtattcagtttcaaatccttgctttttgggaaaatgtgtgccctgttataaacaagaattaattggatattatggtgaataattaaagagtacaataaattatactcttccaaacctttcatccacttactagttacaatatctaggaaactatgcttgaagtgtggcttagaatataggaataaatcaccatgtaaatgtaccctgcctgtaagtaatatttgttagtgtctaaacatattctacatgtaaaaaaatctgatgctcttaaattctaaaaaggatatctggaaaaagataactttcagtgcttaaaattattttattctctccaagatatttctaaaatttttctcagttaccatataaaaagaaaagtaaatctagtgatttagtttattagtattgttctttctgttctactgatttctaatttccttcagccttattgttcaggaaaaaagtaaggcatggagtaaggaaaggctcccaaagaagcttagatagtgagtttccccaccaaatagcaaaccttcaaacgttaaaataatcatatttgtgtcaagtcgcttcagtcgtgtctgactgtgaccctaggaactatagcccaccaggttcctctgtccttcagattctccaggcaagaatattggagtgggttcccatgccctcctccaggggatcttcccaacccagggatcgaacccgaatctcttaagtctcctgcattggcaggcagattctttaccactagtgccacttgggaagctcgcaataatgataacaatagcaataacccattaaacatcattcagtgaagtttgtggaaaataacaaactggaaaagttgccttaggttggcttcctcactaatactaaaaaacgtagtaaaacttcatgaatataagcagttattttttgctcagtatctccctgaattgaattacatgtatctacatacctacatacatatatgtttacaagcaaatactttgaaaactgagacatagaaaattaaaggataaaacttttaatgcaaaatgtatggccattggccataatatcaaaatataatactggtattgctgtccaatatttaaaatatttcattccattgcatttcacaataagaaaaattcttggctctgtatgtgtgcgcgcgagtttgtgtgtgtgggtgcaggcactcacacactcagttgtgtccaactctgtgactctatggactgtaaccctccaggcttctctgtccatgcattttttccaggcaagaatgctggagagggttgccattgccttctccaggtaatcttccctacccaggcattgaacctgtctgtcatgtctcctgcattggcaggtgagttctttaccacctggtgagttgagccagcagggaaaaggaaaatcaaatgcaagcacccatctcctttcaagaggttttttgacaaaaggaaagagaagtgtttctgataaatgaccctcatgctctacaagctttaaatgggagaagagcaaatagaaacagagttttacctcaatggtatacataatcccccctaagtcaagacctacaggtttaatttcaaatctttgccttttt

SEQ ID NO: 30452 - DNA, 1652 bp, Bovine  19866880521131
  misc_feature (1)..(1): n is a, c, g, or t
natttgccttacagagttgtgttaggtggaagtatagtcccatcttctagaccttagaggtggtttctatcactgtctttgtcctcaatcttacctagtcaagcctatgtggccaaatattgtgcactttctatgtttatcattgtcttcatccttccaacaagcagtgactgagaaggtctacacctgcatatacaatgctgaaaaaaggttaaataaaccaggatataacaactgtggtcaatgattatcatgtcttcccaggtgttttgactccagacttctatactctgtggtcccccagacaatggcagataatctaaatccctgatgcagctcctaattacaagtagaattattacaaaggaaaaagaaatgaaaaccagcattatagtcacgtactgggtgaaatataagtgaagacaaagaaaacatcaactttaactgcagttcttaatccacctgtaattagatctttaagcacgtgaaatcattatcatcttcaaactagcagcctactcaactttgggaaaatctcctgtttgacttctgataaaattcctgtcttagtcactgaaggcattaactttctgctatgattctgtctctaagatctggttaactattaatggtggcaggtggctggtaaagtctagatacaaagaaaatcaagggaatggagcaatgtaaatctgtgtttgatccacacacctgttctggtctccaaattctactttataagagaaaggaggtcttttttctatccagtcatagatagctggcactacttaacaactggcaaactacttaactgctctgagtcctcatttcttgtgtgcagcatgaaagaggtgatctggagatgcccattggcagggaagcctgcgtcctttgtgatagttcaaggtgatgtccctaataacccctcactagcgacagtgtccttctgggttccccaactttgcttttccaaaaaatggaaatgtacaggctcttagatgagaattagaagtttcaccactcaatataataattattctatacataattaatatcaagaaaaagaactaatcccacaagccacacatataaatcaatttttgtcttgattaatatgtgatatcatccatataagtgtgcttagtccttgaaattattacattaacttcttattccttgatttcaaggaataagtaattccttgaaattgttacattaatttcaaggaataagtaattccttgatgtaataatttcaaggaataagtatatctgtgcgattcagtggaaatgaaatgactattagtaaccaaaatgtaaacacaggttttgtcttggatcttgttaaaattaaaaaatcacatattcttaaaagtatgcatttttttaaataaatgagcataaagacactgaggaactgactagactctatctcagtccaactgcaactatttctgggcaaattagtgggagacaaggcctctttctaaagctgatatgttacttcttgtaacacagagttagtctggaagccaatataaattcatcctccactaaagaataagattacctaaagatggtggttggatcaactgagactttttctgttgcaaacaataatatttcacctgcttttttaacctatttattttt

SEQ ID NO: 30453 - DNA, 824 bp, Bovine  19866880532993
  misc_feature (1)..(1): n is a, c, g, or t
nctggttgtgtctagaatttgaacaccatgtttttctgagtaatgtaatatttaatgttcttaaacgttacacttctatgcaaggactaatttctttttgatggtttctatccaaacactgccctcatagctgggacatagaagcatgatgaacattcttttaatcattggagcactctacaacccaattctggtgctcatgtgtgcatgcacacacataatcagtgagtgacaaagcacaagtgtatatgtaagactgtgataactggaatgcatagtttgcaaaatcaccaaaaaatgtataaaataactcctgcccacatcaatgaaaagtcagcagaatagaaaaagaaattccctttaatgaaaacgacagaggttcccaaattgcatgtgatttttaatggactagagacactcttctgcatttttatttcttggacaagaggaaaatatattacttatgcaaaaggatagttagcatttccaaccactaacacatggcctgtaaaaaataatcatctcatttttctattgtgcaatagccccctgttaggcaacagcaacgtacaacgtgctagtttcctgttcctttagtagagcctcccctttcactcactgcccagactaaatagttattccttggataataaaactctaatactgagtttcaagctacttccaagaatgtttctgcctgtattaagaaagaatcatatcagtttgctaataagcagaaatgcactgtaagttgaatatgttgtcacatgtagctagcaagcatataaatcaatccatgaccaagaaagaaacaatatattttt

SEQ ID NO: 30454 - DNA, 662 bp, Bovine  19866880561399
  misc_feature (1)..(1): n is a, c, g, or t
ntggctctccattggctttaggtttaaagtaaaagggatggtttaggtttcagagacccagcaacaaaactgtacatgaggaaagaatcttgtacaggaagtgtgaacaaacattgaaatcattttatgcaatggccctcaaggtgctttaatatatagaaatgtcttgttccctccatgaattgctaagtgagagagtcagcatgaaagagttagacaggagagaagtgaaacctgccaagataaatgccaagataaatgttaacagtgttttataaattaactccgctgtctgtgtgtttgttttttctttggaagagcctaaaattaaggctattcgactcatcttggtaatggtttagaatttaaggggtggattgaggaagtaagtttgggctagaaagggcagagaaaatatcctgcactggaaaatctcggaaattttcacttgaaatatgttcttatctgatgaatgagggtatttctgcccccaaagtctatgaatgaagtagtttggttaaaaaacgattccacaaagcttgctgggtttgtaagcactccattatagtatgggcagtttattaaattcaaaggcaaacagttgacaatgaattcgagaacgtcaatgagatgtccacgtgggtactaaaacagtagaagag

SEQ ID NO: 30455 - DNA, 846 bp, Bovine  19866880640358
  misc_feature (1)..(1): n is a, c, g, or t
ncttgccccagagtcccttgcttattttgtgtaatgctctcataaaattttgtaggtgatatagtaagcatggtacatccaatgccaaagaaagaaaagcactagaaatatgtaatttgtaagtaaaattttatatcaaaaaattatcatgcccattttatagtaaataacaataatcagttcaattattccaagcttatataccctcaattattttttcttcctagttcacaaatcttgatttttcttttaaataatgaaacaaacctgttcatactaataggatgataaatatttctcaaataaggatgtttaatctcatgtaagtgtttttcaaaagtacatttgcttctctttccttagggagtagagtttggcaaaggatgttgctgagatacggtttgaggcatcatctcatctgctaacagtctgctcctgatgacacatatttattccatttttcacatgtggctgaaactgtaccagcaaaatggggaactcagttttcctattttaaaaaaagataccatttggctgcatcatgaaacaatccaaatgtacttcagaagaaacagccaagatggatagttacatggaatcgctggagaacactgggaaataagtcatcagacatttcattgctttttttttctttctttctttttctgattaaccaaaatgccagttttagccaggctgcgtgaaggatattttacattccagtctcttctatcagaaactgttaaatgtggacagtaggtcaaatgtaccgaggctacaagttgtaatacatttaagagactcttactcagttttgatgattaaccattccctctctttcaacaa

SEQ ID NO: 30456 - DNA, 1541 bp, Bovine  19866880641466
  misc_feature (1)..(1): n is a, c, g, or t
ntatttctttgcaacatgttctctcagacagtgttggtcacccaaccttgcccaaacgtcccctgctgagtctcatccactggttgatctaaccctcccccgctttagaagcgccctactctgaaaccaaagtctaattcacacattagtgataaagaattgacttagctctgtcactgtctccttcttctcttccctcacagaagcctttctttctagaaacatattttgatttcacattggtctggggggtatgccccaggtatagggattttaaagcctgtataaggaatagaaaagtttctggtttgctggtggttctggcatgtggatgctagcctgcttttgactttttcccatttggcaggtgggggagctagtggagggcagggaagcctggcatggtgcagtccatggggttgcaaagagttggacacgacctagccactgaacaagagcaacagagttccaggacacttgtaggacaaagttctggacttaagtctaaaagtagagagctgttgtcatttggaactcatggaggaaaaacttgttggggcattgtagtcttgggagaagtcataagagcttctctatatggaggtaactcgagcctgatatttcccttcctttctttcttgtttcatgggctaagataagtgtgacttaagatttgtgaatacagcatagagagctcttcattaaaaagaactactgtttaaatgccttcttcctgagagcctttcttttgcctaccaacactgacaaatggacttatcattttcgtgcacaggaacataaggaatttaataaggtgaagccacgatctttactccctcagtattcattgattctctgacttaagaatggcacagtgattttgcctgactttacggtgaattttcatcatctgtggtcataagaattaatatttttagtagcatcataatttatgtaaaatatggtgtctttcatgtttttgttaaagacatgtggtatagtagttagaaatttgatgccagctcagcttctaatagataagtaataacctgaggatgtctctctcaagtaattatattagtatatacagcttgctttaccttttcctttatgtgcgctcatgactatatatttttttcacctgtttaatcccattgctgaaattgttcacaacattatgtatactacttgaaatcatcataattaaaaattaagtttaaatgcacatacccccaagaaagttaagaacaggtgaactattttaattaggttgttttttcttaacagatctctgacatgtggcaagggaagatcagcgtgtgcagggcattatgaaatgtgagtgtgtgggagatgtgtctaataaggatgctcagtgactatgggaggttgaaaaataaggacagaaacagaagctgcaagaaaaagcagcagaggggagatgtgactgtttcaaggatgaacttagttttctggaggtgagcaaatgaagcattaatgaaaatttaagttagacaccttcttgcaattcccttatcata

SEQ ID NO: 30457 - DNA, 1689 bp, Bovine  19866880654352
  misc_feature (1)..(1): n is a, c, g, or t
nctgtgctttttggcccgcacagctcaaacaaatggaaataacatttaaaatctagaaactttgtgtaaaatatgaatttataatctcttgtgaaaagttagaagtgtgggtagtgttggatgtacatccctacatggctggacaggcaggcactgattgagcctatcctcttcaagctgggcatgagctagtttgccattatcatcagcacttaaaggctgcaaacccagacctcatgccttgcaggcttcacacatttgcaaagtacctgcctgcttacatgaggcattttattttatgtgctgtgtgtgctgtactctattgctcagttgtgtccaaatctttgtgaccctatagactgtagccagccaggctccctctgtccacagaattttattttatagccctagcttaaatttccttgttttaatctggatttttttcatccttttttcattctttaatttactcccttgcatttatctctgatgactttatcctgtttctgtcagactctttccagtaaaatgaagttatatttgcttttaataattaaagatcaactcaatctataaggtaaataatagtttctatgttttaaatatatttgttttaatgggtattttgtctgtattaaaaatgcaaaatgggactgagattacatatcaggtagtgtatggacacaaatggattttttacacagtgtgaaccttttcagaagtatcatgttgcaagaatcctaatttattccaaggtatattactgcttgccacacacaatgaaaatcaagggtttagtttggataagcaatatcaactcaatacagacacatacacacacacacacacaagttagaaatggttttagtttgaattctggttgatgaaatacttggctacataactctcctaactctatacttaagtaccatttctgatatttaataacatggaaattttaggatttacaaagaatatttaatctaattgaattaaaatttcagaatatacaaggtaaaaaaaagacacaagcctaattttctaatctaatttgttgtcagagttgtacaaatatacaacacttataatgagcttgtgattgcattgtctcattgggttttaaccatggtcgtgtgggtattaccatctccctttagcaggtaagaaaactgaggctcacttaaaccatctgccaaaattcaaatagatggcatgtagagctgggactgaaatctgtttttgaatttaagttaattcaactttacaattagtatttattgaatatatgctttttgcagactttctgctaaattctggggctatggtaataaataaaacagtttctgctgtcaaggaactcagagatacccaaataagtaaaatagtattgttagtgttcagtcactaagtcgtgtcctactctgcgaccccatgaactgcaacatgccaggcttccctgtccttcaccatctcccagaatttgctcaaactcatgtccattgagtcagtgatggcatccacccatgatacaatagtcatgagggcacatcaggttgccttgagataagatttgtcttatctcatttcttcaagaaagtggcacctgtaagaagactcaaaggtataaaggagtcagatgaagcttcaaaggacaagtagaagttattgagataaaatggaaatgagaaa

SEQ ID NO: 30458 - DNA, 1652 bp, Bovine  19866880716515
  misc_feature (1)..(1): n is a, c, g, or t
ntctaggtttcctagtgatctgcaggaccttcattttcttgactatcctaaaatataaatatactctccttttctctgaatgcatttgcttctcccagtgtgtgagatattcatatgccagcattctttaaaataagcttgctgccatttatcttgagaatgtgtgccaattctctaatgaggactctttccccactcccaatttgttctcaaccactttgatttctattgatcctaaaataatatggaagtaaaaattaaagtatttctatatgtgcatgctgtattggtgatttgaaacttcaggtactgagaactgactgtgaaggagagagccagccacaatctggattatttttcaaatgctttgggtttggcaaaaactaaaatgcttgttgccaagcccctttcctcctaatttttaaaaatcatgtgtgtttcaagggaaatttaatccacatgtttctgattcatttgcacttaagttgtcaaactgttttgtaatcataagtctctatctttctccacagaaagttgagtttttccaagtgtgcataaacaatcacctcttagaagaatgaactgaatttttaaattcagaaatccaggatgggcaaaactgtgtgtacctcacctgctcttgggagaggaaaagatttttgaagttttgactctgcatcaaatcttttgatgtggactttgacttacccttggaaatatgagattcttccctccaagaaaaagtgttttgagagtttaaaatatactgtagaaggtgctaaatgaccaatgatgcaggaagattctaattatttaaaattacaagtaaacatgactgtgaataatattagtgttatatttcataacaaaagacttattttaaacttcataatctacacaattgggtttatttacaactataaactcatcgtctcttagatgtgagcttaacaaagcaaaaagctcaaactttcttctcccaaaatactttatctaaaattagtttaagttactaataggaaaatttacaaggggaaaataaacacaatatttttaagagctcattccatctctgaaaagagcttagaatttgctgtatttacatatttttcttataaaaccttctgtagtgagacttgaaatgctgaagcttactataatagaatgtcccatttgggaacattaagaacttttattttatgggaactcacaatggttactcccatttgggtctcttaggaagtgctaattcccaacacttcctcctttatcatgagatcaaaccatttgaaccacttattatcatgtacccagtaaaactcaatctgttgtgttaattagttatgtaaacacattttataattgtggagacaaagcagagctaggcaactgggtaggtgagaaaagatcaaagatctcccttaataaattgttacgctaattagtgtttgtcttgtagtgcttctccagggggtcctttaaacccaagcttgggaaaacctgcttagagaacaaggaagctttggcaaaaacaaatctagccaaactcccaaaaccaacttaaaaaccagtgaagtgagagaaaaaaggaataccaaaagaaataggtggaaaagaactgtgaattcctcctgaggagatcctactcttaa

SEQ ID NO: 30459 - DNA, 785 bp, Bovine  19866880783910
  misc_feature (1)..(1): n is a, c, g, or t
ntattgctaaggtagtaacaaagagggacatttcaccatatcctttgtttatacaaataaatgaagtatatttggttttatgtcatccacacagggaaaagagggtgaaaaagatgaaaatttaagtaaaattattattatttttatatttctccttattatagcgtttgatttgtttatttgatgcattcatctagagagtactcattattgctgaactaacctaaaaaaaaaaaaaaaaaatagaagggggcaccaaactgactctacatttttagtattacatttgtataaaagacacgaatgtcatttaaaatagttgtgggaacaagagtagaaaaagaccggaagattaacacacatgcagaagggaaaactaaaacttgaaatgggccaggtctttgagtgggccagatctgtgtgagaatactgtatcgtccaagaaaatttttcattgcaatgtatatcttattaaaatcctaattgctttcagtctccagcagagcagtaatggcatgacagtatttttatacttcaagaagtcatctagatttctcttggaggagctgtctttaacatttggtttactttttgcagtggcaatattttttccattgttttgcatgctaagacagcaattgattagtatagaagccttgagccaagttctgccctaggatatgtatgtgacccccactaacttcaaatagagttacacgcacatatcctggagtggaatttggctttcttccatagtagtcaatgagagtcattgaagtggatgg

SEQ ID NO: 30460 - DNA, 1733 bp, Bovine  19866880810036
  misc_feature (1)..(1): n is a, c, g, or t
nctgagacgtgcataaatcacactttttactggcctgccaactccatttagagagctctcctagcaatacgaactccattttaattttcctttcacacctcccatgtcttatactgtcatatctcattgtatggatgtacagtataacacagtttatttatctatttatctaccgaaggacatcttattcactttaaattttgacctatgaataaagctgttataaacactcgtgcttttgtgtggacataacttttctactcatttggataaatacccaggagtgtgactgctggatcacatgctaatagactgtttatttttataagaaactaccaaactgtcttccaaagtggctgtcccattttgcattcccactgtcatagtattttaattggctattaaatgttgttccaagtcaagaaaaaatttaaactctaaatcattaacatgagttttactgttcatttttatattgtgcaatgccagttttaaacgcaactataaaaacatttgctcatgtgcagaacaccaaaattacacaatttgtattttgtagcttgtacatgtatatgttggagaagggaatggcaacccactccagtactcttgcttggagaattcaatgaacagagaagcctggcggactacagtccgtgggatcgcagagtcagacacgactgagtgactagcacacacatatacacacacatgcatatgtatttcattctcacccaaagagtggaagcactgcacaaaactaactcaagtggttttgatatgtgcacattctaccaaaactctcttccttcaatttaataagcaagaaaagacccaaaagacacagaacctgtccattgccctgttacagcataaatggttgactaatatagagacgtaattgaagttaagaaagatccccctgtcgttctgttcctgagaatgccattgctttctttctgcctttaagggaagttgatttgaatggaaagcagtttttcaacttagtcagtggtagtcctattaatatgaaacaggagtagggaattctggtgctcagagagattcaaagcacccagctttcacgacacacttctcttgtactcattttgaatctcagtgaactgccacgcttggtgcgcacaggaattcagagctcctggggcattccaaacactctgtgggaatggggcagtgaggaatggaggacacacacgttgcacggacctgctctgctcatgagcaggctccaagacctaagttcacagataaaattattgtaaatttcaagatggccagcagagcattggatcaagcccagagcccttctgcatgtggggcttgatgagactgcacaggctgagcatccgtgacactggccctgagtttccttgaggacattctgctccattcaggtcaaagctctgtcctgcctctgtgttgtgtcacccccttccctctttcacttccaggaggtcacaggaacagagctcttcctcctgtcatctatctgcctgatggtcaaaccagaaacctgaatattgccttgcatcctctctctccctctaagtccttattcgcccaccaccccctatcaatgctcctctggaagcatcacttgactcctctctcctcccgtctccactgccgtcacctggtctgcttacaaaccctgcacatagctgcctgatggatttccctgttcccacttcctcctttcgggtggaacccca

SEQ ID NO: 30461 - DNA, 989 bp, Bovine  19866880827600
  misc_feature (1)..(1): n is a, c, g, or t
ntttaggatcaaaaactattgagaaagtgggttagggggaaaactttatctttgttttccttatagctctgccatgaagtaaagcgtcggaggaaaatcaacgtgagtgaacgtgctaaggtcattgatcttgattgtgagaaggctgttggagataaaatggaatcttctccagattaccccaattcaggacaatgtaaatttacagggatacatcccagggacattctgggaaaaaaagataaaacagagcagagtttactcagggaaagaaatcaagtgtgcaaggaacaaaaaacaatcaaaaaatcaaaagtagggtatatggattctgaagccagagacaaccaaaaagaacatggggcctggcctgacctgaggacttctgaggcagagaacaagagctgctctggcgccctcaacacagtaagtaagacgggatttgccttggactgtttctaaagaaatatttacatttcaaagggctaacatgatattgcttatatgtataaaggctcttgaagaacttgccaaagttagtgaagaattatgcaactttcaagaggaaattcgaaagcggtctaaccacagaaggtaggctggtacatctatgatgatttttatgttgaaaaatcaagacggatattgttttaagttaatgaatccaaattacctttcacatttaacactttgttagcaagaattagtaatgttactaaaatctgttattttaggagataaaagcttaaattgtacatttctttgttcattaattcttaaagtaaatcttgttttatttataatttgactattatgtgtactttactttttattgatgtttagtttagttatacttgcccttgtgctcagtcactcagtcatatctgactcttttcgaccctaggaactgtatagcccaccaggttcctctgtccaggaattttccaggcaaaaatacggagtgggtgccatgccctcctccaggggat

SEQ ID NO: 30462 - DNA, 1642 bp, Bovine  19866881083090
  misc_feature (1)..(1): n is a, c, g, or t
natgggattctccaagcaagcacactggagtgggttgccatgctgtcctccaggggatattcccaacctagggatcgaacccacatgtcctgcatctcctgcgtcgaaggtggattcattattgctgagcccccagggaaacctttttacctgttatacttggagctgtatgttgctaatcaggtttgttgcctggcatcctgtcctctgtaataggttaccatgtaggactgcttctggagcaggaaatatgctagaaattcagtatatgaagtattttgagtagggaaaaaatagtaaatcagtagaatttcatgaaatcacagtccaaagccagtagcatagttccagtgggagttgctctgtagacaattttactttggtgaatctcagcactgccctttctcctcctacctaaagtggtttggataggtttcctgtagccaaaaggtcttatgctgtccatctcactggcaatttacagagtataaaactggactcagtcatgttgagtcatgctgattgagtgattgagaacactcactgacgttacctacttagaaatactgctgagttggtggatagatatgaaaatctgtaacaaaatgaagtatcttgccccaggcataaagaatgacatatggaaaatctttgctccagtacagaagttggtgcaggccacagtcttttgagtcctcatccctctgcatgtaaatttcccttttagtgttaatttagtaaaaactacataataattaaaaattgagtttataatgtgcttagttcctcagttgtgtccgactctttgcaacccggtggagtgtagcccccccaggctcctctgtccatggaattctctaggcaagaatactggagtgggttgccatgtcctcctgcaggggatcttccccacccagggatcgaacctaggtctcccacattgcaggtggattgtttaccgtctgagccatcagggatacctactcttaatgtacctgatttttaatttagttttagtttttgctttgttttggagaaaaaagagactgggagtgaggagtggttaaccaacagttagaatctgtcagtacatacttcccagcttttcatcttaagatttcaagtggttagatagagcttcatgacaagaacaaatgaaatagcataaatgctatagttaatcaattatacaaatgttactttaaaaaatatttcatctccaggaaagaagccactttaaaaataaaaaattaattaaaaatcagaatttgactgttagaaccttgattaacccccagattgccatcctgggggcttcccaggtggcttagatggaaaagaatctgcctgcaatgcaggacacccgggtttaatccccagaccaggaagatcccctggagaagggaatggctacccacttgagtattcttgcctggagaattccatggacagaggagcctgccgggttacaatccatggggtcgtactactgagcaactttcactttttctgtctcagaggaatcattttggcaatgaaagtggaactgaaagtaaatgtttgaggcagaaatttaaatgaaatgcttattgcctttggactggaatacagtcagctaagcaatgactctctcatctaccta

SEQ ID NO: 30463 - DNA, 1708 bp, Bovine  19866881151726
  misc_feature (1)..(1): n is a, c, g, or t
nactgatctcctctaggataggctggttggatcgccttgcagtccaagggactgtcaagagtcttctccaacaccacagttcaaaagcatcaattctttggcacttctctttttttatggtccaactctcacatccatacatgactactggaaaaaccatagccttgactagactcacctttgtttctcagccataaaaagaaacacatttgaattagttctgatgaggtggatgaacctagagcctattatacagagtgaaggaagtcagaaagagaaagataaatatcccatactaacacatatacacagaatctagaaaaatggtactgaagaatttatttgcaggacagcaatggagagacagacatagagaatagacttatgggcatggggagaggggaggagagggtgagatggtgagatgtatgggaagagtaacatggaaacttacattaccatatgtaaaatagatagccaatgggaatttgctgtaggtctcaggaaactcaaacaggggctctgtatcaacctagagggtaggatggggagggagatgggatcgaggttcaaaagggagggggtatatgtattccaatggctgatttatgttgaagtttgacagaaagaaaaaaaaaatctgtaatgcaattatccttcaattaaaaaataaattaatttaaaaaaaagaaactccataaaaagatgctgcattgaaagaatgtacattacagaaggggcagttggaatttcaacacatcgatgtgcagtatctgccattttgagaatatcagaaaacatagccagctaacccaggattcctagaagaaaatgatatttagatcttaataggccactcttttgaatgaatggggaaagcacgttcccaagtaggagaatccatactttaaaaactcagaaatgaaagaggatgtcacagtcaagatagttaaagtagcttggtatgcagaaagggtagaaacaactaggaaaaaagacgaaagatgaggtgagagagatggcagaggccagatggctaaaggcctggtagtcatcagctcattaagaagtgtaaactcttattccataaattatggagatttactacaaagtctggtagttctcagtttcatcttctcattcttaataagaataggaatttcctcactttcacttttaattttttgtttcagaagttatttggacacatactcatgataccagacctagtggcagagaacccaggaagaggaaactgttattccctccaagccaccagataaaaagccaaaaccatgcatcttcctaccaaattgaagcaaagaccctatatcaccaggcagtaactaacgctgaattgttctcatttaagtttataagcataagcgatatgttatgttttgcaaaatgttaggcagaagaaggatagaaagatggaatgcttctaatatcctctaaggtattaatacaaatgtttgatttttggaagacttcaactgattgaaaagtcattaagaccaccaaaaatgaccttattaatataacaacttctaggtaaacccactctggggtttctttgccctggagaatcccagggacaggggagcctggtgggctgccgtctatggggtccacagagtcagacacgactgaagcgacttagcagcagcaggtacactcttagaaagtgaaaagtgaaagtgctagt

SEQ ID NO: 30464 - DNA, 803 bp, Bovine  19866881162807
  misc_feature (1)..(1): n is a, c, g, or t
nccgcagctcagggctcggacagtttgaaagtacaatagttggtttccctgaccacccgaccccgctgcgtttgccatcccggctcgcctgtcggatctgagtggagaagttgtccgcagctggggttagcgcttgctctctccatacgcctaacacctacgtgtatttctgaaacagtcaatcttaattaacaatcaaaagaaaaaaaaaaggagcaaaggaagggaaacattattgggttactatgcacttgcgactgatttcttggttttttatcattttgaactttatggaatacatcggcagccaaaacgcctcccggggaaggcgccagcgaagaagtaagtgcaggcttttttacgcatttgctccctcccgccgcgttcacctgtcgggtcgcttttccttaacttgagtcggctcacagcggcggcagtcctcccacccaacaccccacgcctggagaagaggtaacagttgaggctcctgtgtttcacgcattcttttcggccgctcctctcttgccccgcatcttcctgggtgccatagtcccggcggacccggcgctcctgtgcctcccgcgcccccataaccgcaggttagcgggaaaagttcgctccttctttaagaccagctcaggggatgtgtgctttccccccaagactgggacaggagcctccagcccccagcggttcgcggacgcccggctagcgggatgcccctgacccactgagtgcccgccggggggaaggcgcggccgcggcacccgctcaccttgcgtcgccaccctcgcgtggggaga

SEQ ID NO: 30465 - DNA, 1394 bp, Bovine  19866881168541
  misc_feature (1)..(1): n is a, c, g, or t
ncctattaatgtgttatattagaaaagtgtctgtttagctagactactgcctacttctctcttttttccagaaatggcaagtcttttgaagacatcgcctaacgctgtaaagaaaagattgctgcatcagataggattgtcactttataatacttctcatggcttccatgaagaagaagtgaaaaaaaaacttgaacagtttcctggtggatccattgaccttcagaaggaaaacagtggcattggcattcttactctgaacaatccaagcaaaatgaacgccttctcaggtatagagatctttgttatgttaaagaatgatactaaatctaacctgctatcttgtgatttttattcttaaactctgtagacagaattcttgaaagtcatggtactctttgtagaacatgtaaaaatgaaaagctgtcacatgaaccaggaatatttttaaaatttatttatttttaattggaggataactatgttgtaatattgttttggtttctgccatacatcagtcagtcataggtatacatatggccccttcctcctgaacccccccttccacctcccacctgatcccttctatgttgccacagagcactggtttgagctccctgcatcatacagaaaattcctactggctatctgttttacatatggtagtgtatctgtttccatgctcctctctaaatctcccccagcttctccttccctcaccgtgtccacaagtctattctctatgtctgtgtctccattgctgccctgcaaataggttcatcagttccattgttctagattccatgtatatgtgttaatatatgatacttgtttttctccttctgacataacttcactctgaatattaggctctagtttcatccacctcattagaactgaactgactcaaatgcattcctttttatgactgagtaatatttcatcgtatatatgtaccacatcttctttatccattcacctattgatgggcatctaggttgcttccatgtcctaggtcttgtaatagtgctgcagtggacattggggtacatgtgtccttttcaggtttggttttctcagagtgtatgcccagtagtacaattgctgggtcatatggtagttttattcctagttttttaaggaatctccatactatgccccatagtggctgtaccagtttacattcccaccaacagcgctagaggctttccttttctccacaccctctcttaacatttattttttgtagttttttgatgatggccattctgacctgtgtgaggtgataccttgtgattttgatttgcatttctctaataatgagctgtcgacattgagcatcttttcatatgtttattagctatctgtattcttggagaaatgtctgtttaggt

SEQ ID NO: 30466 - DNA, 1483 bp, Bovine  19866881197350
  misc_feature (1)..(1): n is a, c, g, or t
nccttttagtgatctttggcccaaaatgtttcccttcccttccgattcaacaagagacagattaattttgataaattctaatatttattaaattataaagtctgtaatcaaaaaaaaaatgtggagcaagagaaacctcttaactacaaggactagacagcaaagcctatgagaacgccatgaagtgtgttacaaacaagattctgaaacataagttataagctgtttcctttacatttccatttcagtaactttactgttaagtagttgttattttaaaaccccaaattcacatttgttctcacgttatttaagctttctgttcatactgataccagacatcttgtaggtgccaaattttggtaatggttttacgtcaatccatgcagaaaaatatgaaccaaggcaatagtcagatgaggaccattaatgcacaaatacacacacgctggccaaaagaactgaaggtattttaaaaaactataaaataaacagacctcaagaaaactgcgttattactaaacagctctcaactattaacacccaagttctttatattaaataaatttctcaacagagatgtgttagacatattaattacaagtctatccttcccataccccttcccaccccaactcccaaaatgcactacttgggatgagtataatattacatgggcaaaaatttacagataaccattttcatcttgagcatggatctgaaaacttttatttaaacttccgttactgtgcactgtccatcaggccttcgagatctgacactcactgttccacccgctgccactgatcgatcagatactgtctgacttggattaggaaccaaaagtctctgttgggtcaaggagtgttgtgcaacaagcgcagatacatcctcactatcactactggcatcggattcggtttcttcaatcgaagtgtctggtgctggtaccctgcctgaagatggtgattcatgctcttcttctccttcccctctatgactcctttccactatgctgtctccaccaagttgtaaatgtgcaaaagagtcttccagagaagtgcctgcatcaggggatggtgtggcggggcttgttagctgaccgtctactgacgtcaggggcctcacagaagacgactgaacagaagctccgctctgagctggtacactgtccgctccgtcagcagagctctctctcgccaggtttacagtattagcatcacagtccagcctaagtccagctactcccttctttggtatatctattatatcccgcttgatcttcctgcgacgtccatgttcgtttctcctatactgtaccatattttcaagatcggcaacatacagaaacccggcaattaacatttcagtgctctttttacctttggaaaaagcatcttccagctctctgctagtgcgctcgtcatactgccaccacccatttcttccttcataataccaagcatattcaccgtttcctcta

SEQ ID NO: 30467 - DNA, 748 bp, Bovine  19866881263086
  misc_feature (1)..(1): n is a, c, g, or t
ntcttacacactacttaatactagtaaaggctacatgggacttttctatgttttccaagctagttaagaagtcaagagtttagcatcaagtctataacaaaaaagaaaagtgaaaatatttgaggatgtagggaaggtacattaaaaaattagccttacgtaagtaatcaataaatttctgaaaacagtaaattatgactacaaaagagtgtgacatctttactaaaaatgtggagtagcacatgctaaatgagacacttggtagttgtttttccccctgtgatgtaattccagattagagttacatttttttcccccatagagcagtaaaaagcttcaaaggaaggaaagagtgggatgtgatagaatgagaattagacagcacagtcagctggtacataaaatgatgaaagagactagaataatatcaacatcttgtataatcaatcactgcaaatgtgtcaccaagtatgaggccatctccaactgtcaatacgaccgtgtagacaatccgggtaagggaggaagtacagcatagtcaaacacgcctatcaacacttctttttttgtctccgaagaacaaaattctgagacgagacaagttcttggagcaaatggaaatttatccaaatgaaaatcaaacgataaatgccaagagaatattctttctttggatttatttcagttctttaatttaaccagcggaataattttcaagtagcattctgttcagccttttaaaggagga

SEQ ID NO: 30468 - DNA, 1182 bp, Bovine  19866881293418
  misc_feature (1)..(1): n is a, c, g, or t
ntatttttagagatgaacttaaacacctccaaaacgctcttcaaatggaaatattatgtaatctaaccttttcagccatgttctttggaaaatcaaccacataccacaaaaaccagcatctctctctttcagtttgtacagatttatgaaaattatagtacacatgcaagacaataaattagcttttcagttttctcttagttactaagttcatatcagcactgaaaatgtgtaaagcagcatgaaaaataagaaaaaaaacaccctgaatttcttctatagaaatcttatcaatccagcaatagtcttttaagtgaaaagagtagtggaattcatgaatctgtatacgactagtcagccctagatgtaatactcaactctaatattttttgttctctacgtatcccaaataatttgcctgatatttgatttacgtggtctgaattcttatttttgtttactcttcttttaaagtccaaaatttggagatttttatgttgagcccaacaaggcaagttttcacaacgtaactggaagactttataaatatagtctcagacaaagctagttgtggcataaaatcgaaggagacggtgttggctgagcatacatatgcagtattaataatgttggttcctagaattccataaccagagctcaagaaaaggaaagccaaaccactgaattcaatatttgcagcctatttcagggacgtgaaaatattttggttctcccatgcaaataatttctcgaaaatactttttgttcaaaatgactttttgtagactgaaactaatttcagattctacatgactcagtatgtggggatacacccaatcagaatttcttccacacccaggtatacttggttcttagttttcacttactgtattgatttgaatcagtaatttctcactgggatatgtgtgttaatggagattgctaaaccatgccctcaaaattactttacaatgtaggttgtatgtgtaaaatgttaacataataataaaatatagctgatatactaatttgaaattttaaaacaattcatctaatttggtgccagactcgctactttgatcaaattgtgtgctaagtcatttcagtcgtgtctgactctttgtgaccctgtggaccgtagcctgacaggcttctctgtccatgggattctccaggcaagaa

SEQ ID NO: 30469 - DNA, 1817 bp, Bovine  19866881402771
  misc_feature (1)..(1): n is a, c, g, or t
ncacctcatcaagacactctattagttcttgatcacatttaggacaaaacccaaacactttaagatggcctaaaagaccttcagtggtcccatctctttctttcctcacgcttatctcctatcccactcactcagcttgttctttgtctagacactttgatctttctttgaataggcctcaggacctttgcatgctcttctgtctcttgctgcaattcctcttctctcactccctgatttccccatgacccctgctctcatttttttcatttctctgctcagatgttccctccctcccccacccaccaccttggtcctcttctccctctgcttcattgcacacttgctcaatctctacacttgggggatgctttactttttcattttatttaatatctgcaattatattgaacatttattcatttatatctgtaattttcaactttaatataaagtctgtgaatgcatagatttcatctatcttgttcatctttgtccagcactcagcatccatgaaaagctctcatgaataaaaggggcaataagctgttatattatatagcatgatggagttattaagggcaagatatttcatcatactctaattgcatgattataccttattgtttttgcaagggatccaaatctccatgtatcaaaagtgtgtgttggaaaatacagcccaggaccttgcttctcatgaatattcttcatcataaccaaggtttttcatttgcttgttttcttagtgaatgtgatatccttaatgatatcctaagcagaagcaaaaagctatggcattgctttgatttatataatttttattacttgacattttgggggttagaaatgcagacaaggctctaactaaaagattgcatcacagtaattcaatgatgtaaattcactcaaatgacttttgatttttagcctgtctcttttattctaagaacaggccaactgataatacatatctgttttccagagagctgactcagaacaaatagtgaaaaattgtttatacaagcttatattactaggtgggttgaaatagaaacacaaattccagccctattttccactactctttcttctccacacttaatggaggaaatgaaaatgcttccagggtcaatctcaagggtcctcatagaaaaaaaaagaatgtgtggctaaactggtctccagagaaggatagcaacagcattagctttaccacactgcctgtcagcgcttttatgaagaaaaactttcctctaagcggaaattttgccccccaaaatataaggaaaaggtcataaaacactgagtaagattgagtatcctatatataagactgaaaaataaatttcttagctgcttttgattttttaaatgaaaatatgtcatggggatggaagtttctaacacatacttttgggtatctttattttggatgttatagaaacaatgtagttttggagttttaatacacttaaaaaaaaaaattcaatgaaactccaatactttggccacctgattcaaagaactgactcattggaaaagaccctgatgttgggaaagactgaaggcaggagaaggggatgacagaggatgagatggctggatggcatcaccgacttgacagacatgagtttgagcagctccgggagttggtgatggacagggaggcctggcgtgcctgcagtccatggggtcacaaagagtcgcacacaactaagcgactgaactgactgacttaagacaaaaattatttagaagataattgctttacaatgttggattagtttctgctgcacaacaatgtgaatcagcta

SEQ ID NO: 30470 - DNA, 1062 bp, Bovine  19866881419271
  misc_feature (1)..(1): n is a, c, g, or t
natggcaaagaaaatggaaaaaaccatatttcccactcaggggtataccagcccccagtctacagtgatgaagacatgtacttcactgggcaagtcatatgagccttaaccaaaaaccccttgcaagcttcttggaattatcactgtcccccctcgtctttagtcttcaggcaaggttgacagaactaatggaaaaactgaattcaagccagaacaaggattaattacatgggattgaatgaactgatgaatatattttataattttatgcttttttgtctcaaatattactgctaatttaaatcttttgctttccagatacaaagactttaaaaaaaatacttagagcaacttgataaattatacctttattatccaaatggaagcatttagctttttatttttacctgatccctctggaattcagaaactctcagtgagtattcttattttttggcactatagttatttcaaaagttcaataagaatctgttctccttataacaggacagaattggaaaccctggttacattatcagtgctttgactagaatgtcataaatgaaattcagataaacatgtagactcagatatgaccagacagttggaaggaacttttgacttttagagccaatgaagctccttggaaaatcagcctggtaccttacttatggtattcacagcagccttacaaggtgagtaaggaaggtcactttctggcaggtacaggaacctcaggatattttgaggacctcaagaagacagaaattcaccaaatccataggtattacaggtgagcctggtgataagttttcagtgtggtttccaggccttgagagaagttcagtctggagatttactatgaaaaattccagcagagtaggtttaaaagtgcctctatggccaaccactattcttgctggacttatacagataatcaggccaagcttattgaatttaaacttactttgcaaacaaagtagtcttaatttgtctatctttgatagaaatgaggggattttagagagaaaagttatgtttcaatagaaactagaatacata

SEQ ID NO: 30471 - DNA, 1688 bp, Bovine  19866880488420
  misc_feature (1)..(1): n is a, c, g, or t
natgaaatgcatttgttcttctctccaagttttatttagccccacttagggtcagctttgtgcaaagtcctggaaagagatagattattaacatagtccactgggggaaacatatcagaacatgacccttttcaattgagtttattttatttttatttcagcagtttagtgggatgggtatcctgaattatcctcttgtttgaaacaaaatgctgagctgagcaggcacaataaaataaggaaaattcaaatttggaataagaaatgatgtagctacagactcctaggagataaattagactcttttgatagctgcatggggtagtaaaaatggaatataacaattaggatgctggcacaatgggggaatctgaaaccagactcctacacaggcagtagaagctgttacccttggtataagatgaactgaatcctgccaagtggagagatacaacatgctgtagttttcagctgtgttgaagagatctctactcagaatccgtatcactgagtgtctttcatcagttttggtctacattcatacaaccagagtagactaacaacttcaagctaataattaaattgtgagggactcttcttgtctggaaaatcccatggatggaggagcctggtaggctacagtccatggggtcgcaaagagtcagacacgactgagcgacttcacttcacttcacttcacttcactacattagaagtgtcccctagactggctgatgaaagtacagtctctgagaagctcaatttcaattcacatcttcacaaattcccaaaaatcaagtttaaaggcatgctttgcttagagtcagaaatcacaaaacaaaactctataaatgagaataagtagaacaatacaaagttgaaatagacccacaaaaagaattatcaaagtataagacagttacatttaatatgttttagagaaaaaaaaagaatgaaagtatgaccagagaataagtgactaccaaaataaataaataaataaccaaatcaatcagacaaagcacttctagaagtggtatgcatagtaattgcaattaaaaaccccatggacatccctcccactctccccatatggctgattcacactgttatacagcagaaactaacacaacattgtaaagcaataatacggcaatataaaaaaaggaaagaaaaatcacaaatacatgacaatcattaaaggctctgagaggtcctgcaaaaaaaaaaaaaaaaaaaaagattaaacggctaaatagaaacagctaaaggaggaaagagcagacatctagtgttactatagcattctatgtgggagtatatttatttttccatctttacatgtctttctctcacccttttatctatctctgtgtgattctattcttctctggattcagctttaccttggcttcaggcagctgcctttgctctcaggcatgaggctgagttgctgaatcaggcttggttctgctccatttctgctctgtaatgggatgcatgggtgagtgatacaagtttcctctagttacgatccagaatctgaattggtgatgtccctaggtgaccagtgagtagcagaactaaaacagtcgtgtggagaaccaccctcctcctgtttaagtgagagaagaattttcacgctatatgacctaacaggaattttcactcatagggttttgaacaga

SEQ ID NO: 30472 - DNA, 822 bp, Bovine  19866880582796
  misc_feature (1)..(1): n is a, c, g, or t
ntttcatgtttctttttccaggttccactgaccatctcctgtgacccattctgtccttctgcagtggtttagtccatttaagtctgcctcaggatgggatgctgtgagtacaatttgcataccatttctagtctttgcctgtgtgtttgttcagcgttcatttgaatttgagtttttatcactgccttacctaggagtttttatttctttgtgcaaaatattgttctccattactcatgccatgggagcagctttgctctctgtgaggcaccagttctgactgttcctctcatctcatcactctgtgtcttttttgcctctggcctttgtgtttggaacctcctgtggccaatggctgccatgagaaggtcaaagctgcagtgtgactgtaaccaagcaggaccctatgaagccttccgagaatagacctctgcccatgtcctctgactgccttttttctgtagaactttagtcaaaggatgcatttaatcaggcaattgagggaaggcagaaagaaaggaaaacaatcaagccagacaaaataataatacttgagccattaaacgaagtcaaggacttttagttctttctcaaggaccatagttttaatattctgagccatgtcctttgagctattttgcagaaactgaaagcccccaccaggtggaagaagttaactgtctgctgcccagaagcacttagactccaggttggtaggaaccagaaggttgatgatgctgactcctgactaactccactcagtcagaagaatgtccatgagtagatcgtgccctattcctcactagtggctccagcatgggt

SEQ ID NO: 30473 - DNA, 2582 bp, Bovine  19866880603529
  misc_feature (1)..(1): n is a, c, g, or t
nttttttaaaaagttgatgatttcggtcataagcaattgcaatatattgattttgccctctggagggatggggagcaagtggaggctttggaacagaagttgacgtcatctgactttctaaagaaaccctctgactgccaggcagagaaaaaggattgtgagtcgtggggaggaatgaggtatgagaaacctagttaggagacttttattcctatgatttaccctcccacactccccatctggtccgcatctgggtttctcttagctttctgttttgagaaacaaagagaattccagaccaacagaagttcaggtcatttatcatcagcaatgtgaccagaagccatagagctggggggtgggtgcagctcccaccacttggaatgagccatttaagttgtccacctatgaagtgtgtgttccctggagttcttcctacatcaccaaacagcctaggttgagacattcagcagaaaggctgaggtcctgtggtcagatctcaagtaacggtgaggagactggggactcaaggctctgatttctccaaaattcttgtgacaatccttcacaaccagttcagacaaggatggtgcagagtggtataacaaagtgttagaaaattccagatgcctcccagcccctgagatcttttgatacctcggcttacaaggtttttatttgttatgccttcaataaggatggatgactatcccggtgagtcatgggctggtgcccctgttttcctgatcacaaaaggattctttctcctggtttgtgctgagcttccaggagggcaaaaaaatgacatcagaggagtcaccaaaaaaaaattttttttgtccctcaaattagtctaaagaaaagacactggctcctagatacatcctaacattttgatctctagaaactacaatgccttagggaaataattcttcaagcagcttcagccatttgtgcttcagggagaatgttctctcagaacattggtgaaaagttttaatggggacaagggctttctgtgtacccaaggtgtaagaaagggtggcaggccaaagagcaggattatctgggcaaattattaaaatgcaggttatgaagtaggtctgttgtggagtctgagtaccagcatctctaggtggtttccagctgatgatgataccgcctgtttgtggacagcattttgagcagcaagaaccagggttccctccatcttagctttctctgggtcacacagtaacatgaaacaaagatctaacttctatctaacttttaatattggggttgggagagagagtgaagacagaggaagggagagaagggggaagacatgcggagagtggcttctcaaaggactcacagaggaggttgaagggatgcagccccagcagtcatctaggtgggcgcacagggtcctacctgggaagctaccagaaatgaccttggctcctgtgtctgtgctttctgatgagcatgcctgtgattccatcaggaagcacagaacattttcccttgtgttgctttaggactgggaaaataaatagctcaatattccatttgatttgaggagtgtggatgctgtctctcctaaattagaaagataattttgtaaaagcagctatgagaacaataagtgggttactctgtcagagaaatgccactttatagctgggtcttagttctagtttctttgtgaaccaatttgttagacttaaaaacattatgctgatgaatagtaaaatttcatatcacccaggggcagccataaagataatgggctgtcattgctgtggggagaaaacagtggcttgtttcatccagggaagcaagaatgaaagaggcaaacctaatcaaggataaagagctatgaataaaattcagagcaaagaattcggttgcagcaatgaatagtctagtctgcaaattcctgtgatgaatcctgtttgtgaatgtcataaaagattagaagctacatgaaaatagtcagcaatagctgtgttcatggtcagtgcgatgcgtatattatgcatttatttttctatctattaacaaataacatgaaatttaccagtgtcattagctgaccactgtgtcgtcacattcaaatgaatgctttacaagcagtactgtcttttctttgcacttccaatgacttcctgcatctatcaacaagcatttactgagaaactgctacacagaggtgctgggctaaatattatattaataaagaatattaatatagtgcacttgattttctatcattagagtcctccttctgactctgatccagtacctgtcatttctctgcaggtgtggcttctgtcaaaaagcaagttctctctttacttccacataaaatgaggcatacaaggaacacaaggcttggtatttttgatactgttagttaatgatgctttccaagtccataagaatgccccacattaatttcaatccttgcacatcttatagatgtaaatacttaagaatttggtgagatgttagtgtgaagacatactgttcagtggtcataacgtgtaacacatcaaggctggaattgcaccagcttgctctggtcagtaagtctg

SEQ ID NO: 30474 - DNA, 1220 bp, Bovine  19866880607526
  misc_feature (1)..(1): n is a, c, g, or t
ntaattcatgtgccattatttgttatttctattatgcgttgcgaacattagacagaacttaacatcaattttatctctattcttttccttagtttcgcttaactgctaggaaaacgtgaaacataaataagtagacaggaacagatggagttctgttatagtgatattcttattctttaagttcctctggcattttaggctaacaatcacaccatgatctgatcattatttttaatgatgtatcagctgttgactccattaggacttctaacgcaaagaatcacaaactgccctacttgcaaaaactgtgtgctatccgtcaaccaagttccctccctgtcttaacctcaaacacaattatttcaaacaccctttgtgtggcagcccaggggcaccatgccacagaaagatcagggatgggggagtggggcaaggatgctggccaagggggagatgaggaaggaaaagtcgtgtccttagggaaatttaggaaagcgtgctaggaaagctgagatctagacactgagtgtttaaatatatgtgtgactgtttaccccttggaaaatctgcagatccagccaggtacccaaggcccagcagaagacgactgggctacaagtcctgtaccctctgtgtgcctctcaccacagccttctatgttccacccctgtgactctcagccttgctctggccacagctgacctgcttgctagtctttcaatgcactccctgttcttcagccttggggcctcttcccaagctgttcaaaagtcaccttgatcatgaggacttcttcaaccaccttattataaatagcagtcacccacacatacacattcctatctcccttcttttatttttctccctggtgatatatatacacctgggagtatttctcccaggtatatatttctccctgctccatatatacttgttgaatgcgttaatctctatgggctgtaagctagtgtgtcaacatcagccatgacagagccctccatgtttaggactgtgtttgggttgggagaagggcatcttctaaggatgtggcatcttctaaggcatgctgccttccagtgtgccaggaggcggtgtgggaagcctaccggatctttctggatcgcctccctgagccgggggaataccaggactgggtcagcgtctgccagcaggagaccttctgcctctttgacatcgggaaaaatttcagcaactcccag

SEQ ID NO: 30475 - DNA, 1085 bp, Bovine  19866880617101
  misc_feature (1)..(1): n is a, c, g, or t
ngttgatgactgctgtctatctgccggtaaaattctatccctattatgaatgtgaatctttttctcaaaatgagtatgtttgtaaggtgtttttattagcttatgaacaaatacatgttttcagtactgaaattacattattagacacataatgcagactaaagtgaagggatgtggcctagtgtgtctcccggtacagacagcatatgtagggatttctccttatggacatacaaaaaggacttcaactcttctttcccctttttatttctataaatacatttcaggggatttatttcatagagacccacactgtctgtaggttcggttctatttattaaattcaaccatactaggagggcagtgtcttcagtagagttatcagtgttttcctaggaggatccattttgcttaacaaataccccacatatcatgtaaaacactatcgcaaaaagatagaaatacaaactactccaaaggcatttccaacaaaggcttctacttacccttacgttcctcctcatgtttttctctaaacctctgactgtgtgcctgtctgcattttcttccccctgatcattttcagctgaagtagaacaggcagtaaaatcataaattctgtttgtttcctgcttgcagacgttcatgcagttacaccgcagcctccttttgaggtgtgccagtagaaaatctgaaaatttcaatgattagtttgtaaacaaattgcaagtcatttgtggatttggtcacttaggaactgcactgaaataatgatttatatcagctgtgataagggcattgatgctaagcagaataaatgtcttatcatttcttaatggaaaacctgaagcaattttctcataatttgagtgcctaagtgttgaatacattagcttaatccttacttcatttcttttaaattgaatagtacattttttcttgttgaagtgcatttgttaatatatttgccattgaaagacttaatcaatgatttatgagtatgtggcacccaatatctggaatcttttaaattaactcaataagactcttactatagtttcttagtttttatggctttttttttt

SEQ ID NO: 30476 - DNA, 2448 bp, Bovine  19866880640372
  misc_feature (1)..(1): n is a, c, g, or t
natgaaaagccaagtgtggtctagtttattgagtgaaagctacagctgtgaaagaaagcccaaggatgtggaggtaagcaggccagcaactgtgaagtgagctaccaggtagggactaatagagattgtcttgttggggctgatgcccttcccgagagcctgaggaaagtgaggtaggggaaaggatgaaacaccagcgagaggctgtctgagttacagctctctaagtcacagagtggactgattttttaaaagaatattctctatgtttaggaatgagttttgaagcatgtaaaggatatttgaggggataatcttaagtaccaaaacatatttctatcatcaatggaagtgaaaaaccttcagatagttttaaacagagcagttgaagagatgtgcacagtgcctggcacattgcaggtacttaaatgaacttttggacaaatagatgagaaatgtagagggccttatcacaatttttttttttcagtttttggtaggttgagaggagttatgtttatcagtatagagattctgtgtttgggggttaaaaaagccaaagaccaagaatctgatgttttgcaaaactgtgtgctgaaattagcaagacttaatggagaaaatggagtgagggtgagaggtgaccactcacactcgtacaactttgtgactagagcactaaccaagttagcattgatgccttgggagataacagactactcaggcaggcagttcagtatagctagaggctgtcccagaggatcctaaaatgtacagaaaaaaatctagtggaaagtctggcaactccttaattagcaacagactagcaggtagatagaagcagagatcttgagcagtgggggtcctttgaagatgagtttggagtgtgaagactgtcaagaggataaactataggactctgggatgttcctctctggggagggcttatttcaattttttttgaaaatggggctgaaaaagtttctgctgcttgagcagacatggactgagggctttctccttcattgttgaaggttttatttctattcctgcttttttggctcccctcaactggcaaaatttcatatgaacccgattatctccacattatactgacatttctctcccagttcttcatgagctaattcatgttgtagaaatgaaacaggagggaaggaggcaaggcacaacctttgaaagaatgacatagccacgtgtgtgtgtgctcattcacttagtcgggtccgactctttgagaccccatggactgtagcccaccaggctcctctgtacatggaattttccagtcaggaatactggagtgggttgccgtttcctcctccaggggatcttcctgaccgagaatcggacttgagactctcgtctcctgcgttggcaggtggattctttgccactgtgccatctgggaagcccataggacacggcaaaagctgattagaaccaaatgggcccaagatgacagatgagtcaacttccactagacctggagcctcagtatatgttcactgtaacacatccgggttttggctcaatcagaggtgcacggtttcagcaaaatactccagttttggagtattttgagtacaaaatactctagtacagtagtagaacagattgtttaacaatttggaattttgtgaagaatgaagttaactatattagatctttgaagatcttagtagccatataacaagtctaattttacaaatgtggaagcagagattagagaaatcatatcatttgtggtagggcctataataattcaatatttaccaagttaaaacaattaaaaaagctctaatattgggaatactttgtaaatttatgttagatgaaagaaataaaatagaattttaagaagccatctaattccacagcaatttattaattataccacacacaaatatcctgcttttctgactgttttatggaggattaaagcaaaaatttcactggacaaaagtaaacaggcaaggaagattttattcaaggctatagggaaaaaaggctacaaatctgtctgagttcaactctgtggaagcaaagcactggagagttttgatgagctggagggaggcgaatagaaggccatttgtgtttgctagttggattcacccagacaaaaagcaaactttctcttatccttgtgataggaaataacccacaagtcacaaacaggagatagtttaaaatggttaaaaacaaacaagcaaacaaaaagcaacaataattaaattcacattcatatattattatgaaattcttagtagcattaaaagtagaaggtagaaataagagtaaaaacatagatatactttaagtaaaaaaggacagcatttctccaatgttatgtatttccatataaatacatatttataatagtatcatatggtatttatagttttcttttatttccccaaagtttat

SEQ ID NO: 30477 - DNA, 1021 bp, Bovine  19866880661122
  misc_feature (1)..(1): n is a, c, g, or t
nccaggaacataaagatttttaaaaagcatttaatggagaattacctggtgggctagtggttaggagttggcacattctgactcttgtggtcctgggttcaatctctggtcagggaaataagatcccacaagccatgtggtgtggcaaaaaaaaaacaaaaacaaaaaaaaaaaaacacacaaatcagtgcacttaatggcactcgaaagagtttccatatgccttcatgctgtgttttcagttacccaaaagtgttgtaggttacacagaaatatgccaactgaaacttaaaaaagaatgtgcaatgccttttagaatccatcacacttatttcctactgggcttaatttcagaacccagtcagttagttcagtcactcacttgtgtctgactctttgtgaccccatgaaccacagcacgccaggcctccctgtccataaccaactcctggatatcagacaaacccatcgagttgatgatgccatccaaccctctcatcctctgtcttccccttctcctcctgccctcaatctttcccagcatcaggggcttttccaaagagtcagctctttgcatcaggtggccaaggtattggagtttcagcttcaacatcagtcctatcaatgaacacccaggactgatctcctttaggatggactggttggatcttcttgcagtccaagggactctcaagagtcttctccaacaccacagttcaaaagcatcaattcttcggtgctcaactttatgtatagcccaactctgacatccatacatgaccactggaaaaaccatagccttgactagatggacctgttagcaaagtaatgtctctgattttcaatatgctgtttaggttgttcataactttccttccaaggagtaagtgtcttttaatttcatggctgcaatcaccatctgcagtgattttggagcccagaaaaataaagtctgacacagtttccactgtttccccatctatctgccatgaagtgatgggaccagatgccagatcttcat

SEQ ID NO: 30478 - DNA, 2471 bp, Bovine  19866880842427
  misc_feature (1)..(1): n is a, c, g, or t
nctgagaaaattggtgagagtggtcatcctagtcttgtttctgatcttagacaaaatgctttcagattttcaatgttttttatgatactggctgtatgtttgtcatatgcatgcatgcttaatgagtcatgtccaactctctgcgaccctttggactgtagcccaccaggctcctcagtccaagggattctccaggcaagaatgctggagggggatgccatgccctcatctaggggatcttcctgactcagaggttgaactgcattgctggtgaattctttagctgctgagccattggggaaacccaggtttgtcatatatggcctttattatgatgaggtatacagtccattggtggactcaaaatgaatccttcctcatcagtattttggaatagtttgagaaaaatcggtgttaattcatttttaactgcttggtaagccatctggtgttggtatttagttttctggaagtttttaaaaatactgataaatttcattgctggcaattggtctgctcatgttttatatttctcttgattcagtctggggacatttctgtgaatttagaaatctaaattctaaatccatttgtgctaagatgcccattttatgggcattttctgagttttgttgctctttctgtagcctcctaacggatatgaggtggcatctcactgtgattttgattttgatttccgtagtgattagtgatgttgaatatttttcatatgcttgctggccatttgtatatcttctttagagaaatgtctattcatatattttgcccatttttaaattggcttgtttcttttgctcttgttgcattattaggaattctttatatattctggatattaacctcttaaccgatgaatgatttgcaagtatttctcatattttaggttgccttttcactctgttaatcgagtgctttgaagcacagaagtttaaattttatttagtgcaatttatatagttttacttttgtcccctatacttttgttgtcacatctaagaaatgattgtcatttgcagtgtcaaaaagctttcctacatataggtttatgttttatgtttagattttgatccacttaaatttttttatttaaggcttccctggtggctcagaggttaaagcatctgcctgcaaggcgggagacctgggttcaatccctgggtgggggaagatcccctggaaaaggaaatggcaacccaccccagtattcttgcctggagaatcccatggatggagaagcctggtgggctacagtctatggggtcccaaagagttggacacgactgagcaacttaacttacactttcaaatttttttattatgtaacaagtccaaattcatttctccccatatgtttatacactttccccaacaccatttgttgaaaatactgtcctttctccactgaatgatcttggcatccttgtcaaaagttatttgactgtgtacctgaagttttatttctggcttccctattttattcattggtacatatgtctgtgggaaggtacactttaaaatacattttatgtctgaaatatctttaaaaatatcatcaaaaatagctaatattttggctgggtagagaattgagtttccttttataatttaaaggcattattctactaacttttatcttctagagttgctgtttaaaaccagtaagctgggcgtttggtgtaacctttcaatctggaaattcaaggtctttttttctgctgaaatttcctgtgatatttcttaaataattttcttcccttctactgtctctcttctctcttttgagcatatattatatgggtgttgcacttcatgaactaattctctcctctcttattttctttcttgtttccatttctttttcttgttgccgattttctagggatttgtacacatttatcttgcaatccttcactgatatttttaaatttttgcctgcatgaattttgtttccaaaactgctttattgcattctttacatttttacagagtcagtatcttctctcattttttcaagatgaataatatatttttgaaattttattctccctccatggtctcagtttcttttattttgatcctgttttcctatcttccaagttataagtcttgctcagggggctgataattcttggttcccagttcccagttaaaaatctgggggacaaaaatcttattggtaactttgatggattgtcaggaattgtgaactttgaatttctctttggggtaggatttctcaacctcagcactatttaaaattggagatagattttttttttctgttttctgtcattagaggtggagactgtcctgatacatagcagcattcccgacctctacctgctagatactagtaaactctcctttctgttgtgtcagcaaaatgtgttcagatattgctaaatttttccctgggggagtggggtgggaaaattgctctcagttgaata

SEQ ID NO: 30479 - DNA, 756 bp, Bovine  19866881129504
  misc_feature (1)..(1): n is a, c, g, or t
ntagctgctcagtgggcatcactggtccgggtgggcttttatagctgcccccaacaagttccatgagattattaaatactactgctctcctaagccatttattgtgtttaataagtgaatgtctccattttgtatctaacgtgttgtcaatatgctatcctggggagaattaagaataagccgacatactaagtagatctgctaacctgagaatatattgcatggaaaacacaaggcatatgaaggaagtaaatctgcagaagttcctgctttattccaatctgtgtaataccagcatgcattctcagtcactcagtcgtgtctgactctttgcaaccccatgcactgtagcccaccaggctcctctgtccatgtgatttcccaggcaagagcactggagggggttatcatgccctgcttcaggagatctttctgatccagggattgaatctgagtctcctgagtctcttgcattggcaggtggattctttaccactgagccacctgggaacctagagctgtagaaattcagttagcaaaaatctacagttagtctgaacttttaaacactgtccagttgcaggcagaagcaaggcaaaggcaatttcagacagggctggcatgagacccagacttgtgagggacactgcagaggatcaaggggtgaaccaaacaggactcccagtaagactaggaccaagagggttcctgcagatgctgctagtgaacagctgggaataaatttgtttccatagt

SEQ ID NO: 30480 - DNA, 1022 bp, Bovine  19866881161794
  misc_feature (1)..(1): n is a, c, g, or t
ncagtactgtttacaatagctaggacatgaagcaacttagatgtccatcagcagatgaatggataagaaagtaattgtacatatacacgatggaatattactcagctataaaaaaagaatgcatttgagtcagttctaatgaggtggatgaaactggaacctatgatacagaatgaaataagtcagaaagaaaaacaccaatatagtgtattaatgcatacatatggaatttagaaagacagtaacgatgaccctctatgcaagacagcaaaaaagacacagatgtaaagaatagttttttggactctgtgggagaaggtgagggtgggatgatttgagaaaatagcactgaaacatgtatattaccatatgtaaaatagatcaccagtccaagtttgatgaatgaaacagggcactcaaagctggtgcactgttacaacccagagggatgggatgaggggaggtgggagggggtttcaggatggggacacatgtacacccatggctgattcatgtcaatgtatgggaaaaaccatcacagcattgtaaagtaattagcctccaattaaaataaattaatttaaaaaatccagaaaaaatgcaaattagctatgaaataggtataattagacccttaattagtaatgattgagcacattataatgttcatgtggattttatgctattgcctgtcatttttgaatttattaagcaaataattctttccttgatgtattttccttgaaagcattttaaaaatatacagtccttctttaaaaaaaataaacaaggagacatttataagatggggagaagtgaagtaatttaccaaagatcacatagttaataagttccagagttgtagatcaaacctggtgatgagcctgtaaagtctattctgtgaaccatggcatttagttgcttttcttttgaagcctaatttactgagcacaaaggaaggaaagccaagcatattggcagaaaatatacgagataggtttaaagggaaaaggattgcaagt

SEQ ID NO: 30481 - DNA, 555 bp, Bovine  19866881169584
  misc_feature (1)..(1): n is a, c, g, or t
nactgagtgaacccacgcatatgtggaacctaaacaaaaacccaaaccagggtcatagatacaaaaaacagactggtgactgtcagaggcagagctgggtggaggggagcagaaatgggtgaaagcggtcaaaaagcaaaataaataaataagagtaaaaagaatgcttgatcgccagaagaagagtagaagggatttatgggctcccagatctaagtcacaccttgggctctggttgcgtggggtggatttgctcacctgaagctgagacttggctgcgacctcctggtaatacggggactgggagttatccagctctgacttgaacttctggtttgccagagagatacttagctctactttctgctccagtgcatcctcagcagcatccgtgaattctatttttctttcctgtgttagagttagaaaaaagagaagtgattctattactgtaaagcataagcaaatggttacatcatataatatgtatgcattgctactgtctcaagaagagggttatgaagcattaagtgcttttagagtaagtcctattaa

SEQ ID NO: 30482 - DNA, 2657 bp, Bovine  19866881198868
  misc_feature (1)..(1): n is a, c, g, or t
ntcgaattttattttaacttaaagcttatactgtatattaaatcagtgctcatttttatgtacacagaagttttttctatatgaaatccactataagatggtgatgatgagaatgacaatgataatattcttgtcttgagcatttttcattttctcctttttgtctgcaaaattaagtaccaaaatcatgtcttcaaactttggcctttgtaattccttttatccttaaggggccttcccaggtggcactagtggtaaagaacccgcctacaaatgcaggagacataagagacggtggttcagtccctgggttgggaagacgccctggagtgacaacccactccagtatttttggctggagaatcctacggacagaggaacctgtcaagttacagtccacagggttgtaaagagttggacacacctgaagcaacttattacacacgcacacatccttaaggacctgattctcaggctctgtatcttagagattcttattagactagagagggatttggaattctgcaagtttaacaagtcctcaaggtattttagactcaggtgaaattaaacccactcagaaaaattgccttggtatgaccaataagcctttcacggttcagctatttctgactatcttttatctctcactattgcaaagccatcctatctatttcatttcaattatacttaagcatttggagtctctggatgttgtcagtttatgtgctagcagtgttttcttcactatcatgtgccctcttcaatttgtccatctgcaaccaccagttcatttgttcacatgcatcttttgtgctctttccttttaaagccatcaatcattttcagttgaactgtgtgagggaagggcttcttggaagccatctttaccaataccaccctactctagcacctactcccctctaagaaaccatcagaacaatccccaccattgtctgtgctcatttaacccagacactggaagatttctgtgatcccacagtcacccattaacaggggaattcctactgttgtgttgctctgatctgtataaccctcctatgttacccaaatctttccattgtgttcccagaagtgtggctaggtggttagtactgtatcctcagctttcttcctgaacatcccctctaccttctagcttaactgaacctaactgccccatgaatactctgcattctcgaaacattctgaagtaacagcttgggtaccccccttttcttccaaactattactttttcttccttttgcaagagacatctactgctgttaatactgctactgttactactacaacatcattataattctccatcttgctactctgtaattgctatcacctggtcactttcatcattcactgaagacaaacctgtctgtcattcaagatatctattatgcacatgtctgactttaagtaacttttaggtctaacacacttacacatgataggtagacatgggagttgccaatcttagaaacagtgtaaaaaataatcctcttccttcttatttgtctcagttgatctcagtaacttccaggttaattcattctgcctagtcctcaatagaattacagtatgtttcatatgctatacttatataattttcctattctgtggttacatattctgaatataaagtgtgaatacatatgtgtatatttcatatatatatatatatatgaatgaatataaagtctttgtacatacatatatgtgaataatgtgtttttgtattaagtatttgtgttctctaaatcttctgttaaatgttaaaactgtttagagaacaagggctatgatgtctatggcaacttgttcccagattttgtcttttcccagagctctgaccggtgagaaactggaatttttgttggagaacttccatactttagttataaaatcacggtactattatggaacattttcacctttttttcccccaagtgttcaataataagaaagtagcagggtcttttacttcagaacaaatatgaatatatgtaagatcatgttattgaatagtcaaaggactgctatggagactaaagaatactttcaagatagaataacgactttgaattaaggaaaaaatacttaggcacttgccctagatcagagatcagagctggtgtaagttgcccaagcactgactggctctgtgtttttcagagtgctattttattaagtcatctgatgaccagatttctaaacatagaccttgtaaatcagagggaaaaatccagaagacatttttgtacaccaaggtcagatgaaaatttccactctgtaatactttgtttgatgttatctgccctttgcttaaactttggggagcagaggaggagatttaattaagaaattctaatggaatatttatagaaatagcaaataatcaaatcattattatttagcttgacatttggtttttcctatctttatctttggattttactctcctctcccctttctttcatggtcagacatgcctcatagtgccgagaccagaaaaagccaaatttttccctgggaaaatgactacagaatagctgaggtcagagactagttaacttctataaccagttaggaattttagggataagaacaaaaaaatagaacagggcattaaaaacataca

SEQ ID NO: 30483 - DNA, 1426 bp, Bovine  19866881430731
  misc_feature (1)..(1): n is a, c, g, or t
nttgcagtagtgtgtcagaggtcgtgagaagccacggggatcaacacttagcttcttcctggtactaaatttacttgagcattttaggagaaaagttgaaaatgttaagaactgtaaacgattttcacatgaatacacaagcgaagtcagcaaaattctttctccctcaaataagccggtattgaaagtgagacgagttgggtatttctataagccatgattaactgtaaagtgtatttccttggaaaatggagagtggagttggattagtgctgaggtcaggttgaagtaaacggcatgtgaaactgaggtgagaacgattatgttgaagttgctggtcggcctggttaaggcttcttttcaggtgctgacaaaaagaaaccagtgttttccccagctagatgtttagcaacccctcaaatcaccctgggtagacaggtaccttctgcgtatccatacaggactaaccctgttaagcccctcgagaaagggatgatagaggatgttgttctggtcacctgatggttggatggcatcactgattcaatgggcatgaatttgagcaagctctgggatatggtgaaggacagggaagcctggtgtgctgcagtccatggggtcacaaagagttggatgcgactgaacaacgatcatctttttcttacattaacttctcctggcttccctggtatgttagttggtaaagaatctgcctgcaatgctggagactggggttgatccctgggtcaggaagattcccctggagaaggaaatggctggatttttgcctggattcatgcttggaaaatcctgtgggtagaggagcctagcgggctacagtccatggggtcgcaatagttgaacacgatttagcagctaaaccaccatcacaaactcttacttcttcccaggcactgacccatcacgaaaacttttagggcaccatctccataggtttcagaatgtggaggttaaacaaacacacaggttatgaataagagaatcagaatggaattttacaagttaatctgagatctgtgcatgatgagttgcgattgtatctcacaaatgtttatgggatgtgacagtattcggagcatttttctagcctggctggacagaagtttgaatgatacagagaccaaaggattttgctgaaaccatacaagggcattcacaagacaagtagcaaatcatgaagacctaccaagagtctataaaaaaaaatccccccaaattaggaagaagttaatttcagaagctgggagtgcactgaggaaatatatcactggcaggaatacagatttgcttaggggacacattaatgacatgtgcaaaatacccactttcttctggttctagctgaattggtgtgtttctccccgtgatccttagggctgctatctattggggcatatttatctca

SEQ ID NO: 30484 - DNA, 1113 bp, Bovine  19866881431831
  misc_feature (1)..(1): n is a, c, g, or t
ntcccacatgctgctgtaggcccactgttggacaaggctgtcattaattgtctggagggaggattccaaaatggcccttgccagctttggtgccagcatggtagaataacatcttccaaagtggctttttccagcctctctgtggccagggagacccagctgccttctgctctccaggggctttccataatcaacaagtaggtctgacccaggtacctttcaaactgctggcctctgggctggtattcagagcatgtgaggtcttgtgtgtgccctgtaagtggtctttcttcccagtagtcctctggttttcctgaatgtgagccctgctgattttcaaagccagatgtccttgggactcatcttcctagtgcaggacccttcagctggggagcctgatgtgggtttagaccctttgcttctcagggaggacctctatgggtgtgatatccctctcatttttgggtcatcagtccaggcatgttaatcctgacttgattgcatctttatccctcttaatggtctcatttggctctttatttatatctttaagtgtggaaacttttttctggtagcctaaaagtcattgtcatagatagttgctctgtaggtaattgtaattttgatatacccatgggaggagatgagttctgggtcttcccattctgccatctagattcctcagctatgatttttaaatgactgtacatggctgtagagtaatttatttaaccatatctttattgttgaagaggtaaattgttcccataaaagtttatatagattttacacaagtaatatattaccaaagcttcatttagaaatggatttatgaacaccaagaaggtgccagtatttactgtcgaatttaattatgttagatttaatagaggataaaaataaaacatgacctatagaagtaaaactagagtattcagagaggttactcagttcccagattcttttgtggagccaaatttacctttaggttcaaggatgaccataaccaaaaaaaaaaggaatgccacattttgcaaagatagatcagggccgtaagttagaggagacacttgaagagcaatatttggtgttcagagatccgactgcacaggt

SEQ ID NO: 30485 - DNA, 1671 bp, Bovine  19866881469269
  misc_feature (1)..(1): n is a, c, g, or t
ntttttgaagttttgttaaacatttacccagttgttatatccaagagtaagatagatgagtatggaaaaaagtccaatggtttaaaatgtcaaatatattcataggctagagcttttattgtttattgaagaaaatgaatttttctgcagaaacctgtgagtattggtactgtctgcattacttgggagaatgacagtcatctttattatccttctcatttgaagaaaacaaactttcagcaaagttttcatgaaagagattattctcctctctgtagggagccctttgagatctgtgttgtagatcaggaaactgaaccaggcaacaaagactcctttggacctgaatttgcttgttgagattctgccaactcaggctttattcttttttcttcactcctgatgattctcttattctcccttgtttggagcaggcagtactgaagtttcacgtattctcatcttcccagtcagcgccagatcttttcttctgatcagtgtgctaattcataattagaattatccccagtaacttgaccataccttcatctgatcaaataaaaatctggaagctgattaacaaggcaccatctccttcacttccttgtttatttaaggctgggggtgttgcaaactttctggaatccaaattgagttgaaacccaaacttcatgtatagtaaagtgtttgatcagtcattaactttctgagtttctgaatgcctaatttcttgacttattcaaatcatgatcattgtttgaacacctcgtttacatttcttcatttaaacaaaaagacataaagcatctgagttatgtactttgaaggcattattaatgcaaaacttccctgaaaaagagttttagaggttttttttttttttttggtaatactttttccttttttaagcatgatttatgtctatttagaaatctggaaaatactgagataatgcaaataaagaaagttataccaaatcacatcagggaggcaatgaaaccttatatttatttttccacatgtgtttatacatgtgcatagaatgtctgtgtttgtacacacacatatatacacatgcattacatatagataaattcatattgatatttattgtactcactggattttaggtaactgttgattcaattttaaacttacatacaatttgctagaatagtgcaaacagcttcagcatactctttactaacattcaacagttgtttatattttccccatttgtgctcaaagttttataacttgctggtttatttagcaagtatagcataccttctgatatttactaagtataattatattgcatcattctaaagatggtgatgctttcttggtggctcagacaatagtctgcctgcaatgcagggcacctggattcgatccttgggttgggaagatcccttggagaaggaaatggcaaccaactccagtattattgcctggaggattgcctgaggagcctggcaggctatggaccatgggggttgaaaagagtaggacacaactgagcaactaacccaaacacaaagataacaatggaggtgatgctgatagtaatgataatgattgctaaatacattttgggtatttttatgtgtcagacactgttctaagtgcctaacatattatgtctcttaaccttcagatatacctaga

SEQ ID NO: 30486 - DNA, 1382 bp, Bovine  19866880490813
  misc_feature (1)..(1): n is a, c, g, or t
nctgagcaccaaagaattgatgtttttgaactgtggtgttggagaagactcttgagagtcccttggactgcaaggagatccaaccagtctatcctaaaggagatcagtcctgggtgttcattggaaggagtgatgttgaagctgaaactccaatactttggccacctgatgcgaagagctgactcattggaaaagaccctgatgttgggaaagattgggggcaggaggagaaggggacaacagaggatgagatggttggatggcatcaccgactcaatggacatgcatttgggtagactccagcagttggtgatggacagggaggcctggtgtgctgcgattcatggggtcacaaagagttggacacgactgagcgactaaactgaactgaactgaactagtgggtttaaaaacaggaagatatttttattttcctgccttagaaactatagagggatagataatgaccttgtttattccttctcatagaaagtaagaaattttaattctattaatccttaattatctcatccctaaatagtgatatttatatcttctccctctgctaaacacttagaatcaattgataaccagttgaaaaagtgtcatgatatatcttttagagacagaaagcctatggctcatttctaaaagatcatacctctttatttacctcttcctccttttgggcgggcccagcttccttaaaaacatcagaagaaaggcattagttgaataatcaaggcaatagaaaaacacctcattcctgcccttcccattaagttgtgactcattctccaagtgcggttgccggctctggaagtttagtatcacctgcagattgctcccttagggagcaaatccagtatcttcaacaacacgagtgtataaatagtataattgcagcattctttatgtcacacaacagacactgcagagctattcacgttgtttattgcaaagctatggcattattagctacaattagaaagtaaaactaacactagtttaaaatatcatttcctggtaaatccagatttttcaatagaagaaaatgatagaagggagaagggatgagtttgagaggaaaactaataaagttatcacttagtgaaaggctttgattgttttcattgtttagtcactcaatcgtgtccaactctttgtgaccccgtggactgtagcccaccaggctcttctgtccatgggattctccaggcaagaatgctggagtgggtagtcatttccttctccagggaattttcctgaatcagggactgaacccacatctcctgcattggaaggtgattctttcccactggccaccagggaagaccaaaaatgaagtataaagatgcaaaaggaaatgacagaaacactga

SEQ ID NO: 30487 - DNA, 1075 bp, Bovine  19866880639628
  misc_feature (1)..(1): n is a, c, g, or t
ngatagtttatagaatgctgaactttctggaaagaacactaaaagactaaaattgtatttgttcacttagttatgtgaatgtataaaaataatagtgaatcatttacaagagttgtctgctgctgctgctaagtcacttcagtcatgtccgactctgtgtgacctcatagatggcagcccaccaggttcccccatccctgggattctcaagacaagaacactggagtgggttgccatttcttctccaatgcatgaaagtgaaaagtgaaagttaagtcgctcagtggtgtccgactcttagcgaccccatggactgtagtccaccaggctccttcatccatgggattttccagacaagagtactggagtggggtgccattgccttctctgacaagagttgtctagagaaaactttcagcataagtagaaaaaactttcagcagtttgtgctgagcctggtacaaaatatggattagtgacttaatctgagtaaatgtagtctaattagtacaagagtgcaaatatgcatacatatatgaatctatgtgtgaatgagtctgcacagaccatttgctgcaagaacaagcacttttttaacaataaaaataagaatcaacattgcagcagcattcacaaccacataactggagaaaccacgtgattcaggtgctgcaaatagggaatagaactagtgtcagaggctggcatcaggagcatagacgtaggttctacattgcctaagctaagtggctacagtctggttgagtgtggggtgtggaatgtgaaattctaacaaaacattttaaagagattgatttggggtgagcaaaggtgatatgatattcatttctgtatagcttcttaaaactgatttactgcagtagcttgtagaagtaacagatgtttattcgaatgaatattcattcactgacatgaagtcctggtagatgacactttcctcttaacatgtcatagttttctcttactggatgtttgctactgtggttgccaaatgtctatttagaagatataacactaaggagctacataacgtgacgtattgaagtataatggt

SEQ ID NO: 30488 - DNA, 1100 bp, Bovine  19866880641060
  misc_feature (1)..(1): n is a, c, g, or t
nacaaaaatgggtatcaatccacataatagaaaataattgatgaagttggagggcgtgattatttgtgattactttacagtcatgcacagaaagtaggagaaccacagctagtggttaatctctggctacctctttgaagataatgaaattggcttcctactgatgattattcattaacaattaattctttctcagtgatctgcctcattttcagcttctcactacaaacatgcaatggaataattacaagtggaaatgaaaaagcaattagtggcagataatgccaacatctgattaaaaaacagtagaacagattagcagttccgtaactgcaagtctgctgccttcggtggggaggtgtaagtcacccggttatactgcacttcaagctgtgctttctcttttattgcttcccctccatcatggtctgccacattaaatgctcccttttattctagggggcattagcttgttgtaaatactttctacagattaagcagctttggggatgatttgtgatcctacatgctgaaattctaaaaggcactgtctcataatacaatgctaaaatccatatctgtataccattctttggggatcacagaaaataccatatatttctttgctttcgtttcagcttaactcttgttaaatgtttccagaagaagagcatcactaaatcaaaaacaagcaccttctttaagcacccatggatgccttggtcttacaggttggtttctctccttgcaataaggcgggccacaaactgatggtggatcttcacttatcatttactaaggagtaagatagttctggctgctgtagaaataattcctcaataaaaggcttataatttcactgttctcagtgatccaactggtgtgtcagtgcttcatatgatgtagaactatatagggagtgtcaaaaccaacaattcataaggcaaacaaaatgcagttctcttaaataacttggcagatgctttaatatgaagatctaataagatcctgtcactgaatttgacacagtaggagtgtagaccatagctgttttaggaaaacagattttttttgggggaaaaaaaaagctatgtacttag

SEQ ID NO: 30489 - DNA, 758 bp, Bovine  19866880719909
  misc_feature (1)..(1): n is a, c, g, or t
natcactaactggtattttgagaaatcagtcagataacgagatgtagtcctgtataactaaggttggcatcttagttgctgggttttaagttccccaaaagagtcatggcccaaggccctatataacctagaagagagagagcttttagaagtcgtggttcttacattcacttggaccacagtcattttctttaattatgtaattttacaggtcataaaattgtgtgttgaatgcatattgatgaacccaaggaaaatgctatgttcgttttttcagaggtctatttcttagtatacatactgccctgcctagagaataaatatggcatttttcacatgaagaattaataagtttatagtctatactttttatgcattctacaataaggcttttaaacaaaattcctcttagtttattggatgtgtctgttcacacttcactaaatctggatgtcagcttaagttaattcaaatgaataaaaaccaataaaacttttacataattcagatgcttattaaatagctactatttgtcagcttgtttaaatatcaaacctggtactaactaaaatatgctggtagttatatattatgtcattaatacttgatggtaaaattttataagattttaaatgaattcttctatatttatgtatagttaacatatcaattcattgtagacttatctattagtttcctagaagcaccatagcaaattatttcaaactggggtggcttgaaacaacagaaatgtatcg

SEQ ID NO: 30490 - DNA, 1669 bp, Bovine  19866880779049
  misc_feature (1)..(1): n is a, c, g, or t
ncctggagatgagatgaggctcatctgatgggctggagttcctgattgctctgaacaccatctggccagttaactattctgacattgagaagcattaaaatattggactttggtgttactgatacccataagaacttcccaaagaaaaagcaagccagctgttgatatttatgagacctctataaaatgaccaagaagaaaatatgtacttgaacagtttaatattatccataaatatcctgctaatttatctcaactaatgagaactttcaaaacagtttctaaaccttctgctgaacatctgtgttaaatgtgggtggttatgataatagcagataaatgcagcttttgctaatttactgccacgagttaaaatttataacataattttctcattaaaaataactgagggtgttaaaaccacagaacataatcttatatgaagaatgttatattttctttttttgtgaaattcaatattctgaggattagtgtgaaagtattttagatgaaaaaagtcatagaagttcttatagatgcatgaaacctgaaatcatttgcctgcaatcaatggcagttaaagagggcacagccaaatctggttctcttcaggtgaaatttccctttggtggtcaccattttttctcccttctagtttgagttagttccttcatctcccagtactaagccaggagtttagagcagtaaaggggtataagtatcaaacagctggattctctcctttgcttatgaacttaaggcagaatggttataaacttatatggtccttacgatgagtttacaacacaccattcatatcatctgcctctttgaattcattcaactctgtatttgccttttgcagatcaagcaggatgagaatggcaaagtaacaaatgtgatgacctggactcttcatggtatagaaattcactggaggagcctctacaaaatccaaagacaccaaggtccctccaggaaccacgatattcaatcttcattgccaagttacaaccaaagatagtttgtgaaagaaaagattaagttcaaaaggaatctactgatctaccccatccattcatccattctcacaggagaagaatctactgattaatcgtcatttatataaatttaggcctgagagaataatgaatattgactgaaacagaattctacaatttagagacagcatagaaacaagttaatataattaaaacaagaaatgagggagaagaaacaagacaaaaatccctactatttaaaggctacacaaagaaactttgatataattaaaacattttaaaaaggagaaacaaggacaaaattgatattcaacctctacactgtacttgttcagtctttgaaatggctaaaaaaagttggattaaagtcttggaatttaaaaattttaataaaagaaacacataaaatgtacattactcatctagataatataaagcaaaacaactctttttgtaaaactaccaattatttaagctgtgttttcctggctcttgttatttagttaagccttgacacttcattctactttgcaatttttaattgtactttggttttaacaggatgaggaggagagtgaagatagaggcaattattgccatgccctaaattaatgagtgttaacaagctctgtggaagaaatagattg

SEQ ID NO: 30491 - DNA, 1181 bp, Bovine  19866880800676
  misc_feature (1)..(1): n is a, c, g, or t
ntggactgcagcctaccggctcctctgtccttttccggcaagagtacagcattgcttaaattatttttcaaccttaaaattctttctttatttactaactgagaagttgaggtaaaaccggagctggagtaagcgatttctacttatcctctctcggtcctctccttcctgggctgtcatcattcactcttctccagccgaaaactatatcgcagtggtgcttctggcttagcatcccctctaattgctgtccatctgtttccattaagcatctaagccatttgtctcatttcaatatctcgctcctttttctaaacacttcagataaaattgtgacctcaaatatttacataacattttcctagatttctgcatctgaggacagtgtcattttgctattattaaaagaatgttaattcagcacctttcacactgtgagtgctaaatatgcaattactgttactttgatagtatggtagtaaaaaaaagttgaatcaaatattaacgttcttccttttataagaaattctgtaatttaaggacaatagttccttctctgatccaacgtcaaagataattattttgacaaattcttttgagatttttagatcatagaaatatgattaaataaaaccagtgatcagttggagttatcataagagctccagagtattcctcctgtgatctaaaacaatgttttaacaacatccctggtctccaaattctgtcttgttaaatatgaaataaaagtttcaataaaagtttttcctcttgttaactttaaaattgtctgtagcttaagatagagccattttgccactgtactttcgctatggttcaagtccatatttcttgcccgttagggcactgggtccctcttctgcacagttttgacttctgtaaaataaactttcctaaactttgatgctatagcatcagtcagcttagagagatgctataagaaaatgcctgtgacacttatcactagtgtagaggtggtgttgatgatgccagcaaagagagccttactttataaggatgcatgggagagatgtctcacatatgtcagccctggaaataatcacacctcctgagcatctggacctgatggatcattaacccatcatatttttcccttaaagctaaatttgtagcccttctccagcaagtattccaagcca

SEQ ID NO: 30492 - DNA, 1229 bp, Bovine  19866880856632
  misc_feature (1)..(1): n is a, c, g, or t
ntctttattttgatagttcatgaattaatgagaagcttttagtctcatcaatatctgtcaatttgcagtagaagagcatttgtgtattatatataatactattaaggattaaatatgtcatgttattttagaatctaattattttatgtagttattattgcaatgtataaggattatttataacaatggtggtgatgatgaccataactaatgctctttggattcttaatacgtaccaagtagtatccaaatattgttcatggatttatctaagtaaatctcacaacagcactaggacacattatttttattatttctattttacagagaagtcaaatgaaacaacaagtgtgtataacacatattcaatgttacttagctagcaatgactaaatccaaagctttcctcttaaccaaagtagattcaaagatgccaatttccatgtaactgaatgtttatatagatgttcttttctttttaaagtattttagtcataacatgttgctggttttaaagtccctttttctttgggttgtttactgtttatttgtgacagcatcctcaaagaacaaggacagaaatcttatttctatgttctttcatgtaaaactggagcttttacccagcatgaaaatattaatacaatcttttcccagagagatagattatcagtgaaagtaaacgagaacatactctggcaataaaaataacgagacaggtgggacaaaagtaatgacatcctctagcataatctcggcagcaaataactaaatcaccttgaaagagataaattgttacaaaacaccatccttgtctaatgtggattgacagggaatgacaggacccttcaaagggatggcagcccacaagcccatgtgcttccaaaggatcaaagggactgacaccgcctgccagccccatctaagcagaaaacaactagattctctccaggcggatatttactctaagatattatttctgggaaaagatagcttatttgcgatggatgacggcatttttttctacacagcctgtcatctgttagagcaggactggatgcggggagaatccgccaaacctgtccttgggatccaaatcagtcataaatctttagcaagctagggaaattgaactgtgacacaaccactttaaagacagcgtgtgcagagccttcagtttacagattgttagtgatttccctcctatcgatataaaagtttttaaaaag

SEQ ID NO: 30493 - DNA, 1877 bp, Bovine  19866880950351
  misc_feature (1)..(1): n is a, c, g, or t
ntcttcagctgaacaaactctggttgcatgaaatttccactctttttcattttagtgactatatggggggggggggcggacaagggaaaccctccaaagggctccaagtttgatcatagaacatgtaactaagcaaatactctcatgtgttttttcctatcccagaatattttcataaaaataatgaaacatataatacagttcgaatacttgtttttgttataatttactataaatatttgtgttttctttgaagcaagatcatttttaagtgccactaatgaaagcatatccttaattccatgtttatagcaagataaatttttgcaaaagccagaaatgagagcagatcttgaattccacgtaaaatattttagtcatcttctttaaaatgttgaaattttaacatagctcttttgtattctttttaagtactgcatgaaagctgatccatattgcttaaatatctcatgccattttgggaaaatggacagtggaaaagaagccagtgttcacattcagttggaaggtcggccatccattttagaaatggtaagtctatgatacagtggcaactttgtagataagatttcagacagaccttacaaacacagccatcttatacaggtaggatggtaagtacggaggcattcaacaaattaagaaggtatgattgactgtaaaatctggaatgaaattctaaaactgttcccatttatcacttcaaaatacactgtctaaatgacatggttttagtaactaaacagataacatagactataaaatagactataattaagagattttagaaagcatgtccaactatttatgactgtcactcaaatcagttagctgcctcaacatttcatatatccttaagttatttacaaattatgctaaaagacctactattgtatatagtatacatttactaaaaattaagacttccataaaatctaaaacatcaaaatttaacaaaacacatacaagaacacaaacacacttttaaggacatgaactttgaaggcttgaattaaaaattacctaaatacatgttagacttcttcttggaaaggagtgtgtatatttatgagaagtactttgagatacaattttcttatctgatcaatatgggtaatagatctttttcagagttgttcagatgagatgatctttataaagaacttagtacatagcacataataagccaaaggaaaggacagctatcatgttctgttaagaggagaagttgaaattaccacaaggtggttaagaggaagacacatcagacagggaaatatgagcgctccattttagttgtaagttatttagacttttgcagtctgccttcttactctccagggtcagtgttctcaccagtgggtgccagtggcattttggaccaaatacttctttgttgccaggggccatcctgtgctagtaggatgcttatcagaatagctggcccctacccgctaaatgctaagcaccccttccccatgcctgccagctggaaatggctccagacgtaaatgaccatcctccagggtacagaatcatccttggtgaaaagcactgctccagctaaagcacataatttatttttagcttaaaattctgcatgttctctccaaaatgttaaataacctttagacagtagttttaacatttgcaggtcatagacttctataagaatttgatcaaaaaatatagtctcatctaccctaatgaatgcacatatgaaaaaaaaaatctcaattttgaataaaatttcaaagggccttagagtttgtgaagcccatctacagatgtctaagccctgaattcttggttatgaagtccctctctcggtgagatagtcaaactgaattcatcca

SEQ ID NO: 30494 - DNA, 3296 bp, Bovine  19866880992703
  misc_feature (1)..(1): n is a, c, g, or t
ngtaagaaaatattgtctctgctggaggcacaaaaactgacatgagcgtaatgggcatttgtcttttggcttttgtaacagtttcattaaaaatggatgctagtaactgctcttctaaccttgaagcatagcccagtgagagcagcttaccacgaaagaaatagtcgtcagctttcctctggctcctctgtcccctcctgccccttcctaacaacagaaaatttgctttgcacctgctccaactgggctctaagtgataagcatcttgcaagcccagaaaattgtagtatcaaatctcagctccaactgtgaggcagcaccatatcccccgatcccgctgagagacgttgcttttccggttccccagggaagagttctttctctccggccccctttcaggtttgaactctgacctaagccctctttttagctcccagcgtgcattgctctagagctggccctgacctagccccgaatcctccaccctgagctcaccagcaggtcagccctgggtagccctggggtcaacggaatacccaattccaataatgagcatatttatccaaggagaggaaatggactttcctatttgttacagtctattgctttctctgcacccccgcccagaaacaggtgcttaagaaacattggatatattcactattattggtgatttggtaaatatacataaaaatcatctaatattcacaaagttgttttcattcacaccttccttcacaggttgaaaatgctttgttataactcaggacttaactttaagagagagattcctatttcattgctagggaatgtgaaatgtttgaaaataatgctgttattaataatgctgtcaaataaaaatagcaaatactaattaaatacatgtataacattttacctggctttagtgtgtggtttaaagggaaagaaaaaagtgctgacagaaagtttataatttctgtattcatattttcctcttaggtttttcaaacagaccaaagtcattaaaaatactccttaacccccaaagccacaaaaaagaagctactcaggtctattatgaaaaggttgaaccactgttgaagattgcaggaataaagactgacgtaacaagtaagtattttcagaacataatttcgccttttaaaaaaaatcatacttgaggaagcaagataaccttgagtttgttcttgagtcaaatttaggaaactacttgtaatatctaaagcttgtttatgtgctttgataacttactgcaaccagctacaggattataattcaattattttgtttcaatggtattattttttattggagtatcactattatctctttagacctttttcagactttaaaatttattagatatcatatttaagggggctgcacatgtatcagtatcttcattgagatgctggctgtttgcacattatctctgcagttcagcagtgattgatttgtgctcacttaaatgttagatgtcttccatgaaatccttcattaagtggtttttgttctgactctgacccctgctggttgggtcaaaactcagcacttaactgctgaattagatgaatttggagaagccagcagcttaaaatcattgtctaaaacaagagaggtgcttaggtttgtgcgcaggaaaacagaaatttggtaatgctgaagttcatagaaaaaagagtaaaattctttcagctgttaaaatttggtgaccaaatttctttgattgcttggcggtggtggtttagtcactaaattgtttccaactctggtgattccatggactgtagcctgctagtctcctcatccatgggattctccaggcgagaatactggagtgggttgccatttccttctccagaggatcttcccaacccaggaatctaacctgggtctcctgcattgcaggcagattctttaccaactatgagctatgagggaagcccagtgatttccctaacagggaattgaaccccagccgcaggagtgaaagcactgaatcctagacactagaccaccagggacctgctttgatttcttagagactcttatttttcccaaggggatgaggtgaggagggttgatgctgttgtgaatcacaccctcagttttgctggttttacttctaggtagcttctatttacacttaacagataatatacatgtgtagtgaattttaattgatgaagagtgttgcataagcctactcaggatacaaggccagaatgcacttggaatctcctagttataagttcccaaggaaggtgcccagagtgacctggctttgctcagctgcaaccaagggagatgggtctcacaatgtaaataaggtttaaaaccgacatctcatgacttgatggatgggtatgcctgtgtgcactgtgcccttagtattttggtatttctttcattaaccttggcttcatcttaaatatggtcctttccatcactgtaaaatggttgccaattaatttggttcttcttcattcaaatctagtgggatgggaagaggtgtgcatatgtgagagattcaacatgttttaatcctgaatgaggattaaaattttttcttattaatttgactgtccctaatgtattacgtctgctgcacctggagcgctttcttaggcagcaagacccttcctaggagatgcagtgggaccccttttcctagaggctgaggacacctgaactgaagttgggaaggctcccaacaaggcgcacaagaggaagtctgagtccagattaaggataaatcttcatgctacaattgggagtttactgtttgtgcattgatcccgaggggctttacattttttatcacggtgttgtaatttagtttagcaaagatgattacgtcatcaggataaagagcataaaacatgagggagacattggaggaaagaaaaccagtctatgaggcttgaactaaggtagaagaaatgataggaatgtgctttcctttttagtaattgttttggagagaaaaatattatgtctagaagctttttcccctacaatttaaatgttacaaatattgtatttagtttaacataaaattagaatattacataaatgcaaatttagaatttatttatatatttgtgcagaatggctaattattagctgcctaacactcctgctgcaagcaaaattataaaattacatcttttgcttatgaaaccatttaggtatgtatattggcttaacatttatatttttaaaatgtttcctattttatggaaataacaataaacatgggctatctgaaaaattttatcctgcctatctca

SEQ ID NO: 30495 - DNA, 1251 bp, Bovine  19866881015375
  misc_feature (1)..(1): n is a, c, g, or t
ngggtcgctaagagtcggacacgactgagtgacttcacttcactttacttttcactttcatgcattggagaaggaaaaggcaacccactccagtgttcttgcctggagaatcccagggacgggggagcctggtgggctgccgtctatggggtcgcacagagtcggacacgactgactcgacttagcagcagcagcagcaggtgtgtatagggggcttccagatggtgctggtagtaaagaacccacctgccaaagcaggcagacataaaagatgcaggttggattcctggataaggaagatcctctggaggtggaaatggcaatccactccagtggagaatcccatggacagaggggcctggcagacttcagtccataggccacaaagagtcgaacatgactaaagcaacttagcatgtatgcactatggaatctaggttctgaagttcatggttcttcttagattttaattggagctacactttgttcttgaaactcctccagagttttccatttcttaagattccatttcttaaggtttgcccacaaattggtttagttattaaacctagcaaaaacgattgactttgagacaagattaggttttgattaggttctgatttccttaaaagggccaaatttggcagtttttcattggctttgctttccagacaataataaactagcatactatttaagtctgcctcaaaaatggaatgccatatacaagtatgtgtttatcaggtgtgggaagggattttgcttattcttacagtctcaatccagttgaaactgtattagaatgctgttgggatgccgatcagcatttcataatctctcagccacctcatgtttttctgtctaaagcatagcactctttcttctttcagattttgaaaatttaattctgaatcactttactggctccatgaagaagttaaacaaagctgtgttcagcttttcattatctttcaattaattatgatcctctaaacacgttaagcgtgagaatttaaactgtcaaatttgccttctgggatgcttttctttcacaaattagtgtttctctgaagcatcccataaaaataatgatactgacattctcaacaaacaaagcagctgctgttctttcaacagttctctttgagctaggagatataattttatatccataattacatcacaggctgcatttaaaaaaatatttaaaaacttgcatctgtgtcctgcagatgatgaaacttaggctcc

SEQ ID NO: 30496 - DNA, 2068 bp, Bovine  19866881021810
  misc_feature (1)..(1): n is a, c, g, or t
ntttagggatgtgggaaatcttgagtttggcctactggaatcctgaagagatactactttaaggaggaaaggccaactctattcttggaaacatttcacagataaatgccaatggcatgtatgttacaaaagaaccagattattcaatatggactaacaattggttagagggaatgtttcaaaagaataaaaactaaaggactcagcgaattttgacctttttctctctctgagaagttattgccaacaatgccatgtagatgaatctactcttaattaaaaaaaaaaaaaaaaattagcctcgtagcagaaactgaaaaagtttaagaaccaaagccgctcctctcaactgtgactttttgttttgctgtttaatgtagaattttggatttcttctggattcactgtaatgaagaatcatctgctgtagtgacatctacaaggacacacttgatttggaaataacttactggcttatagggagtcatcttcaactataactttggaggtaaataaggcgtgatgttattgcttgttttgttatcctttttttttttttaatgaaaacttacgttgactaagaactcctttattatgaaagctttggtattaatataattgactgggacttgggattttatgaaaacactcttttacctactcttgctttgaatatgtgtattcatttaatgcttagttgagaatttaggatcttgttcactattgttctttagggtgctttgaagaaaatttcactgtatgaatccatgaaaggtattaacatctaatatcttggctgttttatgaatacttatgttttatgaatatgcaaggttgtttgaagtttattttttccattttattatcttaagtagagatttctctattgaaaagtataaagctacacagattggagaaacatatcaaggcagaaggatgtcccagtgattcagtaggtattttctctagacattaaagagatgatgtattagacagttcctggaacagggctagagcttgacatattatttttggttgatgacatggttgcccttcacagtcagaggtgaacacaggatgtgaaaagtaaacaaagtctgaaagagcgcttgtgctgtagcatttaatattctttctctgtcagcactgacccagcttgtttttctaagggcctacagtgtggtgaggcatcaggaggcaataatggactgtctgagcatgggaaaacagcaaagaaagatgagatctgaagtggaagtgaggctcagaattggaagccaaagtgtactttgtcagttaactacttggggaaagtcacataatctgtgagaccaaaaaaaaaaaaaaaaaaaagatataaagaaagaagaactggaacctagataaaaggatccagattgtatacaccattggcttttccagtatcagttctgtgttcctagctcatggctgggaacagggtcctgagggcatccaaccattacttcctcaccctgaataactgggtcacctggtgtgaccatatcctgataccttgtatccctaaactttttggtctctggtacggtggaggggccatctctgtggtaaggttagctttcctaggattactacaaattgctaattatcattgtaaactacatcaaaacctaataaagaattcctttgggcagagcttccagaaaccatattctaatgtaagcctcaaaagtaatggcatatgtgaaatactagataagagtctctgtgcgtctcaattgcctcttttagtaaatacatcaatctctactgatgccctgctgttaatactaaatgagatcaagcatgcatgacactttgagaggaataaggcatatatctgtatttgagctggataacttattttatgataagcagagaaagagcctcagacaaggcacctatgtgaagcatattccacgagaaaagtaaatcttgaggcttggtgcctacatttattcgtgggagatgcaggagaggggggaggaggagtgcaggaaatgggaacaggactaaataaataaagtagtagcaaaaaatatcaaggatt

SEQ ID NO: 30497 - DNA, 1495 bp, Bovine  19866881031135
  misc_feature (1)..(1): n is a, c, g, or t
naaatgcagaagtcataatatagttgtgggaaaataaatgaattgttttatgtatctgattctataaagatactgtttttcttgggggctataaattgtagatttatagatagagtataagaagtagtatggtagtaccaagaactttgaaaattcatatatttaactcagtaattccacttcttagaaatccatccaaagaaatgaattaaacgtggacaaagatttatttgtaaggatgttcactgtgactgtaaatagctatatcataaaatgcatggccatctgatgcgaagagctgactcattggaaaagaccctgatgctgggaaagattgaaggtgggaggagaaggggatgacagaggatgagatggttggatggcatcaccgactcaatggatatgagtttgggtaaactctgggagttgctgatggacagggaagcctggtgtgctgcagtccatggggttgcaaagagttggacatgaatgagcaactgaactgatctgaactgaaaatgtgttatgatataaatattaaatcattggggatgttacacacagtagagtatcctgtagcattaaaatcattaagactgtttaattggcaaagaaaaatgtgcatgatacattaaaggtagaagacaaaactacataaataacagaaccccaacttgaaaataaaacaggtgtgcactgactcaagactagaacaaatacataaaagtaccggcattgttatgtctggatagtgaattatgggtattttaaattttcctcattagttagcattgtcaacatatattttaaaataggcaaataggaattaaatattataattatatataaatttatataattgtatgaattatgtttatacataattatatatatttatataattttatataattatattattattatattagcagaatgcatacggtttgaaaaggctgaaaatcaactataacgtctttaaacatgaaacactgcaaattccctagctcctcttgagaatgtcactcatgtgttgggatttcttttctatactgaggatatggcaacaaattccaagaggaatcttgacactattcagttcagttcagttcagttctgttgctcagttgtgtccgactctttgtgatccaatgaaccgcagcacaacaggcctccctgtccatcaccaattctcagagtttactcaaactcatgtccattgagtcagtgatgccatccaaccatctcatctcctgtcgtccccttctcctcctgccttcaatctttcccagcatcagggtcttttcaaatgagtcagttcttcacatcagagggccaaagtattggagtttcagtttcagcatcagtccttccaatgaatattcatgactgacttcctttaggatggactggttggatctccttgcagtccaagggactctcaagagtctcctccaacaccagagttcaaaagcatcaatccttcagcgctcag

SEQ ID NO: 30498 - DNA, 779 bp, Bovine  19866881037668
  misc_feature (1)..(1): n is a, c, g, or t
naaaaaataagaggaaattttgaagtgcatgtttatgccagtgaaaatgaattgtaacaaaaacattatgtccattgaatgaatgagaattgaagctacgagcttgcttctgacaagattgaaagacttcacatctgaattattttaatgactgtcttttgatttcaaagtaaaagttattacctactagaaatacatattttttccaagaatcaccaacagatgtttgagacattccaagttttagactaatttagggatttttccacatactgttgctctctgcaaactcagtttgtttttcatcttgacatcatttgcgttaaaaacatctagttgtcctacagtatctcttttttcatgaatggaggtcatcaagataaataagctatttcaataaatcattttgaagaactaattattgttttattatattgctaatgctcaaagtgttcatgtaacacttatgctaccttggttctgagaaacttgaaaacaaggaatgtagtgaaagcaaggacactcttttatgttgctcaaaggcctatattgaacaggatgacctgctgtgctcttcaaagccagggggaaagattattcttaacctggtgtgaaaccagaaactaatctgtgttcaattagcatttccaaaagtctagaaacatcttgaaatgtatcatttagtatgtggcttatatttagtaaagttcatattcatattctaaagatgaatatgatttattactcagaaattaaagttaaattttcatttcagtaaa

SEQ ID NO: 30499 - DNA, 1141 bp, Bovine  19866881039054
  misc_feature (1)..(1): n is a, c, g, or t
nattatttgtttaaaggctagtgaagtacctaaatatacagaaaactacttaggaaataatgttcatcagcagacaatactgattcaaatgacaactataagggacaaacatcttggctctctactcaataagacaaaatatgtgcctgacttatgtctgaaaattcctagcatacactattatatataacatatatgttaaaaacccaatctaattgatgttgttaatctaatcaggattgcctcacaaaaaaggaatacatatactattaaaaactgtcattcttgacaaaggacaaaacaaatctgtagctggtaatcacactcctttctctcaaaagaagacaataattaatttctcccctccaacctaataactgagtcctttacctcacagtggaacaaaatagagctgcccttacacataaaatcaaagtttaattctgaaaatactaaaggaacaggaaaacatgatgcattctatggagtccacttttcctaataaaactctctcagggaatttaagaacaaataaacagaaatcactgtccatattgtgaaattaaatagttggaaaaaatgttatagccaatctttattatttgttcttcctaaaagcagttaaaagtaagatacatggctcattcacttcaaacaaataaaacaataaataatggtatgatacaatttttataacactacttgccagaggatctcagtgattaaactgttatagctcatacaaaccggcattcagatgaaagctaaagaatggaagagcattacctgacaactaatacagggagaaatgatgtttctgtatcatgctttctttgcagctactgggttatcttgctgaaagaaaattttgcttgaggaacactagaaagaacactggtctggagcttttgttttggctctgatcaaaaaatgagacctcatgccaagtcactaaatcactccttgattttattcactaacaacattgggggctaatagttgctaagtccacaaaggccctgtcttttatgatgtgcagttgaagtagtaagtcttcagtattaagtcctaactcagggcactcactaataaagaaatcagtgggctcacttctgcagaggtacccaagacacacagcagt

SEQ ID NO: 30500 - DNA, 1426 bp, Bovine  19866881049077
  misc_feature (1)..(1): n is a, c, g, or t
nacttatgattacaggtgtccataaatacaactcatgtcactcttaaactctggttgtcactatgatgagaaaggcacagcctgaaggtaaattattttcctaagtttgagtttaattcattcagccagtttgaattttgagaagaggaaaacatatgcttccttccccagtggcatttttacactcaaataagtcaaaagtaactattctgtcaaaaattcaagtaatttaaataatggataattttgaagattcatacatttaaacacacatggatatttcatagcatgtttgcaggtatttcgggttttcaaatgtgaccttggggtttgatttcattttatgttctctgttctaagtttatctatctttaagcttacaataacaattaaaaattaaattggccatattggagagataatttacctgtgatgcagattgaaacagaaataattcagactgtatttataaagcagtttgcctctgtaaacgccaatgctttataaaaataccatctagtgataagtttgaaattattgtgttgattgcatagaaaccaactatatgcttctgtgacttgaatgttcacagaaatcccccatgatcttgttaacattcagattctgattttgaccgtctgggataaggagaaggttttaccatttcagacatccagatgatgctgaaattgcaggccagcaggtcacattctgaatagcagaggtttagagaactataacttttctttaagtatttccctttttacttcacagtttttgacttattcatttagaattttaacctttagaatagctaagttacgtaaaaagattgtacacttggaatttcccttagaaatcgataagaactgctcactccaacaaggctcattttgtttgttcctctgtctctggaacagagatagagagccctgattatttaaagaccaactcttgcagcaaattttacggtatttacgaaatgtactattgtgaaaatctaaaaaatagtcacagattcagaagatatctccagacctgaccaacaataacatttttggcgacacatagaggaacgggaagctgtaatgagtttcttttagtccccaaagcaaccacaaactatatttcatctgttattggaacaacagaatcaatgtcctccagatgagccagcaaaaaagacaccattaaaatgctattggaacccatgaattgaaaaatggtgcagactaagagtgtaatgatacaagcaggacactaacaggaagccaggaaatcttaaggtagatcttccatagcctcaactctactaaaaaaaggatgcaaatacacatggaaatagtttcttctgattttgtatttctagttttaaatttattctagtgaagagcaaaaaaatctacctcaagagattctgacactg

SEQ ID NO: 30501 - DNA, 2119 bp, Bovine  19866881174491
  misc_feature (1)..(1): n is a, c, g, or t
ntatgttaataatttagtgaatatacaattagctgtatattaatgattaatagtcctgttttcatcaactaaaatatgaatatgattttatcccctttgttttaccacttttctccaagttataaaaatagtatttttatgttcaataatatgagaaaaatgtgacaagtgaaagatcgttctaaaggtgctattagtctgcttgtccagttcagccactgccatttcatccattgttattagtacttatttatctctatctccaaggcatgaggatatagtttggaagattgactagatttcagttaagtagaagacagacaaactgggtttggaagaccctttgagttgcagaaagttggcacagttaaaaggcatggagtaattcccaaagtaatttcaatcactttgaaatcaagtagttcttgatatcaaactgacatgtgaccaaagaaagtaaaagcacatggaatcatcagggaaaaggtatcataaaatcataaaattttacactcatcacagaatttggaatgccaaatacttcacttataaactcacctgatctcactctatactcaagatatatatcacccatcactcaagacactctgttactgatcagcagcagttacaaactgatttgtctcttccaaacccatctactataactctgctctcattatcttgctaaaatttcaagctggatccctaaggctcctaatagtcttgatccaaaaacattcattccccaaaccacaccctctatatcaagccacagcgatcttcttaccattttctcagacacatttccatctttcactatttcatgactttatatatgcagttttgtttttctcaaacatgctgaccttctaacacactgatgaacttctcatccttcaaaacatttcagccattttttatctttgacaactttttgaattccaccaaactgagttattcttatcttccatattcctatagcactttgcatttctctctcctgtaaaataaatatcatttttttagggtttatatgtctaggtccctcaggcctcatgtcacctaaaggtagacctccatcttattcttctttggatctatcctaaacttaagaaaaatttggcccattgtctatgctcaacaaataattattgactgggtaaatgaatgtcaactgaatttctggtatcctgacataatctctgagaaaggaggggtctttaacgtgtgttatatcttccttgttactaaaaggtgtgtcttttgagatttgtgcatatactgtacgatctaccttcactttaaacactaaaatgaaatttatagttttccatgtttcatcttgctttagcttaatttgtgtactggtctttataagtgtaaattaaagtcttatgctatttagggaagctgagataatcaaaacccctgtgctttaaaaagaatatcaatattatttgaattctatactattctgtttattttaacatttttctggatatatttttgaatctcattgactagatgtccattttcaacaccatcacatcatatactattcacaggagtgttttgtttaaaaatgcacaaaggtatcttattaaataatgtcacaaacatgaagttcattattatgcaaatgccatccttggaacagatttgttaattgaaactcatttgcataattaatgaactcccaaatgaattatgcctttgcagatttgtgcagcattgttttaaaataaattataaaatacatgtcaaaggaagagtgctttctgggttcccatagcattgtttgaaaattaattaccaaatgcttgtcaaattaaaatgagtttgtagtttttacaatgttattttaaaattaatcacaaaataaaatgtcactgcattaaagtaaacaacttgttattttctgcaaaaagaaccacagaaaatagcattttaacttcaattatattggttagtatagtgattctagtgttttattcatttcatctttacactgtgacttaaaattggtagttgttagcatgttaatgttttgataaattgagatttaatttaattttattaagtggcttattttatacagttgatgattaatgcattg

SEQ ID NO: 30502 - DNA, 1537 bp, Bovine  19866881219577
  misc_feature (1)..(1): n is a, c, g, or t
nagcttttagatgtcttgagtagaatgacttaccctttcttaagtagcatccttgcccccattccttgtacattttaaagtttggagcaaagcaaaagagagattaacgtccaaaattaattacattaatttgtccaaagtttaagctttgccattatactgtaaatctgtatcatgtgtcaatcatatttaacagatcgtctcattttaatttaccatcctctactgaatactttaggacagactatgaccgggtgagacacaactaagagatgataaatggaccaagctctagtctagtttatcatgaaggttaaattaagcacacatctcttcttttagtttttctgtatgttttgttttaaaatttgagcaccaagtatgaactgtttgtgctgtacgctccattttccttcaaaactttatgaagcccacactgaatccctgacctgcaaaaatctttcaaaattaaataaatctatttcctgcttatgttctattttatgaaaatctttttccttagtggataacataattataaagcttcataacataggtagtacatatagatataaaacagtaagcaaggtactttcaaattcagcgctaatggcccatttttgtaacatttactgagcagccactatatgctgggcactgttaggtactgaaaatagtgatgaacagaaaagacatgatctttgccctcacagaggctgtacaaatactgcacaaatatcacaaaattatgaacatgaaatgaaaagagaaagtgatgttgctcagtcgtatccaactctttgcgaccccatggactatagcctaccaggctcctctgtccatgggattttccagacaagaatactggagcgagttgccatttccttctccaggagatcttcccgactcagggattgaacccaggtctcctgtatcgtaggcagatgctttaccgtctgagctaccagggaagtcttgaaatatgaaacatgaaataatgctggttaaatgcaaagtcatttacacaagcaggttttctcccaaaaagagtacttaacgaactagtcctttgttttatgttttgtcctaacacatctagggaatggactatattcctttcagttaacactggttcactcaagtaataaagggagagggaggggaggaacattgtggactaaatctcccaggtgattttaataagcaacattcttaagaacagaagcagaagatattaagatgtggcaagaatacacaaaagaactgtacaaaaaagatctccacaaccaacataatcacgatggtgtgatcactcatctagagccagacatccgggaatgtgaagtcaagtgggccttagaaagcatcgctacaaacaaagctagtggaggtgatggaatttcagttgagctatttcaaatcctgaaagatgatactgtgaaagtgctgcactcaatatgccagcaaacttggaaaactcagcagggccacaggacggaaaaggtcagtttgcatttcaatcccaaagaaaggcaat

SEQ ID NO: 30503 - DNA, 1312 bp, Bovine  19866881224844
  misc_feature (1)..(1): n is a, c, g, or t
naactaagagtcgtatgtcctgggtccagctttgccttaaattcaaccccaagtaatggtttctccattttactcagagcctgaaacttactcatttataaagaggcttctgacacaactggagttttccagtgagcaagggttaaaaggtcggtcagtaataatgttacctctaccctctgaatatgaaactgctagagttcaaaggtattttatctatcctgataaaaacatctcattgtttttcacaagacactcaaaagtaaggttcagaggggatgtacggctggcgcattatgacactaacctcttctagcgggagatatcaaccacttcattggaagccaatgactgaaaaatacaaggaaaaacatgagacgattgtgaggtccaaagaaaagggaatcttgttatcccaaataagcatctttaaaaattactaagttctattgttccagtgatgaaattagtatgtctttgttgacctaaacttaaatttgacacaatgggtaaacttgagcctgaggcttttatgccattatcagagcctctgtcagtgagtgctttaacctaattacatttgatgcagcaaatcaacaaaaccactgctggttatgacctctgccaagagcactagtgagctagacaaatggagcttaagatgctattagttgttctgttgcaaagttccagatacaaaccgacaggaggctgttgcatgactggggcatgcatcctccagatggcattctgcattggcttgtggcaaagctcacaggggtactggcacattttctctgtcaaaatgaaagttttccaattacaaggagataatgcgaggagatgcaaacttaatctcttgaacaaaaggttgcaagctgtgtaatagccatttcaggggagagatttcactgtcgttcaattgatttaaacattgcagatcaccaaatgggctatctttcctaataaaatcaagaaatcagctgcagttgattttattccctggaataatgctgtaatggtttcatcatttaagggagaattcttttaaattagtgctcttccattgaactgaaccctgcaattatttttttttcccctaaattgttaacaggtacaaagaaggcagttttccctttagtgaaacacccaatgccttaaatgaaggcttcaggtgtgatgccataacagatccctattggatactagatcacagaatttcattagaaagattagacatgttaaatggtaagaaggcactattagcattaaaacctggagacagtttagcaaaaacgttgcttcttcattt

SEQ ID NO: 30504 - DNA, 1473 bp, Bovine  19866881243030
  misc_feature (1)..(1): n is a, c, g, or t
ntggggaaatataaaaggaccctaaggataccgtggtaagtgaaataagtcagagaaagacgaaagccatatgatcccacttatatgtggaatatttttaaaaattcccccaaacaaacaaatcaaaacatgtagatacagagaacaggtttccagaggtttggtggtggggggtaaaagggttgaagggtgtcaaaaggtacagacttccagtttaaaaaaaagattctcaccacattaataatagtatattaatttcattttggttagtgctgaaagtctaactccttctaaatatagatcggcatcttttgaaatagttgagctaaaggagtatctcccctctgctgctactttcaatgcagtatcttatctaataatcatatcagaagacctgaagaaccttaaaaaagagttatttattcctaacaacttgatacatgaatcaaagagcaagagtggaaagcccattctggcatatgataccatttctttctcttcctctcaaagcagagcagactttaagaattacgaggggaattctggacatcataggataactcagagaacaatgagattaaaaaagtcaaggcagcagagaaattaaactggaaagaactgtggaggccatctagttcaatttctctcctgtggtggagtgcaggagtgtggcattcctagtggaagaagtgccgctcctggggtgctccacagcctgggcctgggcatcgtgtggtggagtcagtgcgtgctgttactggacaatactgatgggcgttctcaactgcagttcagagtcactgtgcccctgtacatattagaaaaaggcgcctcctctgtcctcacttactaacaggtgctcgctcttctgggctgatgtagtccaaagtcacctaacatgttgaataagagtattagctggattgcagacctacttgaccctttgccaaatgtctgtgggaaatgcacactgcaagaagaacttgtgagctgatgtttgcctccttgtgactttccgcgctgacatttatcttttgtgcctgctaacttgcttcagtgctgtccaactctttgtgaccctggatgtagcctgccaggctcctctgccgtgggggattctctaggcaagaatactgcggtaggttgccatgctctccttcagaggaatcttcccgatcaaggatcaaacccgtgtctctcaggtctcctgtattggcaggcgggttctttaccactagcgccaccataaaaagtaaatggaataagtgtgtcccatcttgtgtgtacagtcttggaggtatttgcaaacagatatcatgtagtcccttgatctcacttgttcaagacaggcaattccattttcttcagtcaatctttatagtcacacagctcctagaccttgttatgttcatcatcagtatcgtggtcaaagacacttctctgaatgtagctttgatctctgccagctcaggg

SEQ ID NO: 30505 - DNA, 668 bp, Bovine  19866881267828
  misc_feature (1)..(1): n is a, c, g, or t
nctgacctactaataaatagaacgctttcaagttcatcaaaaggctaaatcagagggcagaaatgttaaaatgagcaaccagggaaaaaaggtcctttgtagacacagacacactctaatgagaaaagtgattctgttagttaaaatgccaagccagtggttgatatgcttgggaataaaaccaagcattattactctggtaggcagatggtgctttttttttttttctctcttaattcaaagcttcacttttgtaaataacaatggaaattgaacaactggaacacaccaagctttgcagactgtgttaagggtgttcagaaatgagtttccttaacagtctctgcctttggagtatttaaatgtataccgacttgcagtatgatttattcagtatttcacatctgtgtgttatcctttcattctgggcacagatgcccaggaacagggaccttatctatgtacatggtgggcacacagtaatacttgttgaataaataaaatatttagacaaacttggatgtgtgtgtggcataccagatatggatccggtattcagcagagaagagtcaggaagggtcaggaagtggaatttgaggcatgtaaccttgagtggattcccagactggagagagactgcacatatgttggatatgaaatttcttttt

SEQ ID NO: 30506 - DNA, 2017 bp, Bovine  19866881290297
  misc_feature (1)..(1): n is a, c, g, or t
nccactgaatgagaaatcagtgtggtctacttgcatttgagctttattcaacaggtagtttggggtaagcaaagattttacatcatagacgtaggactagaattgatctctaggaaaataaatgataaatctgacagtagagggaatattggggatagggaatccagctagtgaatattttaacatggtaagaaggaaggcttgaattgtgattgcagtgttgaaaacaaagagaaagaaacaaatcagagataaattccggaagtggagtcaattgccaggtaaccagcagtggaaaggggggggtgactaaaatgattccaagcttcggaactgaagtgatgctagttccattaatagatagaaacagcacagaagaaggaggaagagaatgtttcagggagaatatgacaaattgatcagctacacatttgtcatataagtagagataatagattacctataaaattagatatgtgggttggaggaaataaaaccttggcaattccctgatatcatgtctgctacttttctgggtttgactataatcgattaaaatgaaaggtgaattacagttacaaacgtatcctcccaagtttactaagaattaagtacaatatggtcttaatcctacaatactctcatctgtgtagcctcctcctactcacatgtgtttcctcacctgggtctctaactcagcagtcttaattagatcctcagcaaatagagaacctctgtctctcccctttaccactatgtgacagctggaaaaggttctgaacccagatagcttctttgtctttctaaactctgataattaatcttttgctggctgacaataattctactgtcttcatttcacagacccaaactcatatggctttgtagcacttcagataacgtattgccaagttgaaaaggaatggaggtactccttcaggcttctctagcttcgcctgtgctgtcaggccaacattttcaacacaagtaagcagggacagatggtgcctgttccctctgtgacagattcatccagcagtgtcaacggcatttacctttttgagacagagagagatgcttcatgactaaaagtttcccaccatgtgtactccagaatacagaaatgaaattctaaaaacaattcatgtccagttgttaaactttaattatgtgaacatttagaaataaactcactctgttttattattaagtgtccaaagacactttctagaaggatattagtgtgcttgacttgaagatgtctatactattgattatgcaaaattcaaaattggatacactgtcctataataaatctcaagtattttaaccctctgtattaaaactgaaaaaggaaatgtgaaatactgttgaggaaaaatttcactaatttagataacataacatatatcttgtattttatgaattttcatatcctttattttacatattactgtaatgaattttttgattgtttctatacacgtggccttaaatcacctgcttaagtaacatataagtttgatattaaagacattggaagctttccccaacctatccatttccttctctgcttcaaggatagctagtattaatttttaaaatataatttgaaactctggaagaatctggtggcctgaattttagttgcaattctgaaactatttgcataatctttgcataatattggcaaactatttgccagcttaattttctctgaatctcagactccttgtatataaagggtaaagttattaagctaagctctccccatttttgaaattctattactaaaaaattctattggtgatcagatgaaaatagtaaacagataatgagaaagtttagttacatataaaattttatttttcttcatgaaagttatattattttttggtttaaaatataaagtaaaaaaacctgtcaagttggaaatgaaaatattttaatcttgaaaataccagacatctccatatagtttatatttttctctctctgaacatttgtacgcacaggg

SEQ ID NO: 30507 - DNA, 571 bp, Bovine  19866881301408
  misc_feature (1)..(1): n is a, c, g, or t
nttattaagaatagcactcctaagattgttaccttgtgtctgaccacagaaggagaggtaaagtacaattacagccaggattctccaacccaaatgtgcttcttaagtttgtttatccagtcaaaccacatggtacacagctgtgaactatttagagaaggtttactggacactcctctgtctaggaatttgtttctttctttttgatttttagcctcattattgtactggggactactttatatgactacattaagtgttttctgaacagctgctatttctaagtagttctgatgtctttgggggcatatttccatcaaaagccaaatttccttgaaagggattctggttcaattaattcatttagcatattgagtatataagttgatacaaacaagaataattattgttttgtccaacagtgacctggatgctggggctgaaacaggaaatgggagacacaggtggctgcttttatagagagtacatcctggtggggagacctaaagtcagtaaacatccagatcattaaaagagaacaatccagcaagaactgatatgcacatacaga

SEQ ID NO: 30508 - DNA, 1257 bp, Bovine  19866881315049
  misc_feature (1)..(1): n is a, c, g, or t
natcataaataatcatagcattgttgcagaagcacactttatagtggttgtaaaatgactccttgggagaaataattcacatggtaaacatatttagtaaaaccaggacattttgcccttactgcaagtggatttttatttcccttctttcatgtacttcttgtctgagctcagggtgatgaatttgtagatggcaatttcaattgcaactctgtctctgaggcactgaatcttggttattgtagttctgaagatgagttttattttctaaatataaagaatgatgcaagattcatttgaagtttgtaggagtgatgtagattttatatttatgttcccttgaagtaagtagataaaatccttccagaagaataagttactcctaaagtataaatgaacacttgaggaattatataaattatttcaaataccacttatgaattattgctcctgtgtaatgaatgacatttcagaagactattagatgtagcttgttttgcaaggaaacttttttatttttcaattttttacactgaggtataattggcatacattatattagtttcaggtgtacaacatgattcaatatttgtgtatattgtgaaagtgtcaccaaaacaatcatccctcgtcatacataattgcaaatttttttcttgttttttttttaatttttttaaatttttttcttgtgatgagaaattttaaggtctactctcttagcatctttcaaatgtgcaatacagtataattaattgcagctccctggtagctcagtttgtaaagaatccacctgcaatgcaggagactctggttcaattcctgggtcaggaagatccactggagaagggatagggtacccacttcagtattcttgggcttcccttgtggctcaactggtaaggaatccacgtgcaatgtgggagatctgggttcaatccctgggttgggaagatcccctggagaagggaaaggctacccacttaggaattcttgggctcccctgtggctcagctggtaaggaatccacctgcaacacgggagacctgggtttgatccctgggttgggaagatcccctggagaagggaaaggctacccactccaatattctggcctagagaattccatgaacagtagagtccatagggtcacaaagagttggaacatgactgagcgactttcactttcaccatgccatacattacatccccatgacttatgggaattttgtattttgatcttcttcacctgtattt

SEQ ID NO: 30509 - DNA, 951 bp, Bovine  19866881339494
  misc_feature (1)..(1): n is a, c, g, or t
nctgatagtgcttatcttttggctcttcagttgaacttgattttgatcttccaaaatgaaaggattggaggggtactaacttcacattgcttgcttactcacgaaatatgattttatcaaacatgaggaaaaccacttaaaactgacatttctcttcaaaccattggaaaattctgtaagattttgaagcctgcaggatccttacctcttcagaatgtaactcagaggaagtaagccttgattcagagacaaatattgctaattaggaattccaacctgtaggttccaaatccttaaatctttctaataaaaggagaacacagtttcaatatgaaattctattttttttcttttataagggcagagatgtttttcccatgtttgagaaagtgtttgggatttccttacttcagttaagacataaggctgaatcccttctttgctatttttttttcccttctttgctatttttgcaagttcatctttgagtatgtaagattatcttctaaaatattagattaaagtgtgattaactgcactctcctaaatattatatataatctttaaaaaaaatcagagaacatgagaactgagctttgttgtttcctttaaaaaataaaacagatgttctttattaaggggacataccataatatgtcacaacttttcagaattgtgtcaagattacatttcagatcgccaagaagatatcatatcagcaaaatacttagatccaaccaagcaggcagataaaattttacaggatataatactaacaagttgtatagttcaagaacaacttttgaattcacttaaaccctagctgtgctatgtaagaagacaaaggagcagtgagaacttagctgggtttcagacccataaagctggctctcagtagcatgagtcactcggagataaaggcatccagtgatttacttgaattattcactg

SEQ ID NO: 30510 - DNA, 723 bp, Bovine  19866881371776
  misc_feature (1)..(1): n is a, c, g, or t
ngtaatctgagagttgtcacacatgtagtgcatatatatacttaacagctccagggcaaaaatctaggcttagttttgacgtaaatgtaagcactttttgcttctgtacactgctgcttgagaaatctggtaaaagcattcagagttgtttcatggtctgtaggtgcattcctagtgtgagtgtatcccgtctttttgcttatagtctcttgaaggatccagcatactccatggttttagaacctggcaaatgaggttcagttggtgaattggagaaagaagagttttcttctttgccttgggggtgctaggcttgcattagtgtattttttttttttttaatcattcagacagaatcattttcttttttagggagcattccccaagttgccagctcagctctcttctctctttccttgtaaggaagaaggtcagggaatgaatatgatcataacagagaaggcacatctttgttctctgactcgtagttccttgtgtaaggcttttctttgagcaaaggaatgactttaaatctacctctctttttttctctctgcctattttggagggatttggaccagttctgccagtctgaagtttctttcctgcttcactgtcccagagtaaatatactttgtcattctgtttaacttctagcttgtctggggaaaaataaagacatctctagtctgaaattgcttttgggagtaagctccacatgtt

SEQ ID NO: 30511 - DNA, 614 bp, Bovine  19866881373571
  misc_feature (1)..(1): n is a, c, g, or t
naacccccaaccccacaaatcgcttagagctattggatggagctcgacgcggctgtgatttggggagtgatttagcaccagacttccccaactcggtccgcctgggctcttttatttattatttacgagctcctaatccctccagggcgtgggcagctcccctcatggcgcctacagaccccaagggacttcatcttcgattcccaggcaagagtgaggggctttccttaaaccatccatccaacacccgtatcaccaacgcaaaatcaactcagctccaagtaatggctggagcgggttactgacacaattgcccaaggctttgtgtgtcagatgggctatgtgtgtgcctatgggagtgtgcttaagtgtacagtgtatgtgactgagtgtacaaaagaatatgtgtgaatgtgcatatgagcctatgtgatcgttaatatctgtgtaatttgtcagtgtgaatgtgtaagttttgtgagggggtgagtgtgcacgagtgtgtgttcgtgggttctcctgctctcaggtgaggaccataaacagaggggactcacacctgtttcagcggattgagaaagagcatgctgtctaaaggggaccgcaacggggtg

SEQ ID NO: 30512 - DNA, 1217 bp, Bovine  19866881374403
  misc_feature (1)..(1): n is a, c, g, or t
ncgtcttttaacttatggttgcggtcaccccctggacatttggagaagggagcaggagctgcgtcctggtggccacagtaactgggagaggccctgccagcatgaagctcaaagatactcagtgtcttctaaagcaaagcacgtgctgctgcgcaccaagttgctccagtcgtgtctgactctctccaaccccacagactgcagcccaccaagatcctctgtctacaggagtttccaggcaagaatacttgagtgggttgccatttccttctacaggggatcttcctgacccagggatcttccgcgcatctcttacatctgcattagcaggcgtgttctttaccactagtgccacttgggaagtccaaggcaaagcacaacgcagtccaaaatgccgaaggggacactgataagaaacactgtagatggacagagaacactgcttttcttgtatatttagataaaataaagttcatttttaaatttaattcttgtgattaatttgattctgataaaggtctctgcattccaccttaatctattttaattgaaaatttaaaaacagacatatagttctaatataggaatttcagttactaagacattgattatcccttcacaaattaagatagagccaggagaatatcttatgtttaaagcgacagcttcaagaagtattcagttttcaaaataatacctagggcaatggttgagttgaataacacctttgcattgttaccaccaaatatgtccatgcaacttctatgcatgcaaagtttcctaacagcggccatatactgaaggaccgcaattgaatgaaagagaacaaatacaagttcatgaatcagaaaaggataggtaaccaactcactattttgaaaaggagcaaaaaaataaatctgataaacaagaggaaaaattaagcacttattctgccttcactatagaacttaccagactggtaaccaaatagaagacgtgggcaagtttctctttagacaagtattccagtggctaccagcatcacaaaaacacaaccagattttcaggtgtttcctgatgaaatagttcactaccacctatgaaagcagttttgtcaaaagaaaaaaaaagggggggggggggtaatcaatcctgaatatccagtacctaactcccaaatttacaggaaacgctgaacaaaaagatactaaactttgccgtcagagtgcaacaag

SEQ ID NO: 30513 - DNA, 1329 bp, Bovine  19866881384544
  misc_feature (1)..(1): n is a, c, g, or t
nataaacatgctcctgaaggcatagtttcctgtcgtaatattttaagtcagttttgttagaaggcgtgtctgagatgattgttgttgaaataaaaatgtgaatatgaagattgactacgaaggactagtacaaataaatcatttattaaatggaaaacatttcaaatcttataaatgtgtagagtttttgtcctctaagtcctaatgagagaatacatgagcttaaatatacagaaatacatttttaaccattggtctcaaaaacacataaagctctactttgatgatgtgacatcaaaataacataaaatcctggcttaaaagatttgatatccaaaatggtgacttctgtccaccattgggcaatattgtcaaataactttaatccggtatcccttctgtgtctttcatgctttttttttttttttaacttatcctgttcctgagttttcatggtgttttttggtgtatattatcatacttattatggcacttgccaagcagagatagctggttgaacacaaactttcgtctatcctgaaggtagaatagtattccagattagtgtgcagatgtagcattaattctcagttgaaaaaatagagaattttaagggtttacaggttatatggatttcttctttctagttattaattattaaatactagatttcttacaggagttaatttacttttcaatatttagattggtcagcagagtataaatgttttcctctggctgggatagttattaaggtaattccctggtcatgctgcaggtttgtggaatatggggatatgtcttatccagtccaaaagttggaaatagagtaccatcttaaaatgtgtagaatgaaactcttagcatagaagtaccgttgctccaagataataaagcaaagcatttcgaattgtacatagccttacaaagaatgatggactcctgctagagtacttgtcagtagaagtcttaaaccagcgtaaaataaaatcacgctttcacttaacacccctactctccaaataactcctcgttacaaaagtacaccaaacaggcttaggcccgtgaaaacctctgagccttgaatattaaaagcagtaactaataatatgaactggagtcaagtcagtgtgatgagaatgggggattttttatgtaagctcttgaggatttctatgtaggtgaagggtagaaagtagtttttacccacttccaccattgtacgttctgtaccctagattaataaactctcgatgccagaaaagtgttcatcatactgaatatcaggatatttgggggatgcgattcttgaacttccttcatttgcta

SEQ ID NO: 30514 - DNA, 875 bp, Bovine  19866881495282
  misc_feature (1)..(1): n is a, c, g, or t
ncaataatcgtcagtgaccttgtggaaacattcctgggttaatgggcagagcacatttcagccactgcagcactactgctcgcagggcatccagcacgtgtctactgggctgaccagattcacacacaaacaccatttaatagtttgtgccatttgcagaaaatcaacaaaaacctttaaaaaatgtttgaccttatatgtaattttaaaacaataaagacttttgaacccatagatctttacatcttctataatgagaaataccagaatacactctccatgttaaataattcttccagagagcaaatttaacctgacctccctaaatggctacagatttgacacaccatttagaagcctgaaaggaaatactgatttatttattctctaaagcagtgctgttcaacagaaatacaacatgtgccacatatgtaattttaaattgtctagtaaccgtattaaaacaggaaaacaataaattaattttaaaacattttacataccgaaataaccaaaacccaacatatcaaaatattagtatttcaacatgtaataaatattttttgaaaatcagtaaaatattgtgcattcctttcttcatattgttttcaaaatctgatgtgtattttacacttacagaacatctcattttggactacaaccgaagtggtcaacagccacaagtggttagtggctgcattactggagagtgcagctagctcctgagtactactttgatatctgacatactactatctgtttaaaattagctcacattcatgtttccgttttgaactgaaatgtctgataacaaatattaatataagcaaataaacatcagatcaccttatcagaggacctagttaacatacaca

SEQ ID NO: 30515 - DNA, 733 bp, Bovine  19866881569333
  misc_feature (1)..(1): n is a, c, g, or t
ncagcatagttcagactagccactttatcagtccttaatagccacatataactaatggctgctgtattgggcagcatggatttagaatgtttgccgtgtctttctgtcatgggttaacttgtcttttactccctctcaccactgtttattatgcatagatttcaagaactggggcacaccccactttgtaaaaggaagattaaaaacccttcttggctggaggtaatcagatgtgaaaggtcctaaagaaagctcagtacccagtgtagaaatgcaggctgttttccaagggattctgccttgaaatatatctctctgcccgtgattcttcactattgctgtcttatggtagtatgtgcttactttttgtttgagaagggatctttttgagaatggggagtttatcttgaatatcacttttgtaacaggaagtgtatttggtttaattaggattcctaggtggaggagtttatttagtaaggaggttacagaggacttaaaatgtatttttattgcccttctaagttgaaatgtcatttgttataagtttaattttttacattaacacctttaaagcaagggtgagtgtatgtattaggctggccaaaaagtttgttcgggtcccccttatctatgtatcttatacagtgacaaccaaggctgctgttgcttcttggccttttgttacatgtagtttgaaggctagtagtggtatactaaatgttaagatata

SEQ ID NO: 30516 - DNA, 773 bp, Bovine  19866881631545
  misc_feature (1)..(1): n is a, c, g, or t
ntatagaaatagcagaaattatacagaagtttaacaaacattttaattttaaatgcaagtatttcagaggaagaatttaagatttgcttggagagatttttttcttgcaggctttgatattaaaaagttagggatttccatacagccaacaaatgatacttttcttgtcattttaaaaaagaaaattgtgttgactaatcttttttctttctaaagctgcttattctaaatgtctgaatctgataaacccatgagccccaacttaacccaacctcagtgaaacttaaccttttctctctcctcacatctgtggacaatgggcctcagctgcagggagcatttgagaagcttgcctaaactctaggccagctggaaagtcaggctcccctgctttcagccaaatagacactggcactgagttacctgagggcagaggtttaacacggcttgaatgaagcttggatttgagagtatccatcccctcaggttgatgtcactgggagtccaagactcttctttcattaaccagcctctcacatggatagcaatggtgacgcaaaacagccaacccctaaaacagttggttcttttttattatttgtaattttgtctatttgcatgagagcctggcagcatatggcctgatgaattaaaaaaaacaaaaccctgtacaaccctcatctactggctagagcctccagttcgtggcatcagtaggggcttgtgtggctccacctgccacttgtctggagagtcggggcataaactgatga

SEQ ID NO: 30517 - DNA, 1945 bp, Bovine  19866881696793
  misc_feature (1)..(1): n is a, c, g, or t
nccatttccttctccaacgcatgaaagtgaaaagtgaaaagtgaaagtcacccagtcgtgtccgactctttctcgacccccatgactgcaggcccatcagggctcctctgtccatgggattttccaggcaagagtactggaagtggggtgccatggccttctcccacattaattagactattagattgcaatttcattctgtataagaattttcatgcatagttttgcataaaatttgttgagccacatgcctcgaagtgattcttgccataggactcctggcctggtaaatgactaagaaatcatctagtctgattcttaaaactttgtaggtgtgaaaactgacacccagagaggataacagatttctcagattatagacttgctttaaacattttgtacagtaattttcattcacacttaattcttcatgctgggagctgacaccatcttatatgtaatggtcaacttttttacatccctcaagtgtacttctttttcttacattacaggtcaactaccagtatccatctgtggttttttccccgtggtttgttttacacatacttcttttccgtggtgtatttgctctttcacttctatatggaaatttagagtttggtcacatggtggcgctgtagttaatacattgattttcttgtgtatttttccattgccttcttagctttgtttttaaatcgcagttatgtgaaaaatgtcttttaaaccctgctgcaggtgaaatgatttaatggcttttggcttctagattaattttaaacattaggaacattgtaaaaacagactcttgctaataatgatcattaccataatggcttgaggcataatcacttaccaacattaactgaatgattaaaatccatcatgagtttaatttgaaaagatttaagttcctttgcaataaatggctaatgatattagcttcatctctgagaggccaaaatttatcattatatgactttgtatttccacggctagacagatagaaaacccactcttgttaacacaggccacatcatgcctgttgtttaccaagctcatggcatcccctgtattagcactgaattgggccatatggcgtactgtgtatgggtgactgtcactcttttatagccctgctatttgataagttattattgcacaaggcaagtgaccttagcagatgttcagattaactaccatggtcagtaaaacctgtaaggaaggagaaactagtttcataaaaactaggtatgatctttatatgatcagatcttttttgataaaatattttcataactttgtgacaatgtcttttaaaagcgcctatccaaaacttagcaataaccatccagaaatacacagtctcaactgacgggaaaaaaaaccaaaaggagattcaggaccagatttttttcacagagaacctgcccctggactttcagtcacctcctcattacttcttttgatgaatcatgaacaaaatcttgacctgctacccaaaagataccccacaagaataatgatcttacttccaaaactctgtcagaaaattagaagggggaaaaacccacaacaaacaacaatccaaacaaacaaactttggcaactgtgaaaggaaaaaacctgaatttcataatgggtgctgtttcatttccagaagttttccccaaaggaaaacaacccagtaaataactttcactgattggtgttacagattagccttccagaggctcagggatgaattttgatctttacggcttgttagctatttcctcctcaaaaataggtcaacatcattatttccagttttcaaagagtcagagacccaagatggagaattaacatgcccacgattgtttagtgagtgggtagaaggcatgtcagttggccaataaaatgctaatggaaaagtaaatatctgctttctaatcacgttctttca

SEQ ID NO: 30518 - DNA, 1265 bp, Bovine  19866881765243
  misc_feature (1)..(1): n is a, c, g, or t
nacagtttcctgcataaatgttgtgttaacaagtagcaggggcctgtgcaagagaggcagagcagggacttggtctcagcagggtggtagcacttccctggaatggctgggctgatcatctggatgaagcttcttaaacatgtataatatcatgtatgaaacgagtcgccagtccaggttcgatgcacgatactggatgcttggggctggtgcaatgggatgacccagagggatgggtatggggagggaggaggagggttcaggatggggaacacaggtatacctgtggcggattcattttgatatttggcaaaactaatacaatattgtaaagttaaaaaaaaaaaaaaagaactagcagaggagtaaagtgtgatgtcatatgcaaaataataacttgtgcatattttattgacctctaaatttcctctcccttctattgattgtctaacatccctccaatactagcacctgcaaagaaatcactctgaaatttctgggggtgggcaggggtggtggcagtgatttctgtggactttgtacctcactgtacaagctgtcttagtttgagtgttccaggtacgttgcttttgataaaagcaacagacataatgtgagaatgaggttaagtaagtgtttatttgaggatttaatatctcacacactctaggaataaagcaattatcatgctgttaatttcatattcatgtatggcttatttatttgttgtttacctctctgcataatgaaaatgccatggaaatctgcatcttctggtgctctaattttaaatgatgctaaatgttatgtataattttaagttacagattgctaattctattctatttaaaatactctatgtatgagatgcccctatgttcttgcagaatcctttttaagcagaatcaaagcgtaattgtctaagtaattacagaataagtagttaattaaaacatgaattttaagcattatattttgaactatatatttattggaagcatatatttatatatgtatgtgtgtatatatatatatatgtatatgtatatatatctgctgtacctctaagaatcaacaccttaattacttttttgacaaatgtaatataggcagaagataacagcacatttcccctactggtaaattatttgtatctggtttacttattatctcatggcagaatcagtgtttgaagtggttctgaaagcttcagggcactgctattttcatctgtttacatgacatgatatttttaaagaacctgt

SEQ ID NO: 30519 - DNA, 1370 bp, Bovine  19866881831470
  misc_feature (1)..(1): n is a, c, g, or t
ntgttttctactcacagtaatctcaccatttcctttttgcacatgcatctctaccaaaaatgtacattttctttccctttcattttgccttcaacagcctgtcttaaactcacttctgttagtgaatccttttctttccattactttactctgtccctgtaagtaacaggaagcctcttgcatgatactaatttattattactgaaatgttgctttgtttttgttcctggaattcttcatgcattgaatatgtgtggcagggactctcttccatttttttctatctatgggataatggacctaatttttccttttttccctccccatctcatataggacttgacataaagcataatcagatgataaatatttttgagttttttcactatttattattcatacatataagaatataaacacaatggttttgacttgaaattttaatttcttttcaggtgattccaagtatgattttctacataaagaagaatttgttgaactcaaggacatattctctgtcaaactgaaacggcgttattcaattaaacagcagggaagtggtactttattaggaatcactctcttcatatgtttgaaaacggaaaaaaataaattaaaggattctacacttgatcttattaatttaagtgaagaccactgtgacatatggtttagacagttcaagaaaattttggcaggtaagtactccttatggaaatttttaatgagtctcgtttccttgatgtagattattaatctaaacatggtatcatatttatcaataacccttaattatattgaggttgtttgtttctattttggacttccctggtggctcagacggtaaagcgtctgtctacaatgcgggagacctgggttcgatccctgggtcaggaagattcccaggataaggcaatggcaacccactccagtactcttgcctggaaaatcccatggacggaggagcttggtgcaggctcctgtccatggggtcgcaaagagccgggcacgactcagcgacttcactttctttacttttgtctaagtctactggtgtttcttggttgccagtttttctagcatccagcctggaatacaccaggcaacaacagcaaaaaaacacactggaaactcactgctgggtcattcctttaggtcccgaggccctctcaccagtctatccttttatctctacccttttatctttacgttcttttaaatacaatgcccagagtttttagcagcacttagtaagagggttgcaagagatgcaggtttgatccctggctcaggaagattcccctggagaaggaaatggcaatccactgcagtattcttacctgaggaattccagggacagagagcccggt

SEQ ID NO: 30520 - DNA, 2564 bp, Bovine  19866880186640
  misc_feature (1)..(1): n is a, c, g, or t
ntccaccccagaaaatctctcctatagatttacctagagtagcttctatccagggatgaaattcaaattatcttttgggccatctgttcctcactcaagcaaagttattttaagagggagttggaggtgttaacttcggaaatctctctcttccttattttaacaaactccttgagacagagaatcactgtactcactcctggctactcacacccaccctggagcagcctgtaacccaataaaaatgacacaatgcagagtcctcataattggtgccatcatctgataactaatccttactaagatgctaaaggctattaatgacttgatataatcaactgccatattagaaagagcactgaccttggaatcagaagatactctcataatctttctgcaccacttgtaggttatctgaacctccatttaacagtgtagttcatatgactgagtacctattatctgccactattctcgggactggagatacaaaaataattgagaaaaaactggtcaatgtgctcgactagtttgccaatagtgaatgaaacataaaagtgaaaaaagatcacgtccatacaatgatattagatacatattctgcagggaggaactggaaagctaactgacattcaggattttttcctttttcctgaaagtataaagccttggtaaataccactcagaaaagataagttcccctcttactggaacaggaaagtctttttacttcctttcattaaaccttgtttgtcctagtttaaagacagtacctgaagtagttagaaagaacacacactaagcttgcttagagatgttgctgctgatttaggagatctgcagtgaagtcactgctaactgggtttatgtcaaaagtaatggatgagaagatctaatctaaccaatggaaacaaataaggaaacatctgcttcctcttttacaggtgaggagatgaagtttggagaggtccagtggcttgtccaaggccacatagtgagtggctaagaaaacttattactttgccaacaaaggtccgtctagtcaaggctatggtttttcctgtggtcatgtatggatgtgagagttggactgtgaagaaagctgagtgccgaagaattgatgcttttgaactgtggtgttggagaagactcttgagagtcccttggactgcaaggagatccagccagtccattctgaaggagatcagccctgggatttctttggaaggaatgatgctaaagctgaaactccagtactttggccatctcatgcgaagagttgactcactggaaaagactctgatgctgggagggattggggacaggaggagaagggcacgacagaggatgagatggctggatggcatcactgactccatggacgtgagtctcagtgaactccgggagttggtgatggacagggagccctggcatgctgccgattcatggggtcgcaaagagtcagacactactgagtgattgaactcagtgaagcgactttcacttcactaccagggatttcccttttaaaacgtacttggcaatataagatagaagaatataaagattgggagggttaaggagagggatcaagagtaaaaacagaactgaaatacttcagctctttttgaaaatgaccagaaatctcaaagcataaaacactttcaaagttgcaactgaaatggaaaaaaaagaacagtgtgaaatgaaagcgggcccaaagcattgcctcagctgtcccggtgtcctcccgaaacggcactgaaagtctctgtgccgagcatctggatgcttcagaggcgtccctgccgacctcatgccccttcgctgagctcatcttggatggcttcatggacaggcaaatcgtgtttcatgtgcggcttttaatatctgtacttgttttctggcttctctttgcagaacctccagaatgatgtcagctccaaactttcctgaaagactgtttccaaggagctcccattttgccatcctgagcagttaacagtagcctcttcagaagccatccctttggtgggttttgccataggctgttccttacaggcagacgtgatggacactagctggctgctctcccagctgagtgtcattccctcctgggcatccagctactccatttcccagcattaggggcaccctgtgcctgggttctaggcaaagaaggtggccagaatgatggacgcgattttcattctggcccctgaaaccctcccacatgccgtgtgagctctgcttcagtcctgttgagtttgacatgccagtgagacatccagagctgcacgtttagagaaacgtctgaactcgagatgcaatcactggtacagatgtgattgtccagaggcaggagaatgaggaagggccgaggacagatccatgaagaccacctgcccttcacaaggaaggctacccaaagaagctggcgatgcattctgagaaggaaatggaaaaagaaaagcagggtgaacttttccatgaacatgaaggaagcagagtgtttccaggagaccgcaaccaatagagacaactgtcactgcatgttcaataaa

SEQ ID NO: 30521 - DNA, 1668 bp, Bovine  19866880422833
  misc_feature (1)..(1): n is a, c, g, or t
ntcgtgtccgactctgtgcgaccccatggaacagcagcccaccaggctcctccgtccacaggattctctaggcaagaatactggagtgggttgccactgcattgcagatgctcgagtaataatctgctattccctacaggagaggcttccttagtggctcagatggtaaagcatctgcctgcaatgcaggagacctgggtttgacccttgggttgggaaaatcccctggagaaggaaatggcaacccactccagtccccttgcctggaaaatcctatggatggaggagcctggtgggctacagtccatgggggtcgcaaagaggtccacagtgctctacgggtctatgggtctactacccctttacaacacactccagccagcaagccgtgtcgactcgccccgctcggggaccaccagccccgcgaggcaggctccgtgccggccacttactgcagcaggcagttgatgtccggggagtgtctccagtagcggtacagggagatccgcagtgtcgggtggcacctgtactccttcaggatgctccgcgtgctgccaagggaagggcacagtcagggacgcgggggcctggcctgctcccgggggcggggcgggccgagagcccaggcacctactccttgaacttattggtcatgagcaggaactggctccgcgtgagcctcctgacgtcaaatttgcagaggttctgaaactcgcggtagacctgctgctcgctgaccccaggccacttcctgacggtgaggatgaagatgggggggcggatgctaggggagtctgggcccgcaaagttctagaagacagggaggggaagcagaagagatttcccacagctcctatggacggaccacccacccagcttgttctagaaggcagggaggagaagagatttcccacagctcctacggactgaccacccacccagcttgaacatcctgaaagagaaactaggaaaggccctgtctgccaggggtggtggtggtgggagagaaagaaggaacaagcgaggtcaccttgcttctggcatggaagcacgagaaagaaaataacaggctcagtgtgagcacccttctcgactctgagtctggctcctgtcagaagccctagagagcccagaggagcatgctgcatcctagcacgagcctgtccccctcccctacaaagggcagagtgaagtctacttacgattttggggaccccggctcggataagattcacctggttcacgtagggagccagcacgtccaggtagagcgggaagctgggctcggggatgggaacagcgctgcgagggcggaaaacgccgtggtgctcagcctacgggcgccgtgcccggccctcggccgaagctggggcctggggacagcgggactgtgctgcccgacaccaccctcctacccctccttgcaagctctagggctcctgttgctggatgtccccctcacaaccagcgagctctcagcatagccccagcccagggggagcgtccaggggtcaccatctgctggcaacacttcggtgaacacctctgggctgacgagcaccagccacaggtcagagaatgagaggaaggtccctttctgtcgcccctcgagaggggcatcaccccccactttgtccaaaggaccgtccctccccccacagcctggtt

SEQ ID NO: 30522 - DNA, 1720 bp, Bovine  19866880641316
  misc_feature (1)..(1): n is a, c, g, or t
natggctatagactattaatcttattaagcacttgaaattttaagtactccttcttaaagatggtacttcataataacataattatatatgcaacatgcaatttgctttctaacttgaagaactatcttactgaaataatcataatgcaataaatatagataggctacttttcctaatagtcattaagcaaaattagacaacccttaatatcatacaaaactgaaataaaggtttgaaaagtgatatacgacagggttttctcaattattacttttacagattgaaatcaaatttgaattaaactttcctgttcaccaatagacaagtgaaatgatgatttatgttgctgtcaaagcaaaaatatgacttcatatggcattttatcagtcatactactatgttaaagcaaactccagttttagagatagtatggtcaactgaaagcttcaaatatataaaaatatctttggagagaatgtgcaaaactattttccaaatgaggaaagctggaaagaagtagcaatttattcactttcagagagtgagtaaagaaaaagagggagggggactctaatcattgttaacaacatgacatgaggaggtcactttacaccactccaagttaactagattttaaccttgttccagtctgatgagcaaagcaagaaggtaattagtaatctaaatggtgactatatcatatcctgtgttcattctggcatcttggcagacactagggaaagaaaactaaatcacagtctttaccctccagcaactcctagaggaaggctaatatataaatgaagaacttttaaaataattataatgtgtccttttttttttttttttttttgcagaccatgtatctttcagttacattcccctagctgattacattcaaacagcttttagataatcacatctgacactttacactgaaggtaataagcttactcccatacatcaatcccccaaagtggaatagaactgttgttccttgtaatagatcctgattagaacaggcagcaatttgtaagtgtccctgttacttaatgaaaccaggccaaccccaagctgaaccttgaacacctacagacaaagctgtcaatttcccctttgtcaaaggaataaagtaacacatgctagcttccatccactcactcccctttggttttctgccatcattaaggcttagatttgtccctaaaatgggacgagtgacaggtccttcaccattgaaatttagcgtaagctgaagagtcacttgaattatgacatcatctttcaccaaaatctctttatatttttccttggtagcattcaagttatttgcacaatttacatgatatttacaatggttacaactgcatgatttgggcattattgctaggccccaaggcaccataatcataagcatagtcagggaggctgtgcaaaagcgttaagaatatacaataagacttttcctggtggtgcagtagataagaatctgcctaccagtgcaggatacaaagatttgatccctgatccaggaaagatcatgccacataccacatgccatagagcaactaagcttgcgtgccacaactactgagcctgtgctctagaccctggtgagtcacaactactgagccttcatgctgcaactactgaagcccacgtgcctagagccctgtggttctgtaacaagagaagccactgcagtgagaagccagggca

SEQ ID NO: 30523 - DNA, 1851 bp, Bovine  19866880689644
  misc_feature (1)..(1): n is a, c, g, or t
naggtgtcctgctcccctccctggtagaaagcagactgcgtgaccctcccaccttccacctgtcttaaaagattcggatttctcagctcataaaattataccctctttctgtacatgtgttaatccctcagtcatgtctgactctttgcaaccgcatggactgtagcctgccaggctcctctgtccatggaattctgccggcaggaatacttgaatggattgctagtcccttctccatggaatcttccagacttagggatcgaactcaggtctcctgcattgtaggcagattctttactgtttgagctatcagggaagccctctctgtacacacacacacacacacacacacacacactgtgtgtatacaataaacacacacacacacactgttgtgaatcaaatcagaaaagtgaagaagaggatgtaaatcattattccagttgtgatacgtggtttaaactagagaggagctgtgactcatctttgtccctcggtcaagcgcagctacagcgtcaattaggatttagatgatgttctcagacccagggaatgaattgctgagtgccaggaaaataatactacagtgttctgtgcatgcacggagctagctggacagcttctcaaatggatttcctttgtgtgatcaaccatctgagctctgtagaaattctctcttctcaaagccatcttggaatccctgagccctcagattccagcagtatctaattttttttttaacctctccattgacataaagacctaagatgtttattcatactttctatacgctgaaattcgctctcaaaaatatggaagaacgtgtttgagaatattgatgctcacctcataatgacagagggacactttcttcctctggactccttccggggtttgcccgagcctctaaccttggcctcggagtgcggcaggtggagtgatgtacacagaccacaggagacaaagtcagattttaactaaatcgagagtgcgactgagggactttcctggcagtccagtgtttaaggctttgccttccagtgtgggggatgagggtttgattccttgccatcgagctaagatcccacatgcctcgcagccaaaaaaccaaaacataaaatagaagcagtgttgtaagaaattcagtaaagacttttaaaatggctcacattaaaaacgaagttttttttttttttttaaagagcactattaaaagaagtggacatttgaatgatggtagtttgccatcttgaagcaaaatcatagttttaaatcagaatgttctatcaacttagaaacagatgtgagtgaaatatgacatgtgaatgacaaggattgggattatactgaatatttttctcatatttctctaagtctcactgggtgactctggagtacagaacacctggtctgttccaagggctatgtatgaatgaacttgtataattcccacacccaatgaagcagatgttgctgtgatcctcattcgacaggagaagatgccaaggcacagagagcaaatggcatagctctcatcaaagcctgatgcttaatttctagagcccgtaacctttcttgactgacatctcaggtgctcagcatgcgtgcatgctcagtcgttcagtcctgtccaactctttgagaccccatgggttcctctgtccatgggattctccaggcaagaatactggagtgggttcccactttttccagggaatcttcctgacccaggaagatcctgacccaaatcctctgcattttcaggcagattatttatcactgagctacctggggagccctaggctctcaaaacttctacttatgttctggaagagtgatgcccatcaatgg

SEQ ID NO: 30524 - DNA, 2689 bp, Bovine  19866880929051
  misc_feature (1)..(1): n is a, c, g, or t
nacatgagggtgcagatatctctctacgactctgatttcctttccttgggtggatatatatctagtctcatcttcaacccactccagtattcttgcctggagaattccatggacagaggagcctggagaactgggattgcaaagagttggatacccctgagcgactgagcacacagcacacatagagataccaatagtttacacaaggcagaggcaataatattagctgtgttaccatttcctgtgaaaggcacaaaggtaatatagcatgaaacctcaacccacgagacatgtataatccatttgtagagataagactaaaaataatttcagttacaattcaagctgacatcaaatgttcattgaaatcgtattttatcaaagctcaggacctacacaagtaaccaccaactcccaatgcccagatctctcctgtgaagtcagcatggctatcacatagagactcctgagtgtcatacaatcttcagaattctggagtgaagttgggaccccgatgaacctatctgtagggcagcaatggagatgcagacatggagaacagacttgtgcacacagtgtgggaaggagagggcaggataaatttagagaggagcgttgaaacatatacattaccatatgtaaaacagacagccagtgagaatttgctgtatgatacagagagctcagcctggtgctctgtgacaaccagtggagtgggatggggtgggatggggtgggaggtaggagggaggttcaagaaggaaggaacgtatgtatacctatggctgattcatgttgatgtatggcagagactcacacaatattgtaaagcaattactctccaattaaaaataaacaacaacaacaacaaaaaagatgggacccggcagagggagcatgggcaggaagggaaggtcagaggtcaaggaagaaacagaaagagcccctggccagttcaagcctccctccagccatgctccccagccttgacacccctgccaccgcatccctgccttctttccttgttgaggaaggagaggcaggcaagaagagaccagaaagagggaaggaaacaaaaaatgtattaaggaaaagatggaaaaaaaaaaaaactgccagcaaaagagaaggttttaatgatctttgcactgctctgaaagtgagaaagagaaagaaaatctctacaaaaataacccttcatgcttagcaatttcaagcaatggctttgtaatatttgcttctctggagaagaggaaacaggcagaaggaaatgaatggacagggcttctctacatgggatgcatgttcctcagaggaatctgtaaactcaaaagtttttcaaattactcagtttcagtgatttctgtcaggaaatggttctggggctcccatcagcacctcaaggattttccagtcctgcagatgaaggcagagatatgttagaagatgaagctttttaaagttctcacttggcaggctattgtgaatcttcccccagggggcttcccctgaaaggataaaatagtgacttgatcagactttccagaagcccagatgttacatagagtcgtttccaggcacatgtccatgtccttcaaccatgtctcttatgataagatttcagcttttctcactattccccagttgcttctaaacatacactggtcaatttctttcttagcatgtggcatccacagagccggcattgtactccagagtaagtccaaacagcacagagaaaagagagtcaccagccatgttttggacactgtgcttctgctgaaataatctaagatcacaagaactttttgaaagaagtatataaccctcttgccttacatcaagcctttttgacaagtgaaatttctaagtctttctgtatctgtcacctctgaattctatcagttttcatttctcttctacttatatggttgattttgagaggaataaagggaaaaaattatgtttatctttttcgaattttatcttattggattcagtcattgttatcagatgctgatttaggttgatcaatgaatcaatgctcttcaagcagaaagtgatcaaacagttgtcaatcaagctgagtattacagcatccagcccacatcactccaccatggtgatttgaatttcatgaaattctttcttaagcaacttgctgaaacttacccttctcaggtggtacagcggtaaagaatccactggtccatacaggagatgcaatcgggaagatctcctggagtaggaaatgtcaacctactccaatattcttgcctagaaaattccatggacaaaggagcctggtggggtacagtccatgggggtcacaaagagtcagatacaactgagcaactgagcccacgcacacacattcacaatttgcctcgtgaaaactgtggtcgagagacagattttggctcagcgattaaagctccttggaaacagaattgatgctccagatggctgtgagtgtcctgtcattgaatattgtctaatgtctagctggtcatggatcagaaaaaaaaaaatagaaaaggttcaggtatcataagaagtattgaattctgcaatctgtatggtgacttgcaattccagaatttttgaccatagatgacttcagcaggtaatgaataaatcaagtggtggcttcaggtgcagcttgatccagagcacgatgatgtcatca

SEQ ID NO: 30525 - DNA, 2418 bp, Bovine  19866881014027
  misc_feature (1)..(1): n is a, c, g, or t
naccctatggaactgtagcctaccaggtcttctctgttaagagtactggagtgggttgccatttccttcttcaggggatcttcccaacccagggatcacacctgggtttcctgccattgtaggcagacgctttactgtctgagccaccaggggagtcactttgtagatgctcactacattttcgttcattatttaaaaagctgcctagtgcaaggtgggcatagagggttaaccaacattatatgagctgatacttctcatgtggatcatgatacactgcaaatgctcataccttgagtatgatttctgagagcacatgcgttgtaggtcagcaggaaaaataccttgtttgtggtccaccccactgacaggttttgctgaataattgtaactcaccagtgtgagtacataaaacatgaaatctcaaaggtccaacgaggcaaatatttagcaggtggatgggttttaacacctagaagaaagacgggaggcaaatacagaggaaaagtgagaaatggagattggtcacgcagagagccctcagcatggaggatatggttgttcctacctaaacccaggaatgtctgtaagcccctagccacactccagaggacttagcaagcttacggcattttgctgagtgcgtttgacttggagagggttccgcctccaccagttcttgaaatgaatgaatttgttcagtagaaagacctggagcaaaagaatgtttatgaagtctctgtagttgaggctgagagatgtttgtgcttaagttgtgtttaatgtttgtgcattaaagagtgaaacgtgagaatttgtaggtaaggaactgctctctctgcagttaacatggctgtcctgaagcttccagggtctgaggaaactgacgtggccgcaggatggagcagagccagaatgtgaagctcagtagacgatcacgacgttgagcaagaccaggccagaggagagtctgcaagtcacaccacagacgcatatgtgtgctttgtgcaatttgtggtctgcctctttgcttcattctttttttcgtaccttggcatggacccaccaaacatcaatagaggttacttcaggccttgtctgctgtgagctatcagtaactttggtttcttctttacaaactaaccttgttcattctcaacttttttttttctttttggttgggagcatctgcagaaggtctctgcctggagatggtgtgctaacctatgtctagcagacaccagcaaggcacccaggtttgatcatggcaacaaggcaaggctttagggaggatcattgagagcaatgaggtaaaagaagctcctagcacaggtgactgctttgcacctcgcctgtaggatgtgatgttgtttgcggtgacttatttaacaagcggctagagaacggagatttgtgttttagctcatgaatggagggtgaaggcctggaattttgttgttgtttttactttctattttgggatgatttttgacttatagaaaaaatttccaaccagatttcttcacccagatcacccaaatgtgaacacttttccacatttcttattgttctccatctccccacttccactgtctgtcatctctatttttacctgtatctccagctacatcatgttctgtctctttctggctgtacacatatacatttccacggcaggcagctagttttaattaggttgtttattgactggggaagaatgttaggtggcatgggcgacactgggggaatagctgatgaaaatcatggagtatgaatgcccctcaaaatttgctctgcttcgttatttacaagtatgtgtctttcttgaggggagttatctgacgtattgattgccataggttttgagatttctcagctaaagcatgtttattttcattggaaaggaaatactgtggtcattttcagggctgagggatgttggttcttttggagatatgtaaaaagggaggaatgtagggattttatttggggttttaatttaataagctcaatcttgtgggttttacatcctttgaggcttttctgagagtggagggaagctgagcatgtgtggaatggcagggtttacaatgcagggtcacctcctttacatcacagccagtcctggttagaaaatcataaaaataaaaacaaagttgcgacagaatggctttctgaatatatttctgtattgagtgtgaaacttaattacttttagcctggcactttaagcctcaacaaagaggactcgggtaacatgattatcacgattttaaacatgaaaagctgtctttctaagtggtatttactcttctgtgtgctttggaggctctcccagtcaatgtcagcatgatgaatcacttatttaactttgcttcttaaagtctcttttagtttaatgcaactggacctttcttt

SEQ ID NO: 30526 - DNA, 1907 bp, Bovine  19866881054206
  misc_feature (1)..(1): n is a, c, g, or t
nttgactcactggaagactctgatgctgggagggattggggacaagaggagaaggggacgacagaggatgagatggctggatggcatcagactcaatggatgtgagtctcagtgaactctgggagttggtgatggacagggaggcctggcgtgcttcgattcatggggttgcaaagagtcagacacaactgagcgactgatctgatctgattcattatggtgatctgaataaccatttgacctagaataagccaaaacaattggagaaggcaatggcaacccactccagtactcttgcctggaaaatcccacggacataggggcctggtgggctgcagtccgtggggtcgctaggagtcggacacaactgatcgacttcactttttcactttcatgcattggagaaggaaatggcaacccactccagtgttcttgcctagagaatcccagggactggggagcctggtgggctgccgtctatggggtcacacagagtcggacacgactgaagcaacttagctgcagcagcagcagcaagccaaaacaatatcgacaaaataggaaacagggaggtttgatctttggtattaccactatagcttgctccaaggctcagatgatggttagtgtgtttttaacaataaggtatttataaattaaggtatgtacattgtttttttatagtgctattgcacacttaatacactgcacatactgtacagtgtagaaatatggtggatatcactttaatcaagtgagcaaagttgacataacctgagataaactccaacatgtatcctgataagatacatgaaaaaatgtaaaaatgaaaaaatatcatcatccaatactttcccacattatattctaatgcgttagaatattctaatgttatattccaatgtgttatctaatcttgaggaaacatcaggaaaatcaggattggtgacatctgacaaaggaactggtccctacccttcaaaaataccaaggttaagaaacatggagatatgctgaggaccagttgcaaataaaaactgaagagattgacagtgaaatgcagtgtgtgatcatggattggatgatactgaacaaattagctataaagggcatccctgggacaacaggtggaccttgactgtagactgagcgtggagataacagtattttatgagtgttgcatttcctgattttggtagctgtggttatgtaagaagctggcttttcttgtggggaaataatacactgacattaaaatttagagataaatgggcatgatacctacaactttccatcaaacggttcagaaaccaaatgagaaggcaaatggggccaaaaaataggaacaattggtgaagcagcaagaaggaaatttctgaaaggtattttatagaaaggaaagcagaaggaaggcagcaaagaaagaaaacggcttcttaagaatccttgcaacctttccacacctggcgggaggcaggagtgccacagaggactgtctcagcgcaccagcgggcccgccggtgttggccatcagtgcttgagccagcgccagaagccgtcctgaaaatgtttgtttttctttcacagctgaaaatgtggccaaacaatggcaagtgagtagagaagaccaggacaaggttgcagttctgtcccaaaacaggacagagcatgcacagaaggcgggccattttgacaaagagatcgtaccagtttttgtatcttctaaaaaaggtgggtgtgtcaatcgtaaaggtttaaaggtcaacagggctgtctataaggcaatcattactagtctataagaaaagcattaatagtccaaaggataccatacaggaatgtctgtgcattgttatctttttatgtctctcaggatgcaaagaaaagctgtattcagggtcgatctg

SEQ ID NO: 30527 - DNA, 1317 bp, Bovine  19866881254182
  misc_feature (1)..(1): n is a, c, g, or t
nacttgggtgggagagtgattcatgaaagagttggtgctggaattgagctttgaatgagaattagggcattaagcaccgaagaattgatgcttttgaactgtggtgttggagaagactcttgagagtcccttggactgcaaggagatacaaccagtccatcctaaggaagatcagtcctgggtgttcattggtaggactgatgttgaagctgaaactccagtactttggccacctgatgcgaagagctgactcattggaaaagaccctgatgttgggaaagattgagggcaggaggagaaagggacgacagagaatgggatggttggatggcatcaccgactcaataaacttgagtttatttggtaaactctgggagttggtgatggacagggagccctggcttgctgcagttcatggggtcacaaagagttggacatgactgagtgaactgagataaagggggtgactgtgaggttctgctacaaattataactggaatgaatttgagaatcacctgagttctctgcttagctggtctgtctgtcttcttggttgaaatgctcattttcacctctgtgtgaacatcccattactggagaattacagaactatgcttttggtcaatgatggattaatctgtttttgcaatgcctgtgctgggttaagaacatacacacttctacaaatactcagggcaactgaagatgtaaacctgggccttgacccctaaccttcttctacctgaattactccatcttttaggttcccatttccatcaatgattctacatttctgatttctcaggttggaaagctttgagtcatctttcatttgccttcattctcaaaatctattgttttacaaagatttctttacataagtttctctgatttctcctcttgggctccagtcatcactcttgggtaaatgaatatgctgtctttcttcaaagtttctctgactccagtttctccagtctatttgtatactctttacagattcatctcccaaactagagctctcattatgctatttttctgactccaaacttgtattggctccttattgcctctcatataaactctactcctttgttgactattgaggaagcaccatagtcgggttaattctatttacctaaccttttctctattattcgtaaacctggaatttctgttctaagctgggaaaaccaaaatatggttacttaaacagactttagataatctatactaagcacccagcccaagaggcaaaacaaaaaaatagaacaaaccctgatttgcgttgttttttcattttcctccaagggaagc

SEQ ID NO: 30528 - DNA, 643 bp, Bovine  19866881396040
  misc_feature (1)..(1): n is a, c, g, or t
nttgttatagtcgaagccatactggttcaaaaactgaacactggaagcctggaaagagaactctgagtccaaaaccccaaatgtcgtagggaagaggaagaagttacatgaatgagctacatacctagcaacaaaaacaaacagaaggagaaaaagacagaaaacacttaaaattctggctcatggagcaggcttcctagtgggctcctccttccccttgagaagtccagctgacccctgaacaacatgggggttaggggcaccagctgttcttacagccagacatctgagtatactttagagcctgccctgggtccagccacaggccctctgcacccacagaccccactgtggggcgtacagtaccacagtgtgtatttagtgagtgtaagtgggctcaggcagttcaaaccctgtgttattcaagggttcgctgtatttgaatgccagctgtgtttcaagtactatgactggtgctgggggccagtgaacaaaggcacacagtctgacccccactgagagaggggggtgccattcacatcctttctggccgctggggcctgggagctgcgtccccctcattgtaacactgctgactgcaatcctgaagaaacacacaggagtgaaggacgcgggcaagggg

SEQ ID NO: 30529 - DNA, 724 bp, Bovine  19866881463849
  misc_feature (1)..(1): n is a, c, g, or t
natcttacctgttctcttattacacacaaaaataataataaagagtgtgggataaaacctttcaaggtgatatataagtttatggcatagatcacggtgatgatttcacaagggtagattcatctccaaacacctcaagttttatatattaactatatacaggttttgtatgttaatcatagctcaataaaatggtttaaaaatgaaaacgaagtatgaatctgtacttggaaaggcctctggaacttagttaggatttattacaattggctattacagatgtatggatggatgtactaatgatattcaccttgtatttgacccatgaagcagattacaagctattttccaactcagtcattacaaattaactcagagataccctgactatggacaaagccctgactttctaccaagaaactctttggaccggtcaacaagctttgtacctctcaggctaccatttgtttttcattaaccagaacattcccaaaggagagactacattttctgattcagcatcaaaaacagaacagagcagtggtcaccaaagaaatatttcctatacaacgaggcagcccagaaatgctggaagcggaatttagcgcgtctcgaagcagctgggtttcacacggacatagcacagcacagatgacagcccccagagaaacaaacataaaacacccatgacttacgtgtaacttccccaagctttttaaaatgt

SEQ ID NO: 30530 - DNA, 1375 bp, Bovine  19866881634922
  misc_feature (1)..(1): n is a, c, g, or t
nttagcaacctcttacatgaagaactccctgtgactgccttcctcagaaagggctgtattggtatggaaaacactgaagacggtactaatgtaatgtcacaataatttgtattactgtggacttttctattagaagtattttataataaatttttcttccaaatgtgaatctttctgtatcacatttgaggaatccatcatttctagtaccctgactgccatctttgtactaatcttgggtcatttattttcttttcaggtcttactgaagttaaaacagatgagtttcctcgccatgggagcaacatggaggccgtgtctaagctaaagccttgcttccttatggatggaacaggaactgtcaccccagctaatgcttcaggttagattatttgaagggcggtttggggaataccatcttctgcaaggagtaccatgtactaagattcttcttttttggatgggggtagggggcctgtgcctgtggctcgtgggatcttagttccctaagcagggatcaaacccatgccccctgcattgggagcactgagtcctgactagtgggccaccaaagaggttcctgtacaagttattctaaaatcttgtttcagttgctttagggaaaaatgtaggtttgaccatttgtttctttatattagactcatatataatataccgaaaaatggatttggcttccctgcagtatcctaatgggacatacacatgaaaaaagccaatcagattttatctactacctttgtgcttttccaaaaccagaaactccgataaccttctgtgatgtctgggctacttcttccacttcattaatctcctgtcctccagtgcttccatcttcctgttctttctcccgtggaaatgttctgtaatcagttgtatcagattggcaaacctaccatttctaattacactgtaaagcctaacagtacatgactttgccaagatgtgttaaggctgacttaactcacgtctcctggtgttagagaaagtagacacagctacttaacgaggatggcttcctatttacaggaattaatgacggtgctgcagcagtggttcttatgaagaagtcggaagctggcaaccgtgggctcacacccttagcacagatagtttcctgggcacaagcaggtgtggagccttcgattatgggaataggaccaattccagcaataaagcaagctgtgagtttaattttcagtgttggtacctgtcctttgtcgccaaaacctctatgggagcacacccgtaacttgtaaatgctttatttctgtcttcttcaaacctttgctcagatccttcccactccaaaatgctagacgaggctgatttgttttcatcttattccatcaggttt

SEQ ID NO: 30531 - DNA, 1402 bp, Bovine  19866881660187
  misc_feature (1)..(1): n is a, c, g, or t
nggacaagccgggttgctgactgacagggtggtaaaagccagtagccaagaaaatatggagatccactttgggaatctgtgctaagctgaaaactggggggaaccagaaatccatgcagcccagctgaacaccagcagagagcctatcttaagtaaaagactcttcttgatgttttcaaatactgccatttatacctatgtacctgccagcattgggtctgaaatgtcagatccaagccagctctgtttacataatgtttgcagttttgtagggtcagtctgtggttcagttatgtttagaactgtgcaaaatattatctgttatcaacagattgagattaatcctccttttcaaactggaatgctctatttttccatatttacagtattcaccacggaaatgaatggatagataatccttgggtaacctgttaacaccaatactggctgggagaagtggtttctagcctgggaaagaatgtttggctaacaaatggttaatgatgaaccttgctctcctagttcaaacttccaactagatttttaataatttcccaacccaaccctctagaaggaccccggagtcttttacgctttatctgaacttgtaatcactgccacttactccgtaaagtcctccatatatacggcaaggccttggaaatatgtggacggggacttcattcatctattgatttcttttgtttgatgaggtggagaggcaaagatggcctgaggtctgatgggccgagaggagaaaagaacggaagccgtcacctcccttcactgccaaggcttcatgttgtcctgatcgcttgctggtggatctgggagcatgaggcacgtaatagcacatctccaatagagtaactttgtaaaaccaaaactgggtttttagggacttcccttgtggcccaagggttaagaatctgccttgcaatgcagggatgcaggttcaatccctggtcagggaactaagatcccacatgccatggagcaaccaagcctgagccaaaactatagagtctgcatgctgcaatgaaaaatcctgcatgtcactatgaaagatcccgtgtgctgcaactaagacccaatgcagccaaaccataagaattaaaaaaaattttttttaactgggtctttattgtaaactcagtttaagtgggagagtttatagaattcaatatattaattcattcagtaaatacttactgagagttaatatcatgcttggtatattctagatgctggggattcagcaataaaggtaagtccatccctcaattgggagtcttaacagatacgctctaccatatataaaatagacaagcaacatggatttactgtagagcacagggagctatatccaatattttgcaataaaccgtacaaactgtaatgg

SEQ ID NO: 30532 - DNA, 770 bp, Bovine  19866881887922
  misc_feature (1)..(1): n is a, c, g, or t
nctcagtgcagagtatgaaagtgtagactctcccaggggcagtgaaaactctctcacacaccactcaaatgacacagactccagtcattaagagtctgttctcctctgcaagaggagaaaccagtgagtgggaaaggtaaccgaactgcagcttcccgccacgttcagaatggcttggcctcaagtgtaaatgtacagggttcagttttgtaaaaaaaaaaaaatccagcaaattcttatacagtgtcacttaatttggaagaggatactgtccatttaattaacgcatacttttgtcacaatttgccttttttgtggggttttttttctttttttccctttttctttgcttcaatacctctgccactttggaaattgtaacagttaattactttgaatgttgctaaaaggacatttttgtgtagggtcaggttatttttatatgagttaatgtgaagttgtaaatggaactttttgcttaaagtataacacagtgatgtctgtgtgaatctgtgtctaccctagaacctgtgctgtgtgagggcattcttactcatgctgttactatgcttatgcaccattcagacttgtcagagtagatgtgggtttatgactgccaagtttgcccagtacagtagttttatcactaaaagttggacttgttgaaggagtcctatagtagtttcagtgttagatacagtttttgccaccatacatctgtgcattttctctttaggtgattgaatgtttaagaaatttgtgtgcatagt

SEQ ID NO: 30533 - DNA, 1436 bp, Bovine  19866880196904
  misc_feature (1)..(1): n is a, c, g, or t
naaaccagcttgaacatcaggaagttcacagttcacatattgctgaagcctggcttggagaattttgagcattactttactagcatgtgagatgagtgcaattgtggggtagtttgagcattctttggcattgcctttctttgggattggaatgaaaactgaccttttccagtcctgtggccactgctgagttttccaaatttgctggcatattgagtgcagtattttcacagcatcatctttcaggatttggaatagctcaaccggaattccatcacctccattagctttgttcgtagtgatgctttccaaggcccacttgacttcacattccaggatgtctgggtctaggtcagtgatcacaccatcgtgattatctgggtcatgaagatctttttgtacagttcttctgtgtattcttgccacctcttcttaatatcttctgcttctgttaagtccataccatctgtcctttatcaagcccatctttgcatgaaatgttcctttggtatctctgattttcttgaagagatctctagtctttcccattctgttgttttcctctatttcttagtggaattaaatatttttaaatgatgtcttaatagttgtcgaaattcctgggcttctgctgtgacttgacaacttggtaattgctaattcacttttatgctaatttaactccatcctagttgacgattttcctgttaaactcttaagacttgttcagatggagtctgggcggatcctcccagcctgacttgatggagggtgtggatggcaggggttcccacagaccctgcggcccgagcacctcacacaggaagaggctcagtacacatgcattttgtgagtaaaagatgtaaaagggagtggggaaaatcggtgattcttcagccctgcaagcattcatttacagccattgcagagagccgattcaggggaaagagtacaagttttaaagtaggacacagctgggttcagatcacttctctgccatcttatttactagctgagtgactttggaaaattacttaacctccctaggtgtatttcctcatgtacgaaatgcaaataatgtacttaccttagggtgttacatgcatttaaattatcaatgtattggcagtgtgactatggcacgtggtattcaagaaacacaggcttcatttttctttctccttttaagcagttgggatgctattttctgctgtttctgttatagtccttccttttcccccaaagcactaagagatgagcaagctctgcctctgtcctccaaggtctaatgggcaaaggaggcagggaggtcacatggaggcccgagccaggcagggaggttgaggctcagactgcctgcagagtccttggcacagggacggcgcacaggaaaccaccaggaagtacccggggcctcccagcgaacgcgtacccct

SEQ ID NO: 30534 - DNA, 1473 bp, Bovine  19866880380832
  misc_feature (1)..(1): n is a, c, g, or t
ncggcagcttctgtctgaggacccacgtcttcccgggtgacagtattaggacggtgctcgccctccctatagaggggcatctgcggcaaatacaccctcccgctgtgttgtaggcactgctgtaaacaatcacacagggtaattcattttaccctcccaacaatctgacaaaatcaaccattttatccctatatgtggtagcagaaaactggctccccaaagatgtccatgtcctacaccctgggaccctgcatgaaaaagggattttgtaggtgtgattaaattaaagactgtgagctggagagattatcccagttgtccagggtgggtaagtgtagtcacagggtccttaaaagataggggagggaggtagagagagagagagatttgaagataccaggagataaaaccagtcaatcctaaaggaactcaaccctggatattcactggaaggaccgatgctgaagctcaagctccaaaactttggccacgttggttcgaagagccaactcattggaaaagatcctgatgctgggaaagattgagggcaggaagagaagggggtgacagaggatgaatgagatggttggctggcatcactgactcaaaggacatgactttgagcaaactccggaaggtggtgaaggacagggaagcctggtgtgccgcaatctatggggtcacaaacagttggacatgacgagcaaccaaaaaacaacaacatttctgcccttgagggtgaaggagccaagggccaaggagtttgaacagcttccggaagctggaagaggtcaggcatcagattcctccagcctccagaaaggaatgtggccctaccaacgccttcagtttagttagtccagcaagagctgctttggatttctatcttcaggattgcaagataacatgcatgtgtggttttgagaccctcagtttgtggtcacctgttacagcagcaatggaaacaccacatcacaggtggggaaatggcctgaaggctccagtgacctgcccaaggctgcaggtgtggtcagcgctcctgaccatgtgcatggccccctctcgtgggccgtgacccctaggaaagccccaccatcgccggttacatggccttgggcaagccatcgaatcctgtccttctcaggtgtgacgatgagccaggagccctcttgacctcgtgtggggctcagagatactaacccccagcttgtgtggggatgctgtctgaggctctggcgatggctcccaagcagtgtccgcccggccctcctcttagatgggctgcagctcctcttccagcttcttcttccgggctccttccacgaagaaagaagtcaaggccgatgaagggttttccccagaggcgtgtccacccggctgcccacggcccggttcgtggaattggggacagtgtcagagaagcgaggcacatggtctggcagcttcacgggctccttcttgttgccctgagga

SEQ ID NO: 30535 - DNA, 1569 bp, Bovine  19866880437821
  misc_feature (1)..(1): n is a, c, g, or t
nttgtagaaacctaccgcccacgaagctgagttctgtcatcccatctaggtaggctgccaacaggcctgaagttaagccatcctgagatgtcggcagcaggaagcgggaatgtcctagaacatgtgggatcaagactgaggacagaaaggtagacaagctggaaggagagatgaccaaactcaaatcccagagaagtgtccttgtaggacggtgggccacagagctggaaacggggattctccaaagatctgagcagttgggtgtcagatacacgtgggacctggcaagtgggcgatggatcagacccggtgtgtcagctcacgtgggaaaggcgtgcagtctgccctcattcgtgtttcctgtcaggtgtggctgaagcaggtgacactgcaggagacggtgtatccgaatcctgcagggagctgggggtcctctctggaccaggaagctctggttttctctttgaggagctatccgctctgatgatggaatctggagcctctgccatccccgacacatcgtaatataaactcacggcaatgcctacatacatcaatggctggaggaagggtgagatttgttttatgacttggtcaatttggatcatttaatttgatttgcctacatctaattctgcccagtaatgagagatgtgcatgcataaatatggctggcttgcatgtgtgcatgctaagttgcttccatcttgtccaaccctgtgtgaccctatggacggtagctcaccacgctcctctgtccatggaattctttgtgcaagtatgctggagtgggttgccatgacctcctttcggggatctttccgaccctaggacttttctagtgcaaattttaaagtttctcacatcactagagtcactgcttttattttatgtatggtaggaaaatctttgatatttgaaagactttttcttggcctgaaagagagcttccaatattggattgggatgggatctccctggcattgttcatgcttgggctacagcataacttctggagaggtctgtcaattatttctcagaagggctggttagagcttgtgcagactgcactgtggagctgagataaggaaaaacccaatttttcataattaaaattatcctctccttgattttcaaaaaagaaagaaaaaggaaggcttttgttcaatatatttacagatattcctcacctctgcctataatgttaatgttaactcatttgttcagtcattcatcacatattcattttcagaaagccatccatgccttttgcagaagagctgttgggggccatgccctgtgcttggaactggggagagagaacttggttcctgccttcacaggctgatagccccgtggggtatgtgctacacagagggagagaagagaggaaagacgggtgccacgtgaaagcagggagacccatgatgctacctctgacgggctccttggatgactgactgggcattaacagtgtgatcgggttctggttcagaatggtgaactgagcatatacatatttacctctcctgcctccaaaatggtgatcaccagaacacatattataat

SEQ ID NO: 30536 - DNA, 867 bp, Bovine  19866880596577
  misc_feature (1)..(1): n is a, c, g, or t
ngatggggcaggattagggatggctgggacacaaaagtcgcctcgactcagcttcttaactgctggtcttcaaatctctttcctgcagggactacaaagcaaaacagataagggagaaaccaggtaaaaggcaggccttcggatgcaaaagcacccggccaggggcggccagatcacctaccaggctcaactccatctggaggaaggggagtgggccagcctgcacctctgcccaccagacggccactgttgtgacctccatgaatttctgaagtcagaggaggctcttcagatggttccactactgatttattctcgtttctctcctcggattttctattaaaagagtaaggctagatgcagctatcctgacaacctgacattacatacctgtccattataaagtgggatcagagtcatcgcaagcaggaccatgtttagctagagacgatcttccttctcccggcaattcattgtggaccagaacaaaggcttctgggaaaggtggaaggaatcgggctgagaggaagatgaatggcaggtggtatagctcaaggtcacagctagtgtccgcaggttagcaggcctggcgggggcgtccacctggggaggtgcggctgctccccacccacccactccctctgctgcttatgctttctcttccctggtaacaaaacattcttcctgcctaaagaggttgcagctatttcataacaggaagacggttctctcgttattgctgttggggatgggactgtatggggaacagaaacacgatttcttgattttcttctataaactgcaagtgtggaaaacaacaggagtaaataacaagtgttctgcaaacacctcgtggggagggtcggt

SEQ ID NO: 30537 - DNA, 2816 bp, Bovine  19866880641325
  misc_feature (1)..(1): n is a, c, g, or t
nacattgtaaataaataacagaaaacacactccaattaggataatttgaggaaagactcttcatgaaagggcatgtgagtgcgtgaggactgttggagaagcacaggggatggtacagaaacccaggtagacggatgttgtcacacctgtaggctgtaggaggcgagaggaattgggtcaccggaactgggagggaaccggattcacagcctcctcagctcctattgaatcgcctggggagccagagggcagggagcctgaatgtctccatcaggctgcacacctgaaggtatttatcacacactcccaggggcctggttctttacacgcactgttccaaactctgtgagaggaggggtgtcacggccatgttgctgaggaaacaggatgagattagctcggtcccttgccccagctatgattaggaagaggcagaacaactatcctaagaaatgccaacatctgtggagattttaaacccaggtggcccagagctgtggggcccacagacagactggatagttgggaggcaaattattaatactactctgggcctcagtctccccatctggaaaagggaatgatacctatcttcgagaattattgagatgattcaataacagtgatatagaaattggcacgtggtcaacaaaaggaaaatgttgacgtgcaaagagtatgaaacatggttttgggtgggagagtatggttgttcatttctggttaattactttatacttgtattcatcagttttttggccccaaacagataatggttagataccaaagcaagttgctttccccactactctgttctttttttccctccctcctctgtctcttcctttaacctggggcctttcggggtcctctgcctcagttttgtgtgttggaccctaggcccctgggccatcctctgagtggccacatggccagtgcctgccacagctggggagtcgtcctccacttggaattcagggacctcttcctcctccctgcctgcagccgctccctcctgggagccaggagaaccaggagagggcccgaggcaaagatgtggatcctcaatgcgactggcctacttcctcctgcaattctaactgatgggcttccagaagcggacactctttgctatttagtctattaacatttataacaattcctcaaaatggatatcatcccattttacaaagaagggaactatggatcacagagattaaataaatttggccacaaatcatacatgtggcagagccacagcaaatgggaatgcctctgcatctcctgtcttatcctttcttaacctttctggagcctccagtatgttttctgaagacttaaagagctttaattttctaattataaaagcaatttgttgttgttgtttagtcgctgagtcgtgtttgactcttttctgaccctatggattacagcccaccatgctcctctgtccacggatttttgcacgcaagagtactggagtgggttgccattttcttctcaagggaatcttcctgacccaaggatagaacctacctctcctgcattggccggcaggttctttactactgagccaccagggaagccctataaaagcaatactggattataatagaaaatatgtaaagtaggagggacattttcacatagctgcagccgtacggtctgtataagtttgcagctttttttcatgtaacattatagtacatgcctcgttccacagtcctagaaattctttgtaaaccttattttcagttcagttcagttcagtcgctcagtcgtgtctgactgtttgcaaccccatgggtcacagcacgccaggcctccctgtccatcaccaactcccggagttcacccagactcacgtccatcgagtcagtgatgccatccagccatctcattctctgtcgtccccttctcctcttgcccccaatccctcccagcatcagagtcttttccaatgagtcaactcttcgcatgaggtgcccaaagtgctggagtttcagctttagcatcattccttccaaagaaatcccagggctgatctccttcagaatggactggttgatcgccttgcagtccaagggactctcaagagtcttctccaacaccacagttctaaagtggctgctaataatccctcagctgggtacactagcatttacttaaacaatcgtctattgtcagaccatccggtggtttccagttccttgctgtcagcaacatggctgcaaagagcatctttttattcagaaagctttttctgtttgtcctgtttccttaagatggtttctcagaagtggaaatactggttcaattaccagtttgcgttttatgtttctttgtacatattgccaaattgttccccaaagggtggccccggcagagtggagagcattttgagggtagttttctgctcttaactggctttgtattccttcccaaaagtctcataaggagaatggcccagagcgtggtggaagtgatggaagactccaagggaaaggtccaggagaaccttctggccaacggaggtaggtccctgaagcacgcttatgatggtcctttcccagcttattctagtccattcgtggtcccagctgtggccacacaggagggctgaaatgacacggcaccgcggaggctccaaactgacatgccaggcagaggctgtccacgccgcttagagcacagtggcaccgctgtttggaagactcagtctcccttatattccttctgtctcatttctaaagcacctggcttttcttacctgtggctgagctcctcagtgaaatttgagattaaaatggattcaa

SEQ ID NO: 30538 - DNA, 1274 bp, Bovine  19866880689621
  misc_feature (1)..(1): n is a, c, g, or t
ntggccccaccagcaacaagcccattgtgaggtgctggggcagccatagaggaaggaaaagccatctgtgccttaaagtttatagtccagtggacaagaggcacaactcaacaaataatgatggtgtttttgtgtgcctcttctgaacatttccactctgccggttcttttcctggtgaattctattcatccttccagacccagctgcagcatcagctcaccttgctagccgtcctatcccaagctgagctggtggcccgtctgtatactgagtgttttctctaccaggacccgggccactggccctttgttgctgttctccctctgctacgtgaaaggtgttcagtcgtgtctgactttttgcgaccccatggactatacagtccttggaattctccaggccagaatcctggagtgggtaggctttcccttctgcagtggatctttccaaccccaaccccaaccccagggatcaaacccaggtctcccgcattgcaagcagattctttaccagctgagccaccagggaagcccacccccagggaagtctccctctgctgcccaccccctaaatgtgagccccataaggtgggacctggggattttttgtctgtgagtcccctgaacatggaagaaactggataagtactgaatgaatgaatgaaatgtgtgtgtatagaggcccgagggcaaaaaggaggtaatggtgaagaaatgccgagttggatggagaaacaatttcagctgatgctttgttaagcctgtttgctggtgcccttctggcattccccccaccccgagaacaatgctgacaggcatccaatcaaacaaattaatattctcttcccaccatgaaaggctcatttcatgggaacaacaagtccacacagccatgtgtgggtgtgtgccccatacatcaacctgaccagaaaccaccatgggtttgcctgcgtcttcctgctgcaagaggtgaggagtgttcagctttcctttctcatgggagctgttgaccctcatctgacctttgtgatggctgaaaaatgaagaggtaggagcgtagagaggggagatgagaggggaaatgtttatcaaatgtgaatacaggcacctctattgtaagaaaaaccaacatagtttccactatttaaaggtcataaactttgggcctgtggaatattctcctggacgtttcaatttttaaaaagcactattttttttttttttttatgaacaggaaaatggagactctcttctcaagacagtaaaaataaatt

SEQ ID NO: 30539 - DNA, 3175 bp, Bovine  19866880711804
  misc_feature (1)..(1): n is a, c, g, or t
ntaaccccgctagggaaccccgataggcccgctgcggggcagagcgacagagagagagagaatgagggcgagggtgaggtaagcaacccccccgggagccctggggttccccggctcgcacatcctcgcccgcccgcgcaggcacctttgggagaaaacaaatcctcgcctttcctgttacctactgtggctttcgaggtcttaaattcaaggacccccagaatcacgcttcctcctaatctgcagggcctcttgggagctgccctccgctcccccagcagtgatgggtgcttgctggccagggtgccttggttctggctggaggtggctggagctggtgatggggcacatcctggctggggccgggggggtggtggtggttgggcatctcagctgtcttccctggatgccccagctggacccacccctgacctctttgggcatccgtggaagacagccatgccagcattagtgatagctgctgtggctgatgggctgtggccccgtgaagtggggccgtgaggagacccctgaaagcggtggccggtggatgatgccaggacctggcagaagggggactcgttggcagcgcagtgtcagacagagaagtctgccagctgcctgcggaaagccctgggtcagctactgcagcttggttggcagtggccccgtgcgtgtgccaggtgggctggcccaccgaaccaccctggcaccggtggcccctggagaacacacaaccaggcctggccctgggccttgtccgaccgacctgctgcttctgtgggccactgggcatttcttctcggcttggggctcgttctgccaaaacccacgtccctctgttggccaggcgtcgggtggagtggccgggaggggtcaccgctctcctatcctctgcagggcccgctgctgcgatggctcaaggtccacttcagcgaagcctttgttgcctggatccacatcaaggcactgagagtgtttgtggagtctgtgctcaggtgcgtagacgtgatgctctggggccacctgggctctgccaccttccttccaaccaggacccccccaccctgccaggctctgggacagccctggccttcctaccctcttctgcaattcttggctcttggaaacaagcttagggattcctgactccaacaaaccttccctcagtcctgaggcccctgctctcctgtgctctgagtctcctgtcaggctggcgtcttgctcctgcaggaaacaccagcactgtctccgtccttgagttttgaggcctagccctcaaggcagcacaaaatataaaacccaaacaaaccaacaacaacaaaacttactttacctcttttttaacaaatgcaaaataggttcactcttttgtggaaaacttggcaactacaggtaagcacaaagaatgaagaaaaatcacctgtaactttaacaccaagaagaaacactgctaactcgctggtgttcctagcatccttcaggctttttgagtttgtttttttaaatttgcagatatgcatgatttttataaaatgtttacaaaaatggagtcaagcaggaaacttttcctgaagcccatttgaacatctgtgtcctgaactattggtgtgtgtgtgggggggtcttggcagcactgcatgtagctgactgcacccccattcccaaagcttggtttgctcaggcctgcaggtccagtggccccttggcccctctgggtggtcttgctgggccccttccgtgtgcacaccaaaggcgtcctcaggaccccatcccacacctgcctggtggagtgccccgctctcttttccttgcccaggcttcctgggtgccccctgctattcattttcccagaggcttcccctggactcctggctcatcttccctcccagtcctttcctcctgatcctcgtatctgccaatggcctcaggttcctccccaaacttcagggcccccttggacgcctccctcccctcatccttacggccttccccctccctctacatcacagcacccctgacaagcctccatcctgccttgacccttgctctctctctctgtctctctctttcaccatctccttcccagctgttcccaaaggctcttccttggtcctctgcctccagctcatccttcatgtgggtgccaacgtggttttgtccaagcacaagctgggtctgacgtggctcctcgtcctctctcagacatctcagacctctgtcatggcaagcattgtgacaatgggctgaagggcagactcaggataacccagagtgttccagacatcaacaggccccagtctgtccctgctcaccttgaaaatcattggtcctcaggctcagtacagcaaagcctgccatccttactggaggcccattttgctcaagagtgaggtccagatggtccacagaggtcccaaatattgtgtttaagctcaataaaagggaagtatatgcaaaaacaattctattcaaaactataaatgtatgacattcttaaaacctatacttttatttctcctgaatagttgtaatacatcactactgttaaaaaaaaattcaagttcagaaataggtactgtggaaagtaagttcctgtcagttccaccacccatggattaacccagttaatggttttaagactcttctttcccaagttgggtcatttatacttgatgttctacaattttttttttcatctacttatagtctcatcactatgcatagagatacttgatcttttttcatgactttttcatattccatcgtatggagcacgcataagctaagaaaacagatgttaaagcaacttgattagagcagatggctacagttcacctgttatcttattcctccgacccctcggccttgccctcaattgccctcaattgccctcaattggtccttggtctttcctcagagttggttctgtcctttttccctactctgggagctggaggggagggccggggtgacttgcctctctgcctgtcacccagcccggagtcggatagagaggaggtgttgtacgtttgtgggctgaatgacatcaaagagaagtggaccaaccctcagtggaggaagtgctggttcattgtcaggcgcttaaatcacccaagatgaaaatggaaatgggccctgggtgagggtgggacgggagagacggagaagccag

SEQ ID NO: 30540 - DNA, 2431 bp, Bovine  19866880730167
  misc_feature (1)..(1): n is a, c, g, or t
nagggagtgagaatctgtcttctcacccagagacctccttcagcctagtccgtgcctggtagctggtgaagcatgtgctggtaactgtgtgtagagaaagaagcatttcctttgtcatattaagtggacatcatggcagaatttaagagttttttttttaacctctgctgatgcttgctgtatggtatgggataattcaccagcctgtctttccagtttgctcgagtatatctgggaaggaaaccatggcacaagagtgagttaatgctattaatggtgatacaggatgagcgaagacagaagcttggccacctgaagacagtagtcagccatgagcatgcattgaaaacctgccatagacaagatgctcttgtgggttgcaaagagggtaaaactccagcctgttctaaagagggcagaacccgaacatatctcctcttggagggaagaggatcagggagacggagatgagcagatggctgccctagaggggagggcatggcggaggaggcagtgagaacacggagatgggaagagggtgccaagggtcccatcttggctctgccgatgctctgggtgactccaacaagtcctttaactcctggtttttcccagtaaatgatggagttgctctcgtcccttttggttccaaccctccacaactgaagtctcatccagctgacgggcggttggaacttcttcctgggaaccagaatgtatttggaccacatggctttccctgactccccccctccaccccgagaaaggagactttccagggtctgaggggagagcagtgaagagagcattctgttgacttcagcatgtgttctttctgcaccaattctgtgttgagtgtgttgagtgaggatgcaggaaggcagccttcttaaaacaaacaaacaaaaaaaaaccttttattttatattggagaatatcttattaacaatgttgggataatttcaggtggacagcaaaggggctcagccatacatatacaggtatccattctcccccaaactcccctcccatccaggccgaagggcagccttttgaaaacagaaatctggaggtctgaggctgaatgaagccagataaatcttatttttctatttggaatttccttccaacagaaacagatgttctctccatccctcatttgtaaaaaggacctaataataatgattaataataataataagcatgtcaatgagttttcatgagccctgggagatgacacatggaaaggtctggaacaggtcagtctcggtggagactgttattaacttcaccatccttcctgccacttaacttttgtcatctccatgagttctgagaaaagtcccccagggtgcttcagttcccagcttttctcttgggcaaagctactttcgttattttttgctttgaattcaattgaattaaaaaaaaatatttcctgttcttgctactgtatctcttcctttcaaagaatttcacacaagggaatgcagccttggcagccatattatatttcaagaaaattaaaaagaagaaatgttatctgaaaattatagaaaattggcaggtaatggggcacagctctgattcacattcagaatagacttcctcttgtttggcaaaggcttggctgagggagagcaggcagaaggatatgaaaggcagagaaatgcctagaaatgcctcttactttctctttctcatctacattttgggacaattggtaatctccttctgtctcttttaggggaaatataattttgaaatagtgtgcctccttctttctgctgttaagtcgcttcagtcgtgtctgactgtgcgaccccatagacagcagtccaccaggctcccccgtccctgggattctccaggcaagaacaccgaagtgggttgccatctccttctccaggcatgaaagtgaaaagtgaaagtgcagtcgctcagtcatgtccgaccctcagcgaccccatggactgcagcctaccaggctcctctgcccatgggattttccagggtactgtagtggggtgccatttccttctagaatctttaaaataaagtatttccacgtattatgtaaaaaggtgaagaatcttgacaatatctaaataccatagatcacataaaacacttattaaggctcaaatttaattaatagttaaattgaagagatctttcaacaataagttgaatgagctcagttttatattattaaatttaagctcaaattcccaattaaaagctgttcatgaagtgaaaatatgattaactataaatactaaagcagcataatttaaattcttaatttaggtacttcatgatgtatagcaaaatgcagcatttgaagtaattatttaaaaaattacttggagataactatgagccaaccaagaggtaatgtggtcaaattaaatttaaatgaatttttaaa

SEQ ID NO: 30541 - DNA, 1758 bp, Bovine  19866880869916
  misc_feature (1)..(1): n is a, c, g, or t
ntgatggcctttttgcacaggtgccccccccaacccctggccttacctgaggtcaccactgtctctagagggtccaacaggagccagaacagggggagacgtgcagtgtgttctgtccagctccctttccctttgtcagcatcagttaagacagggctgctcggggtggacacagcccatctcctgggctgccagagctgggtgagttaattggagggtttagggtggagacgatagatggccctgtgaatggacacgccaaggtttagaaaataataacatgaattccttggtgaccagtggttaggactctgtgcttccaatgccaagtgtttgggtttgatccctggtcagggaactaagataccacataccatgctgcagggccaaaaacagtaaatgaaaatttaaaaaaggatattgctaaatttaaaacacaaccaaaaagaagaagaaaagtaataataaaagctgaggaagaacagaaagtgaggagacacgaacagaagcctcagatggtgtggcccctggggacttacccttagggtgagcgggtgggtctgagcccccgacctgaggtttttcatatagtttcatggagggtctgttactcagctctccttgaagaaaggagaacatgctggcttcccttcatgtggggctacatttgactacatgaaaggcaaagaccctacttccaggccaaaccctcaggggaaataattattttccagcagacgtttcttaaatgactcttcaaagatccatgccccatttcccactggtagcaggaatgcccccccccacccccgccatcctggtggctgaagagagaggcccacggatctggaaccatctaccattaccgagggccaccatgtctgccaaccgggagctctcattagggaggagagctgagtgtcagcttggctgggccgcaggtaccaaccttcggtcaggtgtgtatgtgcgcgcgcgttcgaatggggtagaccgggtgaagcagctgggcctccccagggcgagtgggcctcatccggtcatctggagcctgaacctaacaagagggcagaactagagggaactcctcacgcccgactgcgagctcggacactggtctttttctgacctttggactcagactgaaaaactggctcttcttgggaaagacccaagccagcttgctggctgcatggcttgggacttgtcagcctccatcatcacatgggccaattaactgctaatagtaaatctctttatgtagatgtaaaatctcctattggttctgttctctggggaaccctgactaatagagtcagcgtggttaatagcgtgaccatgtctccaatttatgcagcccaacaaacacccagagcctgtggagctcattaactcagaatcattaattaagtgcctgctgtgtgcatgggagaataaccacacaggtctcgccacagatgcagaagttaacagtcacagcggtggctggctgtccacagaagaccactaaggcaagtaaggagtcgggagcttcttggttacaacagaaaccagcgaaatagagttcaattattattgtgagttatagccacgcctcttctacgtgtgtttttcaaacaaacttgttgtcatggtaactctcttaaaacaagatgcaacaaggtttaaagagcctgagagctaattacaatagtgctttatatttagttacacctttcttctgaggagtttaatggacctcattcattaagctccatc

SEQ ID NO: 30542 - DNA, 1907 bp, Bovine  19866880870050
  misc_feature (1)..(1): n is a, c, g, or t
naacctcttaggagtgtctagtagggaggacagaatgtgctaatttcttcaaacataaattttaatcgatttgtaaattttcagttgcggtttgaattggtacctgtctaacgtttcccaattaccagagaaggaccacgttttgctaatccatgtcattttaagtaacgtagccataacagaaaacacccaaaggtgttctagggtgaactttctctgtatcaaaagttactgaagtaaagctttgaaagatacaaggaagcaaaatacttaatagtggtgtgtttcagagaaacacacacttgctaagtttaagcctgaatgttgtcttttttttttttttaaagaccctaaacggcccagtctatcactggtgaccctatttaaatgttacttatgtaaacagaatgtgtgtgctggctgttggtctgttcccttctcctctgggcgaattaggaaactaggaggttgacaaagccagcaagtcacattagatcaagtctcgaaagttctcccatgcatgggtttggatttatggcaggctcgtccccctgggcctctcatagtgtcccatgccagagtaaatccggcccgaaccattgcctggcctctggcagtaggctgcaggcactgaagtgggttgcacagtggaaaagatgccctccctatcagattaaatagattaaaataattattttaaggtaactcattgacctatgtcacgtttcatgaacgccaaggacagtggctctgatggttaaatgagctttgtttttgtttattcataaatcattgtttgctaatttttgtaattcatagttgagaatgactcccaggtgattatcattcatagccaagcatgtaagttagagtgcctgtgaggatagttgggattcccagaatcccaagtagttaagtaggcagcactggttttagaatattgattgccattcagatacagcagctgtaatacattctgttgattttttttagattgcattttttaaaaaaacacatgcctagcatgaaaattagctcatttctcaggaaaatttagagcactcagtaaattgataacaatgcctgttgttcactaaaagttcttctgtataagacttagcaaatgtcagaaatagcaaggtgtttatatggcagctttgctaaattgctatcatggtgttttaagcttcgagagaaaaacaggtctgaaataaagtaagctaactgtcatgaagccttttccctctcagtggactaagtgcaggaaagtttctgaaacctgtattctgcattttagcaggaatgtttggagtgccttttttgaggtggacaaaactatatgggcttccttggtagctgagctggtaaagaatccacctgcaatgctgggttccatccccgggtcgggaagattctctagagaagggcatggcaacccactccagtattcttgcctggagaatcccatggacagaggagcctggcgagctacggtccatggggtcacaaagagttggacacgactgagtgattaacacttatgcttacagaaatgttgtccaggatagttcagagatttctgtatatcctaaatcctgtttaccctattgttcatattttacattcttatactacatttatcacacttttgaaagagtattcttaactaaagttcatgctttatttagatttctttagtttttaatctgagatcctgtttttttttttttcccccagttccttctgtaatactacactacatgcagtcatcacgtctccttacaataccttggactgtaaaagtttctcagattttccttgatgtgatagccttgagagttttaaggcatactagccagatactgtttaggatgttcctatattcatatttgtctaacatttttcta

SEQ ID NO: 30543 - DNA, 1086 bp, Bovine  19866881128139
  misc_feature (1)..(1): n is a, c, g, or t
nctggggagggtcctggagctggtgggcagcccagcctctcctcctgctgtgggcgagggtagggggtacagatcaggcctctgccccatccccccaggagcacctggaacctctaagcacacgcatctgtgtgcccctttgcaggcgatatataaaatggtgtcctccgtgatgaagatgccagaggacgagtccacgccggagaaacgcacagacaagatttttaggcagatggataccaacaatgacggtaggacccctgcatgtctgtgccacactgctgggagcagagaggcgtttggggcctttccccgcagcttctgggaccttgcccagcccagtgctggccagtgcaactatgctgagagctgggctttggagtccagtatcctgccccctgagcggtagtctcctcacttctagaatggggagactgtgtgcgtgtgggcatgtcccaggggagaagaggcaggtgtgcccatggcacattggacccccgaggggctgggatcaggagtcctgtgtggtggatggatggatggcccccatcatccctcctccaggccccagtggccccggggactctgtcgggaggtgctggcctgcagcagctgtgccaggcttgctgggaccacaccacagtagaagtggtaggttccaggggggcggccatgggggcctggcagggaggatgtgccccgtgtttccttctctgccttggctgtgagcttctttggggtacacgccggggagggtaaccatgaaacaggctggatccgcatgaagtgcagccccagagccatgtcggatttgcttttgaaggataaagaaatgcagcatttagaaaagaaaaagagaaaatatcctctgcactgtgcttgggggttgaaaataagctaatgcatgggaaagccccccaccccccggccaaaccttaaagtgcagtttgcagatgaaggccaaggactgagccagcaggggaaggggtgcggcggggcctgcaggcgcatctacccatggagacagttttcaaaacatgatcaacataagacaagacggcctttgcgcctggcatggcctttggg

SEQ ID NO: 30544 - DNA, 992 bp, Bovine  19866881165598
  misc_feature (1)..(1): n is a, c, g, or t
nttgagttttatgctccctggtgtggacactgcaaaaacctagagccagaatgggccgcggccgctacagaggtgaaagagcaaacgaaaggcaaagtgaaactcgcagctgtggatgccagtgtgaaccaggttctcgccagcagatacgggattaggggattccctacaatcaagatatttcagaaaggtgagtctcctgtggattacgacgggggacgcaggagatccgacattgtttcccgggccctcgatctgttttctgataataatgctccacctcctgagctgcttgagatcatcaacgaggacgtcgccaagaagacgtgtgaggagcatcagctctgtgtcgtggccgtggtgccccacattcttgacacaggagctgcaggcagaaattcttacttggaagttcttctgaagttggcggacaaatacaagaagaaaatgtgggggtggctgtggacagaagctggagcccaatctgaacctgagaacacgctggggattggagagtttggataccctgctatggcagctattaacgcacgcgagatgaaatttgctctcctaaagggatcgttcagtgagcaaggcattaatgagtttctcagggagctgtcttttgggcgtggatctacggcgcctgtaggcggtggtgctttccccaccatcagcaccagggagccctgggacggcaaggacggcgaacttcccgtggaagatgacattgacctgagtgacgtggagctggacgacctggagaaaggtgaattgtgagaggctccgcaaagacttcagctttcttttcttgggagcagattttcctgtggtgaaggaacgtcctttccagtccaaggaacctaccagtggcctttttaacggagaagtaacccttgactggtcatttgaaaacactgcagcagtgaacttttgcatctcaagaaaacaatgaaaaattctatgagttgtcatagccagtgaaatgagtt

SEQ ID NO: 30545 - DNA, 746 bp, Bovine  19866881255401
  misc_feature (1)..(1): n is a, c, g, or t
nctctctctttcttgaggtcttacctgactccccctacactagctccaaagagatgtgacttttatttttcttctgaaattagaagaattatgattctcagatcttcttggtacctttcttaaggctcgtatcacattctacccttcattatgactatataattctcctatgtccctaaatagttgacagactccctcaaaagcaggtgttcggttttcaaacacacaacactgccttacattcatttttaaatgaatattatatataatattctttgaaaaaaatctcaatttgaaacaaattaactctttatcttctataattcagagtcctgaagtaagacaactctttacagctagatgttgaaaacaataaaaatataacaaatcacatacaaattttctctgtagtaggtaaatcctataaaaggtagctgatttcccacaaaagccttgggaattgggaaggtttctacatctcctttatcatcttcaatgtcatcaaaattgctgctgtctatgtcactgctgagttcaggtaccacaggagctgcagctattaaaagaaaagaaacattgtttaataataatatatatgatttaaaaagacagaaaccacccctgttatgttttatattagttattatagattattaatgttatattgatattagcacactatataaatattaatacattatatattgatatttgattagcaaacaatactatattgtcatgattta

SEQ ID NO: 30546 - DNA, 495 bp, Bovine  19866881327374
  misc_feature (1)..(1): n is a, c, g, or t
nccctcccccacccccccctccccgggaacatttgccaagcttgggaacaaggaggcttggtgtccacgctgttcggaaaccagaacaaaaccgtgggcctgtaccaggaagggacttggaaataagacgccttagaaatgcaggatccttggaggctgtactctcagggacaagaagatggaacacggaaaaattaacagagcaagatgtcaaggaaacctttcaattcccactcctactccctaagaagcgaaagagagtcctccatgagaagccataatcacatacctgccctcgttgggtatggagtttgaactgacactatttggtctgcaaaccaaaatcaagaaattatctatgagtgacctagggttgacggttccctgtgtgcttggcagaaataactgcaaattctctctggagcagcatgccctcaacccaaggtgtataggagttccaagataaatcccagtcttttgtaagatcaaccttaa

SEQ ID NO: 30547 - DNA, 1357 bp, Bovine  19866881329557
  misc_feature (1)..(1): n is a, c, g, or t
natgtgcctgcatgtgtaggaagaattaatgccttttacaaaaacataagtacatcatggttaaaatccacatttcatacaaggagatctaatatatccatctatagaacaggaatcttcttccctatccaactgtgtatgtgtgtgtgtgcacgcatgctcagttgtgtctgactctttctggccccagcaggcttgcttctctgtccatgggattttccagggaagaatactggagtaggttgccgtttcctactccaggatatcttcctgacttagggattgaaccaacatctcttgtgtctcctgcattggcaggcattctttaccactagcaccaccttggctctctatccaattatgtatgaataaaacgtccagggatttcagcctgactgccccagacacaggccaagaggccatccaaatttcatccgtgtttgccctggacgagagcgtatctccctctcaccactttggaactacaaacaccatggaggcccaagttcagcttctggggcctgaagctctttcttgctgtcttccaactcttctacttaggcccagggctaaggaagccattgcggggcctggttcttggcctgcagctcagctgtggtggacaccccagggccgactggctaggaacagagacctcagtgggcacacgagcagctctgactccctctgcagtcacttgactcaatctcctcttattattattattttttaaactcaaagtccaccaatttaaaccacttttaaaaacaatcatcttctttgcagagtttccttggtggctcagctggtaaagaatctgctcacaatgtgggagacctgggttcgatctctgggttgggaagatcccctggagaagggaacagctacccactccagtattctggcctggggaattccatggactagtgcatgggcttgcaaagagttggacacaactgagcgacttccattttcatgcccagtttacaatcaggcttcaagatcgtgacacacattaaaaactgacattatacagagacttacttgttttccagagctgtagccactgccccggccgccaaggcggtctttcacaagctggcgcagagcactgagggcagcgtccacgatggcctcaccagttctgccacctgcagggagataggggcatcaggtgaacagcagtgggcaggctgagtgtctatatctgatgctagctaaagactggaacagacatgtctgtcagcttcatctggtgttcaaatagacctaacaactcgagtgtctttaagacaggaccagtttcttctaggatgttatttcctgcttaaactttaccctgggaaaactaattcct

SEQ ID NO: 30548 - DNA, 712 bp, Bovine  19866881370032
  misc_feature (1)..(1): n is a, c, g, or t
naatgtggctgaaatggaaaaaaataataaattatactcaccgacatctttcttctgaagtgccctcttcttcctgtcagaaagccacttaaagaaagtgaagagacttcattttaaaacacatttacttgaactgtctctctgcttacaaaaaataatacgtgctcatatttaaaaactgaaacttaaagaaatatgtaacatagaaaaggaaaatactctgtaatcctaaccctactgttacatcctggaatacagatttttcctggtatgcattttcctatactagacaatatattttaagaaccaccatatttttacacaagagaaaactagctcatctaatcaacctaagggaaaggagtaagcctcaaatagtatgggttataactaatatatggaaccacctgaagtgaaattttaaaaagcaaaacattaaatggagaaactgtctcaaataaatatattttttacaaaacaaaaacctagataaatagctgagacttgatgataaataaatgatacttttaaaactcatattcacagacaccacattttgttctgtaattactataccttattttagctagcaatataatcccattgcatgaacaggtccaatgatgaagcaccataaagtacaattaccttaaaggtaaagtctccattttcaactaggggcaattcttaaagcgtattttggttggcacaa

SEQ ID NO: 30549 - DNA, 1301 bp, Bovine  19866881378183
  misc_feature (1)..(1): n is a, c, g, or t
ntttacttttgttttattcatagagaaatattttaggaatgaatctgtcataatattaatgctgagtagtagcaacagcaacacagtagtgaatgcatttactatgtgccaggctatattcaggattttatatatattcactcatttgaagcttatagcaaaattttacagtatagctactattattaccaccattttacaaatagtacagctgagactcagagagggtaagtagcttgtttaaggtcacacagctagtatggagtggaagctggattacttctcatctaggtatataaagagcttgctagaatttccttattgctttgaaagggatttttaaaggttggatgaacaggtaatgataaaaaccagtaaactctcattatctttttttttttttttcacattggtttgaagtaccgattttattttcttaaattgtaacaccatgatgcatccttgaataataaaagagttatctgctctttacttccagaatttgctgtttataatagcaacatatttattgagtgtcttataaactctagacactgtgctgagcatgttatagttttttcatttaatcctcatgatgactatatgaagttggtgaacaccgttttgcagagaaaagaaaattcaagcctagcacggtggactcaacaggctggtcaagcctccagattggtgtttgatagcctgtgttattttgctttgggggaagattattgagaaatttgatcttttggcaggatagtggttttgaagcgcgcccttccgtgtctcaccccctggcaggtagagtgtctccccgcggtctgacaatccagggcgagcccttcggtgtctcaccccctggcaggtagagtgtcaccccgaggtctgacaatccagggcgagccctttggtgtctcaccccctggcaggtggagtgtcaccccgaggtctgaaactccagggcccttgtgcccagcactgggccttgtgctgcctcggtgcttttcatatgcagatgatcgagaacctgctggctgccgccttctccatggcagtgggttcctgtttgtttaggaagtttaggggagtgtctctccccctaaagcagatgctaaaactctctcccttatcactttactgttttagggagaataatgtttgtgacataaattcagtgcatggcttatttgccacaggaacgatagaggtaagcatacattgacttcattttgaaaaacatttgccctgcatttgctaacagagtttcatgtaaagacagggttactggttcctaagagcag

SEQ ID NO: 30550 - DNA, 797 bp, Bovine  19866881404325
  misc_feature (1)..(1): n is a, c, g, or t
nacgtttgaaagagactgctttatgagtatacattaattatgtccttacatgtgtatgtgtgagattcttgactgcaaagacgttatcacattcatttctacttccttctcgacagcacccagattaataagaagtgtgtggtgggaggggcttgtgaaatgtttggtggcaccctgatggatgggcgatggagggatatagtgatcaaccatcctccctgtaagaatctagccaatagcccttatacttgcgtccccaggcatgggctgggaccacgactctgaatattcagtcctctctcctttcgtgtgaaaggttaagtgagaaggagaaaggattgtttttctggcatttcttgggttccagatcagaggatgccctgtccagcttcttggctctgagtctgccctcacccagatctggctccattggccttctcacgtctgctgggatagaaaagggtacacagcacctgtggtctgaaaacagtcacagaaaccccttcaaaagccatcgtggccatgtaggaggtaggcgcacttctcagccttcatccttcttacagcaatttgggtgttcagctacgttcatttgaaagtcaatttaccccaggagatggggaatagagtgctctagagctcaaatgggggtgatttttgcaaaagtcgggcgctggggaaaatcaacatcactcccattttaaaaccatcaaaatcaaggtctatttgtttaagctgtttatttggtacagacaggctgccaggactacaaatgaaacatttgttcctgctgatgg

SEQ ID NO: 30551 - DNA, 680 bp, Bovine  19866880446492
  misc_feature (1)..(1): n is a, c, g, or t
naattttaagaaaaaggtgatggctcttttaattgctctaggtcaggaccttaagttctcactcaaaacacacttattaatcccaaattagagctaaacataatgcacataaagagtagttttgatttatttttgttaccaggattttcacagtttgcctagcatgtttgtacaatattactgaatcttccaaatttgaatgtcagatgttttaacaaaataaaaaatatcaagaagcaagtttctagaatgttgttcaccatgtgactacttgtctgattatgtcctgcagtggccggtccatgagcggaagtgctgaccgcatccaaaagctgcggaaagagtattatcaggctcggagagaaggtttcgctttatatgaggatgacgaaggaagagcaagacctgagtatgaccttcactgggtaagtctatgcctgaattcattgcactcatctttactgatgtagttaagagcagaagaacatggctaggaatgtcctatacatatcaatgtatatttaggttacttgggtttcatggatatgaacattacctaaaccacagcccattttctcctacagaagttgtttctataaatcaaaccacactaatgcacagtagttcattttaattgctttcatatttactccctcttggacttgtatgcctgcttgttt

SEQ ID NO: 30552 - DNA, 1135 bp, Bovine  19866880482569
  misc_feature (1)..(1): n is a, c, g, or t
ngattactggttggttagtagcatattgttttgcctccatgtgttgttgttttcctttcttttttttttttttcctgtgtcctggtgtgcatgagaccatgtctacaccaaaagtggagtcttgcttcccctgctactgctactgctgctgctaagtcgcttcagtcatgcctgactctgtgtgaccccatagacggcagcccaccaggctccgccgtccctgggattctccaggcaagaacactggagtgggttgccatttccttctccaatgcgtgaaagtgaaaagtgaaagggaagtcactcagtcgtatccgactcttagcgaccccatagactgcagcccaccaggctcctccatccatgggattttccaggcaaaagtactggagtggggtgccattgccttctccctagtcttatggaattcctgtgatcaaaccccactggtcttcagagccagattctctgggggcttttcctcccattgctagacctgccagctggtgagcctgatgtggggctcaaaactccttgggagaatttctgcaatataattaatttccagtttgtgggttgcctacctaccaggtatgggccttgattttatcatgattacatgcctcctaccatcttgttgtatcttcttctttttctttggatgtaggatatcttttctggccagttccagtgattttttttttatcgatggttattctgcaagttagttgtgattttggtatcttcataagaccaggtgagctcacgtccttctactctgccatcttatctccctaaaaacttttgttttaaatatgtgtgtgtgcgcacataatatttgcaatcactgagaagttctagtaaaagccaatcctcaattttgagcaaagagtttttataaacaacagcaacccactcccccaccaccgaagaaagaaaaatccttccagcactctgtgaaccttaaagagtgtttttataggccagctcattgtttgtcttctctctgaaaaattagaaaggataactgctttgatgagttctacagaaaaagacaatttccatgatttcatttcttgacaaagaacagctacctcacttggtttctgccacatgtaagcaaattcccagatgt

SEQ ID NO: 30553 - DNA, 1369 bp, Bovine  19866880524782
  misc_feature (1)..(1): n is a, c, g, or t
nctctagttattagcagcaagttataccatagacttaacttctcttggcttatgggaactcctagagactttgtcccttgagtccttcctgctggactgctcccaagaacatcttttcttcaataccctgaggatgtgccttcagagtggcatggcaaaccttgcaaacaaggaagaggtctgtagggagaaaaagacggaagacacttagtcatttttcatcttgctctctagttgtcttaatgatgtggtgaaattaaaattatacattgttttctagaagagtagctcccagactttctgcgggctaatcaatgttataaaaatagaagttactataaggcaaccaagtttttattttgtcaagtaaaagcataaacaaagctccccgtttgctataatcagtgtttcataaagaaaagcacatttacgtattaacaaaatagaaaagatataatcatagaatgtgggagaattcttcaaattaagcaaatggagttagactttcccgaagtggagttgtacttatttttctcattgtgttgctacttggtaagaacttatcctagaccagcatggaataataagcaataagcactgtttttgaggaagggagggatgactgcaaacaggaggaaaatgagtaggaggagaagcaaggagttactccctgctgctcataactgaccttgtggaatcaccaactgcccagagggagactcagttcatcctgtccttctcctgatgcttctgctgctaaggattgctcttgggttgagtagtgaaagtgaagtcgctcagtcgcgtccgactctttgcgacccccaatggctgtagcctaccaggctcctctgtccatgggattttctaggcaatagtcctggagtggattgccatggaacctatatcttgaaaactgagttcaagctgttacttaagaatttctgaaaatattgacagacaacagcagtacttttaactttgaggaaaagagcactttaagtgcattctgtcatcttggttacttactgaaatctatcaatggtgaagtgggtaataagccattgtttgcattggcatggcaaccatctacttaaaactaattatatccatgtatgagttgtcgtgtgttgcttcaagcttgtgggtggtctacagtccttatttcttacatcatttcaaccacaggtacccctggatgaacagctgtgagcacttggtattgctaaagtccccccacctaacttttatcgcactgcctagcttttctgttggcaccttatcttaccaagatcaagtgcttgacatccttaatcatagatctatgttctagtgattttattcttataattaaaatcatctcagaaaa

SEQ ID NO: 30554 - DNA, 3323 bp, Bovine  19866880591027
  misc_feature (1)..(1): n is a, c, g, or t
ntaagtgctcgcagtgggtaactatttggacttctggatttctactgactctagggaaaagggacatcctcatagaaaaatcaatactttggaaaatagtgctctgaaataaatggtaaaaaaaagggaggcattctttcctgcaacttagttatataaaaacaaatctataaaaacaaaatctcatctgtgtactggtgtaattaaaacccactgtatacatggtcctatgttaggtcctgttgataggtgcaaaaatgatgggtatagaacaatatcctttgtttcaaggaatttataatctaatagtggtggaaagggtcagtgaagaatcaaaatctagtctaagatgttttcagtggcactggtaaagtggtaaactaatgttatggaagttaaaaggaggaagagctaaagaaagatggcagagggcttgggttttagcatgggggctttgaggtattagaggcttcccaatggctcagcagcaaagaatctgcctgcaatgcaggagatgctggttcgatccctgggttgggaagatccccctggaagagggcatggcaactctctccagtattcttgtctagagaatcccatggacagaagagcctggctggttgcagtccatagggttgcaaagagtcagacacgactgaagcgactgagcccacatgcgtgcactttgaggtatcttggagatagaaggacgggtacttaagcaggcagtgagatacgaagattggccaggttcattttggattcatcatcatagggataagaattgaatctataagaatggcggagggacttccctagtggttcagtggtaaataagctacctgccaatgcgggggacatgggtttgacccctggtccaggaagattccacatgccatggggtaactaagcccgtgtgccacagctactgagcctgcgtcctgcgtgtccttgagccatgctctggaacaagagaagccaccggaatgagaaacctgtgcaccgctactaaagggtagctactgctcgctgcaactagaggaagcctgtacacagtgacaaagacccagtgcagcctaactagtaagtaaataaaatttaaaaattaaagtttaaaaaaaagagaatggaggaagcagctcagagagacgctatatagaaaacagggctagaaagaataaatacatgtataactgagtcactttgctgtgcccctgaaactaacacaatattataaatcaactacactccaatattacacaaaaagaaaaggcctggaggcagagtcagctgggagcatcagcggcatggtcagaagcctggggcaagaggtgagagttcagaggctggtgtggaaagagagccaattctttcccaaaaaagtagcaaaatgaggatttgaggaggaaggagggttgagggaagatctctgttttctctgatggaataaaatcaagttcatggggtcggtctgccacctgagcctggctcagctacgagtcctgacagctggaggcttggtcagcgtgtcaggtcctgagccgacaggagtatctctgtcatatcccaggacattcccccaccggtcaatagcgggcccctcccttaccatatctgtcctgtgacaagagcgtcatgtccagccttgctggttaattcacaatggtgggtctctaccactcaggagacactgggtctgaatctaagccttgttggccaggggccgtggcctcttaccgagacctgagttagctcccatgtccctgacttgagctccctatctataagaacagcaggccactttagtttgtaatgtccccttcatgatcatctggacttgggtctttctttacgagctggctgatccctcagcctcagttatgcccccagcatatctccctgagccactggctctccttttctgcacgctggggaactcccagcgaactatgcagctgagcctctgcattcacagttgtaagcacagggaggaaagccactgccaagggcttaatgatatagatgagagaagggtagttgatgatgtagggtccctgaaaagccagtgagaatgagctctgctatacaggtctgactcattaaaaaagggaacacatcatttccagagagaaaattaaaaagaactaacagtattaaaaaaaaaatccttaaaattcgtcagccagcttcttcactaagggttttgctcgaatcactgaatttaatactcatacaagcattatacagagtccctaatatcatccccaatttgcagattaaaaaactgagcctggaccagttggatacttgcccaagatcccacaggtgagaagtgatggatggggctataattatggcctgactccaagtccatgccttcgcatctccccttgggaagtgtgtgttggtgaagacagagcgagtctgaccggcagggagctgaagctgaggaactaaggttgaatgtctcaaggtcgtaaagaaaaggaagtgagatcatctctagagattgggcctggggggcttagtcatctttgcagaacttaacgggagcagaaaagggttggaacggccactgtgggacagtcaagggagttgacagcacgactaaaaggaattctggacagcagcaggggcccagctggggctggataatgtgaattttgtagtggaaccaatgaacgcttttctgagtttctccagcaacctttcatcgcccttgcatgcaggaccacagaagagatggagagcctttttgctccctcctcaggactcaacactcgattacaagcccggaagagcaacatcatgtgctgatgcactgagccatctgcagagaagggataatggggtcccgtgggggtcggggatgggccaggtgggaatgatggaggctggagatgggagaggagagagtttactgccgaacggccggaccaggaggaggtctgtaaaatcagaatggggcctgggagaattgaaagaggctgggaggctgaagtgaaaaagaagctgtttgcaaaaatacatacattgttgttcacacgttatagcagcccaggaaacagccacttccctgctcacccagggtgagtaataatttgtgtcaggcaagaatagggggaggctgatttccctctgtttactaccaaaaaaagtgggggccggacggcctgggtaaaacgctggccttgggaaaagcctgacgctctctaacgaggttgtattacaaccacgctctgctttccaaaacagcaccctcaggagaaaagaaataaagtcatttttcttcagaggtaaaagatttaacatgccttaacaat

SEQ ID NO: 30555 - DNA, 1092 bp, Bovine  19866880627789
  misc_feature (1)..(1): n is a, c, g, or t
natgtaggtcctcctttatagctgagacagacagatctcagtctgaataacttctaataccactgaagtaaagcaaggggggacatacactcttagtttcctggaaaactaaaaacatacagaaaaagtctgtttggggaaattctaagataaggatgatgaaatatagaaaaagtattaaccggaaagcttcctggccagctatgaacttttcttgtgctcctggggcaatgagggatcattgatgtctcttccccaaacagtttcttgatatcagaggattaatatttccctgagtcacagctgtgtcatgcacaattgttacctctgttgatgtttgtccccagtctttctctcatgatttttcctgttaaatttgctttcatttcactgcttttttttttcctctcacttctgttcacagctttgtgaggctgtgtgtagggatttgaacagtgaacacagtagattacttggagatgtgctttttagtttctgcaaacagagccaaatcagtttgggaatcccagtgataaatgccatatccatagagagttaaaattcatcagttgagcaaagtaatcagatttttttcttaaaacatattaccatcaatttttaagtgacttttaaagaataatgagaaatctcttaatgaaagaatctatggccagataagtgctaatagtaactgatataccattaactctactttgctctatcccctctctttcaaacttgatgtcctcattaatttttttttttttttccatctctgagagccctactcttgggactctgctagacttatgtctgcctaagttgtcagcttccaggagtgacaaatgtagacaacattccctttattatgcatgagctaggcaaggaaacttggtactcaatgcccatccatttccaagacctccacctccgtgccatcctcaatcactgctagtaagggagcacatttgaggaatgcttggcaaagggctactctgatttcttaaggctgtcatgtaagcactgacttgactgcttttcaaacaaatgtcctgatccttaagaatttattcctctgatttatcctgttta

SEQ ID NO: 30556 - DNA, 1164 bp, Bovine  19866880759901
  misc_feature (1)..(1): n is a, c, g, or t
nttatgaacctgactttgataatcttcccatattaagacattctgctaaaatgctacaagtttagaggaaaggcaactgacaatatcccatctaaacaaaaagaaactaatcaaaataagctgttcaattattttccttttgcaatgtgaagtatattattcctgaaatatgtatttacgaatacgtatccagagaagcaaaagtacacacactcgttcaaaccattatttctgaagtgtttattttctctaatttaatttcagtaattttgtcaaataactgggtattcagcttatagacttgcttagaacatctgctagtttagaaactacagcaaataaaatattttaaaaataactcttggataagcctttttaaccattttgtgcctaaattttccttccttgtaaaatgttagagttaacactacaaatctttaagtctcttctaacctacacacatttataaatgttaccttgtatataacttctacattatgttaatcaattacaccttattaataagtacccaaatgtagttacataattataattattttaaagctgaataacaaagtaaagcaacctgcaacattataaagttataaaacatttactgggatttaaacattaaacctcatgctagcaccatccaagtcctagctatatgtacaggggacatagcctcaacaatctctcttctgattatcttcggagaaaataaaatcagacatcttctgcccagctctgtttgtgtctcgggtctaagatacagttaccatagaaactatgattgtggatacaatttacaaatttggcttcatccatcagatgcactttgtgtgtgagagtgtgtgtgtgtgtgtatgtgggtacatgtccatatgtgtcttgccaataagcttgaagagcaaactctggctctgtgtctttaattaaagagccagacaccactcctcatttcctttccccatctgtctacctacaaatagagacattgtaacactggctgacatataaactcttacttggaagatgacaaaagtctgatgaaaagatgagaaaaacagtattaggaaaagaattccccaagaaatttgtctgttcacctgtcctgtattttcaagaacagaataaaagccctttggtggagttttggttatt

SEQ ID NO: 30557 - DNA, 2222 bp, Bovine  19866880788298
  misc_feature (1)..(1): n is a, c, g, or t
ntctctttaagatgttggacacttacgagtactaacattaaaactagcttttactgtgctttctcatcccactgattatttattgtttgaaaggataaatacaggaaagcaattgacctaacaatggcctattcttgattactcactgcattaaatacagaaattatgaagaagaatctgtctctagcatcagcaaagattatataatgaaaaggtatgtggcttcgcctaaaagattaatgcaaaccacaggtcacaagaggcttgggctaagtgtggtaaatcaacacaaatctagcactactgcagagaagtaggtcaaagcctaaggcttctgatatgtctttgttcctccatacctttgagcaggatgttttgcacctatgggacatctaatattttttaacagaatgaataaatgagggagagaaggatggcagggtgtctggcaggtgaggagctacatgaatgctctttgcatgtttagtgaattccagccttttaaacatcaatctacagtgataagtgtattttgcatcatgtcccagtattcacccacatacatcccctgtatacatatggctcagagttgaaagaatctccctgcaatgcaggagacctgggttcaatccctgggttgggaagatcccctggagaagggaatggcaacccactccagtattctcgcccgggggaagtccatagacagagcagcctggttacattccatgggatcgcaaagagccggacatgaccgagcgactaacactttcacttttaccttatttttaagacacgatgctattgcacgcttagagactacagcatagagcaagcgtaaagtctcggggctcatgttattgtgacattcccgttacaggtggtggtctggggctgagctagcagcacggccacgtctgcctgtgtatgtctcatacaaattaaacgtaaacatttttagtgaaattggatcatactgtatggacttttttgtaagcttgttcacttaatatctgattatttatacaacattaatacctactttatcactttaagtagctgcctcatctcctttgtaagtagacaacacaattcatcaacctaatcctcggttgttggacattcagattgtttccaggttttcaccattatagacagaatgatgaatatgcttttcgctacatctaatgtgaatatcgaaattatttctttacaataaattcctaggagtggaactgttaatttttaagcatgttctagttggagaaggcaatggcaccccactccagtacttttgcctggaaaatcccatggatggaggacccagtccatggggtcgctgggagtcagatatgactgagcgacttcactttcactttccactttcatgcactggagaaggaaatggcaacccactccagtgttcttgcttggagaatcccagggacgggggagcctggtgggctgccgtctaatggggtcacacagagtcggacacgactgaagcaacttagcagcagcagcatttttaacatctttattgaatttgttacaatattgcttctgctttatgcccttaggaataagggatcttagctcttgcaccagggatgaaactgtaccccctgcatcagaaggcaaactcaaaaccactggaccacctgggaagtccctacaagtatgttttctatgtctgtgagcctgtgtttgttatgtaaataagttcatttgtatcatttctttagcttccatatataagggatatcatatgatatttgtctttctgtgcaattttaatggctgcttagtatttactaatatgaatacagcttcagttcagttcagttgctcagtcatgtctgactatttgcaaccctgtggactgcagcacgccaggcctccctgtccatcaccatctcccggagcttgttcaaattcatgtccaagtcagtgatgccatccaaccatctcatctgctgtcatccccttctcctcccaccttcaaacattcccagcatcaaggttgtttcaaatgagtcagttcttcacatcaggtggccaaactattggagtttcagcttcagcatcagaccttccaatgaatattcaggactgatttcctttaagatggaatggttggatctccttgtagtccaagggactctcaagagtcttctccaacatcacagttcaaaagcatcaattcttcagagctcagcttt

SEQ ID NO: 30558 - DNA, 1194 bp, Bovine  19866880876062
  misc_feature (1)..(1): n is a, c, g, or t
nctgataggctgccatgggctgtcataatccagacaaaaaaagatcccccaccgtgcaaggcacacccaaggattagcttttcaacttgttttgaataagctctctgaagtttcacttcctgcgcagtagaaagatagatatgtcccaaatccaagcctaagttctaacattacattgttgtagaaaaatctaggtttctgttatggcttaagtcaagattatttctatcagacatatatttaggtcattacattaaaaaaaaaaaaaaacctgcatgataccaagtgagataaagagcttctttaaaagattaattggatcaaagctgctgaccttattttttttatgataagagaaattacctaataaggaattcttcaaggaggaacaattctgagtcttgttgagcatagaacaaaatgaggaatgaacttataaatgcctctgccagttctctctcccttcactccctccaaaagtggcttgacttcctaaggacctgactaaaacttataattagtgcctctttggcaacccttctatttcctactttcagttcacagctatttgcaagaagctttgtccccagcacaataatttgtattgccgccatttctgaaatagtaaaagtgatcaaatcacaagagaagactagataaattatgatttatccataaatcagatattatattgccataaaaattcacatttgtagaaatatacctgctagcacaggaaaatgccaataataaacaggtgggaaaaattctatataccactaaaatatttatatatttataaatgttaacagaggtcatctttgagtaatttagggaggaaaaaaaactgttaaatctgttttttaaataattgaacacaaatgtattcctatcatctcccttgactaacaggtgtttctctgagcaggaaatggcttttctaatctccgtatcttagagtacttagcatacggctctctacttaagagacactaacaaatgtttatttacttgaaagtatttctctcattttctgagcatgatagaataagacagtatatccagtggttgtttatttattagaatactataaagattttcaacaccgtagagtctggctttctctccccatcaatcctttgaaatcacgctcaataaagcaccaatcagcgtctcattgccaattcccacata

SEQ ID NO: 30559 - DNA, 1355 bp, Bovine  19866880893240
  misc_feature (1)..(1): n is a, c, g, or t
ncacactttagagaaggtaggccagtataatttgctgacgttttagctttgaattaaatttagcttctcatccttattagaatctaactgccaaatagcactctacttggattaataaagttttctaataagcatatcactttctagtactctgccgaggcagctgaaatcttgagtacggctaaagggagaactgccaaatggaaacagtattgatacattctctgtccagtacaatcattctttttattgtcaagcccagctctgggtaaaagagaacggactatgttagaaatgggatatggtcactatttatgaagccagtccagcagaagacttagaaaaccatgaaaacccactcaagctaatgctccagattaatttagaatttaaagtgcttgcaattaacattttcaggagaaactagggcttatgactggagtagagggacgagtaggtaagctactgcagggtaattgggaagcttttaagcaccactcattgcccccaggctgatgacagaaattcaatcttaatttagtccaaggctttgatctccattaaaatacagatggtgctggatgtctgtctctataagacaccattcatctgtatatgagtgaaggctttggttcagttcagtctcacagtcatgtctgactcttagcaaccccatggactgtagcacaccaggcctccctgtccatcaccaactcccggagtttactcaaactcatgccatcaaatcagtgatgccatccaaccatctcatcctctgtcatccccttcttcttctgtcttcaatctttcccagcatcagggtcttttcaaatgagtcttttcttcgcatcaggcggccaaagtattggagttttaactttagcattagtccttccagtgaatattcaggactgatctcctttaggatggactgattggatctccttgcagtccaagagactctcaagagtcttctccaacaccacagttcaaaaacatcaattctttggtgttcagctttctttgtagtccaactctcacatccatatatgactactagaaaaaccatagctttgactagatggaagactttgataccagaaggcaaagttggtgaacctgagggcctggaagacttggggtggggttggttgtgctgaagtggggcttccctatctaaaacctctccatgctccacattcttctccacgtctagctgtgcactgaactaatggtggtactgaagaccagtcattgatggccaaaaaataaaaaaaagtacttcacacagcctgcttcggtgagaagattcaggaagaaaattataactattttagaaaaaccaaaaagccttt

SEQ ID NO: 30560 - DNA, 1120 bp, Bovine  19866880902517
  misc_feature (1)..(1): n is a, c, g, or t
ncacacgacagacactagttccctgtgtcctcggcgctatgacgttgctattctagggtgggcaggaccagacctaccccattcattcatcaaatcttaacacaagtcagtggtgggtgaaaaccaggactctcttactgactgaataaagctttattttaatgcaaaataaacaagaaaaatttatatattcatatataacaatatccaaaatgtttctgtggtacaaatgggatcatccaaaaaagactgtaaagaattcattctccaccctcaatcatatgccaaaatatgatttcacataatttatcttcagaacttatgaacagacttggtatcatataagcaaaggaaaacactagaaaaagtgactgtataaacagcaggttttgtttgtatgttcccagtagtaaacagcactgcagtcagcatagatggaacgtaacacttctgaaaaagctgagtcaggagacagtctcggtggttagttcactctccattctgcgctgtagtgaagcccaccttcaaaagtcaggctgtgtgagattctagtactatttaaggacacgagggagaaagagttccccttagaagctgagctgcatatgagattctaggcttattttagatacctcactttcattctcttttttatcagaaaggtgactttgtagggatatcttacggagacttctctttctggtctcattgtggcatcatttccacttaagtcggtgtgaactgggagtacagagaaataccatcgtgggctgtttctgactcccaacaccctcctgcctaattgcactagatctgagatatattttgctcacggactcagaaagcagcaggatgtctacccaatttagcaccaatgtgaaggctgttcattgtaaatttcagagtttaatgctgatgggaattttatagacacaccttgctgtccacactgaactctccagctctgtctgtccccctgaaatgctaagatgctcctccaaagaaaaggaagggacataccaaccctatgcatggcaactctaaaactcatcaggtggatttccttcagaaaatagatttcattcaagaagttcataaatcttcggaaggaataatgaac

SEQ ID NO: 30561 - DNA, 1309 bp, Bovine  19866880948017
  misc_feature (1)..(1): n is a, c, g, or t
naagatgtggaatccatatggttagtgactcgtgttagatctccaggttgtctctgtccctcaggatcacagtttataaaagaaaaactgtgaatttagcattgaaaggaaacagatttgagtgtcatctgtatgctgacaggctgcatgataagataaagaactaacctggaagctaacagagctgtgttctggcattagctctgcctctcaggcatgctgtgacatttctattcctctgggtccccacgtgtaaaaggcagggaatcacaggatcttttaaactcttcagaaaaagatacttcgtaaatataagctgcggtaataaccactgatagaacaaaacattaggctgtcatcatatataagtagggaatccttcaccgctgcctatttaagcactgcacagcaaattcaagagttgagtcaacacttgattattagcctacggggattattcaggaaaaatttaaaattctaattcctctgaccccaaaatatgagttctttctcctttccatcactatatgggtgcttgtggaatttaaaactaatttcaatacttccagagttgaatatcatgaggaaaggaaaaacaggaatttaaatgaattctgcagagttccaggtgaataaagatagagagacagacagacagacaggacagaggcagagataatctcttgctttacttgttggagtgacggtgtcactgactccttcccaccgtgtcctggccactccgtgcactcactttccctccgtgctgtgctgtgcttagttgctcaattgtgtccacttttcctctacctctttccaaatcctattttcaaatactactgaattagcaccccgtgatgactatgtgcggtaatagagcaaaatgtcacttttcttcaacagagtttattaatttattcacccaaagactatcttaaatacatcagtgtgaataataagaggaaaataacaaatgacacaagtaacaacacactacgcttggaatgtctttccttctggaaagataaatgctcctcgttgtctctaagacgcctgggcacaagtccctaaagaagatacatttaatgaaagccaactatcattaagttttttttttttttttcaaatgatattagttttgcttttcccttttctctagattaaaaagaaaaagtttttgagcagacatagccctgatgtgatacctggagggcagcaagaagggaaagtgagcatgttatctacaaaatagtctgatgctacgggcgaagaagaacgtctgacctgctaggctatagcagactttcta

SEQ ID NO: 30562 - DNA, 1508 bp, Bovine  19866880997547
  misc_feature (1)..(1): n is a, c, g, or t
nctacataagtggctggctgtctagtgactccttttttcatctcttagaacattctacatggaaatctttttgtaattttagtatttattttcttaaatttgagaatgattctggtcacctgggagtgatttaattaacccttatgttttccattattgatttttaaactgggtgatgaaagacatttttaacgtatattttaaaattaacctgagaagaaaaagatgtttcttggccacaagcttaattcttatttatgataaaaggtgacaggggtaaggtagtgagagaagttacggaaggtgatgaaaatgagtttttatttccaacattcattattttgaattaacctatgaaaacttccacacacggaacatctagtagctagaagaataaaaaagccacttaaaggtctgtttagagtatggacttcatttatttgtcttctgtcatcaaggtataaaacagtatatctaggcaccagagtacttctcacacttcagccccactgctgaattgttttatttatgatcattactttccctctgccttcttctgggagaagagaatgcagaaattaaaatttataaattcaaaatatccacatcttaaagagaatatgtctaatattttccttgagtgaaaaaagagggacggacatattttgctttcctttctttgcaatgaaagttgacacagttattttgtgttattataacactcatcatttctccctctaatttggatggtttttaataaagctccattgattccactgaaaggcattcctcctggcaaaagcagaacacacacactgattgctaaatatgcagcaattatcatattcagcagcacactttaatatcttatttatagatgtatctatctgtaatttgctttaattaagttgcattgattttaatgacaggagcgatctgcagacaaggggctggtgtcatgctcctatgagtcctggtctgtcattcactctttaagatgtggtcctacaccttcgtgactttctttgggctccaggcaagcccatccaacttagccaagtttcagagaaattctccaagtgttgacacctcggaattgatcctcttgatcacaggatggtatgaactgaaaggtaacttggtggaacggaaagggcggctgaattttgaaatgggttcgggtgtatgtataatgccatcaccagccccaaatcactctactttgacagctgctttcttagatgtggcaacagcatcttgcccctcttattgctcagctttgggttttgctttttgatttgccaataacaccaaacagccctcagaaggatcttgggacctaaattatttttgattttttgactatttttcatacctcctctgggtgaaaattctgggaaaactggaagcaagaacttctaacagttttgcctttcatggcatccgtgttcaaaagtgaaggggctggctggctggctggctaacaaacacaaagaaacataagagag

SEQ ID NO: 30563 - DNA, 1391 bp, Bovine  19866881035109
  misc_feature (1)..(1): n is a, c, g, or t
nattggtatttatgacttcttttcctaaaatgttggtaaatgtgtgcatccagaatatgccagtcagaaagccggcaggatctctcaggctgcgattccatacgtgtttccccatcttgatagcaagctcaactttgatgtcaaactgttcatctgtctgtggcacttactacctaaccatatttccattcttaacttggaaacaatacgatagacgccacattccacattgctaccttttttagttctagggaggaaaatgctcaattaattgacatgagaaaatttaaacttaaaaaagtccctctgagttttggcttggtgctttgtctttaatgattattgcatttttttctagtttaacattcttgagttctgcaaacccaaagcacaacttcactggtttgatttcctgttctttagaaatatcatctaggggtagcacggagtaggggatgcatcaataatgagaagtgattttaaaataatttgaaatgatttttctattcatacatccacaccccctttccaagtaaatctcagtcagggatacaagtggtgattgagactccattagctttcaagatagtgaagaagtcaaacgaaagatttgcagctctaaataaaatagcacaagtgtaggaccatcactagacatgcaagtgtaactacaatgaaaattatcttgaacaaatcagttcccaggatgacattcaattcttttgataaatatgcctgatacgatgaagtacagcttccagaaagataatggagcagataattaatctatttggaaatataaacacacacactcatacacacacactcacacacacatacacacactgcagggagacaaggactgttggttagcaaaatcttgtcggaacaacctaaatgtccttctctagaagtgtgtgtagcctcagataaggggaaaaaaaatagaaaagacatttttgactgcagtaacgtttttgattctgtggtgtaaggccaaaatcaataaaggacaaaagagccaagctctcacttcttttacatatgtgggcggtgtttgggagcgctggtaaacaagtcattaatgtttcagtttcagttgtctacagcacaccaaatggggcttcccaggtggtccggcagtaaagaatctgcctgccaaggcaggaggcgcaagacacacgggttcgatccctgggttgggaagattctctagagaaggaaatggcaatccactccaatattcttgcccagcaagtcccatggacagaggagcctggcagactttgtgatcatggggatcacaaagaatcagacacgaccgagagcatgcacacacacgcataccaagtagtcttctctctagggataactgatcagttaaagaaggg

SEQ ID NO: 30564 - DNA, 3096 bp, Bovine  19866881068525
  misc_feature (1)..(1): n is a, c, g, or t
ntgctttactcttattccctgacttggtctctctttcttccctttccggcaatgatgccctaaaaagattaaccccctctctgaggttggagccaattctttcaatggatgccaaaagttcacctccaaaattcaattgatgagctgtgtctctaatggaatatgatttttgtttactttagattatgcaattgaggaagttgtgctaaatacattggcagaatataaagtgccattaagacatggtgtcactgtttcctgctttgctacgcaaaatgcatccatctttgcaaagcactctcttatctccagcagacagtttttaatagcaattttcaaataggagctgtaataaaggccaaatctattttgttacagcagcgggaactaacaccagttatctgctcagggctagtaagctacatgacaactcagtttccaccacccactgggaacaacacacttcacatgcaaatcaacaaattaggcagttttcacagatcctatttcctcagatttaaagcttcataaaataccacatgatttttgcatttagatacatgagcaatgaagtctaaaatagtatgtttttgtgtttatttgcttttataattacaggtaaattataataaaggactatgaaattcaataaccttctctgcatttattataggcaattaaatataaacctatatttattataggcaattcttattttaaccacattcatgtagccttcttggtagacagatacctccaaagtgggaacagaaaaaatgtctcatttcaatacaggatgtctaactattcaaagtagtgggatgatatgaaaactatcttgccagccttgagtgaagggaggatggtcgtcagcaaggattcccaaggtgatccttgaacttaacacttaagtaagactaaaaattggccatagatatagagtggccattggtatagagtgggttcaaggctgggtaatacatttgacttccaaaatattgatggctgaatgctttcacggtacagtctgacacttgcaggtacttatctatggctgcaggacagaataaaggtgaggcactgcatgacatcttggaaatttcagcatttcaaggcactgtatacagccactttgaacattttggcaggggatcagatttatctttggggaggtcatacggctaatgctgcagagggtggttgaaagagaaacttaagactgctcagacagccactgttttaatctggggagaagctgaactaagggagtacaacaaagggtaaaaagaaagaatttagatacttagggacttggtaatggattgaatttgagggggaggggaaagaatgcatcactctcttgacctcctggatagcctcagtaagggcagacgagcaaagctaagttcacaatgtacaggttgagtttggggtacctacagatgcatatgagaaaactatttaataaattttgtgtctatgaatccagagcttgggtaaatgtctgatttatagctgaaattgccaggagaggtagggaggggtgagaagaaagggaaagaggaaggagagaaagaaaaaacagcagaagggtaagaagaaacagctgaacatagagaactggggaatgctaactctccataagaggctaggatgaggagctagaggcagcagctagaaagctaaaaggagtaccttgagagcaatatcccagaatatgggaataggtatacagttaaagggagaaggcaatggcaacccactccagtactcttgcctggaaaatcccatggatggaggagcctggttaggctgcagtccatggggtcgctaagagttgggcattactgagcgacttcactttcacttttaagcattggagaaggaaatggcaacccactccattattcttgcctggagaatcccagggatgggggagcctggtgggctgctgtctatggggtcacacagagttggacacaactgaagcaacttagcagcgtacagttaaagtaatttatgcagagtcaagacaattcatttttaaacattactaattttaaaaggaaggcttatacattatactgcaacttgacttatattgctcattgcctgacctttcaagaaaagaaattagatattttcttgaataataatttgtgtctttgttttttgaggaagtatcaatttaaaaaaattttaataaaaatgagtattgctctataaattatttgactataacattaaaattatatgccagcaaatttggaaaactcagcagtggccacaggaatgaaaaaggtcacctttcattccaatcacaaagaaaggcaatgccaaagaaaattcaaactatggtacaactgcgctcatttcacatgctagcaaggtaatcctcaaaatccttcaagctaggcttcaacagtatgtgaactgagaacttccagatgcacaagctggatttaggaaaggcagaggaaccagagatcaaactgccaacatcccctggatcacaaaaagcaaggaaattccaaaaaaacatctacttgtgcttcactgactatgctaaacctgtgtggatcacaacaaactgtggaaaattcttcaagagatgggactgccagaccaccttacctgtttcctgagagaaatgtatgcaggtcaagaagcaacagttagaactggacatggaaaaatgcacaggttcaaaactggtaaaggagtacatcaaggctgtatattgtcacctacttatttaaactctgtgcagagtgagtgtgtgtgtgtgtgtgtgttagtccctcagctatgtccaattctttgcaatggactgtagcccgccaagctagagtacatcatacaaaatgctaagctggatgaagcacaagctggaattaagactgtcgggagaaatatcaacaacttcagatatgcagatgatatctctctaatggcagaaagcaaagaggaactaaagagcctcttgatgaaggtgaaagaagagagtgaaaaagctggcttgaaactcaacattcaaaaaacaaagatcatggcatctattcccataactttcagggtaaatagatgggggaaaaa

SEQ ID NO: 30565 - DNA, 1990 bp, Bovine  19866881089599
  misc_feature (1)..(1): n is a, c, g, or t
ntgtatgatggttcccagggggaggtttcccagggagacgggcaagaactaccccgtcactattccatgtgcatcttgttttacacttattcacacactcaagctatcgtaggtagttgctcttctagaataattccaaaaatacctataccaacagttctcatttgtgaactctgttcttctcagagagaccttctaatcattcctggtagtaaatactgccccctcaccccccgcccatctcctaacaaatgccagaatcagtaaagactcgttgactttgtgccctaactgggggcaacgtcacatcattctaacaggttgcctgaaacaggaggcgacgtccttctcctcagagtgacagtaatgagtttaaaaatgggaattcctgggataaagtatataggataatattttgttcttttctgtgttggtaaggagagggccctgagacctgtaggagttctaaggtgacagaaccactgaggagttaacaagagatgccctcccaaaggtagcatttacagacttgaaaaaagagcctgtggcttcatctgtctctgtcgatggcccatctcaaaagtaactttaagagagatgggggggaaggtcactggctgcctctttaactgttctttggctctggtaagagcaaagcatgttccacatcagggtacatttttgagtatcctgtttgctgtttcaaaaaccaaccaaacataaagagtatccattggagccaaaaaaagcaaatgtttggagaaaatgctttttctgaggtttaggtttaaaatgtgccagggaaatgggaaaagattataaataggtgctaattcaaaggatttgatgcacagtgggtgataggtgaattttttaaggagaaaacaaatctacatggattttatatttaaatcccagcctggccaaattacacaacaaaaaacaaaacaaaacaaaaacctaaggagaataaaagtaaagcggataatagatatttaaatatttcacaaagatagcttaaagataaataatgttcgcaaagaattttgtttccatgagatcaaaaaaccatatggaaataactattttaataggagcctttcatatgtttgagtgagtgagtgaagtcactcagttgtgtctgacttttggtgaccccaaggactgtagcctaccaggctcctctgtccatgggatgattttccaggcaggagtactggagtgggttgccatttccttcattcatatgtttacagtgtctcaagtctccttattcttgacatatggtttaatacaatggcttttgaaggtacctgggtaaccttctgggttcttgacctgctttgtgggttggttcagaagcagctattactttccaaagaaagatattctttattttgtggactgttctttgacatttacatctgaacattgataagagtaatgctgataagaagcggcccaggccctagacagataccaagcctttgcaggagccacttcactgaattgttctctgcatcgatgaccatccaccctttagtaagttctagatagtttctcaccagggctactaacaaaagccctacatctattaaccatagagcaactgctcttccaccagttaggcccagtaaccaccctagaagtcggtttcctgcagactctcttcctctcccttttcttaccttatcttgacaggtgttctcagtgcattagaccaaataaacttccataagtcaattgactgtagacaaatgccaaataatactatgttaggtaaagtttcattagcatcatgtcattcaaagcaagtgtttaaactccttgtcaactctttaaccatgtgccttcaaagtagaagatcctcccccagaagcaagaccgttcattctcttgcatgcatttgtgacatttaagaagttaggaaaggtacatctataacctttaccatcactgtggcacgtatatggaagctacactgaaatta

SEQ ID NO: 30566 - DNA, 1100 bp, Bovine  19866881164067
  misc_feature (1)..(1): n is a, c, g, or t
nataattataatttatgggacgttgtatagaaaatatatagatacagactttcacttactactcaattctgctcagaacagatatcacttaatcaattactagcattccttccccataatcctagacatggtcttagaatctttcttaacccaaaactttagaaagctattaccatctataggagctggcacttgagttgagttatatagttgtgttaacaggtgctgtaaatatttcaaaatcacagaagaataaagataacttttatggttctgctccatagacatgagaaatctgaggctcatgactactagatatacaaggtctgactttaaagaaggctctttctgtcattgtttaatacctttcaacctgtgtctcctccttcatctaattagtatcttaaagattgggtcctctaacaacatactggaccagaatgaaagctaagcctagctttgaggacttactttctgaggacttctgtttttccttcctctatttacatgttaacttctattttcctggctttatggaactcagtagtagagattctaagaattttgtctgatagcttcagaagttatatcagcttatgatgtaactcacctactcttgcaaccatataaaatctggtaaagtatcagtaatcccatctccaggtttcgagttagaaaatttaggcttgctgtattatttgttcactggataaggtagaggttagtcagtcattcttaccaaaaaagttcctattgtagctatatacatatgtaggtgatcaatgccactcctgcactttcaatgtgctgaaattttattttaaattaactcaagcagtataacaaaacagatttatattgtagtgatttcttgtaaattatgctgcctttgcctttaaaagcagatgtatagtaaaacaggcttttcttataacactttaaagctggacagagttttaaagttgtaatgaaattcagaaaccaatgtcattttcttcatcgtcacctagtagtaatatattcccaaatgcaatacacatcacagtaaggcattatctgctccactggaatctaaccttattcttcctagttgataatta

SEQ ID NO: 30567 - DNA, 1048 bp, Bovine  19866881408683
  misc_feature (1)..(1): n is a, c, g, or t
ntcacttaattgaatagcctacgttttttaaagaaatgtttgtcaaaaatcccacgtcgtatgttctgcttacaggttcaaacctttccatttatctcatcatgtactttataggttgatgcctttaattatatgtacacgaaaatttttagcattgattgattattctgtgagaatactggcagccattttgagctgtattaggaatttatgggaattattcatctgtgccattgaagaaaggaaaaattagccattggtacagcaaagggaggaacaagccaatatactcgcatggcagaagagtggtttcacagtctagtgggcaagcaaataagggcctgatgctttggacagattataaatcaatttctgatttctttggtcaaactgtaaatcactgggctaagctactatgaatttccaggtgaaagcctattttgtgattgtatgttactaataatagctctttctgaattacaagcgattagaaaaccttgtcagaaatcacattgttcttgttgtgtaagcctggatatattttctttagtgatattaaattgctggagaatgagattatattcattcatataaagctgtattaaaatgggaaacctattcctatgggttttttgtccaggtccctctgaacaaagggaaatgttattggttgatggctctgtagtgactgtcaccttgcccgatttcttttggtataaggtgtgctcgacctggaagctgcctataatatcccctgtgcacttcagtgaataaacagcaactctatttaaaataataaattattactcctctttttattgttggcaaccccatattatttatgggttccaagttttaaaaattgagaaaagctaaggaaagggagtttttagacattttaagaaaaagtgcagacacttgcaggcaacacaggtttgaaacatttcagagacttgtgacttttctgggagagtcagagtgtgatgtagaatttcacttgagatatttagcataggtatattttttcctcctagcctatttatagtta

SEQ ID NO: 30568 - DNA, 852 bp, Bovine  19866881419856
  misc_feature (1)..(1): n is a, c, g, or t
ncttttatcttaagtcacatacatatttgaggcagggaatattttagcataatgtcagttttcttggcattgaatttctgtttgctggtaaaaagaattaggcttcttcaagaattgacagcccatttcttaacactttgcaaaatgttctggttcaatttaatgtttctttgtcaggacttacttgttcatcctttgaaattggtgaagtaaatacataattattgtgaaaagaattgattgttaaaacctcaaaaaagtactaaagctagtttttaatctgctgtgcaaaatataggaacatactcaatctgggtttaataatgtccaaagaagccaactgtaatgctgaaccatttgttaaagctatgatcttgtttttccaaagcagaatatttaatggtcattgcaggattttttttttaatatgcatttatgtgactgttacaaaattcagctctgaaatttaaaagcccaaactagtaaattatcctcttttggctttcttattacatccagtataagaagattaaaaacatatgaattatagtatgcattttcttgacttggagattttttttcctttaaacaaagtcaacgcactaaagtatcctttgattctcattcaggtaaaaatgttatattttttgcaaagatatattattttatttgaaaatatgtttaagtgcctagaatacatatttttagcacttgaaactttctctggctatcacaacttctattagagaccatgaaacactttaggattattgaacaaatatcaattatgtctatgtcctcagtgtcaatctgaattggaaatgtgccatcttttacatcttcactaataga

SEQ ID NO: 30569 - DNA, 1257 bp, Bovine  19866881624901
  misc_feature (1)..(1): n is a, c, g, or t
ntgtgcaattaataagggcttccctgatggcttagatggtaaagattctgccttcaatgcaggagacctgggtttgatccctagattgagaagatcccctggagaagagaatgactatccactctactattcttgcctggagaattccatggaattcccagagaaccctgctgggctatagtccatggggtcgcaaagagttggacacaactgagcaactaacacttttactttcaataggagtactaattgcaaataagatgtaaatagtttttaaataaatagtttaataactaattttttaataaaacaggaatgttattaactgcataaataattaaaaaaagagaaaggccaagattttacttttgtaattgctagaaacaaatcattacagagattgagcaaaaatgaatagtacagatgctttaagagatgttgatgcttagaaacataaagtatattgtggaaaattataaataagtattttggtcacaatccagagacctcttttctttcaatgccattagggttacataaaagtgaaaaatgatttagggaagagaaatgccacttgtcactttgccttaggctattaaggtatcataaaaacatgattaaaagttataaaaatacaataaaggaaaagaaacaaaaagaaaatagtattttgggaagtgctcgtaaaagtggtgacggaggagaacctgacaccaaaatagcagcactttgggggagggaggaagttttgaacaagattacagtctctcataaagtcaatattatttcagtgcaatcagctgcatcactaatgtgcaaaatctaactttataagatgtggcaaagcggaggagaaagttgcgtttgaatgattaccctgaaagtctaatcaaagacattctcctatgttatcaaacacagatgtgcaaagtaaggaggctagagatggtttcttattgaaaaagattggcaataagattgagtaccttgaagtgaattcatctcctcatcatatgaaatcctacatatacctgggaggctcttcaaagtcgacacacactgaataatgctcaacatatgtttgcctatgatgtgcttttaacctaaacccaaatcttcataaaccaatccagaaacccagggctttctgataaacagcagtgtacaaagactactgatctaactcaagaaacatccaggggtcggaatagagttgaaggggagccagatgaaccaccacaaaacatggctgcttgg

SEQ ID NO: 30570 - DNA, 1868 bp, Bovine  19866881655258
  misc_feature (1)..(1): n is a, c, g, or t
ncttgctccaactcatgtccatcaagtcagtgatgccatccaaccatctcatcctctgtcttccccttctcctgccttcaatctttcccagcatcggggtctttttcaatgagtcagttcttcgcatcaggtggcccaagtattggagtttcagcttcagcatcagttccctaagtgcccagctgctcaattaatgtttgccgaattatagaaaaattcagtccaaaaataattaaaaagtccaaagtgaatcacagcagaaagaatctacccaaatcttctaagtggaaatactttctatgactctagttgacctcatattcaaaggcctaagatgtatcttagatatatcaaaggtatatcttgagaaaaaagatctagggacataaaaatcggttgtgaattctaggaaatgatttaaaatattaaaattcatcaatatacaaatttctctcacatctaaaatctttcttttagaattcaaactgggaactgttcaactgaaatgaccaaataaagttaatctttcacatgagaaatatgaaaaataaaaaagggaaaagaaaaaaagtgaatagaagatggtaaggattagcaatggtttattgggttagaaaaaaacatgctcttagatgttaaaatgcacaggaagtaggtgggactcacaaggacctcagtggagggcccatggagaaggccagcctctagcatacatcctgtctgaatggtacctagacactgttgaccaagaacagattcagaaatatttctgcacttcaataaaaggtaaaacgggttggcttgatcatctaagaaaggttgaagcatatggggatcaagctggaaggccatgaagaattggtgcagagatgtgctcaataaactctgtatgagatgggacacaccatcttccatatatagagatgacgtgcttgatggtcctctcaggtcctctcaggtgttcccttagcttgaaggcctttctctaagagaatacatttttagatgttcacctgggattgaagatacagttttgggctacttataagaactgtaagttgcctgatgataaagatcccctcttgatccatttaaaaaattaatatgagtcattagatcctattacagaatctggatcacaataagtgctgaactgagtatttaatgcatcaatagttcataaaggggtatggtttttataatattgcccttattagcacattgcctttactatttgagccaaacagctgtctgcattgaaacaaattaacaaatctccctgcatggtgcactcacctgcaggccaggccttcagtagcatttcaaggataaagtgtaagggtgagtgtgttatttttcccacagagtgttcccttccctctatgacatgttttcttgtttcctttcaacacctccctcctccttccaactaaccaattctcttcgtggtattcttttatacagtatgtgaactgatggtgtgaaacaattcatttaatctgaaaactgctacttttccaatcagtcaaggaatgattagtaaatgcttgagatggggttgagaaggtaaactaccctactgggcactatgaaacctgaatgtgatttacttacctatgtaactatcacacacacacacacacaattatagatggtctcacaaaccaggtaaaacttccaggccatctaaggtgctcttaataccagaaagatcctttcagatgccacaaaggaataaaataaaacataagcacttctgagctagtctatgtctgatagtttctcatattcctttagatgaaaaaattcttttcttacattatctgattataaggcaatgtaaaaatgaatgtgtaaacagaatcata

SEQ ID NO: 30571 - DNA, 1028 bp, Bovine  19866881821313
  misc_feature (1)..(1): n is a, c, g, or t
ntttatggggttgcaaagagtcagacacgactgagtgactgaactgaacttaacttatgctgattaatgatccaaggcaatggttctcaaatttgagtttgcaaaagaacctgaagggcttgttaaaccacagatcttggctccatcccagagtttcagatatagtaggtctaggatggtgccctaaaattgacattccctgacaagttgcctggtgatacagatgctgctggcctgggttctgtacttgttgaatcactagtttaaagtgtcgttcttctttcagcaggttgctgttattattgttcagttggtaagtcatgtctttgcaacctcatgaactacagcacaccaggtttccctgtccttcagcaggttaacaatcaccattagttccttaactcaaatcagacctatacattgtgtgtaactgctgcatttgcctaatgaaaccatacctttctgtaggcaagacttaccttaagtatctgtattcacagtgcttgggacatcataggtacccaatgcatgctgattaaatgagttggttaatgaaggaatcactcaatggatctggttcagtggattttatacattatcctttggaaagctcacatgattcctttcagtccgaaaggccttcttggagaataaattattgccattctctttgaatataacctcagaaattctggagtcaagatatgcttgcattttaagtacctacttggattaaaaactgaattgccgacaggattacataatgccaagtttgctgaggcccaaactgcttatgtgcaggtttggttctgagttcttttgtcaatcagtacatttctgtgtctaattgcaatcttaaatgttttgggtttttgtgggggtttttttgacacctgcacatgttattttcagtcaaaaccagctttggtaatttgcacaggtataatataactaaaatgagactcataaccaccgatgtatcacctacatcatatgagtaatgaattcagaggtgctgtacctcaatt

SEQ ID NO: 30572 - DNA, 756 bp, Bovine  19866881902770
  misc_feature (1)..(1): n is a, c, g, or t
ntcttattttcctgcccttcgaaacctatttctatgcataactgagaaccaatttaaatgctgttgctaataaagctgttggaaatagggaagaaatgaaagtgtttatgtaatgtatagattacagatcagacagcttgttttgccttggtatgataaaaataaaaaggaaaagcctttttatatgaagtgccaaaaaaaagaaatactcacttcttcccacacatgacttcaccatgatgaataaaaggcataactgacatcatgtttattgaaaaaaacagcaactgtcatactgtcgagaggctcctgaaagctggaagaaggcatgttgtttattcattttcactgtggattatttatagagttcaattgtcagcatcaacctcatgcctaattttccctcttcttggatagcccgtaattcattcacttttcagatcaagaagacagctacaaattgctccagggcaggtattcgggcaccactgttacctggcctgaatggagcaatggctgtttattcactgagcttctgtgactactttccgtaaagtgccagtgaaaataaaagtcattgtcagcgcataatgggttggtttcatttgttttatttttttcactttttgccctctgatttggcagccagtgctctcttcctaaagggaagtttatcactctattaaaatgcatcatgcttcagcaccagttaatgttactggttaaccaagagctctagttatagaaaacattcag

SEQ ID NO: 30573 - DNA, 734 bp, Bovine  19866881940728
  misc_feature (1)..(1): n is a, c, g, or t
naactgcctgatatttgaaatacgtttagaattgttcagttcaccgagagtggcaattgaacaggcagagagcagtggagatctacagcatggccacctctctggaacacagacatgcatagcattggcgtcatggcggggagaggggccagtctctgtctgggacatcatccattcagaggctaagcttcagccacctcctcaagttgttaagtctgtgaagagtagctgcaaatatgggcatcctaagagagtagtctttgcattgagaaaacaacaacaaacatgaagagtgagctccttgaaatgttttgtacccagagaaaggctgcatttatttgtagaatttctcaggttctcagtaccacttacttggtataagcatttcatgtttcctcgatttttatataaaagatgtgaatgcagtattagtgtcctgggagaattcacaaagctagtcagagcttccagaagaactctatgcctaggatcaaggcaatcaagttaaaaggctaaaattcccttggtcctcaccttcctttctcccacatcccaggcaagatagcatagagatatctggcttcagactcatccccagatctcctgcttgtcattattgtaactggggcctttactttaagactcccacttgagagctgagatgtactcaggaaagagagggccctctggttaggtcacccaggaagcagtgctctggagatgccaattctaga

SEQ ID NO: 30574 - DNA, 2061 bp, Bovine  19866880348991
  misc_feature (1)..(1): n is a, c, g, or t
nacgtttttagagcctgattttctgatgtataaagtggatacaggcccacctaggaatagcacccagcacagggcctggcacagagcatgcgctcaggtcctcctgccttgtcccagtccccacaggatttttcttctttcctcttccctgggctctgagactctgatacagtcattatttctaggtatcatacctgctacatccaaaggtctcaactcaaaggagtgactcaaatgacgaacgttttagtcactgatgttatctgtggagcagatacattccgggcagccggtcccatcagcaaccttcaaattacactcaagacaggtcaccctctatctcctccccacaaaggacccatctgaggaggaaagcaaccagaggggacaggaggacatggagttgggagtcacttctggccagaggcaggagatgaataaagttgttaagataagggtagcacttccacacgcaattaaaaccccaaaagaaaaatgcccataattccacatttacatgtaaaactttcaaattaattctgacagcaagaacacctgccagttttgctagaaacaccatctggttcacttctgataaggcccaggcacaacttcacacgggccaggaactgtctacagtctggttcccaaaaggtggcatcctagatgacagctccaaggcaggtgccattcccccctccctagagccccagagccgctgctgccagctcctgcttaggcctgaaataaacccagagtttgattcttccctaagtttctcctctaagacctccaggcactacccttacaatcaggattaatttaggcaagtctgtcttcaaaaaccagataaatactacagcaacatgacaaacagcctgaaccacttgagtttcagaggggcttttacagagtgggtgggagggctacttcttcactcaagagtcttaaatttgtgattagctaactgtaagagggtcccctccacgaggcctttaaggtcctccaagtgtcttcctttcaccaagccaacaggaaacactttgatgcacttcatgaggccttcaggccgccataaataaggaaaagaaagcagcctgggagtcagagcagacttgtctcgaggtgcaatgacttggcttggtggtagcgccacagcaggcccactgttcagatcctgatgggaaattaagcataaaatgtgaactcaacacccacagcaaggatacactccaaggaaaaatggactacaaggctcaccagccaccaccaaatgcaaatggaaaagggtgtgttcgaaacacagggtaacaggataaaagctatcaagggcaagactctgcacaagtatgcacacgcttttttccagtacgccagacaaacctgggctgctaaagctgcaaacactgcaatgcctatactgttcaccaattctgggtaaggacttcgtgacccctgtgaagaagggagcaaggcaaatgtggtcacgcctgttatgtaaaaagagaactgaaaaggggagggtgagaagcatactgtacaaacccaaggtgagaagccagggcaaaatcagctctggccccacaagtgggtttggtgactagaacctctcattctcctgaaaacaagactgggcagaaatcactcagggtctttatttttttttttttttccctctcaaaatgtgaatacacagaaaaggaagctcaacactgatttcccaccaagtctggcttcagctcacccagtcagccgcacagacaggcagctagctgaggagcaggtggaaagtcaccggcagcccccaaggggtgtggagagagaagctgagaggccttgtgctagccttccaggacaggaggaggaggcctgggaggctgttggtgtggactagcggcagggcaggttagcagagaaggctagactgaaggagcggggaaaactgaacccactacaagggcagtattcaggagtcccccacaagacaagcaggaggatgtgaaagaaaagcaagaggaaacgagcccctcccttctgtcagtctggatgcagtccatgtgc

SEQ ID NO: 30575 - DNA, 1500 bp, Bovine  19866880392216
  misc_feature (1)..(1): n is a, c, g, or t
ncgcctatcacgtgaggttgtgttttccatggtgggcatcactagattgtgtcttaaggtccctccaagtccagtgccttgagtgagcctggcatgttgtggggcatccgtgatggttacaaaattcaagacttgtagactgcgaggtttctattctcccttgaccgatggggctttgttaggggcgtctttcatgtgttcatctttccctgtcccacatcacaggaggtggttctcatgggtggtttcaactccagagtttctgagtagtacaagatccccgtctgataagtggggagcatgtctaagtctgctcttgggctggttcctgttaggtgtttttcccatgagcccaacaccctccctcacttgtccctggaggaacaagcacccagaacctcgtggcgcccttgggccttgggtccccattgtagtaggtgccgtgtcccctggaagccatgctgggcttttccctgactccctcagtggaggagtagccttgcctcagtgggaggagggagactctagttgaccttttccctcaagggatgaatgaagacatttcaagtgtccctcagaggattaagtaagaagggcctcactggccagaactgaaaggcaggtgaaggcagagaacctgacctaggctgcttcacttcctctccttcctcatgccaggagctctccatagagaagaagaaaaccctagagatgctggaggagaatgagaaccagctgcagacgctggccaatcagagcgagcagccgcctcccagcggaggtctccatagcaacctgaggcagattgaggagaagatgcagcagctcttggaggagaagctcctggcggagaagcggtgagggagccctgaaggcctgagcccacgggggtagctttccttgaacctgggcccttgggttccagttggccttgatctgatggatcactcccttttgcctagctctcaggttccccaccaggcaagtgggaagcaatccttcactatcctaagctaacttgaaatgatgtgagtcattaggactgtctgatagacaggctgaacaggtcctcccagctgctttttactgatgagaagtctgagacttggaggaccttcctgagctcacagaactagcaagacctgaacccaggattccttgcactgaccaggtcactcccattaccattggggtggggggacaggacccagcccagctctggggctcaccaagcagggtctctgggtttctctagccagctccctgcacaggagccaccctcttaccggatgccccattggcaaatggggccctgagtgagcgcctctccccgggggggcaggatgaaggagaatgaggagcggtccagggccctggaggaggagcgggagttctactccagccagtcccaggcactgcaaaactcgctgcaggagctgacggtggagaagcagcaggctgagcgtgagctcaaggtgctgggtcactggggagcgtttg

SEQ ID NO: 30576 - DNA, 1818 bp, Bovine  19866880506218
  misc_feature (1)..(1): n is a, c, g, or t
naaaaacctgcattcctgcttccttctaggcaagtctcccaagcagcagggctcctcgggctgttgactgcaatacatctcccctgccagggttccctcagagctgccctttgggcaaagtgcttccaggcttcctgcgagcccctgggtcatcccatcaggctcctccctggtggtaagcctgcttgggggcatgttcctccccaagaacttgtgtggccaggtttggggttaagacaagggtttcccagcctgagtaggaaggacacaggcacttctcctcttccaggagaagggtcgtggacacatctagaagccagtaattcacctgtcctctgtcccacaacctcctttccaagaaggaaaggtaaaattcaacgcttgttacttccttgggtctggacaaggggaggcaccttcccctgaatgagaaactgtggcctctgggactgagcagagaatgagaggggctggacccagatcggtcctcaggacatagtgcctgtgggcgtgctcggaagtgggagggggggagcagtgaggggatgtggagaagagatataaggcctcttgtcccagaagcagccaggaggtgagaagaggtgttagtggcacccaggaaggcagaagaggctgaggaattcaggaggggcaagaacagccctacagaaaaggctctgggcacactctctctctcttttgcggccaaagccagggaaagaacagccagttgcataatccttctatttgctcagatctacattttgccttgaagctccctgccctgggaagtgattgaggaaggcacccagcaaggactgggcagggcagggagtcagtagaccaaccaggggtgcgcagggtcttcagcctttcttccaccactgccgtccaggaggatggaggccttcaacgaatcttccccgttcaacttctccctcccgcacaactttggcaagcggcccaccgaccgggcgctgagtgtcattctggtgatcatgctgttaaccatcatgctctcgctgggttgcaccatggagttcagcaagatcaaggcgcacttctggaggcccaaggggctggccgtcgctctggtggcgcagtttggcatcatgcccctcactgcctttggactgggcaagttcttccagctgaataacgtcgaggccctagccatcctgatctgcggctgctcaccgggggggaacctctccaacgtctttgccctggccatcaagggggacatgaacctgaggtaggactgggggtgagaagggagctacctggggagattgcagtcaaggcaaagagccaggaggggagtgaatgggggctgggagggtgttagggcagggggtggcagccatttatgctcaaaagctaacactgggctgggggcagacgctggggtacatcttggcttaggctccaagccaaaggggctcagctggtccagggacatcctggagagaccccgcccctactcccagggttgtctcaaatggcacaaggactgtcttgaaggaatactgtattgatttaaagcaaagggacctctggtgaactttcacccatctgccagggtaggcagaattctgcttcaaggccagagatacgaaagggagtgcagattagtcccaaagatctccaaggagatcaaggcggctcagaaccaaagagcacctccagttcctgcagaccaggaaggaattgccaaagatccccccaactgtctgtgcaagtgggctgtcctctctgaacctcccctctccacccatcagaggcaagaacacttcagcgcaaagacacagccaggta

SEQ ID NO: 30577 - DNA, 1808 bp, Bovine  19866880506613
  misc_feature (1)..(1): n is a, c, g, or t
natctcaagctgctgtatatggccgatggggagcattcattcattcatcctttctttccttccgtcaacaaagatgtctgagtcccttctgtatgccagacactagtccaggtactgaagatgcagcgatgaacaaaacaggtgagatcccttgccccgtggagcttacagtgtagcaaggaaagtgtctttctcagcggcctctccctttgtttgagaaaccgcagcctgtgcccctgcagtcctgaggctgattgctccagagtcgcacaggccctcaggaagctctgcctgccccccttcccctcgagggcaggggctgcagctgccggcagtgtgatcagtgccagcccgtaccctgctgcctcccttctcctgaaggcaagatcgtggggaacatgtcgtcatttctccttcctgacgagcgcctgcaaaggtgtacaagggagttgagaggcgtgatggatcgaggccctgtggaagtgaatcactgcccagcgtggagagcaaggagacgtgctcaaaggacagaccatgccaaggccaccatgcttctcccccacagaggtgaattgaagattttattctccccagggagtcaaattaacaaggtgctgagagttttccaaatcagcaaaaaaaaaaaaaaagtcactaccaggctctcaaatcagatagactggtgggtggttttgtcgacaggctcattgtacttggcatccgatgctaaaacgggggtgaaggcaaggagtttgtattgaaaatgcatccacctctgagcaggcggtacaaatcagcatcattgtgttctcagaggcaggaatcacggcgttccccgagaccgactacctcagtgaccacaaagctgaattttcacaaattatgaggtaggaaattgtcagtcattatacaaattgatttacctcgggattccttctaggtggccagttccctcagtactttaaaatatgacttaatttataaacatttgatatataaacagattttttttttatattctcagcatgagctggtagaaaaagcttgcattataattcttagaggcctggttttccattttatttctgactccagcaaaagcatgctattacctccattgatcagcccattcatgcttcattgtgggtgttccttccttcgatagagacatgacaggatgagcactaaatgtagcattcattcatttattcattcacaaaattcactgagtgtcttacacgtgctgagcactgtgaaaaatgccaaggatatattagtgagcaaactctttcaagacagtgagcttggcttagaggagcagccccatcaatggtccatatcctcatgcagcttatagcccagtggcagaagaaagtaaataaacagctagaaaaattaaacaagtttaggctgagataggtgctgtgaaggaaagaagcaggctgcttcagactcacatagataggatggtttgggatagtccctctgaagtggtgacatccaaagcacacccagaaaagataaggagatgccaattacatgaagacctagaggaacaatgttctacggaaaaggactagtccatgcaaaggccttaaaggcaaggcaggcttattgtgttctagaatgtgtattctaggatgtgaagaaaaaaccttactagaataagtgtgagatggtgtaaaaggaattggatgaatagacagaaacttcatcatacaggttcttagaagctacgtgtattagcatctttggggttgctggaacgaaataccataaaccacatgggttcaagcagcaaaaactta

SEQ ID NO: 30578 - DNA, 2086 bp, Bovine  19866880508433
  misc_feature (1)..(1): n is a, c, g, or t
ntcagcagacattcatggagctcatacagtgggctgagcactgtgagaagaggcaccccccccctgtcttcagggagtcccaggcaggcggggaaagggagtgcgtgtgagcattgctgtgaaagagggagccctgagcctcagccacacagggactcctgcctgccttttgtcacaatttatcgtcattattacttatttggcaatgtcgggtcttagtggcagcacccgggatctctcattgcgatgcggggagctctagttgtggcgctccagctcagtagttgtggcatgtgggcttggtagttgcttggagcttgcagactccagagcatgtggggttcagtagttgcagctcgcaagctttctagttgtggcacatgggctcagttgctctgaggtgtgtgggatcttagttccccgaataggaattgaaccctcgtcccctgccttgcaaggtggattcttaaccactcgaccaccagggaagtctccttttgtcgtgattcagtttggagtcattaaaggtgacttgcacacctcctcctctagtccacttagaagaacttgttaggaagaagggcgggttggctgcggcttgtggggcatgcgtagataaaagtagaagttgacttcaggagtaaatggtcccacagcaggctgcgtcctcagatcagagcagcacttggttctctttcatcacacatcctaggggcacaaaagatgcttgttaaatgaatgaatgaacgaacagaggcctggtcctctggctctctaccgcctcctggttgcaacaagctggggagatatgggatttgaacgcacttctcaggtatgagctccagggatgcccaccatcccccactctccgtgcttcctcctcttctctcccggggtctgcgagaccaccgagattccccagagccctctctacttcaggcatcccagctcctcccaagcccaacccctcccagcaccagctccacagaaggtctgctcctggactattccgctacctctgagcacaggctgcctttgatgctcaggagacaccctgtaattcaattaggagctccctccagggagcatgtcattatgtcctgtctgggccttgtaatgacagccccccgccactgcgcagggagctgccctgctcagctgtccagaaacctttccctggaagggcactaatctacttagcccagattggatgcagttccacacagcacctccctgaaggcctcagaaatcagtccccactagcagaaaggactgccttaggggagcctgagggttagctctgctctgctctttgccgtgagcccccgacccccacccctgggattgttcttggctgaatggaggctgagagagctccatctcagccagagcccctgggtgacccctagccctcgtggagcttagaagggagacgaaaggagactgaaggaatttgcctcttttccatgtaagtttggggaaagagggtgcagggtgaattgaatccttggtgtggtacctggatagtgttgcactttgaaggggaagcggtctgggctgttttgagctatgggggaagttgccttcttctctgcatgacttaacttttgtccgttggacttgatttctgttttagatgcaagggtgcggcctcagtcgggcatggacgctgctcaggttggtctgtctcctccatctccccacccatatcaaggtttacctgagactttcccttgaggaacccaaatcctctccttgctgttatgtgggatcagccaaaaatgccgctggcaagctatgcggggttaaatagagtcccccgctccctgctcccaaatccatgtctacccataacctcagaatgtgaccttatttggaaatagagtctttgcagatttcattagttacagtgagttatgctcagttagggtgggccttagagcctatgactagcatcaacataatgaggccgtgtgacaatggagataaaagttgcagagtgatgccatctgcagacccaggggatgccaaggattgctggcaaataccagaagctaggagagaagcaggactagatgcccctcag

SEQ ID NO: 30579 - DNA, 1048 bp, Bovine  19866880545666
  misc_feature (1)..(1): n is a, c, g, or t
nttgctttgtttccagctgcccccatccccaggagaccccttgctgtgtttttgtttactctgtgtgtgtgctgtgccctttagcctgtgccccaagaatctttctgtaagtaaggcagcagcggcggcaggaaaacaatgaaactttggactctggtcggtctctgttcagatgcaaatgacgagtctcttcccatcagagtttgtacctttgggttctccatcccacctcctgaggagtctttgaacggcaggggtgggctgaatcagtagctcagaaaagctctgatttagcctgtgcttcaagtcttgtttctttctggccttgtgtggatgtaggcacgactgagtgacttgactttcacttttcactttcatgcattggagaaggaaatggcaacccactccagtgttcttgcctggagaatcccagggactggggagcctggttgccagccgtctatggggtctcactgactcgatttagcagcaacagtggatgtaggcaagaggcaaagagaaaggaagttgtcctcctgagtgtcggtgactctgggtttggaagttctgaactggtgtgtatgtgtgtgtgtgtacatgtgcacaagctgtgcaaggaggtggagttaggacggaatgtggacagtcttgaaagtcatctttacaagtgaggagatgacagagcagggaataaaagggcagtatatcctaaaccagggcttctcaaacttttctaacttctcaaaccggaggaatcttattaaaatgcagattttcattctgtagatcagggatgagggagaaagaagtggcagcccactccaatattcttgcctggagaatcccagggacagaggagcctggtgggctgccatctgtggagtcacacagagtcaggacacgactgaagtgacttaggagcagaccctgagactcagtgtctctgttaagctcccaagtgattccagggctgctcttcagtggcccgagcctccccctcctcctcttaacactgatgaataagatgacctaaaaggcagaagggaga

SEQ ID NO: 30580 - DNA, 2071 bp, Bovine  19866880546880
  misc_feature (1)..(1): n is a, c, g, or t
ntcccctcacacaatacccaaagggagacgtgccccagcgcccacctcgaataaactgcgctcattggacgccgtcctccgcacagagagcagccctgaccactcgcgatctgagcggccatgaagaagcctcgatccgagaagcctttccctcaaagtgagccactcacctaccggacaggatctttggcagctgagacacagagaggtccgtagtctgcgatagagccggccgcctccccgcagaccaggactcaactcgtctacgtctctccacaactgacgcacttagctgctctggcgtcccacaaaatggagggcgcgtccctgcgtcacttccgggaccgcccttgacaacaccccttgggtcgggggacagaggtgtccgcggggcggggcctctttacggtgctggccccagtgaccctgagtcgaggtgggcgggactgaggggcggggtgtggtatgggcgtggccgtcaggtgctcggggctgggaggccatggtccagaatgttcgcacctcctaggcaatgacgttcggttcatcattactcccccataaaactaccgtaaggcaaatggtcaccttttttatctgaactttttttttaatacccgaaagagtactgggtgaaaggaactggggctttgcaaaatatgtctgaccatctctgaccccttgttccttagcttcctgcataatgttttttataaaagaaatcagtctttcaattgcaattattctctgcattctgtgttgaatatggaagcaacatcttgtgaattcactcactaaacattatttttgctgcaatgagagtaatctgaaaaatattttctggggtgaaaaacaagaataacggtgctatcaccatttaaaaagttgctgctcttaggccgaagtggtgtgattttcttcagtattaattttttaatacagtatcttgacttatttaacgttaaaaagtttctgacttctataaaggtaattggtcttgagtagtgcctagtgacttaatctattgtattttaaaccatttgtcttctgcagtgattgtttcttctgtgaaaactattgaataagtctccctactagattttctgaccagcttctccaataaaaaacgtcatatttcatgagtagaattactctcccttctatgtgatccagcggtagtctgtgtacaccccaataattccttcaacactgacataaagaagatatgtgttattcatgttttgttttccagaaatgcttagcatagaaaagattcaatatttgtagaactgggtttacattagcatttttttctcaagtgttcctattgctgtattaatgtttcaacaaaatgacttggcatcctttttctaagatagccgagtagcaaatctatagtaaaggaaaaaagatgcagagatataagattaaagtttatcaaatcatctctttgggagactttcagcataactggaatgtttccttcattacatccctgattttatctaaccggtaatttaaaaaaaacccacctcaacctgtgtcacttgttaaagctgccccatctcacctttcctaagccaatgtatttagctatagaccaagtagtttcttgctgtttggttttttggccacacctcgaagcatgctggatctcggttgtgaaatgtcatttctgcaaccaaggatcaaacccatgtcccctgtagtgaaagcctggagtcttaatcactggaccgacagcagagttccaagagcaggtagtttttacactctgaggtgccactttctcaagctctcattcacctacagccagacctccaccccacctctccactgaactgctttcaatgttcatcatcaatccaactacaaaatccagcagcctctttacaattttcagcctccttaatgaaagctgccattcattttcccttactgtgcaccacacatagtgcttggggctttggattgatcagccaattcagcctttgtacaactctctgttgtcagttcatatccttttttttttttttttaatatgttgaaaccaaagctcaaagttacacag

SEQ ID NO: 30581 - DNA, 1943 bp, Bovine  19866880548635
  misc_feature (1)..(1): n is a, c, g, or t
ncctcatgaagcacgtacatcaatttccctgtgcctgcctaagtgcccctccatcaggggctccccaggatgagaatgtcaccatcaggctcagcagtgcggtaggtttgtcctgactctaccaccttaccacatgcacccatcaagctggtcaacttctttctgttgctggaattattgagaaatctactggagtaagtgaatatgcttgagatggccccccagtatctggcagcacaaagtgcggagggaaaagacactgcaatagtcctttccatccgtaacaccacaggctgctctctagccagaaagcttgtttccaagtggttgctggtccaaaagtctacattattctggatttcaaccatatagcttagtttaaaatatgagcaactgctttccaagttactttgctcagcaaagtaattttgctttccctccggttggcatgggaggccttttgtaaccatggctatcattcaaacgatgcattttcttctcccgactcctcccaagcccagagaaggttagaaattccagagaactactagtcccaaacatcgtctctctgccaggctcaatcgtctgatccaagcaaaagtgaaattgacaagttccttctttccctggaggccaagcttacggtccaaaaataaatctagctctcctggcatctggtctgtccagtttcagccttgcttcttgtcctgtgggacttctgtttgcaaggggatatttcagtgaggaaaaataatactttatatcccatgttgaggtctgagagcttcaaatatttattagcaactaggaacgcccatttcaaatatatgtttctgtacaggccaggagtcttgtctcatattcagaatagattctttctattcattttaacaagcactttgatgcatctctttctatgcctaacacaatgctcattataaaaaggatctttgaatgcataccctgccctctgaaaggttataatctaagacacagcagacagagacctggagaatatatttaagaataaagactgcagtgtgttttggggactcagagagcagagacctactaaaaacctaatggcagggaatgtttcagaaaggtaggtctttaatgctgctttggagaaaggtgcttctgtaatataaatacaccttgatttatacttgcttcacgtgtgatactactaccaacagagaaaggtgagtggtgtctaaggttcaggactcttttcaaatatacgacggagatcagaaacctggaacatcaagaatcctgggctctgtttctagatttgtgacagacttgctgaaaaacttagcattgggctgagatagttattattatttccattatgcaggtgagattgacccacagaaggtaatcttaccacagtcagtccttacactttaaatatacatgacaactgataacacacacaaaagtaaataggtgaggtaatggatgtgttaattaactcgatgggcagaatcctttcataaaatgtgtatattacattgtacactttacatatcttacaattttacttgtcatttataccttaataaagctgaaaaatatatatacatgacaaaaatagtttagaatgacaaaaatttagattatctcttttggacacaaactcccttcaaggtctagggtagctctctctaacccaggcttcttctatttgtctatttgtcagcttgtctatttgtaacaagcaacttctccctcataatccaagatgcctgctcaatctccaggcatcacatttgtcttccagcccacagggaggaaaaagggggaaagaagagcatgcccctctctttaaagataactcccagaagtcacagtcaccatatctcatcggttaaaacctagtgacctgaccacacttagccacaaataaggctaaaaaaatttgttattaatttaag

SEQ ID NO: 30582 - DNA, 1345 bp, Bovine  19866880614242
  misc_feature (1)..(1): n is a, c, g, or t
nttggctttcgttctcaaaccagtggctgaatcttgaccagccacaagtaggactgaaaaaggaggaggtgagtagaaaaactccagactaagacatgagggaattgcaactagacacaaaggtaaaaagacaatgctgctgctcctgctaagtcacttcagtcgtgtccaactctgtgcgaccccatagacggcagcccatcaggctcccccgtccctgggactctccaggcaagaacactggagtgggttgccatttccttctccaaagaaagacaatagggagacctaaatcccaaaaggaccacgggatgaaaggaagaggtcttagaaaagaccaagagagagaaagcttttcagggctatatgcataagaagaccagagcagggttaccagaaaactataggctgccctgttaaatgaacatcaaacaacaaataattttttgtaataagttacgtcccaaatactgtacaaccttattttattgtaagggacatactaatactaaaaatgtattcatgtttacctgacattcaaattcaactgggcttcctgtgtttttagttgttaaatctagctgtcctaggccagaggtaccactcatccgtcactactttgcactgtcagcttaccatgattatagatcctagaatatcctggtatctaacaatctggacagcccagcgggtgggagagcagagaatggaacaggattcttcactttacaaatatactcgttcacagctgaggtcctataaatagcaaactctcaacagtcttatcacagaaactcatttttaaaacttaaatgtaacagccccacttttgaagcagcccacctgtcaaaactgaaggcaactgccaggcacagtcccaaaagctgtggttgtcctggcttcagagatcaggagaggggataacaccgtaccagcggccactgcagaagaggggcccccacgataaaggctgaagcgccaccctgggccccagggtctggcctcttccccgcaggcccggcttggatcggccccagcacctcctgcccaggctgctgcagccacttgcacaaagggctgtcgaagatcctctgacatttcagcagagacctaaaaaagggctctctatgtccaaccaaacgcaattccccaacctcagccctaaactgattaaaagctggaggccattcgttttgttttgagaagtgccagggttttaagcccgcggtccccctcttccctcctcactagttccagctgcaggggcacttcagtgtgaaagaccacacaccagcaggcccagcggtgcggaggcctggcggagattaaaccccaggcggccgcg

SEQ ID NO: 30583 - DNA, 4723 bp, Bovine  19866880641880
  misc_feature (1)..(1): n is a, c, g, or t
ntacaactaaaacctagacagaaaaggaggcaaaggggaagggatccttttcctcatcaaggcttgtcatgaagacatggagctattccgctgccgtttactgcccagggagttgggcaggtggtggagtctaggctctgctagggagcacttcgcccatgaactgttccctctttgtgtgattagatacctttggattttgtttctctgtgttattcatccaagtacctcccccactgttcctcagtccaattgccttgttccatttttgcatttgaatatattgcttaaaaattattttccccagattgtggatcttatctttttcctgaaaggcgtgggacagtgggacctaaaacaataatacctaccgtccgttgaggcaaaaaagagcagagagaaggtagcctagcaggaagccgatgaaaggcatcagggaggaggtggccagcaagtgtggtgtcatgacaaataagatgctcttgcccacgttgatggcggagagcactacaacagccacactgcacaaaagcaggaggatgatccctccctgcgaataaggacaagaagaaaaggcagttagaagggtgtggggatatggaggagcgcagagagctagggaagcgctggtggataccgaaggtggaaaacattttaataaacatatttgaagtgaaagggagtacgcaagacctttatcatcatcttggatttcttacctgtagctgggcagcttgctggcggtcataggtctgattacctttttactgaaagctcagccagacatagtttctgatagacatctctgagtagcaggttttcagtgaagtgctgtgactctgaaggatgagactattcagccctccggcaaagtgggtattgtaaatgaaagttctctttacgcatcccaacaatgctttggatgctctggatatcttggaactgagtagaagctgttcttagaacttgtggtacttgtcttaaatacctcttttatgggtagggacttcatctattttaggatgaatctgatttctggaagttgccaaaaatcatttgaagcaatgctggttaaagcaggtaatgaagtcagataatgtgcttttagatctgaatgatgtatagggatgagtgcttttcttgagtgacttgcaaattgggatgataggaaagttcctaaaaggagtttcaaatagctcaggtaatgaatctttagaaacagtgcaggtccaccctaccccaggtgagagctgtgaaagcaactgtcatcaggagcaatggtatgtttttttttcttttaagattatgattttatagttggatcttccataccacttagaattttcagtaggcaatttatcatgaaattagaatgttaagaattttctctactaaggaggattcaaggtttcaaagagtgttacatgtctgcattttagagtgacatctaaactgatgaaaatgcatgcataaacttaagctctgtccctcttatcttctgagttgtggtgtttagtcactaacttgtggccgactctttgcaacccaatggactgcaaccaccaggctcctctgtccatgggatttcccaggcaagaatactggatgggttgccatttccttctccaggtgatcttcctgacccggggattgaaccctcatctcctgcaccagcaggcggattctttatccctgagctaccagggaagccttttctgaaatacaagtgtgtgcagcaaaccttccttgaacttactgtgttctgtaatggttatggttccatttccagctcatttcacacctgtgtttggtatttcctaatgcaattttttaaaaaaaatgtggtaaaatatatagaacacacaagttgtcattttaaccttttttgagtgtataattcagtggcattaattacattcacagtgttgtcctagtgacagtttaacgtttgtttatgttgctctacttgtaactgcgcagttccgtgtttctaaatcatgttgcaactgataatcatataaaacagcacctgtactgttggtggtcctgtcccaggacaggaaggaatctcactagtaacgacttaagttttattgagagactattaactgatacaactgacagggaggcctggagtgctgcagtccatggggttgcaagaagtcaaacatgactgagtaacaacaaaaattaactgataaactgcttagttcacccttgggttttgagttaatttctccttttggattttttgcctcttgggtttgtcctctacctgatgtccagattttgttctgaagagggtaatgaagaatgtaggaggtattgggctacaaggattgtgaatccggaagccctctttgtctgcgtgagtattaatctcaagccctcattctcattctcccattcttggggcctttagagtggtggtgagcatagacattgatgtgacccaggtgtgaaaactggcttagccctcctcaagatatgtaaactggtgagtccttcagcttttggaatgaggttgacaacacagcacctagcatcttagaaccactgactgctttgtagcttgtagggaaaggagtggagtgtaacatctcacactttcttgtcactcggatctcctgtccatgacctcttgctaagaagagaggccacagtagttgtttgttcataggtgaccatgttttctgtcacctgcattgccctgtcattgctgactaaagctgtgatgagtgtctgtccattcatgggcagccagctcagcttgccagggatccaggagataacctggcctaactcttcccatgtaggtgacctggttggtgagcgacccaacgaggaaatcaattctcttatttagggagtttgtagagttacagagaaggggaggcaagagcagagacaagtgtgaaaattttgacatggaggcccgcaggctgcagaagtcacaaggtggcataaactgagacaaaggagagtcaggtcttcggtcagtagcaacaggtatggggaaagcataggtagcgtggttgagtcaatgtcagggtgggatccttataatgagagtggtgagtggcttatgctgagtggcacctggactgtgtcatgctcaggttcaccaactttctaaccacataggcttgaataaactcctgcatgggtgagttacagtattacttgaattacctttccaaatggtgaaagtgttgctcagttgtgtctgactctgtgacccccctgtagcctgccagtatcctccgttcatgggatcttccaggcaaggagtgggttgccagttccttctccaggggatcttctagacccaggtctcccacattgcaggcaaatgctttaccatctgagctaccagggtagcccaaatagggcatccttaaaattgtatcttggtgtgtccaaatgtgacctctcactagggaatgctactggttgagcagagtttgaacagatagcttctgtcagagccagttatcagaagttgggtaattttgatttgaaagtctctaggagtgttcggtatgcaaagaagctgggacagttgttccagcttgtaactcactacattatgaattggggagattaagaatgagcatagtcctcaaagaaatgtaaaagcaagaaaatttcagcctttacatcttggccactcacttttatctgcaacctcgtgggaatgataccttgtttgggagcaattgattaatggagctgttgcccttctgcttgtctaaccttggaggtttggccagcggcaaagcaggtcctaaggtacacttatattttatgtgattctttgttactggctcctgtccttcctgtccaggtgtatctcagcccttttaatgttctctggggtcatttactgtagaattgagtcatggatgtgtaacaaaacaggaatgagagacattccctgggcctcagttattctatatataaaatgagaataaggcaggagactacctcatcttgaagccctctctagccttaagatctgagattcttttttccatcctcagaacactttaaaaaaaaaaaattgaagtgtacttgatttacagtgttgtgttaatttctgctgtacagcaaagtgactcagatacatttcacattcttttacatttcctcacaggatagtgaatatagctgacagtgctatgcagtgggcccttgtccatccatctgtatacatcagtttactaaccccaaacccccattccatccttctgtactgcccctctccctcttggcaacaagtctgttctctaggtctgtgagcctgtttctgtttcacagttaagttcattcatgtcatattttagattccacgtataagtgatctcttagagtatttgccattctcagaagaatacttagatcaggagacacgttatatcagttgcttttggggttctagtctctggtttcacctacaaagtggaggagggcaaagttgctttaagtgatatcggggtcatttcacttttttttttttttttgtgtgtccttaaagatgtctttttttttttttcatttcacatttttatcttctgtgtgatatatttttccttttgtttctacattccacaagctcttcagtaagtgagatgacaggttcatgtttctggttttttgtttgtctactcatgtgtgggagagacaggatttggcctctattcctttgtttattctcaggcat

SEQ ID NO: 30584 - DNA, 4432 bp, Bovine  19866880664792
  misc_feature (1)..(1): n is a, c, g, or t
nccatgatacaaacgagaaaactgaggcccagggagacttagaaaactggtcccataacaagtcagtggcagagtcaggtctgaaccccctccactctcatgcatgtcttacaaggtttttcagcatcatcactgttaacactttggcctggataattctttgttggcggggtgggcagtggggtggggggaggtttgcaggtgttatcctggttatggcaggatgtttaacagcatcgctggcctctacccacgagatgccagcaacatctcccgacttgtgccaaccaaaaatctctgctgacattgccaaatgacctctgggaggcaaaaccatgaccaactgagaaccactgatgtattggaagctttgcctgggcttctgggtgctgccttagatcagagagacagggctctgcgaggtgctggctgtttgaaagtcctgctccagctgccttccagctactgctctccccacagggcaaggagtctatggaaccgaggagacatgcccacctggaacaaccccacccttctggaccacgttctgttttccagggcctgtgaggactcactgccagttctcctggctgttggagcgcctgcacgtctgctcccgaggggtggctcagtgtgtctgctgagtggggagggaggcatgctaaacatgcaaactatgcgttttggactcaaacacgcacgcagggctccgtctgtgaaggatggtggtggaggtgggaagaaaaggatggtaggctcttggcaggggcctccctggaatcttgactcagcctgcagatatgcgggtggcctctccagaccccggctgctggtgtggttgtagctcacacatttttgacccatcaacatgaagacctcagaatcatatctgccaacagaaaaagcctgttagggctccaggttttctcctgaaatccacattttctctagagaaattttcactgtatttctcacttggtggtcatttctcaccaagaaacagcatgtttttttccttctggaaaagcagaaaggagtcaaggacccaaagacacactgagaggtggggctcagctaggctctgtcaccagccgggggctcctcacccacagcagccttctggagggggtacagtcagctttgcagaagagagataacggccccccaaacctcccctcatcccccacaaatggaactatctttaccgtttttacttgaggaaataaaattgagatgacctctagatacacttgatcacaactagtatggggtgggactgttttaacacatttggaatcactcaaagcaaaagtctacccataatcctcattaatggataattataatgtttttcccagttaaatttttttattgtgatataattgagatacattatagtttcaggcataaaacacgatatttgtatatattgtgaaaagttcaccacaataagtctagctaacatctgtcaccatacatagttatagaattttttttcttgtgatgagagcttttaagattgcttttatcaacaagttccaaacatgcaatacagggttattaccatggtcaccatgctgtatattacatccccacaacttatttattttataactagaagcttctaccctttgaccccttccaccaatttttcccacctccaacctcctcaactctggcaagcaccagactgttctctatatctatgaggctgttttcagttttttgaacattataaataatacatgtctgtcaggggaggactgattattcattcatagtatgtccatatgctggaacccagtgcaaccattacaaccagcagcaaacttaaaaagaccagctaagattcatttcttcattcactcatgtaacaaatatattctgggcacatagtatgtgtaggtaccaggttaagtgctgaataataaagaaatacatgttttgacttgcaaagatgttcataagacattatgaaatctgaaaactccagctcacagtgtgtaataaaatcacatatatgctatcatatattggtataatgctaacaataaccatttactgaatgctgagacccattatgcctgaattactagactaagcactcagacatgataattacacataatcctcatatctacaaggattgtatatcctatctattttgcaaaagggatagttgaggccttagaagtttaggtaacatagttaagttcatccagtacaatcttaaactgcagagctgggatcaactctgactaaagagcctgaaatatctgcaactgtgctgtatatctttcccaaaattgtgtacacatgtaagacaatccagtaaaattctcaaaagaagtaatctgtgctgtttaggattatgggtaaattgcagattattactactttctatatatttaattgaattatataataaatttgtcaagttccagaaagaaatttgagattttgattaagattgcatttaacttagagaatactgtggggtagaaattaccatacataatagtcagaattcctacctagtactttggctgattttcccatacatattcaagttatttctgacttacccttaaattaagtgtgataatttaaaacgcatagacctcacatctttcctgttcagtttaatccttggtacttcatggtttctgttgctgctttaaaatgaactttccctccagtttccttttctaactgggtatttctgctctatgtcaaggtaactgattcttgggtgttaattttctattcaaccactgtattaaaccatcttatgtttaaatttgaggtgaaattcacacaacataaaattagccattttaaagtgaacgattcagtgacatttagcacatttacagtgttatgcaacccttgcttctgtgtagttccaaaacatttaatcatcctgaaatcaatccccttgcccgttaagctgttatttcccaagaaccatattatttttttgaattgattatcaggaactggggttatgaaaccctcccatggaagtcatcaggctgtgtggcggtgccacctgatggaggtggtcgtgatggtgttgtcatgagctaggctgtggatcttcttgtctcctaaattgtgggaaagcccacagatgtggaattttttttccattacagaatctcactgggattccagtcttcccttcttgcagctggccctccccacttccaagataaagctgaggccctgctgacctgcttcctctcctcttaagactactgcctcaaattcctgggagtttccaaggaaagcccgggacaggacacatgttttaggatgagctgtgtcggaaaatgaaatgggtctaagatttctccaagtcttagacacatctctacgcccattctaagcctgcttgaaaataaacagttcaagagattcacactggaatggccctcagacttcctttggtcagtcacaagcctaggtcttgctgccaaggataattggtgcttccgcccggctggagccaagctacatgctgccaggctggtcaagaaaccctgggggtttagtggaagttgagggctgggagtgagggcaaacgcctgggaaacctgttcatctgtgattgtcaagactcagggatatttgcatggtatctcatattatttgtataaggtgaaatttattcttaaatttctcattctttagaaggtttataatgatgcaaataacacaggaaaacttttccagtgtttttactgtcattgtgagtctgttttctattccattttccatccatcactgagccagtgttgtgtgtgtatgtgtgtgtatctgggtgccaggtcctgtgctaggctgaagatattaagacagtgtattttattgagtttctgttgggaggactagaaccccaactccgttggcctccacctccatcttatgttgctgtcttcacatgcagccacaactgggattgtgggactgagttagttacatgagcagaaatgaggtataaggtgaagtaggctcatatgcgaagagtcagctcccagtggatccccgtagtgccaggaaatttgtgacctttagtttggaaaccctgcatgctctgagcccctgccttggggtttggtatctgttacagactgaatatccatgttgctcccaaattcatgtactgaaaccctacccccaaaagtgatggtattaggaagtggttagaattagatgcagtcgtgaggatggagcctcatgaatgggattagtgccctttaagagttgtgagagagattgcttcctgtctctgccttcctccgtgtgaagatgcagcaagaagacagccgtctgcaagccagcagaactcaaccgtgatctcagacatccagcctccagaattgtgaaaaatacatttctgtttcttataagcttatagtcgtagccc

SEQ ID NO: 30585 - DNA, 1096 bp, Bovine  19866880686588
  misc_feature (1)..(1): n is a, c, g, or t
ncctggtgggctgtagtccacagggtcgcagagaccgacacaactgagcgactaagcacagcacgtagtacctaattttaaatcgctagataaattttcagtcaaaggcaactctaatatatctacttgaaccactattttggggtagttgaggtatttccagaatttctatagttataaaataattaactgtaactaactttcataaggttaaatctttcccccaaatcacagtaatttcctccaatggaagtgctgggttcaaatgaatatagatttttaaggaatgcgtgctaaattgcttcagttgtgtccagctctttgtgaccctatggactgtagcctgccaggctcctctgtccatgggattcaacaggcaagaatactgcagtgggttgccgtttcaccctccagggtttcttcccgacccagggatcaaaccagcatctgttatatcccctgcattggcaggcaggttctttactgctagagccacctgctgaattcatcaagaagtgcttaccaatgtatattccacaaacaacatattacattatgcttacacttggtggcttctctgttcattcacatttcttaaattataataatgttgcatattttattttattagaattacaatactattgtaataacatttatattttattcacgctttttaaatttctttttttgaattttccatgaatatccttgatccagaagcacttactttttctgagtaattttggttctgtttagatatgtagcacccttgtctcaggtcaagaaagcattagcaaaagaggaatttgtatcaccgtgtttttgaaaagcaccgtctttccttacagtgcatttaaagttctcttttcccctctcatctcagtaaccgccagcccacccagcacttcccatcttgcttgtctgctcccatcaggagtttgtgtggacatcctgagcagcccattcagagtcctcacagtcctcgaaacggggaaactgtacccagcactctctaccaaaaggccaccacttgataaagcatcctttttaaaaatctttcctgttcccctatttgtgacgtggacttttcatt

SEQ ID NO: 30586 - DNA, 1764 bp, Bovine  19866880772188
  misc_feature (1)..(1): n is a, c, g, or t
nttaaacttacatcagttaataccaagtctccccttcccccttagttatcctaaacacttagtcctcaggagtggggctcctatggtgtcaaaacccagattcttaacccctaacgcttcctgcagcggagagggcatttgcttagggtacaatgtttctcaaagtgtggccaacctcaccacctgaaacagtgtgttaaatagcttctgcctctggaacaaatgaaacctgcacccttgttttcttctgttcaggaaagagaactgaaaggaggggagattgtttgatattattttaaaaaaacttttatgcagattgctgggctgcactccagacaaactgaatggttctttgtgggcatggggtatgtgaacctgattttaaaagcacagggaagctgggaaagcatcacccagaggatgttagttttctcagtctgatgaagaactaaaatctcatcaccatttctgcatcccagaatcttaggcggccaaatgccaaactctcctttccagctctccttggtttggatcctgccttcccaccaggcccagcgttaagtctcagctctctggaagccttcctggatgatgtcaggcttaattctcttccttctaatggcactcagtacctgaaccgctcaagggaatgaagatgcattctatcttatcttttcccccaattagactgtgaggacttcagcttctggcagaaggcccagtgcatacgtaacagtttaacacttatgtgggttgatctgctaaagacaatgacattggaaagtcagtgttaaacacacacacaaacacaatgtagtacaaagagcatttcacttgcaatgggaggacctgggttcaaaaccagctttatcctttcctggctgtggtaagtcactgcgaggacaccagtgtgacatgatacccaagacagttgtcaactgccaacagcagcaagcaaccattatttctctgatcttgggaggtggttcatattatttatttctctttagagccaagaaagtaaaaactgaaacaggcatcgctatcatacaaacacagagagaaagccttggagacaattcccaaggtctgtggttagtcacaagctctgctggaacctcacgggctcaggcctctgtgcttccaccagggcagggaagagggggcagggaaacgctcagtaactagaccgtgcctggcacacctcgtaggtctgcaaatgttgagtgatgaaaagcttgcacacactacctgggacaagagagccccagggccctctccccctggggccccttctcacacagcccccttcccacctgcataccaagaacaaagcagagtttcataggagcaaggtaagtgagccagaggcccccaagtgggtgtgaactgaagagcagcaacagtctcggcttctggaagtactgtcaaagctggtcattaaaatcatcctcaaactgctcttccagtaaatgaaaaagcagagtgcagtatccagctgcctcagattaaagcagaggagtggggggaaatgagaaacagagtcaggatttccaattactgctagcatgagcgtgttcagaagggagaaaattaatggaatcatcaaaaggctggtgatttcacttaaaatgagttaaatcagcctcaatcttcccctgtttccagggagacctcaggctagtcactgcttgagctgcctgaaagccacccaggcaggatcagagcggctaagtgacagtcagccaagacagaggctgggga

SEQ ID NO: 30587 - DNA, 1237 bp, Bovine  19866880791083
  misc_feature (1)..(1): n is a, c, g, or t
nctgtcactcaaaagattaacagaaagagacccagggatgcccaagggaacactgcaacagccagatgtttctgctcctctcatgacactgctgcccacaaccaggaccgcatttctgacgccaccaagaagccacagaagagaactgcaggcttccggaataggttgaaactcaaggcatcaccctttagcgatgcagacacaaaaaaatcttgttaatagtgctttcttacagacagactcgcctgatgcccatttcacaggaatggcaccgctagtcggatgaacacttcctgcagctgcttggtggtgtgaaaagcacacaatgcccacaacgtgcacatccaatatatactgggacgtggctcccaccgctacgcatgcaccatgttccaagcaaggcttttaccctcctgagtctcactttcaaaatgacactaaaaagacccaccttcttgctcttataaacataagtgatcatggaaagtgcccggcccaagaattcataaatgcgggctcttactggggtctataaatgcatccaggtcaacacagcagctttcccttggtactttctaaatgtgtgtgtgtgtatgtgtttgtgtctgtgtgacagagagacagagaaaaggagaaagagagagaaaaaaattcggctggaacacacagaggcctatttacacttcctatttgtgttccaccatttctatcaaattaataaactaaagaagcccgagggaaaactaacccatgtctctgttttcccttgaagtccctagctttcccctaagagctgcttcctccagtttcaggaggcaaggaaggagagccatatggcttgagaccctagactcgcccagcaacaaacgagccccccaccatttgtctccgggcctctcatgtgggcgggcatccagctttcagttgggtgctctggtctgcgtctctgtcttgactgttcctaattattggagggaacgccgtggctctcctgacctcggagtttaaaagctgcgagtcctaatatcaaaccaagcagcttcatttaaaaggcatcctcatctgcatccataaaagtcactcccggagccctggcttgccccagcttcgggaatgcctgctgtcgaggatttatgacacgccctggctctaatcggccgcactttaactgctgctgttgcacatctggtcataaaagcaagggccggcccaacatggggacaaacacttttctttc

SEQ ID NO: 30588 - DNA, 1365 bp, Bovine  19866880811811
  misc_feature (1)..(1): n is a, c, g, or t
natgctcaggactaatccctgtttggggaactaagattacgcatgctgcagggcagctaagcccgtgggctgcaaggaagatttccaaatgctgcaactaagactcaaagcacccaaaagtaaaataaataaatatatattaaaaaaataaataatatctttgataggtttttttttttaaaaaagaaagacattcaggactggttcaaacagcttctcttgggaccagtcaggaggacccaggggttccaacgtcgcaaggacaaccttggggcccacaagcacactctgttcagggcagggttgtcccaggctcagtgcttcaccttcctttgcaggattttctcctggctctgtgtggtcccctctcagcccctggagggcccctccttccttgagcgtccagaaagagagtggagggtgtagcaggtactactggagaaatggctacatcgtgagaaagctggggaccccgctggcacaagttatttacagcttccccagcctcagcctgttggtgaagaattataggacttcccaggtggctcagtgggcaaagaatctacctgcaatgcaggagacgcaggaggatacaggtttgatccctgggtcaggaagatcccctggaggagggcatagcaacccactccagtattcttacctgaagaattccacggacagaggagccatgggacagaggagggctacagtccatagggtcacaaagggtcggacacaactgaagtgactgagtacaaggaacaattacaaaagcactgagtttggcacctcataaaccccttcgcgtccccctctctcacttcccacgtccccccccaccgtgctccagcttctcagacacttttagggtatcttcccctgggttcaccgagccaaatagcccgcgggaggcttgtaactgttagctcaaacagcaggctggctgcttggttgccatggcaacagctgttgtgagtaagtggtctttttggcagaagatttaatttaataaactaaatttgggggcccagtgggaagatctggtacaggctttattgggtatcttctgtggcgctgggctgcggcagagggtatgccggagaagggctggaagcttttgtcctgcagaggtaggcccggggatgagagctacaccctgtgtcctcagacaccctgagactccgctctccacatcacctaggagtgtctggccaaggtcttgcactactgcttccagctatcaggtgttggagcagccttcccttggggaacaaccggaaaatctggacgaagcatgcaggacttctctgcgaggtcgagaccgaggtagacacggccggtgtccactccagggacccatttcag

SEQ ID NO: 30589 - DNA, 796 bp, Bovine  19866880821049
  misc_feature (1)..(1): n is a, c, g, or t
ntgggagactggggtttaagtctcagctctgtagtcacctagagcagtggcacccaacctttttggcaccagaaactgatgttgtggaagataattttccacagacagaggtgtgtcagggggtggtttggggaagattcaagtgcatcacttttactgtgcaccttatctctaatctaacactgccactgacctaacaggagctactggtctgtggcccagaggtgggggctggggggggctcccctgacctagagggatgaccctctctgacttttacctctctgagcctcagtttcctaatctgcaatgatcctgtgaggattacgatgatggatgtgaagcaaaagcacactgcctggtacacctggaagtttaacacacgcagggccctcccctttccctgggcacacatggaccagcagaggccagcaagcccaccagcacccctctgccagtccagggccagcccccaacagtgacgcctgctgccaccgccactgggctcaccggctgtgatggaaagacttcagctttggctgcagcagcacaaacagcaccacgaggaggagaatgagcgccacggagctggcagtggaagccacgatggacagcgtggggaccccgagcgaagtgtggatatctttgtctatggaaacaagccatcatcaccagtgttttgtacccagacacatggaacgcgagcctcatggctgaccttcaaaggccccctgcatggtgccccagtggagacgtgctaggtatggccagggtcgcttttggagcaacagtgcag

SEQ ID NO: 30590 - DNA, 888 bp, Bovine  19866880832395
  misc_feature (1)..(1): n is a, c, g, or t
ncatcttcctgtcagctgccaaccatgctgaggacgtgatgtaatctctccatggtgtaattacctgtgactataaaaagacttggggattgtggtaggaggctgggtgggtcattatagagctggctgaaccctggcatcatgaaaagacgttgagaaattgccctctgcttgctgattgttgtgccatgattagaacaccgccagtgcatggtatgagctttgcactgtgacttccgaacaaaacaagccacaagtctaccagactgaacacctcagtgactctcctctgggttaaagcctcattaaacacacattccacctcccaaacaaaggtgccccactactctggtccttaaatacaagcttacaggttatccttacccacatctttctgtaaaagagggtcacagggtgctaataaaaaaaaaaaaacaactaggtgagtgctcagtctttaattgttctaggtaggtttgtagatgaattctttcaccacctctcaccgactgggagattcctttcttcttcatcaccccagcagcacctacaagggtgtgagcagtcctcccattccaggtggctgatactggtgtagtcagctgcctggactgtggccagatcaggagtgaccttggccgccgcgtgttcagctttggagcctagaggaacggcagtgtttagcgacgactgttccgcagtgtgctgtgactgagagggatgcctgctgctgggtctccctgccctgtttacccagctcaccttaagccagcctacagtttgaactctccacgaagaggatgagtactgcctcggtgcctcactgcctgccttaccttggataatcctgctgacctcgttgtcggtatttcgctagaatagggaaga

SEQ ID NO: 30591 - DNA, 1181 bp, Bovine  19866880859479
  misc_feature (1)..(1): n is a, c, g, or t
ngccttgcgaagcctggaacaagggctcaactccaaggtgcggaacaaggagaaggaggagaggatgcgggctgacgtgagccacctgaagagtaagccctgccctcggtaccagcccagccccagagctctgcatggcagtccaggccagcgtggatggagtttctgctccagacgccctgccttcgggcgtgctcttggcgtggctgcctttggctcttggatctggggcgggggtagggaagcctgtgtttcttcccccttcagcaggtgactctgatcttccaaaggatggggtcagggtatttccctctggagcccaccaggatcctgggaaggggaggggcagccaggaagggaggttgcagtgaaactgtggctgcagggttctttgaagagtgtatccggaatgcggagctggaggccaagatgccggtcatcatgaagaactcggtgtacatccacaaggcggccactcgccgcatcaagagctgccgcttccaccggcgcaggtccagcacctcctggaacgacggtaggtgtggcagcccctgggcaccagtgggcgggatgctcacggctgtcagtgacaatgggcaggaagaaggcagggtggggaggtggggaggctgacccagccctgaagtcagacagtgtggcctgagcccttgtggccccagccttaggcttcccccagggtcacaggagcccatggaccagcatgaggaggatggggagcaggggggtggggtggggcccggctcggggttggggacagggctgtgtcccagtggcgggaaggctgttcacggccaggcccctggggccaccatctccccagtgaagccgtcccagtcctttatgacctcccagctggaagccaacaatatggaggagctgaaggaggtagccaagcggctcagcagggaccagcgcttccgagagtccatctaccacatcatggccacgcagcctggagccccctctgcgcttccccgggggggaaagtgatgggcacccctcccctggccccccaaggccttcctcactgggggcagaggcgtggcagggggaggcctaactccacccagttcctctctgccagtgctccacctgggggtgggcagcctcaccctcagaggacaggagtgccaccccgtccccctcaccccagatcctac

SEQ ID NO: 30592 - DNA, 1152 bp, Bovine  19866880874071
  misc_feature (1)..(1): n is a, c, g, or t
nttactcgtgagctgcgtgttcatcagttccaggtactgggtcagagacccatctccgtcatctttggttaccactccccacactcacgccagcaggtatcaataaatcaaggctgggctggactgagggtttacggcaagggctgcccgtgctataagccaagcaaccccaggcttgttgcaaggcgctgggggaacaaatcagaatcactgttgtagggaattcccagctaccctgaacacacagacaagagggctgacttccccagtcctgactcccacctcacccccgagaggaaaagcagcagctgcaggagcaggggcagccagaggtcacttagagggaaatggcagaactgcccttgcacaacctctgaggcagccgggaatcaggacaatatgacgcagcattatccagcccctcccgctgggccaaatgggggacccataaatgtggcacttcaaaggcaaggtaatgctgccttcagtaaccgaaatggagttgctttagagtagagtacaggccagtctataaataccagggattaaaaggcttcctgccgggcccaactgccactggcctgaagacaaaggctctctggttctccagaccccaaacagactccgagacgagtccttcgggttagagctgccatcggccaatggtcaacccctccaaagcaatacccaaaactctttttccttcttttccagcttggccagcctctcctttccacatccttcacccaggaccatccactccccagaacccctccacagcagctcccccacgcactctggtctctccaggctccccctgtctccctcaccacctcatcctccaccccaacttcttcatcagtatatatttttatctgccatgaaaacaacaaagactttggaatcattttaaccttggtttgaggtacacacacttacactacttttttttgggggggggggggggcggcctgtgccagagtcttcattgctgcgtgggcttcctctagttgcagcaagcaggagatactctctaattgaggtgtgtgggcttctcactgcggtggcttctcttgttgcagagcatgggctctaagggctcgtgggctttagcagttgtgacttccaggctctagggcacaggctcaacag

SEQ ID NO: 30593 - DNA, 2455 bp, Bovine  19866880978021
  misc_feature (1)..(1): n is a, c, g, or t
nccctgggggctgggtgggagtggaaggtaggtgggggcagtggatgtctgctgggagcatggctaggaaggggaggaaagacaggtgttggctgaaacaggaagtccagtccagtgactacttactgaaaaaaaggagagatgtaaaccagaactgatgttgattgggaagaattaatacggtgtcattctaaaaatgagagtgaggaggaggctgtgggaataagaggatgtgatgaataaaagattactgagaagcaagggtgaaaacagaagatgctgtccagagcagagtggggtgaccagccatttggcaggagacttcacatcttccaacaggtcgggaggggaactgtggccgtggtattaggactgcaccagggcaagggcaaaaatctacctttgacaatggcactgtgaaaatggaaagaccctggaaatctgaccaaacctctgttccaggcctaaagctgctgccaagccttgcgcttccaagtagtgtaccctgtagaccggctcaaaggcatagatccaggggcaggaacaaaaacaggccttcaggatgcagagtttatcccgaggaccaggttggcacttggatcccaggggtgagcagtgaaccagaggagagactgatggggagtgagctccaaggtcataagagttggcagagggagctctctaagggtctggtttttccaaggcaaggcagtggtatggtgccctcatggcactcccccacaccctttgggaccaactctccacttcctccatcccattcccaaagcgctgtgagtgtgcctcccagctcttctggtctcttcccctccaccttcttatctagtcagccatgtttgcctttggtctccctctgaactcctctattcagacatttccttaggcttacccaaatctgaccctttattcatggtctcgctcaagaccacccctccttccatcctccagagaagcctttcttgactacctggcccttcttaaccttaccttccttgcattctgccaatgcctgactatacactcttgtgtcttgtttctcacgtgttactgattttctgtgattaaactctttgaggacagtgaatccttagtagcataaaacgtaacatctagtaggtacatgattaaaagcttaattatcaaaatggttgtatgttgtgtgtggtgttttcctttttttcctgctaacgcttcaaaaatactctcatatgcattacaatctcataaagtaggttgtatcaatagcagactttttttttaatcaaggaaagaaaactgacacagaaaaagcccaaatgactcggatcaagccatttactgctatgatggtggggttctcactccctgcccagacccctaggttcttaccttggtgacatagcgtacgtattgtggccgtttggatttgaggatgatgcctatggtgcaagggatgagaatcaggatcagtgatatcatgatgccgccgtacggcaccttgtccttcagggacccatcatagatgcccctggagtaaaggtacaggaggaggggcatcatgcccagggcgaagaaggtggagcaggtggtcatcacgatgctgagagggagacataggaaaaatggagagagagagggcgctcattaattcaggcatacctcattttattgcagttcacagttgtgtttttataaatgagccttcatggcagtcctgcatcaagcaagtctattggtgctgtttttccaacagcgtttgctcacttggtgtctcgtcgtgttttagcaagtcttgcagtatttcatgctttttcattgtatttgtcacagtgatttttgatattactattgtaattgtttaggggcactgtgagtcatgctcatgtaagatggtgaatttcaaggatataaatgtgtgtgttttgactgctcccccttttctctctcctcaagcctccttgtttcttgagacataatactgaaattaggccaattacaaaccccacactggtctcttaagtgttcaagtgaaaggtagggtcagatgtctcttatgtttttaagttaaaaggtagaaatgtttactcttaggagattctgtggaaatcccaggcaggctgaaggccaggccttttgcaccaaacgccagttgtaagtgcaagggcaaagttcttgaagaaaattataagtgctaccctagtgaacttacgaatgagaagaaagcaaaacagccttatggagaaagttgtagtgatctaaagagaccatcaaaccagccacaacagtcctttaagccaaagcttgatccagatcaaggcctgaactctcttcaattctaggaaggctcagagaggtgaggaatctgcagaagaaacatggatgtttcttgccatatgcatatatgtgcaagtgcagggtgaagcagcaagttatccagaagatcttcctaagatcatca

SEQ ID NO: 30594 - DNA, 865 bp, Bovine  19866881019393
  misc_feature (1)..(1): n is a, c, g, or t
nttatgtatgtacatgtctagaaaagactgtgtcttattcctctctatatacacagggcctaagccagagcctgatccaatgcagttgtttaacacatgtttgaagaatggatgggggaatatcaaaccttacctaaaagatatcccaaagaagctcctttttctattacttactataaaaagagatattctttgtcaaactaccaccaaatgcttaacactcgcaaattttttttccttttttttttaaaagaaacatctattatataaaggaagccatacattaaccacaggactttccccttgaattaaggaggaaaaaatttcctgagccattgaaaagaatgcagctgagtggctgacagtgtccatggaatttattcccagtgaaactggcgttagcctgagaatcctcctcacaaaacttggaagtcactccaccccccagataactcacgtcacccacaagacaggcagtaatctgagatgcccaaggttgctaagcctgaaatgtgtacgttaaggcaggaaaccctgacaatttaacagccaatgtgattagcactctggtttttctggcagctataatatgcatgtacttgagtaaaaacaaaaggcagattcatttataaaaaatatttttgacaccctgaatttactttttttccatagactcaacgttgtaaataatgggtgagtgtcccagcccaatatgctaatgtcgaattggaaggaagagaaggagaaggagccttccccgtgtgcctgatgagtaggtaacaggcacagtcaaggcttccagggccaggccccccagccgggtagaaatccctggcccttcacactgttccttcctgcctcagga

SEQ ID NO: 30595 - DNA, 1182 bp, Bovine  19866881064458
  misc_feature (1)..(1): n is a, c, g, or t
naacccacgccctttgcaatgaaagcacagaaccttaactactggactactggggaagtcctaaaggcattatcttttgatctcagggcagaagagcccaggacagtgccctttgaactctcagctcgtgccccttgagttcctggccctttctaccacgcggaggatgtcagagctacacgatcacacagcgcccatcggcccaggccttaccggtccacaaagcaccccctgccttctgtttcaatgagccccacagcaacctgggagccagccaggtatagccatcactcttaccggagcaacacggaggcaaacgtgcccacggtcacacagttagtgatagattggtaccagaccctgcgtctcctctgaagccaaactacctcttaaagatcagagaatcttccacttatcactgggccagggtaccacatgcctttctaagtggcccaagcaaggcattcccagagcatctctgtgacctgatgcagatgggaaaggatacgggggcaggtggatccataatatagatgaacaaggcaagggagggaaaccctggacagcatgactcagggagttctattctccatctagagcacacagctgccccagaaatgtgaacttgaacaccctcctctccctcctgccaccccggggcagccttcaccggggcaccagctggactctagtgagtctcactcacattttgtacctaaaacccaggaaattcacagctggccggcctctctccttcagcgtgctagggctttaagcgaggcctgtgagcagtgggtctctgctggcctcatttcctggctaaagacctagatagagtgtctaaattttcctcgggctgactgctgccccagatttagcctctctgatggataagtctgtctccccctgccagtggctgtatctgtcactccatcccatcccctggcttcctaaattacctgcctttaagttgctgacaatctaccccgtttcacttctcaaaatgtacagaacagtcaaaagaaaatgcccacactctaatacaggagggacccatttgagagcctgatcctaggggccacatgtagctgggggggagaaggctcaatgctgtcaccacgccaatcctcaaatccatgcgatcctaataaaaatcctcagatttccttctctgtctgtttg

SEQ ID NO: 30596 - DNA, 946 bp, Bovine  19866881093049
  misc_feature (1)..(1): n is a, c, g, or t
ncagccacaccctagacccaccgcccatgaggtttccttctcagctgctgcaccaaagtccaaactcgttactcaaaaggcaactgcggtgtcaatttacaatgtaccaaagtacaggttgtttctaagacaaacttttaaaagctgactgctcagcactgtttcagaaccacctcacgaggtatccgatttgcactcttttgccccttacaccctagccccaaaggcccgaatatgaatgaggaatgtgtctaaggatcactggcactcagcaacacacacatacctgcacttcacaaagaagccaggactgcagccagggtgcataggtttgcatggcaccaagggaagccaagctagtcggcacacgccataggcctgttactcatcctgggtttccgattctctctgccttgttgatggaaaaggcttgttacatgtgcaagtggcgatcctgagtcttcgcaggtacttctcgcagtggaataatgtgagcagaacaatagtctctccctccccacctcacccccagctgctgggagtaactaggcctacaggaaagagaatccacgtgcttcatagactccacaggagtgggtgggcaatcctctggggctagtctatttgtacttgcagtccatgtgcaaaaccaaatgaaaccatacactccaagatggcagagaagttgcagagcaactgattctgaactgtgggcctgctgctttctctcacacaatcctctcaattttcccagccagcctcacctctctgagggacagagataataaagagcaaagagagctgtgtgtgtcacagaaatcccttgcattcctatacactaacaatgagaaaacagaaagagagattaaggaaacaattccattcaccattgcaaagaaaagaataaaatacttaggaatatatctacctaaagaaacaaaaagac

SEQ ID NO: 30597 - DNA, 951 bp, Bovine  19866881112179
  misc_feature (1)..(1): n is a, c, g, or t
ntttattcttgttacttgtttccgtcttgtcactctgtgtttgggacccaggactgtaatatctgggttaatcaactaagttattcattggacttggttataacctaaccatggctgttttcccaaaatcaaatcttccctcaaagatttgcctcctttgaggatatgcaggctctgagcggtggaatgttctggaaaatcatgacagcatcctttgggagacagctgttcctgagatgacagttctagaagggagaatgctaatttcaaagttattactgagccttattgactatgcaatttatttagttaaaaacacctacagatctccctggtagcaatctgccttccaacgcaggagaagcaggttccatccctaggcaaggaaccaggatcccacatgtcatggggtaactaagcccttgaaccacaactagcgagaaacctgggtgccaaaaggaaggacctgtgcaccaaaacaagatctgggacaccaaaatcaaataaaataaaactgtttattgagtgcccattctgtgacaggcattgttctaggggctggagataaggcagtgaacaagacagataaattcctcttgcctcatggagcttactgtcaaatgtgggaagatgacaataacattaattgcccacatagaagctccgtgacgataagggtgacggaggaaaagaagcagggagtgctggggaagggtcagtctgcaaacgcagaggtcaggggggtctcctgcaggagggacagatgactcaagacctggaggaggtaaggagtgacataggcaagatgctgagaaggatgctgaaataaaaaaggatcgactctgcccagcctcaggcccccagtcattacagcttactgtcctgtagcctacatacatacaccatttgcatgttggctcctcatttgctcattctaccctgggtcgccaa

SEQ ID NO: 30598 - DNA, 1061 bp, Bovine  19866881115133
  misc_feature (1)..(1): n is a, c, g, or t
nacacctgtggttttagtctgcctaatatctattctctcttccctggtgatagaatctctgtcttctttttactctcagtgcccgtcatcgaagtgcactgattcctcctcctagttgcgggctacaggtgtgacctggacttgatcaatgagtatgtgctctctcttgggtcagggatggtcatgagacccaacctggaccatgaatttgattctaaggcttaggtacaactgttgggggatggaattctggttgggctgggacactgtgaggatataggcctagactggttggtggtcacttggtccttatgaatgaacagtttgctggagaataaaaccagcacagagcaaagcaaagcagagagaggaaagagacaggtttctgataatatgttgtgagcatctgaatacagctatgcttaaagagcccctgttttctcccatttatatatatcagtaacttcctgtgatagataaagcatggccacagtttctttgtggctccttccacaggaggtagagtctatgtccctgcctcttgaatctgggctggcctgtgacttgctttgactcgtagaatgtgttgggagcaactctttgtgaggtctggagactaggccttaaggggccttgtagcttctgccttcaccctctgggacttctgccctgaagccaccaagtaagaaagtcagcctaacctactggaggatgagtggccatgcatagcagaactgacgtgctctagccaactgctcataccagttgcccaccttgtcagggagggcctgacagcctaatggaccttccagcctgataagcagctgaatgcatccgcacgagtgaaaccatcagaggaagctccccgtcagcccacagaatcgtaagttgttattttaagccactaaatcttgacattttgttctacatcaataacggcccatacactccttttttggcttaaatcagtttgatgttatttgctatcattgcaaatgagactgatttgcaatagttcgatcaatgtagttatgtaataaactaagctgatcagaaaggac

SEQ ID NO: 30599 - DNA, 1612 bp, Bovine  19866881136460
  misc_feature (1)..(1): n is a, c, g, or t
ncaactgatctttgatgtttccagaaggctcttaatcagtcctaagccatactcatggaggtgacccagcttgagatccccagaactgcccgaaacaagaaagatattagtgacagtaaataacgcttaaaagcagatattgtgtgcataaagtttgaatgtattatttcatcttcataacaaccctattagttgttgttagagatcagtactattttaatccctattttacattttgggaaactgagtcgtagttaagtcatttgagtcatttactccaagtataaagcaaagaagtagcagaaccagagctcacatagagatgacataaagttgatggtcccaatcactccaccttacgaggatgtcccaatttgttgcagaacacccacgagccccagtcagcttccagtcttctgtggtcttagaagcaatctggctgccctacgtactctcacaggagagccaaccatttggttgagttgactgctccccaggtttcctggggtgtcctgatcgcccaaggccatctcccacccaaatattctccttctatcagttcagttggacaaacattaacaagtgcctgtgattttgccaggcctgtcctagcggtcgctggacaaaataaactatgatacggggttttccctccaaggcaccactgagcaggggtggagagatgcacacacaggcactcctactatcaccagcgaaggtgtgggctgagtgctgccgaacacaagcagggcaccgagccaactcggggtttcagggaggcgttctgaaggaggtgatccctgaaatgaggcttcaagcatgagtgcactttagttaaaaaaagaagaagaaagacagaggaaaaaaaaagaaagaacatgggaagggcatctgagtcaaagagaacagccgaagcaaagacgtggggcaggaaagccctctgtatacataggattacaggcaaatgagtgtgaggcaggagggacagaagatgaggctggacacagagggaggacccaattcatggcaagtcttatatgccaggctgagaagatgggattttatcctaagggcagtgaaaagccaatgataggattttgaacagagaatgacatggtattccagaaaaaccaatttggctagataggttttacggtggctgtaagtaggacaaaaccaaagcaggaagatcagtcagaaatctattggaaacagaacagatacagataaagagggtgggccgagggtacattctgcatgtgatgaccctctgacccctcagctcagcccacggcctctcattttttccctggattattttcctaaaccccccagggccatctgcagggtgtctgtgtcctcagcagtggctcctgacatcttttaatatcactggcaaatttaattaaagtcactttcctctgctcttccagatcattaataaaacagagccaccaggccagactgagcaaattctccctcttgctacgccctccactttctccaatgggaacactgctccgggtctgtcaccagccctgggtagacgcatcctgctctgcttctaaatctgggcccctgcacagacgtcacagccaatttacattaaagt

SEQ ID NO: 30600 - DNA, 1914 bp, Bovine  19866881170060
  misc_feature (1)..(1): n is a, c, g, or t
ncctagagaaaccatctgcccaaaggttacccttcacacaagtcctttacaggaaattgtgtgttttctgtttggaatggggtgtgttcattcttttgagaagcctttttacaatagtataatggttcctctggaactcctagcagtgttctctttctgccctctactgtatttacagctgctttttccctaggggagcattcatctgttttaaaaaacagagagagaaaacaagaagttctctctaacagtgaggtttggaaatcaaaaccgtgtttgcccttcaggagggcaagttcttgaggggctgttgttggggtggaagacaaggaagtccggctgtagtgtcctgattccctgccctcactgcacccccgcgcccctctacccgcagcgtgcttgtgacagatgtgaaggggtttgagcacagggcccattatgaccccttggttgtactagatcaaacattgcttttcagcccctgagtaaggcagtttttctggcaggccactgtctggccccgcatatccatgtccagggtcctggactgatgttgggcctgaagggcaggaggagcctatggtgattgccctggagtgtggaggcagcagcaaagccacaagcgtttaggaaagacctctcatccttaggatgctttcattatactgatgcttcaaggccttggagctggggtctgccaggtctctgggtgcagttagtcaacgaacttcaccccagtactccttagcctctttttgcccagttttaaccacatagctggttgtggacgtgcacctttgtttgatgaggagaagaggatttctgctttgcagttgagtaactgtgccttctatttaggttctgtagagggttatatttgaaaagctaatgagtgtttttttccactctgcacacacagtgatccagagtgggctgcagcgcaggtgctgttgaaggcagatgttgagctgacagtaagggcagctgggccctgaagctccagcggcctggccccctggctgacagcccatcccccagggccaggtcgccagagagggcttcagcttccctgaaatgactgctttcttatggctagtgtgaccagccagaggagggggtgggtttcctggggaagagggtgggagagtttttaattaagccagtctagtttggcagttagctccgacttgcctccaagtctgtgttggctgataattcccttcagctctcagaacaagcctttttcgtttccaaacacacaccgccccccacgcccccaaaactacagccttccttgagtgttaactgtgtgtaccttctgcttcctttctggaagaggcaggtagctactcgtgaattttttcccctgagctgctctggctgcattggagttcctggagactcagggctaccggacattctcatctggcagaggcctggccaggagccattcctggagggctcagtggacagagcactgggaacagtgctggggctggcactcagtctggggggctcggtgggaggtatttgggaaaccttgctgagtgaagagttgggagagctgagttttggttcagccactaacaagccctgtgttcccggggcaagctgtagtccccctctaggcctcagtttccctctcttaacatggataggttgaactttaggctgtaatgtgttaggatcccaagacagaccccatgagtctgctcctaataaaagatgaccagaggcagcaaaggtgggtgcagaagaaccttggatgatactagagatgttttccaggttcatctcttggtggcagagcattgggtgtctttgccatcccacccccagggtggtctttggaggtgatgcttggcttgggccctgctcctttcgtttcctgccctggggaggggcgggcaggca

SEQ ID NO: 30601 - DNA, 930 bp, Bovine  19866881200395
  misc_feature (1)..(1): n is a, c, g, or t
ncttgagataaagctgttcctgctccagccacagtccccattcttactgccctcgcgggtgcgcgaacttaacccaccacccggacaccacagtccattcaagaatgcagaggataaaaggagaaagggaacaggagctcgatggagcaggagacagctgttacccaggggagagtgggggaaagggtgtttctgaaagttcaggcctctgcccatcgactcagaccttgagctccttcgcagcaccgtcatcactaacctcagaaaagacaaggtggacaaacgatgagcaaaacctggtgggaaaacgaaagcaaccatgatactgacgacaatgaaaagagacccccgagccagccacggggacaggactcatttccacgcctcacgggcggagtgagaggatggtgatgtgtcaaactggacagacaggagaaaccctgtcccccccgaggaaagttagaaagcaaaggaacagtcagaagaaatgtggaagagaaggtggcgagagggtctgactttgctatgggtcagggacacggcggggagacgggctggaggtggatctgttgctgtcattggtgtggattgaattaaatattttgccaagtgggtgtttcctctgttccactggacggacggactctgccctttcagctcactcccggggcccagtccagtgatgctccagcggctcgggtcctgaggctgcctctctggggtgtggctcgtcccccagaggtcacaggtggggacgcacccttctctggggagaagttgcaggcctgcccagccagaggcctcgttctgtgactcagaaccccttgatgtagcagtaggcctccagcgtggcaaagagtatgtagagaagccacaggctcacaaagagccaagtcgggccagcttgcagccacgagggccgcccagctc

SEQ ID NO: 30602 - DNA, 1412 bp, Bovine  19866881208955
  misc_feature (1)..(1): n is a, c, g, or t
ngctccatacctaatatgtctgcccagttaagattaattcgtgatctagcaattgagtttagaatgacatcaggtgcaaaaggaagtccaactaattgttctactgacctgtgtcgcttggggtctccttatgaggctattgggagtgttggtggagatccagttctcttaccccctcagggactcagggttcacgcactgcacgtttggacaacgctaaccctgtttggcagcctcacaagcagctctgatcgatttcccatccgcagctcaacccttgtcctctcccaaactgcttcacggtgacaaatgcagcaggagggggcctccacactgacatcacccccccaccagcagcagcgatgccaagaacttggccgcttaaacaatagaactctatgtggtcaggagagaaagggtgccctgtacctgctaagtgggggccatgctccccttcccagcctctgccatggggactgaagaaagaggccggaatgaaggcagggatcagccagaaacatgccttccccacccccacaggcaagtaaggcttctggcccaagcgtcagctagtgaacctttccgctccgcagggctgggaactcagatgtacaaggtcgatccccctgagcaaggaaggtgcacgatggcccacagagggctcagctttacaaatgagcccattggccaggaagatgtaggtatttacgccagagcctcggccggctcagggtctaactagacaagaattcaaacaaaaaccaataatcactcccaacatggtattgcgggtagtttctaactatgtacatctggaaaggatgacaggagggagcagaaggagacaagaaaggagtccctactcagggaatttgtgttcatctgatatcatgtgcaaagaactgaattaatcataatctttggctatgatttttccagtagtcatgtatggatgtgagagttggactataaagaaagctgagtgccgaagaattgatgcttttgaactgtggtgttggagaagactcttgagagtccattgaacggcaaggagatccaaccagtccatcctaaaggagatcaatcctgggtgttcattggaaggactgatgttgaagccgaaactccaataatttggccacctgatgcgaagagctgactcatttgaaaagaccctgatgctgggaaagattgagggaaggagaagaaggggacgacagaggataagatggttggatggcattagcaactcaatggacatgagtttgggtaaactctgggagttggtgatggacagggaggcctagcatgctgcggttcatggggtcgcaaagagtcggacacgactgagcggttgaactggactgaacctggttcatgacacactcaatatggcctatgcaggagccaca

SEQ ID NO: 30603 - DNA, 1327 bp, Bovine  19866881219282
  misc_feature (1)..(1): n is a, c, g, or t
nagataaatctactactggaagagggggaaaggccactcatggagccagtaagtcaagaagcacactccaggacgtccagctgcagctcatccctgtcccaagctggccctgtccgcctgctgtcaccggcttcgccatctgcagaaccgggtttcggccctgttctctggggcgggggccgcgtccttgggaacgaggaggagccgagtcacatgaagacatccctcacccacccactatctaatccatcatcggccctgaaaatccacatccccacttttgcccgtgctctcacccttccctgacctcacagcccccgcatttacacaggtgcacaggagggcctcgctcagggcacctcagagcagtcccagagatggaggaggggagataagggaggtcaaagcgggtgggggctgcagcgtggcggtgtctgctcttcttctccacacctccccggcagggcctgacaacagcatgccgattaaagggcttttcatgctgctgagggaaagcagacggccccctccagctgctgggcagctggaagcgcctgtgttgttttagccaggagaggcctgacccccgtcaccccagccccgcccccctccccaagggaggaattccgtggccaccccggcttgtccacccagcttccctcctccactctgtcccccacagctctggagatgatcaagcaggacccaggagacaaggctgtcttacaccaggtgccattgttggggaggggtgaggaggtggtcagtgggttcaacaaagcagctgagaccctgggtggaaagaagcactaacaaggttgcaaaggtaaacctcctgactcagaccccatccgtatccccaggccatgccccatgccagcctatcagaatggcgagcacaaatcaagcgtgagttagggcccaggccatcagatttctaaaatatgaagccttcttctaagtgacagagccagacaaaaagctacatactgtctgattccatttatgtgacattctggaaaaggcaaaactatacaaatagaaatcagatctgcaattgctggaaactggacgtagggggagaaaaggagaagtggtgatatgctctatcttgattatggtggtgctgatacaactacataatcttgtttaaaaacatcaaagtgtacacctaaaaaggaggaagtgtactggatgtaaatcatatctcaataaacaaaaaagagagagagagagaaaagcacaaaccccccccccaaaaaaaggcatgaaacctcccacaggcacacaaagaggtttctggaaatttttctgcccactcccttca

SEQ ID NO: 30604 - DNA, 829 bp, Bovine  19866881247174
  misc_feature (1)..(1): n is a, c, g, or t
ngcccaggggctcttcaccctagtcctaggatcactcggagccccacggtcactgacgtgctaagggaggctctgacgtgtgtaggcacacagacagaaccaacctggaccaaccgacagaactccctgcccgatgcagcagctgagacagaaaaaatggcagcagggagaagagggaaaatggcctttctttgtctctgtagcttcttccttcttgttgcctgtctcctgacatctggtgggatctagggaggaactgcccgcatcctgccctcccgtgaatctctccctctcactgccagcgtgaacagccaggctggcaacagcaagtagggtgccctcgctcttcccagggtccctggggcacctgaggggtaaactgaagtctctgaggagacaccaaaggcagttccccccagcccactccctcccccagcagctctgtgctcccaccttctccagacaccacattttgggccccctggctcccctgtcttctggaaagggaattaaaacaatccatccccgccagcctccaacgctgtcatttctgagaatgcttctgtgaatgcatttactcgtgctcctggggccggcgggaaggcagccgcagagctggttttcatagcaatcttctttattacaattgctccctgactattccagccacgaccattttttcattacagcattcattccactgacagcggcttacggccaaattcccaggcccatttcctgtccagcagagcagacagggtcagacaggcaggagttccactagcctgggacccccacaggagaagtcgtgagaggccttaaaataatt

SEQ ID NO: 30605 - DNA, 882 bp, Bovine  19866881265555
  misc_feature (1)..(1): n is a, c, g, or t
nccaatgcaggagacatgggtttgatccctctttctggaagattccacatgcctcagagcaacgaagctggattgccacaattactggagcttgcgcctcctagagcccttcctgaggaactagagagtagtccccactcatggcaactagagaaagcccacacaggatgacaaagacccagcacagccaaagataaataaatttaaaaaaaaaaaaaaaaggcagaaggtacttgagggaggaggttagccttgccagtgctccccagagcagaagccagcatagacccagtgtcacatagacatgtgtgtcctggagaagatggacaaggggacctcccgttcccacagaatgacttttgctgcttcctacctgcctcctccatacatcccctcccatgaaataatgaaaaattcatgttaaaagcttcacatgtgatctgatttttcaacactttaattggattcatagaagccgggagtagtaagcccagggcccttccaccccagggttcccctccccatacctccccctccctctccaccttgctccttctcctgcttagctctttctccctagacacactcttctgacttcctccacaatatgctcccatccagacctccctttcttcctttccttccagctcacgcccagcagcctcttcctctcagcacccagcacctttttgagagctcaaattttctctttcttccctaaaggagggaagagagcagtcccatcactcaaaaccctgatgaatggactgtttccaaatacttggtgaatggaatgcagctaaagaaatttgattttattgctttctagaatgtacactatctaccaagagttccaggacagcagcactcaaagtttttaat

SEQ ID NO: 30606 - DNA, 3874 bp, Bovine  19866881328454
  misc_feature (1)..(1): n is a, c, g, or t
naacaaagtcaacccttgaaactgctcaggtgtgtatcaagcaggggtagatgtagagagaatagacacagaatacacacagatttaaaatggtcacctctaccatgggaataggtttctccaaatgaccctttaatcaagggacggcagaggattcaatggttggatggcatcactgactcaatgaacatgaatctgagcaaactctgggagatagtgaaggacagggaagcctggcgtgctgcagtccacagggtcacaaagagccagacgcaacttagagactgaataacatgatgctaaagctgaaactccagtactttggccacctcatgcgaagagctgactcatttgaaaagactctgatgctgggagggattaggggcaggaggagaagaggacgacagaggatgagatggctggatggcatcactgactcgatggacgtgagtctgagtgaactctgggagttggtgatggacagcgaggatggggtcacaaaagaatcagacacgactgagcaactgaactgaactgaacaacaaagaggccttgacatgagagctgttgatgggttcggaaccctgggcaaggcccttattagtctgggctcctttttctcgtttagaatgaagcagtggtggagttccctgatggtccagtggttaagaatccaattgctaatgcaggggtagtgggcttgatccctggtctgggaacattccatatgtcatggagcaacttgacttctagcaagatggaagaagccaattacaagcctgtgtgctaccactgctgagcccaggcacctggagcccgagctctgcaacaagagaagccaccatgatgagaagcccatgcacaacaaagagtagctcccactcatcgcaactagaaaaaacctgcctgcaccaatgaagacccagagcagccaaaaataaacaaataatatgaagactcttgagagtcccttggactgtaaggagatcaaaccagtcaatcctgaaggaaatcaaccctacatattcattggaaggactggagctgaagctgaagctgaagctccattactttggccacctgatttgaagagtagactcagtggaaaagaccctgatgctgggaaagatcaagggcaggaggagaaggggacgacaggatgagatggttggatggcatcactgactcgatggacatgagtctgagcaaactccgggagatggtgaaggacagggaagcttggcagggtgcagtccatggggtcgcaaagggtcggaaacaactgagcgactgaacaacaacaatacatgtctttaaaaaggcaaatgcagcaggggtactagaggcggccacctcgatagcccaccaccttacagccaggccagagcttccccacggctccgggcctgagccagcttaggctccctgaccccaggagagccctagaaccaggaagcagctgagcacggggcaaggcttgccgttttgcccccatgccttgctcccccaacccccactcctgccacggccatactgcgtccaactgcttgtggcttagaacccacccccgccaaacaaaactaacaatgcccgcctcgtgtccccaacacacccactcacaggcgtgtgtgcagtaggctctgtaaatagggcccagtgctcggatgaagtgctgtgggtcaggaggcgtaagggaaaattacaaaccaaccagcctgtctaaataatttctctctggggcacctaaaatgggcatgcacggttcaccgttgtctgaagtcgtaccctctgtcttcccacacagacagacgctgagaactggaggaaaacaagatctaaattctacagaagatacttcttctaggatagactatcccaatatagcatagaggcactttttttaaactttttccccaaagcatcactgactcacagccactcgaattttagaaaaggcgccatctctattgactcatgctcatatgacccttccaccaaaaagaatatgaaactcttcacagtggttttgcaatgacaagtactcagaagtggtaagctggcatctctgtagtttttctcactaacttcgctgaccttgacctgacaagctcttcctttaaggacaaaagctagaaacaaaaattcaggtgagaaggaaggaggggtcgtggaagggggagatggaagagaggtcttttttaatttgtcaaataaagtatcataatttcactcttctcctccaaacaataacactgcacatatgagtgtgctcataaactatataccctgtctacttccaaagtcttcttacaaataaacccagaatgaggctgctcagaccaaagcagagatggcagctgacttctaacaagttggaagaagtcaattacaattatctcagcagggccttcgattagttttttctttttttccagcagcagaggccaaaagtagaacattaggatgcggtgggtttgctcttaccaccacaagcatacaaactcaataaaatctttgctagtggagcaagttccagacccctcccagtcacactgcacctctatgttccaaacagacaacatggggtgaaggagcaaggcgactgggaaaaccgatcttaaaacaagattaaaatggactgcaaggctaggctctctggggcctccaaatgtgtttcagatcctcttagcaaagggagaacttaagaaaggcctttgttgtcggagagaaagtcataagaatgaccacccatccccacccctggctcttattctgctggccatgatggaccaagacacctgcagaagatacgtgggcagacatccagaaggccagtgatagaaataaacatcaaggatttgtttttatacagatattctaaatgcacaccagcccagccccatctgcggctgctaacgttagtgggttactcattcttccttccaatcacgtcatgcgcaagtctccaggtggctgtggggtatttgcttacaacggctaccgctggtttccctgaaaactgtttatttttccaggcctcaggtcattacatcaccccgcggtttctgggcagaccaagagcactggtttagggggtggggggatccaaccgggaggtgctattgctctgtgaccccgaagtcccagctctaggagcagccaccccggcaggaacttccaggtaagggaagtgtatccaaaaggtgacggaggggcccaaagtaggcctaggagagcactgttccgaccctggcaggtcaggacaggatgctgaaaacagcttatttgtgactcggatggtgactgaggcaaacaccctcgtgttcaaggagggcaggggtgcatttccacctgtgtctccgctggtggctggtctccagggagcagggttaccagtggctgctgcatttgcagatggactaaaggaaggtctgccaggcaaacaggtgaggaaggaaagacacagtccatttgaattgaacccacagcgccaggtgctagggcctcttgaagtcagatcatgacgttaactagaaaagatggagataaaggaaagaaagggatgggaggagagaagtcaaatgacctcacaggtggccaccggtgggtatcaggccaggaaagagggaaagggctgtagtacacgccttcagggcatcgtctccatgaacagcaaagtgaaggctcacacgaccacatttcctgagagataatattttcccagaggagaaagcacagaattttgtcacacagaaagagagagaggggaaaaaaaaaaagacttttataaatcacatgctgtaggcacatgtccgcatgtaacaaaattagaagcagttaagatatggatgaaagatgagatgaagcctagttt

SEQ ID NO: 30607 - DNA, 1008 bp, Bovine  19866881354002
  misc_feature (1)..(1): n is a, c, g, or t
natttgaaccaaagtttgtctaactctcaaattgggactcttaactgttatattcctgcctctaatatgtgccttcaaaatacaagtttttctgtctttgcacagatgtctaattgtgcaagacatctggctaaaggcacaaaactggggattaaatatgtccaaggagtttttacatgttcttaatgaaaatacacctctcacatgggaaaacagtaatagcaaataatttctccttaatctacatttcatcctagttaattttcaaattttttcaagttggctgacccatagccctttacctcaatgttatctgaccatttaaatggtctatttaatggtgtgagtgagcatggattttgaccttagggggaagggtggagaagccagaaaatggaagtatggaccctaaccttgagatatttgtggtctacttggtcagagagagatgtgcccacttgagaggcattatgcagcagcacagacacaggaccacaggaggcggtgggctgctgggaggatgaaattcgggagactgaggccgattgcagtgaccttgtggacagtcagggagtgttcctggccgaggggcagggtgcctccatggctgggtgcaaggcctggtgtaatcgcaggcagttcatgatggaggaggctgtggctctgcagacctttctgtggaggctctccagcccctttctgagtgccactttgtgcagaggccaccacccctgattgcaccattagctttggacccaggtcccgtggagatcacaaggtctaaaggctgccttgtaggaaaagctccacctggctgtccagttcttccaacacaggctagtggtgaggaacacaggctttggggtcagatgtggtcaggttggaaagcagctttgctactgaggctgtagcaggaaagtgtctcagcctctctgagtttcagttccctcttctgaagtatgggaattttatcaggggtagtaaggttgcatgaagataaataagata

SEQ ID NO: 30608 - DNA, 1125 bp, Bovine  19866881390880
  misc_feature (1)..(1): n is a, c, g, or t
ntgatgagtccagatttctgagctgagcattaaggagtctatttggcccttgccaaattccctgggcccagttgcccctgaattaaaggacagccaactcttgctgttaaggaagagatgtcctcttaactctttctacatgagaataaagtctgatgctttcaacttcctgaccttattctggtgctaaaatatgtaacgtagttgaaagaatatgtgatttataagcagaagatctaggtttggacactgacccttaaacgctttgtgtcctaaggtaaattaacatttcttaaattcagttaactcatccgaagacattgataatattaaaagtgcaatttttatttctatataaatattagaaatcttattatgtaaaaacataacagccacaacagtaatctttcccaaaggtctaaacaatgcggaagcctagaaaatcaacactgtgtcctatattctgatatattctccagcatagtccgatctccccaggggatcaccctcttcaaaacaactttaaacaattagtgcctaacattttcaaagtattttatatcgatttgttcctttgaaagtgagttcgtggctgtcttcattctactctctccccagtcctcaaaatagaaagtatatattcttccaacagtccacgggttaactaaaataacatttctgtctactttggctgaactgtattaactcattgttgtgacactagttaacttttgctgtggtttatgaaaaaaaaaaaaggaaacctaattaattgtcagctaagaattttctaaaacctggggtcccacaaggaggggtatataattaaaatggcctgttatgggaagctggctgggaacccacggtctggtttacaaagcccactatgttagcaaggactctggaagattctggtctgataaggttacctgcatcatgggtccagtggggatttaagtccctgtggattcaggaggaagaagagagcgattcacggaggttttcccctaggactggcccaggactggagagacagtgacaagttcatgctaacgcacctcagtgaaatggagactcctactttatcccatgaagctcttcccatctctcatcccaggactagag

SEQ ID NO: 30609 - DNA, 981 bp, Bovine  19866881406388
  misc_feature (1)..(1): n is a, c, g, or t
natttctgtagctcctacagttttctcaaacctggggactgcagcttgtctcctaagtgcttgggcttgagctgtgaagccgaagccggccttgaggctcctttgcagtgactcctctcccacccccacagtacaaaaccgcatgtcctgcaaccaaaaccccacccccaccccggctgagtggtatgactagcttgtcttggaaacacctgtgtttgccatcttggcctccgtcttccagattctcaggaagtgctaaaggtatgctttatgctaaaggtatggatctttgcatcacttgtgagcctttgtggaccaactgttgaacctctgataaaacactggcaggctggagcactgagtatcatcatgggggggaaggatttgtcctgtccttgatgagtccaagggctgcatcgttttgtgttaacgtgggactatcttacctgaagcaatagtgtgggcgtctcctcagtgcagagggttctgtaggtaaagtactaagagcctggctgcatccatagctggactcttctgagcttctctggccatatcaagttcctttggatgccccaagcacagccagttctgtgtgttttatggatggtgccaacttttttaaagcagtcacactgttaaatatttaagtccatcctctatgtacagatggcacagtggtcaagagacccaccgttgcgtcacttgtcgcttttctttgtccttttctgttgtgttcaataaacatattattattgttacagtttgagcatctactgtgcccagagcatcttactagttgttctacatgtgtttttctttgaattgcttttgttccaaacagccagatgctgcatatggtaatttatacaaaaatgctcacaacatagcacataacttgctgttcagcaaatgttagttttcttcctctttgggcttggtttgctcaactgtataatgggggagctagctgagctcctccag

SEQ ID NO: 30610 - DNA, 2125 bp, Bovine  19866881407513
  misc_feature (1)..(1): n is a, c, g, or t
ncttagccctgtgtctcgaatattgccaagtgtctcctgaatgatcagtgagggaagaggacagaaagggttggagggaagaaaagaaaggttgaaatgaatgaatgaactgtgttatctcaaggaagaaaactgattaaaaaaaaaaaatccaaactcacttaaaactgtgggaatgattttttaggaaaagtcatcacttttgtaactgttacttctcagttgtccagagcttcctttttttaaaagcatgtgagcacatatatcaaatgggataaaagaaagaaagacgcacggtaaacacggaaaaacatgttcagacgccgttttgttaggacactgtcccacttttatgcccgaaacaagggcagcaacatggaaggcagatttcaatccgttgcgttttgaggagaggtgtgcttccctggacttaccctacctcccgaagctgatagacttagcaagaggcaaaaacaggcaggaggacaaagaaaactcagtcttcttaccggtggtggcatagagagctgcgcaagactgaaaggcgggaggagaagggacgacagaggatgagatggttggacagcatcaccgactggatggataagagtttgagcaagctccaggagttggtgatggacagggaagcctgacatgctgcagtctgtggggttgcaaagaacagacacgacttagcgactttctagctctgtttctaaggaaaaataatggtggaatgtattattaggcaaaactacttggggtgaaaatgacctctaattggtaatttatacctacactggtggtaagagacaggtttgtttttctaaatgcggtgactcttgtaacagaggcacgtctcttgcagtgacctacaagcattgtctatggacagtggctcctgctgtatacaaggcttctaagccaaggtagtccttgcacttacctgtcttgtctcttgcacctgacttaccacttgtctgtatgtgcagaggataatgcttagatggctgtttgaactgccatgagggctactcactcccgtggaagaggaacacttgatgatgctgggttagcaggctgttttctgtcctgtatgttttcaagtaaactggtgacaaatgtgacctactcaggtcttgtgaatccaaatatttctatatttaaagttcctttgatagtcaccagagattcgttatctagttatttattttggaagggcctcatattcccttcaagttctttgaggttaagaccatgtctttttcttctcaattaattaacgtaggttgtgctgtgcagcatgtgggatggttccaggaccagggatccaacctgggcctccacagcaaaaacatcgaatcctaactactcgggtcaccagggaactcctaagaccatgtctttttcacctagcaaagtgatctgaatcaatgtgaacctatttttttccaccattaataaaggaataattatttcctatctcaaagggttgctatgatgattaaattagatacatataaaaatgtttcccaagcagtaaatgctatgcctaagtggtgatcatactaacacataaatatatagtccctattctaaaagtatccctattaatgtagcaatgtttattaaacacttcatatattaactctgattttcattccaatcttaaaaattaataaaaacaatttgataaagaagtggtcgtaatgatatgaagctgatttcacactaagaaatgccctgccctctttcctccaacccaaagactctggtctacttttaggacagaaagaatctgtctgctcacccttgttgaaagtaaacagtttcccatcattctcacccaaacaatgggagtaagatatacaacctatcccaacatgccatatacatacacataaatgccaaaaatacccaaggcattttagtgagttgctggaaatattttaagccagagaaatacaagttgagtgagactgttaaaatatcccctttctaatcctgggacgtgttagatcaaacattaaaaaaatagaagcaagcagccctgtcaagaactattttagaaatttccaggtatataaaataagggggattacagaatatcaagatctttggtaat

SEQ ID NO: 30611 - DNA, 794 bp, Bovine  19866881775683
  misc_feature (1)..(1): n is a, c, g, or t
nacctgagagaagatggaaagatcagagagggtccagcttgtcccccaagagtttgtcccactcagagattttcttgaaaccccagttcacgtggaactgtgttcattctagaagttggccagtgttcttggaaattgtggggaggtgcatgtgtgatgaatcctctctaaaggaggatatgaaaggtgcctggccatagggaagctcgtagcttaagggaacagaccatctggggcagtggtgagcagatgcagttcgatttgtttgtattagaggcaaattgattcctctgggaagtttagggatttaaataatattctataaatacatgtttttctttgctttgtcactgatgaggtttatggcttacgttacatgtttccttctaataatagaatcttacgtgaaattaaaagcagtatcttcctcttctgactcagacagaattataagtgtattgctgatttcctaccctgcttttatttcttacattcaaccaggactgtgcagacaggttggtacatctgtgggctgagaccagtttcagccagctgaattccctgtaatccagtctgcatctgagaggcacatctaacttactggagttctaggtaggaagtgtggttaaggaggcaaaaccatttaattgcagcttgtttgaaaataaaaccagcttgagttttcttctcacaaactttctctgaaacatttctttagatcttttatttttggcaaatgggttttggggtggcagcctcattacttgtgatggagaggtaaaataagccagtgg

SEQ ID NO: 30612 - DNA, 1026 bp, Bovine  19866882114681
  misc_feature (1)..(1): n is a, c, g, or t
nctggtatccggccgtgcctggagctgttggggtgaggactctcctgtgatttgatgtgtccaagtacagagaaccgtcgtgccttctagtggagatgtgtttccgctttggccacctgggatgcagttccttgaccagggatcgaacccctgccgtctgcagtggaggaacagagtcttaacccctgaatcaccagggacgtccccgtgtctcaaatttcttatgagagaccttcagcagaggaacccgttctccatgctattgctctcagcacctccttgtcaggcacttgagaagctttgtggtccctcttgttcagaattctgttactggtaacagaaagccctggccctgcaggaataattaacattatgaatgataggattaggtgagttagtacatgtaaaagttctgggtaaaccataaaagtctattccagtggaaaggattactgtaatgcttttttttttcctttagagagcatctcttttctgaattgctcgaagcacttggttaacactaactggttaatccttcatccatccctgggcagaaggctggcttttaaatagctcactttgtatagatcaaactaaagtttccaacagagccccaaatcttgaatctaaagcccaaatctgtggagtctaaagcttggatctcccaagtgtgagactgcctcactcctgggaacaaagaaggtgagagaagaaatggagggatcctttaaaaaattttttttaatttccactgacgtagtcatgtcagacaaggtggctgtagtcaggattttgagaagcctagaaatcttcctcttggaaagacccatgttcctcttggaaagccccagagtcttgttgggagtgagggcctggcatcagctagggaagcagaaggctaacccaggcacaagctaaccctggacacagagttctctttaggctgtggttggcggtacctgaggctccagattctgcaccatagtgccagccccacccccaccctggtacacccccatggaaacc

SEQ ID NO: 30613 - DNA, 793 bp, Bovine  19866880385910
  misc_feature (1)..(1): n is a, c, g, or t
nggcggaagagtggcagaatctgtaaactccagagggcagggacctcgccgggctcaatgcccagaagcagcaggtgtttccaagtatttgtggccggtgttgctgtgggttacctctatagctgctgacaaactggggtgtgcgcagcctggcctgaaagtcagattcttaaactcacgttgtcaagataaaaaaccccctacctggactgtctggtaatcggaagcgtcaattcctttcacagtcacctctcggaagactctgggctccagttcctctttggtcagatcacagtgataaatgatacctagaaggaaatggaagtcttagttcagtccataaactcactagatacaagaggggcaaggatcacaaagcacagtcactgcagaaagagactgcacaacagcctggcatgtggactgtgtaatgctgcgtaagtgttcacacttcatcatcgccatcacatgtggtcttcttttttacaacagtcacctctgtatcattttagaagattctaatgcattccaggactaagagcacaggtaaaacctaactgcagaaacataacaggtctttcccgacaccaggtcacttaggagtacaggtcaaagaagatgggacacttcatgtagggttatttcacctgagcagggatgaagacggaaaactcaaatgatgtgcccaaagtcaacagccaatcgaggtctcttgatgggaactctgggactattgcttcctcacacccacccctctgtggacacacaggtgcaatcagggaccaaagacagc

SEQ ID NO: 30614 - DNA, 2667 bp, Bovine  19866880472900
  misc_feature (1)..(1): n is a, c, g, or t
ntctaatttgtctttattctttgtcttttgaacggttgataataacgtgtctcagtgcagatctctttaagttcatcttacttgaagttcgttgagcttcttggttgtttatactcatgtctttcattaaatttaggaaaactttcaccattatttcttcaaatattctttcttcctctttccctcttttccttctgggactcccatggtgggtgttgctctacttgacttccaaaataattgcatcagacagatttttccagtgggattgttatttaggtggggagatgaattcctgatacttcttactccaccatcttcccagaatctcctccagctgccattttgaacacatatgttgtaaccggctacatgcattttcagaaatctaattcaaatttgcataaaatttgtcaatcctaatgacccattgcttcctgaggagagcaaatgaggtgacctaaaagtatgcgtttttaaaatatttgtaaaataactaaggtatcttctttatttctcacattctttcaagaagcctgtgaatttagaaaatgcagaagtagctatggtataagattccttttgatttcttgtggtcatctctaccttttcagcttgtattgttgggatggggagagactaagagatttcttcaaaggataaggacatttcctacaaaagagaccggtaaggagaacttctgtgatgtaagtttttagtacatcaagaatagaaaattacatttgaactgtgtatttagagaagtcttcttagggttttcttaagaaacaaatgaatcaattcctgttacagttgtataacactgtagcacattaattatacagagaggaattatcctctgtagctactattttggttattcataaatgtttctgaaacatcatgccaacttatcagacaagtctacattcctaagctcactcatttcaggaaacaaccacagcttttttttctttttctttttacttagtttttattttgtaaggattgaaatataagccacctggaatttgctccctttcatctcaccttgtcattaaattcaagtatataatattaccctgatgtgttcagtgaaacattaaaattttacttaaaaagttaaaatctagtttgtaaaataatagtactaaatggattagtcacaaatgtattgtcatataatattagaattaagtgtttcttgctgacatccctgccttaatcagttagctagtccatagaggcttagtgagattgtatttagcctatttcccaaatgtcaattaagaaatggtttcatttcctagtaaaggttcacctgtgaaatctctctggcttgtccacctctgtgaattctgtatgtccatccctcctgctcccctccccacacctctctagaaactctcttcctttcctcatccctaagaccaaggctttccaaacattccctgtgtgtttgtacaatacatatcgaggaagaaatgattaagcagcgagatgtctgaaagtcagctaaatgcaaggattatcatctatttaactctttcttatcttgatctgagaggggcttaatggctggacctattgttctccttttcttgacattaatgaagaaatcatagcatcagctaatttccagaggtggctcaaagtgacctgctgaattgattcatttttttccctccttacaactagactggagtaatggaaagcatggtattgttagaataaatacagatgtgcttacgtgcttgcacacttaatacaagcacaccacctctgtccacactcaaaccagtgtgtttagcctctaataaaaggattgaaggggcctgcagatagtctgcttaagagatatactgctagtttctgttctactttctcggtgattaggaatcccatcagtagcagccagcagcttctctgtataaagcagactttccagttctaacctgtatcttgtaggctcaggtgttgtcagaatacatacctgtctacagtaggtcagaagtttacctatttcttatttttcatagttagaagaattattattaacttgtattttatgacttaagaataaaaactccatttttatgttaacatcatggtgtgtgtcctttattcccttcttccataatcatatatagaggaacatagagttatacaacattttctgtcattgtttttgaaaaatcaggttatattgtgtttcttgctcttctaaataaatgtgtgagggaaatccttctaaacctattacagatccaacttctatttaatttatgcctggaattcattggtatgactacgtcaatgtattcctcattctctgttaaagggcatcattaatttcttattttttcccactacaaaccacacaatcttctaggagaggtaatagtaacatagatgctgaaattgaactgcttggattagaatcctgttaacaccacttaccaactttttgatcttaggcaagttactcaaccactgtctgcctcattttcctcctctcaaaatggaaagaatgaaagcatttacctcccatatctcttgcccagcaaagctgagcacttgcctagctttagggcaaaaataattcagttcacctgttcagctctgtttggaagaaggggtcaatgtaaaccttcaggctgtgtcctt

SEQ ID NO: 30615 - DNA, 2021 bp, Bovine  19866880478569
  misc_feature (1)..(1): n is a, c, g, or t
nttggttttgcctacataatatgaatctgcccaggtatacacgtgttccctatcccgaacccccctccctccttttgaatcaaggtgattattgatatagttgtattaatgtctaccatatttgttgccattttctgtttgttattctttgtttgtatttttgtctgccttttgtggtttccttacttcttacatcgtttctgagatgttggatgtaattcttatctttattcttctttgaaatatggtgggggctttttccccctctgatttcttctaaaattttatctttatctttgattttctttagtttgaaaattatatacactaggtgtagttttttttgtttgtttagttggttagttggttgaggtttttttgcatttatcctgcttggtgttctctgaacttcctggatctgtggtttaatatctgacactcatttggggaaattctcagtcattagcatttcacatcatttcatctattaccatatcatatcattatcatttcaaacatttattacttctgctgttctcgttacatgtatgttacatgttgttgctatcccttgttgcagccgtcccacagtgcttggatcctctgttttcattttttaaagtctttgttctctttgctcttcagttttcaaggttttctattgatattttcaatatcagagatatcttcctcaagcatgcagtctgttacagtgtttgggatctctagcatttccctttggtctttctctagtatttgcatccctctgcgtacattgcccgtttgtgttgggtaccgtctattttggagaaggaaatgggaagccactctaatattcctgcctgggaaaccccatggtcagaggagcctggtgggctacagtccatggagccccaaagagtcagacacaacttagcaactaaacaacaacaaaacagctgtctactttatccatcagagctcttagcatattaatcatagttgtttaaactccctgtctgattattccaacacacctgtcatgtctggttatgatgttttctctggctcttcaaattgtatattttgccttttagtatgccttgtaatttttcttgatagttggacatgatgtactgggtaaaaggaactgctggaagcaggccttagtaatgtagtggtgaggcgtgggaggggggggaagtgttctgagttctgtgattggtctcaaccttttagtgagtctgcaggctggggctgtgaatttcacaagtgtttctcagttttgtttcctccccacctttggtgggacaggatggctagagtggtctggagctgggtatttcccttccccggggtcagttgggctctgcgaatacccccagcagcctaagctctggctcactagtctaccctgagggcagattttgttaagaagaacaagagtgggcatatttcataatggttccctttcccctccactgccaaaagtacaaggggattttttaaatttcctctgatactatgaggacctggtcaactcctggaggttagtcttagtacagtggagactggtctgctggagtttttaattctcagacttgtctacactgggctttcaacagttcattagttatagctcagatttcctaccctagcactggacatgatagtttccagccatgagtctctgccctgggaagctgtggctccgtgtcttcacctctgtctctccaatcttgggggcagtgactggccttatgtcttttacaaatctccctcttttacaaatccaagaagagttgctgacttttcattttgtttagctttttagttgttaggacagagtggcaacttccaaatttctgacatgtgggtccctataattaatagcttccatttagtaattttaagaagtatatcatctaattttaaagctattattcatatgtagtaaaatattttgtatatgaactgaaatttgtactcaccttgcagttggtgctgttatacggtttaaattttaaaaacaaaatcttcag

SEQ ID NO: 30616 - DNA, 748 bp, Bovine  19866880541192
  misc_feature (1)..(1): n is a, c, g, or t
ncaatgattgtactcagcccaaactagttatcatgccatcattgttaagtcatcaggagattagcaattgctaatatacacacagtttgggatctgtaaaagagacagacatctgttttccttggcagcagtctgtttccaggcccttacttgataccatgtgcgtgcctaactcctgttcacaacaatagcttttatccttagggtttggtaatatacttaattgatgcctttatcttttcatgagacatgccagctcacatcaaaaaaaaaaaaaagagagagagagagaggaaagaaataaaacgaaaacacactacaaaagcttggcttgatatctggtggaaatagtgaacctcaaagctggactgagagaaaaataaagattgctttcatccatgttgctgaaaaatttgcctgtgtcctctaatttgtcctgcccttattgagaattcaatgagtattcaggtctgaatattaaaatctggtttttgcctttgagaatcacaagtgtcagtcagagtagaacagaggaggcataaggtatgtgttttctggttggaagccagtgatgttaaacaatatggagggaccgtttctccttgtgctgggagggtgactaggaggcagctggaaggatgtattttagaaactctggaataaatgatcaggttgtttggttggttcatcgtaagtggttctcctgggatacctgtgtattgggaaaaagaagtctcctatcctactc

SEQ ID NO: 30617 - DNA, 1234 bp, Bovine  19866880556832
  misc_feature (1)..(1): n is a, c, g, or t
ncctgagagtttctgccaattgtctttttctgcatgttttgagttgagttagctccttttaggacttgtaggccttcatgtattcgcagaagccttgctttcaatcgagttaacggtctctccagtttgcaatgcagaaacattgaaataactgttttttaaatgtatgacaagaaatgaaagcaataaatactagaaaagattactaatcttattaggaaaaagaaaatatagaagcgtaattccatcaaaagcggtatcaaactgattagactcagttactcaaaactttgtcttctgaaaagctctcaagttgaatttgtagcaggttttacagctgcaggaaacgagctaaaattttccactttcttatttttcctatttttctaatccaaaaagtgaaatgaaacattccttaaggagaagactcaactgacattatgatctctcattcgaaatttactgcctgcattgaacaattgcttctgtattggcacaagtcattcagtcactcaccatcgggggatgaatcactccccatgaaaaatcattccagaatttgggtaacagagaagtttgcctccatccaaaatttcgacaaatgttggtaaaatttaggaaaatcattatcatgaaaggctgccatggtttcaaagagcatctcttagtagttactgcactctctgacctctaaaaaaagtgcaagcaacttcatgcacacacacagcccctgccagtttcccttaaaaatttcattctcttcatcaccactgagtggaattaaaaacagttggtcaagctccactaatcgacagctgcttgcaattagatgaagcatttaaagccattctcttaactaccttcccaactgcctaagcattcagtatgagcaatacaccgtgataatttgccagaatgtttaacttatctccatctctagtggtttctataccttcctattttctccagtcttcccacacactgtctgactcttccagttcctcttgttaaatcaggggtgtacagagattagttgaaaccaggtcgagctgctttgtgctaagatggaaaattctacccaggcaactattagggggcagagtaaatcttgatgttttttgcaaagagaaaagactccttttttcctctttttttttttttattaaacaatgaactggaaagttcactgtaatttttctcatcaaggatgagaagaaaaacaaaagttcctagg

SEQ ID NO: 30618 - DNA, 4083 bp, Bovine  19866880642487
  misc_feature (1)..(1): n is a, c, g, or t
ngagacatggcaataatctctcccttctcactatttctgtatctttcacacagtggtcccaatgaaatgaccacatgcaagttcttgtccccagtgaacaaaacgggtctgaggcttagatgtgtcttacccaaggtgacagcataatgaagactgagtgggacaggtctggctgtaaacctggtgccttttttaccagactgtgatgcagtggattgtgatgtctttggtatttctagcaatagaatcctttctttctgacaatagaaacttctcattttgggtgggggggaccctactctctgactttaggaatggacgtgtaatctaggatgtagatctcctccatttggttaaaagatagctgatctgagctggcccttcttccatttttacctgtccacaacatctttcacttttggtgaaaggtgctctcttcttgctgaggttgtgaagctggtagactgggggtcttaaacatccactggccatcatcacccctggaagaaggactcaaaagagatggagctgaaaattaaacctctgaggacagccatgtcagaaactagccctactcttggactgttcagttatatctgctaataaattatttttattgcttaagctcatttgagtgttctgtgttgctttgggggttttggtttggtttggtttggttactttcagctaagggtccaaactcaccaatgcccaatagaaacaacaagccacaatatgagtggctcaaagaagatctcctgaacacactatggggttcttcgccctcactttccactgccaggcccaccctcagtgatggtccactcatgctgtgagtagcctacatcctgtgatatgtcagggagctctaatctgttcctttctctagccagaatggtttcttccttccgctgtcttgaattctcaaaaagcacactatggataaagtcagtagttgggataagggtttctgggagcccttgggctcagagtccagggagtggaagggaagtgtagggtggggctatggtgggctacatttggcgatattgaagcaatcagagggagaggggtgggttttgttcatctcacttatttgcggtctttctaactgctttcaggacaccaagtcaataaagtagaatccttcacaagacctccatatggccagaaaggctcacgaggatttgcctactggagcccttaccactctcctatcatagaggctagctcagcagagatgaaccctgtgccccttcatgtctctcacttaatctaaacagggacagtgatggaaccaaaatatgtttgcttttcctatttctaccaaatatacagtgtttccaaagaaatgccttatgtaaacacaataacacaacctaataagcacataatgaagttgggaactgcgccctgtttcactactacaacttacaaattgcttctttggcaaagctcaattctaagaaaactatagctattttgaggcataaattccagcccccaaaccaaaacaaataactttgatttctttaaattaagacatataagaggtttgagccaaagctgtctcattgcctctcaagaatgcacacatcccaatgatgggcttgctgctggtagcagagcatgtcaacttgcatgatctagccccaggagcattgctgacatgttgttgtttgttttactcaggattagcagaaaatttttgtgggtgttttacatcactagagtaggaagcactgaaaagttgatatttttggaaaagaattctaaattattagaagagggggatggggagcagggtggccaggaaagaaaagaatgagtaagaatcaagaaagccccatcaggaaagtcccacatggaaaactgaactgatggtaaatgggatttattgcatgagcagtgttcagttctgctggacaaggagatgaaggttctcattgtctcagataggcagaaaaaagtatggaactgaattttggcaatcaacagtgagagttattacaaagcaggagtttccctttcagtaaactgcagattgtatatcattggatggaaagagctagcagagtttagtctggaaacatttggtatgaagtttgagatttttcagatagtccaaagaagtagaacagtcacggaaataatatctagcccacatttttttggcaggggagggtggggggtggagttgggaggacaggtacaagaaaaaaactaacactgagatataagaatgggcaaaagatgtgaatttactgcttgcaaaagaagaaaatataaatgccgagactcaaaacaagcagaaacaaaatcaaaaattcctgactttgttcataaccaaagagatgcagtataaaataataaatccctatttttatcctttaaatgatcaaaatatttttatgtgataatctcatctttgacagggtctcaagaaacagggatgtttacatactgattcaattaatgctaccattatggaaagtgattagccagtatatttttttaaggtagccttttgtccttgctaagctcacttctaggaatttatcctaaggaaaattttaagcagcacacaaatatttacattcatggcagcactgtttaaatattgaaatatgggaaataacccaatgtctaacaatagaaggggaaaatgaatgaaagtgtactcatataacggaatataacaaaaatgtttaaaaccatttctacggaagtgtttagggtcatgggaaaaatgctaaaaagaaaaatccaattccaaagttgtgtttaaaatatatatcttttatataatatatgcatatattaaatacatattatgtagtcaatattaaatagtatacagaattacatagtatagattatatagtaaatataatatatattatctatagcaaatatttatacatagaaaaatatcagagaaagtaaaatttgttcatggtagtaattactgggtgaagaaactataaattacatatatatttaattatttgtaatttttaaatatttgagacgtgggaaacctaaaagaaaagcctgccttagatgtcctaagttatatatctatggtagtcagatagccagacagccaaacacatcccggcaaagcatttactttttgatatttcattgtatttatttttaaataagtaaagtagaatggtgggatgaagttgtattagactcacaaatatgttatatgtcatataaaatatgacccgttatataaatacgtgtatatgatatacatcggagaaggcaatggcaccccactccagtactcttgcttggaaaatcccatggatggaggagcctgttaggctacagttcacggggtcgctaagagtcggacacgactgagcgacttcactttcacttttcactttcatgccttggagaaggaaatgacaacccactccaagtgttcttgcctggagaatcccagggacgggggaacctggtgggctgctgtctatggggtcgcacagagtcggacacgactgaagtgacagtgatatgatatacataaaagctcttaaagaacatgtattagaagcaggtaagttacaaatatataaaaggaaacctagaacttcggagtattagacaaaactgaaagttcatattaccagaaacagggagtatatttgtacaaatactatatttaaagttgagcttcttataagtaagccaaaatgaggaaacatagcaaattacacagttgtaattatctaatgaaaggcaacacacaggtatatctggaaagacagatatcttttttctaaggatttccagtaaaaatttgctttgtgtatcttttttttatgtttattttattttatttttttcttatataatattatacatgttttaatgccattctcccaaatcatcccccccctccctctctcacagagtccaaaagactgttctatacatctgtgtctcttttgctgtcttgcatacagggtcgtcgttaccatctttccgtgaacttcctgatgttcaagctggttttagaaaagacagaggaaccagagatcaaattgccaacatccactggat

SEQ ID NO: 30619 - DNA, 1836 bp, Bovine  19866880642899
  misc_feature (1)..(1): n is a, c, g, or t
nttgttcttttgagatttacccatactgatatatgctgcttttgttgattgcattatcaatgctgtagtattccatcaacaaacataagatcattttttttttttttaataattactactggtttcttttttttacctttatggaagtataattgatttacagtgctatgttaatttctgctgtacaacaaaatgattcagttatctttttcatattcttttccattatggtttatcacaggatattgaatatagttctctatgctatatagtaggaacataccatcattgatttagttttgtagtgtttgctatttaaaataatgctgctctgaaattctccaacatgtctccttgtgcaggttgtctctctagaatactacccagaaatgcagttatattgtcaccaacacttgttaggatcagactttcaaatatttccccacttcagatggagataaaatggtaattcactattgtcttaaattatattttcctaactactagtgagactgtactttagctataaatctggctttcctctgctctaaattacttgctcttatcctatacttatcttttcatatttggagtggtttgttttcttactaattttttttcattctggattctaattccttattggttatgtttgctataaaaatattttcctgttctgtggcttagccaggcattgtttatggtatctttaaaaatgcataaattttatttttaatattaagaaatatatttccttgaaagtttgtgttttctccctcttttaaaaatcttccttagcttgaagtcataggtaaatttacctatattttcttgtgagtttcctaaagttttgctttgtttttaatctacctaaaatgtatttttctgtttggtatgaagtctaaatctgttttccatccccaatagatatcttattgtccaagcacatttattatataactcatcctttccttatattttgaattgccaactccatcctatgtcagattcatgcatacatctttgtgtctctttcctttccattggtctgcttgtctgtctctccttgtaccagggcagtggaatcaattactttagtcttgacacctgataaattcctcagctgtgttcttcaaagttgtcttggttattcttggccttttactcttccattagataagggctagtgtgtgtgtatatatatatatatatatatatatgtatatatatgtatatatgtattttttttttcaaagtggaaaaacagattggggagtgtgctagtatctgtaaacaacgttttgttgaatttcaggttggaaatattcatttaatattttctgtctttaatatttggatcttcatcgaaatgcattatgtagttgacgctgcactacctccagatctgctgctgactttggctactctcctgaattttggtacatgaatggagttggaaaagtttagtttttatttttttttaaattagagtttgaccaagctgaaaagtgtttgattgcaaaaaaatgaggggttttttgttttcttaagtagcatttgaattgagatgtagaggtaaggccaggtaatcgctttcttttctccttttgtcattaagttgggatagaacaatggatgttatttgagagctgcccttctaacctctgctgctctgcaaatgccttcgggtcatcacaagtttcttagtgggtgttttaatttttttaatttaatgtttaacttcagagagaattgcttagaaacacttaacccttgttgagctgcagggaaatggttagataatagtatctggtggtgacaataaaggatttcata

SEQ ID NO: 30620 - DNA, 1685 bp, Bovine  19866880666222
  misc_feature (1)..(1): n is a, c, g, or t
ntagttgatgggcagtggggtggtagcgaggtgaggaagacttggattaagtccagaaatgccatcctagccttgatccaggatgtatgtgtgtggacccagccagttcatgggtgaggggctctggggagccctgggagcctgaggagcattttacccattggtggcattatttttatttcagtagccaacactccacagggaaccatagggaatacttctgcatagtttttctgccctatgtgctacagtatttttttccccttcacattttaactcaggaagtagatttgccacttgtgcaatttaaaacaaatttcaagaaagctgtttgacaggcctctgggcatttttagtatgaagcccaggaatcacagtagcctggccatgtggtcccaagggtcatgtgttgggaatggatctacttgtttgtccactgacactccagacactaacctttctccagtcacaaacaaaaagcaaaatttgagtttcacttggtagacatgaataggagagatacttatagaaaagtgttagtgccctcaatgaaaaaaaaaaacctaaaagcccttcacaaatggttttcatgtttgccacttcatccattagcaagttcatggtaccatgcatgttaagaaaataatgttgcttatatttagacactcaaaactgcccagtgtttttttttttttttaatgtttcttctttatagtcacttaaacatctgtgccaagaatttgaaatgctgccagcattttactgtggagttaagaaaaccagaccctattgtcataaacgtgccaaatggtgctggatgcactactaaattctacagaaccattgtggtaataatttttcaaaacaaagcccaatcagatccagagtataacagttactaccattaatcattgttctttacttggcaaaacatacctttttttcttgagagttatatgtcttgagcacacttgtggacttagctgtttaatgaaacattacatgagaagatattcactaggagctcaagtctcccctgccgtcatctaccctgctgaacagagacttcaggcagctgtttgtatggcaaggcaaaaccaaagaagccacctttttaaatctttccttaaaagccctgttcagaaatgacacattcaattctctactgtaagaaaatacatagaatatagagttccatgggagcttataaggacatttctaaattttttcccttgggggacagaaaaccaatttagaacctttaagtttgtgtaagtgaacttattcctttatgtgtgtgtgtgtgtgtgtgtgtgtgtgtgtgtgaagccttctttaaaagaagataatgggaaaaggccagagcagagaaatgaaagtaattagaggcacatgctggaggatttctaatgtttctgggataatctggtccacaaaggaaggctgcaccacagagggtggcagctaaaaacgttaatgaatagaagcgaagttacatagaatgggatcattgaaccaactgaaaagacacttctatttcctttatgagaccatagagttctttgtccataacatgtctgtttcattatcaatgtctggccagaagaaatcagaccattctgagctcttctgggtatccagcagctgcaagaaatggtttcagtacacataagcctcccatcaca

SEQ ID NO: 30621 - DNA, 1665 bp, Bovine  19866880670612
  misc_feature (1)..(1): n is a, c, g, or t
naaataggaaactaggagcgggctaaaatggtctaaccttgactaattctgcagtattcgaaactcatccctaaaatggaatagttttacccactctgttcttctagcataaaaagtattaataaaaaatattggaccctcagtcaccagagaactagactattatacttggctgaatatttatttgcttatcatctgtgagtttaacagatagtcttccccaaaagtcaggctcgttgttaattatgtaggcacgattaatgtctgctctccatagcacaattttgttatcattggtggtattaccatttgacaattcaactcattgaaacgaaaagatcgattcatattttactgttgaactcactgtttcatatgttttaccccctttagattactggagtggtgagtaaagaatacataccaaagggaacacgttttggacctctaataggtgaaatctacaccagtgatgcagttcccaagaacgccaacaggaaatatttttggcgggtaagtagggaaatttttcccaactcattaagtatcagggggaaaaaatgaaactaaaattgctgggtcacttccttcttcaactgtcctggagctccccacaatattcagggtcctcacggacacagggaattctaagcaattgtgacgaaacgggttaaaaattcagcctgggaaacacagcttgaaggtagttggggtgaagaggtggtctgtgtgaatcttaactttttgcgattcattggagttttgtgatgaaaggaaacagtttgctgcttgcttcaagggtaagttcatttgcatttctgtgcaaggaagtagtaatgagtcaccaagtcttagatttcaccccttcttgatttcttgctgacttaactttaattgagtggacgagtaatcacaaatgaattaccttgaaaataaatgccatttaggaaggatggtactggaggaatggagatggactacaagactcatcctgtttaaatgcatctgtaccatgaaactgctggatttgacagcacataagttattccatagtgtaaggaagatgcttacaacattcaagaggataaacttccctttaacaccccatctagtcaatccagtttcctttggaatatcacagttagaaaaaaatctcacaggtgaactaattagatggaatctttaggtaaaagaccctggatgagaatgaatagaaaaaagcagactgttttacatttgcccatccatctctctggatactccgtttcctcaattagaaaataaatttaaaagcaattatatgtatgtatgtatatagacttgcataaaatgtacatgattactgggaaacctttattgaaattctttcaagaaacagttgcatggtagcaacaaaaactgtattgtacttacttgtttagtcgctcagttgtgtcctattcttttgtgaccccatggactatagcccaccaggctcctctgcccatgggatttcccagggaagaatactggagtgggttgccattcccttctccaggggatcttcccaacccagggattgaacctgtatctcctgcattggtaggcggattcttgaccactgagccaccagggaagcccatattatacttattctggtcggatttacctagaatgcttatattt

SEQ ID NO: 30622 - DNA, 1888 bp, Bovine  19866880770183
  misc_feature (1)..(1): n is a, c, g, or t
naaaaaaaaaaaaaaaaagccatcttagattgtccttaatagttaaaaaaggtatgtctctttctccctggttgttatgcgggtccccacctttgcaccaaaattttaggatctcttataataccaagggggtgcccaagctcaccaatgtaattgtgaggtcatcgagtgctaattaagcaaagagtcagagagggtttgatttttttttttttttttttgccattaggaaaagaaggatcttttacatgttttggctcacaattttaagtggttataaatatattctatatacatggtatagtggtataaatagatttataaatatacatcattgtccgctacaccttgaatgccaacgtgttatctttgggcttagcagaggacgaggcagaatgggatgcattccatctctctggtgcacacgtgctctctcctcttgagtagcaaatcattaaagatgccatcacttcctgcactactggacacactcaatgaggtaattgttgttgaacaactttgcaatgccctttcttcttcaattaaattaaccataaaatgtaaaaacacaaatactgaggaaaagtcttgagttgcacagaaaaaacaaatacaactgatgtgttggggacaggaatgttcattacccgctttgaccctaagacaacgagaatacccgttttctggcttttggtttttaaagtgtggcctgagcctatctaactcaaatccttcctggtggagcaccatgcttgtgcaattctgacgtaataacaaaagaccaacaacaaaaacacctggactcatgcccccagacctcacccatacaaaaccacctgtgctttggaaacattttgcagtggttttaaacatggcatttgtcttcttcacattttcagataatacattgggatgctaaagtctcatggccactgcaaatggtcacatgactttggggatgggacaaccctgtttttttgaagagggagacagactggcaacgccttatcacctttctggtaaatctgtgattgggggcaggaatgctgaactctctacatacaaggtttttatttcttccacctattactggttaattctgcaaacatacccccaaattatgttcaaatgatacaaggctgttcaaataatataatcctatgaatgaacacatcaactgcctaactttggcaatactcaaacctcactttcaaaccattattatagagggaggttgacttgaagtaatgtatctgtttattaaatcttaagatacttaaaacagatgtgcagaaattatctacaaagaatggccaccagacaaaaatataacacttaactcaaattacaaggaattcttccagtcattgtaaactttttttaattattgctttttgaatgataaactgtataataaattatgaaggattatcattgaaaaaataattatggctaggcaatagtcttagcaatggggaggctatgcaaacatattcacacaaatattcaaaatacaacaggttcaaatatatagatggggtgtaaataagtatatataataggtatatatattgtctttgcctcatttatgccctgagatttcagtaactttggggttccttctttaattccagagaggtgagggaaaccatctgccgtcagggagagctttgcagaattggaattatgtacaagcgcttgcgacaggcaccctgactcgccaagtcgtaagttaagaaacaagacaaaacaccttttgttttctgaaaatcttaaggatccataggttcgactgtttcttctttgacctttacaggtcccagaggtagtgggttgctgtgaggcaacttcaggagggacggactctgttgactcatagaggttatac

SEQ ID NO: 30623 - DNA, 1493 bp, Bovine  19866880851478
  misc_feature (1)..(1): n is a, c, g, or t
ntgggtagccttgttatctctccttgaagtgtgatttagtaccacatgacactaagatatgataacctgaacactctattaacttgggaaagactactgagcaaaaatgctagttggaatagctctgttgatgatagctaggaggtgttatctgggaagaagatggaaaagaactcagagccgagagttgttttggatggttaaagggaattcaaatatagatgaagatctgcccacactttaagaaaatcctcaaagacacgacaactgtcaaggttgcacttcttagcagttatcacctactttttgttttctgcttcatcagctctataaccctgcaagtttcattattagggtttcctgctacacttttaattttcagttacagattgactaggggctgccagtatgtctggcctactgatgtttgctggtagattatccttgtaaaagttactattgtcaggtttcattttgtaaaggtagtgaagactggcaattcacataaattcctcagcctcattgctcgtgatggtctaacaactaagaacaaaacagaaagataggctcattttaaacaaatcttcttgcttcaaataatatactaaacagacatacagcacccccaccccccggcaaaaaaggaaaacaaaaaaagaaaaaacaccttacagttgaatttactgagctgaagaggtcaaactttgccagaatcagggactggtaactgacatccagttatccagttcagggattcattttcccttttttcaatagtgaatgaaattccctttttaaaggcttataatttattgtctaaaactggaactgggacaaattcaaagcaggatgaaaggaagtctccaaaacaatagcattgaaattctcccagggctgtttcaattgtgagaacttagagcacctgaatggctgcatagtggtgaggcagaggactcaagagagtggcaatgtgcccaaatgctgtatttttgtggtggcctcctttgctggatgaatattgcaagtttttattttttcctattttgctgaaaacattctacaattttccaggaattaaaggacactcaggctaaggcaaactctgatcataagtgaaaataagagttcatattccagtcctcaacacaacatttcagggatcgtcagtgagcatttattgtgtaccagcttctaggcaacgtgcattacatgcatgagttcatttgatcttcacaacaatattatgagcataggtactcttattcttactgtacagataaggaaacagagaggttaagcaatatgcctcaagccacatggctagtgagtggcctagtcctgtcatttccatactcttaactacttaacagaattgcctcccaagaaaagtaaattgcctaggttaaatgatgttagggattgatggtgaatagaagttgatatttggtccaaagaagcacagaatgtttagtttttgatgaatcctgataaca

SEQ ID NO: 30624 - DNA, 2384 bp, Bovine  19866880853684
  misc_feature (1)..(1): n is a, c, g, or t
naccattgtggtgagcctcattatagggcactgtatgcattctgtgagaggactgtgggaacaatgccggttagaaaaacagaagctgctttctctgaaccattcagttagaaggtccttcaccgtcagacattttatgaaaatgtttgtgtgtttgccctgaccacaaggagatcagggcagtggaactgaaggtaggttttatgttctgcaaacaagtcatagctcctgtcttttcaccttaaaatacctgactacctctaaactggggctccccaggtggctcagtgtaaagaatccacctgccagtgctggagatgcaggtttgatcccctggagtaggaaatggcaacccaccccagtattcgtgcctaggaaatcccatgggcagaggaacctggcaggctgcagtccatggggtcacgaagagtcggacacgcctgagcacacatgcacttacctctaaactgtaagcactcatcaaagtgtcatgttccactcgtgactccactgctgtctgtctgtcctcaggtttagaaccttccactttctatttcacttcttgctgcagtttgagactgggaataggtctcttgctccaaggaataggtggccaagcctttgagagctggtatgtttctgcagaaatcatgtgtgtagcacttagcaagaaatgtccccaaaattataatagatctttaaatagaacgattttgcgatcactgaggtgctctatggaaggttttaaaatctccagtgtcataaaaatgtccacccatcctttggaaagcagagtaaagaaatgtggaataaacacttcccctaatatttcctgcccgaaggtgattcagattcctccccactcctccaaagttaaaagtctggagaagagataggattacatgcttcgaatgtcaggttagtatttttaacccgagcccagcacagaaatgtgcagcaccttccgaagtcctttgtatacttgctttacaagctagtccaggcagagaggttgccttctgcccagttctttgagtgtgtcttgcttcctgtccgtgttgagcgtggaatttctgagcagctctgctgctcatcacatgtatttgccacacttagcacaggcacacaagtggcctctgtcaagtctgatgaaaagggaagctcagcacccttttatgaacattctcctttcaacctgtcaggctctaaaattagataggagttgctatcaccagacgttcttctctgtggagggcttgccctttacagttttccttcatcttctgtggatgagcacattccactaccagtgataatgagcgtcctggtgtttggctcacagagcaccgagtctgcaccaggttcactgtgggggtgaagattgtgtggggaacttaaatggctgcacatgttcgaatatgttagtaaaactgatctactgtattatctccagaaaagtaatcatttcagcacagagagctgatcttttcattctcttgaagaacagtaatgttcccttcatttgttatgttcacttgctcctccttttcctttaaaggaagatgtttctatttatctattatatgaaacaagatccatgtgtgaaggcacctgtggtccagggtaaaaccaccttctatctggcaatgcctctgcccagtcactctgacagtagagatgggtcatttctgacatttcctctcttttcctcaagagttttttaatttaaaagattcagctcaagatctgtgagctctctgttaaacaatcattccctagaataatgggttttaatatgcaaaattagaagctgctttaaattgattacttagcagtagggttttcttatggttctctcaagcattgtttcctttctgaagtgaatttgccttttactattgaaactgagttttttagtagacatagtgagatttatattattgtgtaaataatctgtcctcaaggttgtacactgatgattgttttgagaaggatcatctttccaagcagacttattctgcttaaaacagacataataaacaataacccctataactggaataaggcttttgacatgcttcagtgagtctctttttcaagagggtaacaaaaacaaaaaagcaatagaaagcacaatacctttgccagaatatttgtcccttggattccctgctgctgctgctaagtcactttagtcatgtccgactctatgctaccccagagatggcagcccaccaggctcccctgtccctgggattctccaggcaagaacactggagtgggttgccatttccttctccaatgcatgaaagtgaaaagtgaaagtgaagtcgctcagttgtgtccgactcctagtgacccatggactgcagcctaccaggctc

SEQ ID NO: 30625 - DNA, 1501 bp, Bovine  19866880875555
  misc_feature (1)..(1): n is a, c, g, or t
ntagaattatcgtaaaatgaatcactgaaaaggggcagtttgaattttttccagacagctgtgttcagaaagcctctgtcctcggaagaaagttctcaggtttcaatattgctttctacccaagttccagaatcttctttcctttatcttttttgcctgagctatcattctgcaagtcctcccatgggatctgtgtgctggtattagacctggcccaaaagagttttaggccgctgccttacattatgtttagatttaattcattaacattattcaaacaaatgtaatttgttccctcaagtataattatgtttattaatgtgacagagaaacataacattttaaaaatacatatatttagtataccaagcttttaagagcttagatttggttaaaaatgaacactaagtcttagttatttattaatctttttatgttgatatgtgtataggtaaatcaaaacaacattttttgaactattacaccctggaatatacattgatttgtatattttgagttaatacgctaatatgaagtgttgtaaagaagatttcttttgtcatatagatgctgtatttgatgagtatgttttgaaacctacacagattctttccctgaatgttctgaatcctacagcaggcactcaatctgttggcccttgttactgttgttttcttatccccgaagactatttcctaccaggcccttcctacacacactggccactcaatgaatactgtggacaggctgacaaaacctgaactgtatgtccacaatggtttactttttattctgtgtgtccttactggcaatatttgggggaattgtcaagatgacttttccctcttaaggaaaaatagctgttacttgtaaaccctgaaaaatgcaaaaaaaaaaaggcagatggtaggttaggacagggaaggagtgagggatgatgttgggcaaagaggattcggtgtctctccataaggatgagtattgactggagtggaggagtggtcccggcactccacagctgtcccctgaaccatgaagtagaacgtttgtttgcaggaagtggctagtggaatttcccaattgcagacagataatctattaggtggggcaagtggggagttactaattgcctctgggttatgacagagagtgtccataatcaggccattattctgggggaaggccatcatggaggattcatgttcctgaataaggctgaagaagtccaaaaagaaactttaatccttaaaaacccacagcctgtagggctggaataaatagagaaagaaatgattcaaagagtacaattcaaaaacaggtcaacagcatccgtaataatggaaagaacagaaggttccctctagcatgtcttaccaccatctatttttttatgtctcttcatgcttggtagtgaaggagagcaaatcttaaactcttgtgttaaaaaacaaaattcaattgagtaaattcagagatctaattggctttattaaatgattca

SEQ ID NO: 30626 - DNA, 1361 bp, Bovine  19866880894486
  misc_feature (1)..(1): n is a, c, g, or t
nctaaaattacaattatactacacatttgcagagggcttactgtgtgtccagcactggcttaaatgttcatcaaactctaatcaaaattacaagttcagggaaacttgcaaaatgactaaagtttatctggaaaataaacacacaagaatagcaaagaaaattctgggaaagaaggtaaagagtgcagattaaccaactgtaattgtggtttgtaacaatagagagctccatggaaagaattgagaaataaacacaagtttatacagagtgactttgataaagctgggatttccaatcaatggaaaaatagatttacaataacaagtttgggacacctagatagccatttagaaaaagataaggctagatttctatataattccttaaccacaaattacatggatcaaaggtgtgaatggaaaaaaaattaagctataaaagaactaaacataacctttaaaaatataggatagtatccatcattgacttggcaaaaacacatactcacgcacacgcacaagcaatgccagaagtcaaatgttaactggaggaaacattgtcaatttctaagacaagagattgagctttcatagatcaattaaaaatatgacaagcccattataataagaaggacaagaggcagacagttcagggtaaaagaaatacacacagttaataaaccatgtgaaaagatgccaaagttttgccacaaatttaaaacagaaaaatttaaacaacaaactgataggactttttacttatcacatgaattcagttaacataatttttgagcacttcctagatgccaggtggtttcagtatttttaagtgtatttcacatactttttgtgagcatattttccataatctaccaatttttcataatacgatcagtagtttgaatggaaacatgcctctgaagagcttgataatacttgaaaggtgattttcttacataagtcagacttttagcaatcttgtttatatgcttaatttgattaacacactctttttcgcagaatgcacagtcttcaaaagcgatctatttttttaaattttattttatttttaaattttattttatttttaaactttgcaatattgtattagttttgccaaatatcgaaatgaatccgccacaggtatacctgtgttccccatcctgaaccctcctccctcctccttcccccataccctcctctgggtcatcccagtgcaccagccccaagcatccagtatcgtgcatcgaacctggactggcgactcgtttcatacatgatattatacatgtttcaatgccattatacagagtgaagtaagccagaaagaaaaacaccaatacagtatattaacgcatata

SEQ ID NO: 30627 - DNA, 1734 bp, Bovine  19866880901392
  misc_feature (1)..(1): n is a, c, g, or t
nctggtcccctttgtctctcccctgttcagctgatgctgggtcctctgagtcctttgctagcaggctcactcccaccctgagtgaaggcagaagggaggatgggaggtcagcagcctcaggtcaccatctgcaagagtttataattgagttctattccccagatctgaaactcagtgactcagttgttactcctgggctcctaagcctcctttgtagcctagaaggtataagttctggggttctgggatactggggttttaggtatgaggtggcttgttgccagcaatttcatcagaggttcatagagtctaagaaggtttagttaaaagtcccaagtgttgactaagttaccctccttagtactttctaggtgttcttcaagattgagaccattaaaaaaaaaaaaaaaaaaagattgaggccactttattcccttcctccagagcaggagtcctataactgatgggccatgtgactcctgacttggactggagttcagagttcctttctgccaggttttatcccctgtgtgagatctctgatgccaagggttccctgaatctcatgtgaacaaccatgtggattactctgagcttgggaccattggctgctccatccagaatcactcaccacagcctggtcagtttgccctcgactttgtgcagtactggtaattttcttggaaagacagagttctagaaggaaatataatctgtctcagagcagtgatcatatgtgtaagtagatgctcaataaatgtgttgaaagaataaaaacaagtaaagttaaagccagaactggggccagtgttcaagtagcacagatcctcacatgcattggtcacccaataaccatttgctgatttgaagctgtttgaattggactacagtgtatctggggagataagatttatagatatgaaacaattaaagagcaataaaagacaacacactttggtgtctctatatcatttcaacgggcttgtggataaaggagattgcattagggaccaaccagggtgagcaaaaaacttacagaaaaggaaggacttgagatggactttgcccattaattcacttcatgcttttccaaatgagtttttcaaataattctacactagatatatcactctcatcttaccaaaaaaaaaaaaaagttcaaaagggctgagagaatgaaatgagaattttgttcaaatttgacaaatactgactgcctgctttgtgccatgttttactgccaagaataaaggatgtgaaatgaatgagaaagacacaatgtccccttcggagcaccacaatggtgtgctggggttataaataagaaattaaaaactatgcagtaaattctaaaacagaaatatataacaagtgctataagaacccagtggacaggtgttaaaaaccacctttttgtccatgacaggagtgggaagatatctgttaggaaaaattgtgagagctgagtcttgaaagttgaccttttgttccctgtactgggaagagaaagtatcagagaggaaattgcaggaggaagatttgtatccggaaaaaacacagtacacatccatgctggacaggaaggttaaggacaggctgtgaagtgccttgctaaggaggataagatgtccaaaaaagatgtccttttcattataggggactgaaatgaaaaagtaggaagtcaagagatacctggagtaacaggcaaatctggccttggagtacagaatgaag

SEQ ID NO: 30628 - DNA, 1129 bp, Bovine  19866880902490
  misc_feature (1)..(1): n is a, c, g, or t
ntgaagatggaggccacagagaaaggaccccagacctttcctcagcttctgttgggacatgtgagctgggtgtgaccccaaagactcagaacagctttcgctctgtgaaagcgcgaaacagggagggttctctgaaaggaatggtatgggctgcggggaagaggtggggtagcacatatgactgagacccgggaggtttctagtgctgacatgactcggctcctaatccacagaactcagctgaaacaccctaagccaatgaataacagggtcccagtcataagcagaaaacgctcttccctttttcttccttccacctcacccatgcagccttgtgcaattagtcctcatacaaaggtttgcagaattatccaagtggaggccaagtctgctgtttcttggccatatctaccttcccagaggatcgaccagcatagctgaagcgcgctggaccatggcgcaaagcggggagaggggcgccacggctgctgggaaccgggccttctcgaactcagtttcagagaccaagaaacggtcttcttacttcaaacatgcaaacactctccctgtgaggcagctgccctttgaagctgtggaccaggggggaaataaaagctcctgtctgagaaaggataggtttctttcttacactctctgctgaccattctatttcctgcgggttttctgcatggaccctctgccggcagcatagggggagcctgcagcagccggcgcagcagggcccgagtgaaagtgactaacaccccagcctccacagctacctcggcctctgcagcacctttctccagcctgacctccccatgctgcctttctgctgctgctgtgggagccaaacacgaaagccgggctgaacaggctggttgaagaaaggagtgagtcaggtctcaagtctcagaaaggcaatgtgggctgaatcccggtgccaggggttaaagcccgcccatgcatctcacccataacacaggcaggaaagcgatacggctaaactcaagtgggacatttgtattcagagatcggtttatgttcacccacattgcctggtatggtgctgagaatgcatttaatatttatgggcccttttgacatttaaataaggcctggccaaggg

SEQ ID NO: 30629 - DNA, 709 bp, Bovine  19866880926533
  misc_feature (1)..(1): n is a, c, g, or t
naattttgaagacttactgcaacaaaatgccaactgaatacaagtgttctggtctgctcccaatcagctcctgccgttgatcagttagttcctatggaaagattaggaatttcagactcacaggctgaaatctggtataaccccccaatatttcccaataacttaaaatttaaagtgatctagatattggtatacctgaatatagtactttaaaaatcactggtatttcttgattctttgctttaaagctgctttatagccctggagtgttagagctggtgtattcagacttctgctagctcaaagtctgagcaggttttccacttacacccgaaaacatcccagggagagaaagaacttaccatacctttcagccacgtatgccccacctcagtgaccccatagggatgtgagacactagagtcaggaaaaaaaaaaaaatgctcttctgtattctcctatcatctcttggagtggctgaggatctctcatatgtaactaaaatgcattcatcgaggccacttgttatgattgtatagattgtccactgtacaatgagcacagtcacacatgatccccctgcttaggactgacatcaagccaatcagagttgatatttcaaatgagaagtcaaggtttttatattttctttaactcttacgatggctaaagctctttttcaatatgtagttaacactctgttagatgg

SEQ ID NO: 30630 - DNA, 1580 bp, Bovine  19866881010689
  misc_feature (1)..(1): n is a, c, g, or t
ntaaggataggtttagctttgtaataaactgcccaagtgtcttccaaagtggttttgcattcccaccagcagtgactgaaagtttctcttgctccacatgctctccaaatttgatgttgtgagtgttccagattttatccattctggtaggtgtgtagtggcatctcattgttcttttaagaccttgtctttttatcctttatccttagcataatgtggcaaatgctgggtatagaaaattcattcagaggatatttcttagttgattttccagattaaataaattctctctcctcccatatgtatatacatgcatacacatataagcatatgtgtaaacatattttagcctgaatatttttttactcttgctagcaacacacatttatgtgacaataaaagtattatctttagaaaagagataagaagtcttggttactcaatatgatgagctattgattcttacacctgagaaaaagttaaagcacctacattccttgaaataatcatctctatggcaagcaggacctttgttttcaaggttccacctgaaagtcaaatgttcctcctcctcacatttatgattttatttgcctatgatagataaaggagtcatttgaagtgacatagacctaaaatgctggttacaagaaattttgttgctagtttgtattaattattcctgtccaaatggagggtaagactcacaattgagtttgctgtctgactcatgtcttatttgacttcattcttaatccatctgtggagtgttttgtagattagtattgtgttttggaaatacaaagaatgctggaaaaattcaagtgaggctttaaaaaattcaccattaatttggtaaataacatcttcctagacagaatgttttaacttggccctttgaatataaacatttttaggaagtatattagctcgtttggtaattcagttagaatttgtatcttctattattttcttttactcaaatgctacagagttatttcccttgagtctaaattattgcacacctttctgttgtgaactgatcctcagtcgtgcactgaacacctcctatgagccctgcactaagttccaaggacacatctaagagatctataggataggatgccattgtgattatggaaggggctgagggtaatgcctgaatgaagaaataaagtagttagaaactagttatcattggcgtaaatgtgattgtgagaataaccaagcccactgttagtttcccttgtcatgtcttagacgcccaccatgaggctgtgcacacaggagccacctacaagtcaagcagactggtgaaagtgaatgtttcaccagtgaaactggtaaaagtgaaagttgtgtctgactctttgcaaccccatggactgtagcctgccagactcctctgtccatggaattctccaggttagaatactggagtaggtggctgttcccttctgcaggggatattcccaactcagggattgaacccaggtctcctgcattgcaggcagattctttattgtctgagccaccagcaaagcagactggtgacacccttcaataacaggcatgacaca

SEQ ID NO: 30631 - DNA, 1092 bp, Bovine  19866881018643
  misc_feature (1)..(1): n is a, c, g, or t
ntaactcttgaataaacttgttcttttgatgaaccagaaccaaaccatgttacataatgttaataagataaaaccacaatcagcggtcttcctcttccaaacggaggtgacttctcaaaatggcatggcctagttataccattttcagtgttaaaaatcatggggaggatcatagccacaatgactaaagttttccaaagaatgttctataaatccttgtaacaacaatttcactatttcaattctaggctgtgggaagatttcaaagggtttagttttttttttttttttcattcttaaattgttcattctgttttttcaaacagagcatttaggaaatgatcctgcagcaatttaatgaaaatagcaagatccattaacttcacactgaataatatgtaaacctcgatgtttaattagtctttgactctgtaaattacaaaatactttttctagtcatttgctgctgctgctaagttgatttagttgtgtctgactctttgcaactctatggactgtagcccgccaggctcctctgttttctccaggcaagaatactggagtgggcagccattcctttctccagaggatcttcccaatccagggatcgaactggtgtctccggcattgacaggcggattctttactgttgagccaccaggttcatttaggccagttcatcccctaagggtgggaagcgctcctttcccccaaatcaagggaatacccctatgtcctgattagggtacaggtgcagggaataaagggaggacatggcttgtgggtagactgcgtctagacaggggccaatcccaggcacaagatggggaagggagattttgcagcttcagtttctccaggtcaccttccttcttctgaagagggtaattttcatctgtcttttgttgatgcttggtctgggcctcatgatgcttccactaacaggcatatgcatttcctcaacactcagatgcaaaaaacaatttacaaaaataaaatgaactctgccaccatccactagttgtgggaaaatccagtgtcagtcactgaggacaggccagggggttgtctagtccttctccctgaggtttg

SEQ ID NO: 30632 - DNA, 2421 bp, Bovine  19866881048175
  misc_feature (1)..(1): n is a, c, g, or t
nttatcctgccacactaacactttcctccctcaactttaggagtgatgagggatggaggtgaaacaattcgtccttcattgctttttctcttaggacagagagaggaaaacaagaaagaaagaacttctgaataagttaaatacttttccctcatgtaactattctcaaactggggttaaaaaacagacatgaaatcataaaaaaaaaaaaaggtagaacaagatattttggcaaaaaaaaaaaaaaaagaacaaataagtagtcagagttattattgtacctaagactacacctcatatacattcctaacatagctctacacctgccatggtaaaaggaatgtagctttacatgaatctacttttatagtgaagggtgagtgcaagtctggtgggatctaaattcgtgcatgtgcatgctaagtcgatttagttgtgtccgactctttgtgtccctctggactgtacccctctaggctcctctctccgtgagatactccacacaagaacactggagtgggttgccatcccctcatcctgggatctttctgacccaagatggaactcaagtttatgtctcctgcattggcaggccggcttctttaccactagtgcctccaagttcatctcctgttaaatattcaaatccaagtgaaaaagagactctagacaaaacaactaactctttgcttccactgactgccttcatctgtgagtcaccaaagacccaatcagagattccctaaactctcagggaacttattattattacatagccaaagtccagaggaagatcagttccagaactgattaattccgtgattcagcagcagggtcctagacccagggtcattccatcctcccacctcatcattgggtcttctcatagtcacaaggcagttacagcatcacatcctcaaacaccgatgtccagaagtttgtgtctttttttaagagctaaggtgcccctttcaaaaactacttcccgtctccttgtggagaacttgatcataggtccatccaaagccactgacgaggaagaagaatgaagcctccatgacctgttcaggccagtcaggggttgagttgagtcccacagtggacacaagagccaaggcaaggctctgagtgagccactgagagcacaggtttgctgctgaaagccagtccctggtctacatcgatcaggttcaaaatgggcaatttccataatttttcttgtttaatattttgcctattaagaagtctgatgaataaaatgttagcaggaactaacctcatctgacccatctttatgccagtaatcagagctcattctaaatgagcaatttgaaacctttttccaggaaacattcctcctaaacaccaacaaatagccaaagaccacttaacttccttgttgagaaaaacactcactattaacatgaacaggtttgaaagctctgggtgtttatcagatagctaccttgttttgtctacccagaagtcttctttctattgaaaaacataatcccctaccaccctgtactcctctgcggtgctggtacacctgccaaacacagtgccaactacagaggcgacttgaggcccaggccttggcaatcagggagctcccatcccttgatacaaattagaccatcagtcagacacttaaccctgactcaagcaggcaacggtgaccaaaaaaaaaaaaaaaaaatccttctttgaggtttatcagatgaaaaaacaaaataagtgtcacctttcttttctgggatccggccgtgttcagatgctggggaccacacgagacaacatggccaagaacatgaaaaaaaaagaagaaaagaagcagagactagtggccatgagagagagacagagagggagagagagaaggcaacaaagaggtggatcactggggcttgatgctgtgacagatcacacagttgtcgccagttttctccctgtatctaccacttttgccctgagatgctgcagcttccctcacttccatggggagcgtatattttcccactccctgactctgggcttgatcaggggactgaccttggccaatggcatggtagcacacacgacccagcgagggctccgagtgcccttcccatcagcaggagaacctgctgggggagaagccaagggaccccgctctgcaccacagactcctgcagcccatctgctgatgcctgagcacacagtgagatcagcacagctgggacagccaccctcagatgtgtgaactaagtcactgctcgccgtcacaggtcaccgacatgtgtgtggttgtttattacacagaaatggccctgtttattacacagaaatggagccaggagatcactccccgcttttcttcacctaatgtctgcctgtttgtttgttttgatcaccaaaatggaggcttcaaacggggcaggg

SEQ ID NO: 30633 - DNA, 1341 bp, Bovine  19866881157787
  misc_feature (1)..(1): n is a, c, g, or t
ngaaagatgctttaggaagacaccaacccccagtagctgggaaaaccgaccactccctgctcagccttccctggaaaccaaaagtaaaatacaagctgcttggttggagctctggttgttggttggtaagcactccagcctgcacacctgccctcagtgtagggagagatgatcagctgtgggtttgtatagatgccatcaggagagctcttggcctcagccttagaagaggacaggcttgggggaccttgctaagcctccgtaaaagcatcattttgttgtccctgcttgatttaatggaggaagaactctaggcttgatacccgataggtctagaaatgaactctgtggactccagagtctgaactcttcaaatccattctctaggctgacaggcttgagggattcggttccagtttgagagccccctcagaatgttatctctgctggctgttatcagttactcccgggtgagcccgaagccccagaataaacacagcccagacactatcagggaagatgtgatgggggcagtgatggaaagcttgttgagggagagggatttctgaggccactaaaccaaaataaatacccccttatcaggccaatatcagtctttcagtgaggctcagcaggcaggaagttcaacttgtcacttttgttttttaaagctgaaatggtataagaagagagacaactaagttggaaaactgataggcaaggcatctcagccacaggaggggattttgaggcaaaaaaagaatgatttggaggcaaccatataggctcaggttaaaaaaaaaaaaaaaagacgtaacccgaaaaaaaaagaaaacacagaagcttcaccatcacaactttctgccattgttatgtggcaaattacatctgagtctcctaattttttctagtagcttccacactctctgggttctaatattgaataaattaaagttataagcaggaagttttaatctgtccatagcactgccctcctatttatagtcaggtgttattgctgagcacctccataatccaattattgaactgctgcaaagctaacaatcgagccaacaacaagaaaagttggaatttattattttctatgcaaaatactgagcagagtgtacctagcgtatcatagctccacgataaatgctcactatcttacaccttcataaaaacacatttatttcctattaaaaaaaacaatatctggagagcaatgtcagcccccctcaggtgttctaaagtgtcaatcatggaatctatgcatgtgtgtgctaagtcacttcagtcgtgttcgactctgtgcgaccctatggactgcagcctgccagg

SEQ ID NO: 30634 - DNA, 2162 bp, Bovine  19866881172849
  misc_feature (1)..(1): n is a, c, g, or t
ntcaaggcctttaggacctttctttgtgtggaagaaggtgagggatgtatgtgaaaaaactgctttgagttactgcaaaagtcaccaaggtgggtcatttaaaatggagttacagttcaaagaaaacaaaaaatcaaagtcttttttctgaatccatgaatgatgaagctcaaggaatgtgaggagaccctcaagaagcagcagcacattttcctgggagatggcctgttggagagtaagttgccttttgccactgggcctggcacctacagagggtggaagagcagaagggctcttgggatgctgggtactagtgatataatggggactcttgcaagtgctagagagatgagggaaaagacccaccaccattggccaggacctgattatacctactatgctcaagctggaagccaatttgtttccaaacatttcaaggttttttccccaaacctcaagggtaactatatgtgtgtacataaggaccacaaacacaaatgtaaagatattatggtagaggtctttaagcttttatagcctcagcttttcagaaaactacaaatatagtcttgagatcattgggagatcattgggatgagtaccaaatagctatagagttggattatgcctgactaggataagtaattggtttgttaattggctaaaaatttaagtcaaattctaatttatgttaatattaacattcatcccaaaggtctcaaaggccaaaatgtgaactaaaacaatttagactgcagataaagcaaatgggacagcatatggatgattgatgaatctgggtaaagtgtttctgggaattctttgtactgttcttccaacttctccttatgttggaaatgagatcaaaacaaaaggttacaaaaatttcagcttttagatgccgaactctgaaaccaaaaggagaggattttaaaaacctgctttaaaagcagtctgagaatatacaactatagttacaacaggttggaattttatggtaaatcttacatcattcctagagatcacttgagaatgactaaaacaaagtagccctttgcagagaggtcacgacagcaactttaaccaatagaaaagtaaaagcttataaacctaaggaactgaaaatttgttaagataaaagtgataggtggttactgtaataccgatcaggagatcagataattaggtttttaccataaggaaggaagcgaagatataaaatcttcagggttatccatttcgaataagatttaaaaaattatagctccaagtttttctaaaacaattatgtttcgcatcagaccataacttgataaccaaatgtgcatctacatttcaaagcttattttaagcactgagaaattaccacaaacaaggaactatacctttcatccttggcatgtcagaactaatctctattacaatataatcctacctgcccccttttggacagattaacattggacctttatttcttcctgtacattcagaattgctcttagtattttttaaatgatcaagtttcattatagggaatagagactgaaaaaaattgtttttctcttcccagtgctgagtttaagccacctacttggcccatcaaatgaagccatgtaattaaacaacatgttattagtgcaaaggggcagaactgacattactggcatttttaattttttttttcttctgtaatccacttactgagattcatcattgtcagctctccggaataagggtagtgaagcctttctgcaaagtcccggcagtaccacacaagaagctcctggttggcagggatgggcttaatggtgtagaagtagatgttcatgccgttctgacaggcggccaggttctgctcccgggcagtgtgcgctgggttcacgtagcgtagccagttgctcttctcctcattaaagccatcaatgaagtggtgaagctcccctctggaatagatctgcgcaaaagagaagagagacgtggaaaataaagcccccaatgcaatggaaagcttgccagcacatggcaagtgtgatttctggtccctgactgcctcattagaaaaggaaatcagtttagccgggagttgtcttgaatcagcagaaataagggaggaaacgggaggcacgctttatcagttaccttttccatttcagttttagggt

SEQ ID NO: 30635 - DNA, 2745 bp, Bovine  19866881238088
  misc_feature (1)..(1): n is a, c, g, or t
ntcattcctgggctttctttgtgctctttcggaagtattacatctcttaatatgctaagattccatcattgtctcttttttcctttcggtttgtttcccttggaagtctgattgttgctataggcagttatttgtaatttagagagcagatgtcagaggaaaatggaaatgagggacaggcttgtacggaaaaaactattgtggcttcttttggcaaaagagattcggctcacaaaggtcctgctaatttgtgagaatcatgaactttccccaggaattaatatgctcatctgaaaggaatcaagattcttttaatggaaataatggcttgtgcttaaatcaaacctctgctcaagtgaagtaccatgaattctaggatgtttagtttagtggctttttgttttttcttccacatcttttttttttttttaatgccaagccttacttgcatgaagagtaagaaagatttaagtttgttgctgcaaaaaggaaagaagataaaaaatatgggagctaaagaagacaaagccaaccaagagaatccaaaaagacgttgaaaggaaacattctgttagcaaagcaatagaggcctcgatactgttctaacggttcaaggtttaaaaaagggaataaagacaaatgaagcagtcagagggaggagagggaaaggttaagccaagacagaaactgtgagtagatagatgtgaaaggggctgaaaataagtgaaaagtgaaaaattgctttatgaataaaccgttaaaaaatagtgagtgaaaaagcaatcgtgcttccagttattactgaatcacccgctggtggcagccagaggctgacctgagctgcgactccacgcttaacctacatgcagcagttggtgctgggctgctcctgtgggcggacaccgttttctacttgagtgtcagtttcactgtgattacttgccgtcaagacgcatgtggcccattttaccgccttgaacaccaaaaaacatgacttggtcatctctccaacctgctgacattacaaggcaggagatacagcctcttggtacattcaggacaccagcaaggcaaggagctagaaccgagggatgtgaggacaagcagatcttctacgggaaggtgatggggcgtgaaggctcagcctgcttctgtgtttttctgaaaatgaggccatgagtttatactcaatgatccttgtcattcctgatggcgtgtctgtcagggcagggacacagcaaccatcccacaatctcttctgcgctcggagtccacataatactcttctcccgagcacattcaggccagcaaacaaaatgccaatcatagcagacccgcctccgcccctgcctacttgaggaagcactggagccctaggaagtgaaccggttccaccagttgactccgccctccgagccgccgggaagagcaaagaccggaagtgctcgcacccaccagaagattggtcaagcatcacaaggaagggctagtgcagatggtacaggcaatttccaaagctgcagggtcgccctcctcctcattccaagtgtagagcacagttctctttccgagctgcctgcatgcagagctaacttttgattctctgtttcaacagaaaggaggtgggagatgggtgcttacaaattccaagaaaattttgcatggcagggcttcactggttgtctctggtggactgcagggaggcaggtggccctccagtgttactagggccccggggaagtcagttctggggaccatttgacccaagtgacccatggagcagtgagtgagcccatgcacacagatggcatggctgtgaaatcaaagaatgaggcccagttttaatgaaactgtttcatttttaagaaccaggataagactgtagttctgtacatctggccagttggggctacgatttccttcaaagcttcacacagttcttggtatctgttcttgttgttgctgcaagaagtacctagccttgtgctggtggaaggaaggtttaaggttttcatccttgagtgttttcatggagacaggtaaggatgggctttgagcatcttcattttataaatgggtctgtcaaagcatggaaggtcaggagagaggctcaggccacctgactagttcctgctgggcctggaaaccgaaatccccagcttcctgactctacttccacttctcacttccgaagtcagcactttagaagatgctgctattgcccagcaggcagggcccacaggagtcactgatgctgtttgtatttaggtcaggcttgccaaaatggcagggtttcacagcattaattgctgtcttttgcctggtcaggaacttgactgttaacaagttctgcagacatttcgggaaagcaaggtggggatggctggccttggagaaccgtggcctgctgcagcccagtattattcaccagttcgacacaatcattcacatctctgaaaccaagcttcttccagatgcccctttactgaaaggctttcatcactctagggtggccagttccccttcaaagcgccagactgagctggcgtttccacgtgcattcacagaggcagggggtgtgtgtcaggcttcagtggttccgggtcagcctcaggtcagcagtgctccaaagagaaaactgaggcagggagctcccaggcccccatcaggacatgccttgggggcctggcaactgcagctgaagagcacatagatgctcagacagaaggcacgggcatttgcaaa

SEQ ID NO: 30636 - DNA, 3303 bp, Bovine  19866881246487
  misc_feature (1)..(1): n is a, c, g, or t
natgctgtcctaaaaattgttgcttatctgcctctacttctctgccatgaatactttttttttaagtataattttattttttttaaatttttgactgtactgggtctttgttgctgcatgggcttttctctagctgtggtgaatggaaactactctctaggtgcagtgtgcgggtttctcattgacatggcttctcttgtggagcacaggctctagggaagatggacttaagaagttgtggcatgtgggctcagtaattgtggctcccagtctctagggcacaggcttaacagttgtggcgcacaggcttagttgctctgtgggatgtgattatcttcccagattagggatcaaacacatgtttcctgaattggcaggcagattctttaccagtgagccacaagggaagcctgatgtgaacactcttagaagggattgttgttcatcattctattcaaagaaactagcaaagtgcctggcatatataaaaaaatgtttgttgaatgaatgagtgaaagaatttcctgactctgaacttttatcatgagcatctaatcactggctctcttatttttttatttttattaatcttctaccatcttaattctactagtttgaacaagtgtcttggttttgcacataagtcttcaacactgtcaaatttacttagtcttcagaggtgtcatgcagacattagccatatccggatcactcctcccacactggatgtacacggagaagttctgtgcttggtttctcatcatggcaacatgcccagcccaaagatgccagtttatatgagttcaaatagcaaaagcatggtagacatggctcttttctagagccaagctaccatctcaatgttaaggaggttgaaactactcccaagaacaacctcttccaactgccagttctcaagtgatcaaaataagagaggaggtcattgtaaatgacctcgtaaaatgtcaagaagtgcgggaagtgagttgagagctaccccatgttctaaagttattactccaattaaactcctttatgtctttctgtataaattgtatataattatacatttgcatttatctaatacaatggaaatacaagggagaaagtaataaagtctcaattatgagatatctgcatatataacaattcagaaagatcacatttattgaataagacatgtttgtactttgaaaacatttcctttcagaatcactctgctcaaatctcctaggccccagtgaattttgagtaaggaagagctggacagagtatttacacatccataaaggctatccttttttttttttttttatagatatttacttgctgcccgactgcattcttgcttaagaaacttatgttgaaatggaatgttattttacgtgagtgaggctgcagggtgaaccctcttttaaaagagcagccttgacctgatgcaaatagactcaggatgacctgctgctccggatgttggttagcaatctttgcagttaggcactatctgagtctaatgtttgccggggtgtttccaccatagcaagattttgtcaaggcaaatcatattcctaggtcctgttttgttttgcatgttttattttttaattctcagcttaactggtaaatttaacaattctattcttttccataagtgtggatatgtaagggtccagattacccttactgtactagttatactgaatattttggaccagtttattttgccttccaaggaggtattataaggcagactacacatttaaaagaacaaatgttccacctagatgcaccgaggaatcgagaacaagaatctcctctatgaactgagataacaatgcattaactttagtgaattcctaggaccacgttttctagagactcaattaaataaactccttactaaatgtccatgagtatgaggcattcccaggtggcactactggtaaagaacccgcctgccaatacaggagagataagagacacaggttcgatccctgggctgggaagatcccctggagaagggcatgaagtcactccagtatttttgcctggagaatcccatggacagaggaggctggtgggctaccagtctgtagggttgcaaagagtcacacacaactgagatgactcagcatgcatgcattcatgtgtgtgaggcatgatgtggttttcgagggccataaagagtaaaaatcatttaactgtttctgaccctcagggagtttgcagcaaggttaaggacaatttaaccatgatcaagcttttaattaagctgaatgcaaataaaatattttaataacagatctaaatactggagatggtagctcttatgaggctgtccatgattaattgccaagagaattttataagcaggaagtgctctgagacctcagagaggaccagcttgggaaagcatctttcaggataaacagatgtagatagacccaggaggaggccaaacaaatctatccaattgtctgctgatcatgagaccaggcagatttgggctcagtcccacctaggactacatgagacaaggtcccttctactctgaaactgtcttctcagaataaaatagagacaatgaatctaccccatgagttgttgtgaggagtagatgagttcttggggtaagtaaagtcttggtacagagcctctcatatgttggcatttatgatatcagatattatattatgtaccattttgtcttttagtctactctttgcttccctcactcagaagtaggcatttgaaaatacagatttaacattatttcatgcttggatccacagccttactacaggctcaaaatagtgtctaatacacatttgttgaataaataaatcaataatttaacatcaaaaaaatagattaggggcttccctggcgtctcagtggtaaagaatccacctgccaatgcaggagatgcgagttcaatccctgctctgggaagataccacatgccacagagcaagtaagcccgtgtgccacaactaccgagcctgtgctctagaagctgggaactacaactactgaagcccgaatgctctagaacccatgctctgcaacaagagaagccacacaatgagaagcctacacacccaactagggagtagccgccacttgccacaactagagaaaagcccttgtagcccacaaagacccagcacagtcaaaaaataaaataaataaaaattttaagtagattagctaatattattgttcaatcctgtctttttcatatttcttttcatccttttccattttcttcaacttgggagcaataagagatattgcaagcag

SEQ ID NO: 30637 - DNA, 981 bp, Bovine  19866881250309
  misc_feature (1)..(1): n is a, c, g, or t
ngattacacatcatttttattttcatggttttgctgtgttcccttaatttttcccccgaagaacacagactacttttataattagaaagaaaactattttcaaataaattttcaaaaatgtcaattctgatatcataaaggattttactccctgtcaggatgaagcctaaagaggagactcatgtccagcaagggagaaaaaaaaatcaagaaggacagcactcaataaacacctaattatgtttctgatctcgtgcctgtttgaagcactcacacttgttttgactcagctagataagtcagctcctctataacagtcacaatttccaccagctgttttcgatgtttgaggttatgtttttgtttgagtgaacttcactgcctatcccttgagcgagcttatgaacaattgtaaaggaagtctttgaggccgactcagaggaaagctgctaatctcatgacatccacaaggatttgaaaaggcagctccatctgtgctgtttctgttttccttccatggaaggtctcttgatgtcagaaaaatgggccacttctgggtccagttgttggatggaacattcgtgaccacagctgtgtccaggggttcccacagacacatttaacctagaagccatgagtgacaaaccctacgcagggtacgcttccagccctttcctgggttttgcttcccatgtggtagttctcttccaggagttcagagttggggagcgctctggcaggaagctatttatcattgagaaccaccaaaggagggatcctgccatctgtgcctgacacctctgagactttcttttgagctggaagccagggggttctcagtgcatgatgtggcagagtttctggaaacagatttggggaagaggaagctgacttatgtgggagtcaccatgtcagttgtcattctctggcaccccctcccccatgatgttttttttttttttcccaaaggaaaaaaaaatg

SEQ ID NO: 30638 - DNA, 1388 bp, Bovine  19866881278100
  misc_feature (1)..(1): n is a, c, g, or t
ngcatattcataaaagaggatactgcagaatcctgcagtaagaattaatgaagtgctgctacacaaaacttgagggaaaagtatgcctccaaaatcctcttttgttctttctgaacttgaggattcaaactcctgccctcaactgaactgggagtctccgtctccagctctgtgcttcctggctctgagtcagtcacggggaagccacacagacgttccttgctccacccaccccccaactcacgcactcactggcagccagttaaggtcttcacgctcctattgctcagttttctggtgatcctgacatgaagtagtcaggggggcaatccatgccaggatagcccatatccttcaccattgtgtgcccagcactgaacaatgcctgacacaaagaaggggctcagtaaatattttttgaatgaaagggtgaatgttcactgatgtccctgtgacatcccatttgagatccattgaaatctaactgcttgaaaaagtgtactgtctgtgtaaggggctgaattcagtggtgtctcagatagtcttagttggcatcatgtgacatgttgctttgctgattttgcatgcacacacacgcacacaaacaccatcaaaatttgttttactttcagctctttttgaatttaaatataggatgggcagcttgtttttcccaggcaaggatgaattaaatttggtttcacttggtttgtccttataaatggagacttctctgtttaggaaggtgctctaaggcccttaaatgcagatagtttaaccaatgatttgaagaaatcttactcccacaagactttcttatctcctaatggtatcctttcctttttgtgtaaggcagactgtgcattatactgagattcaaagaaatgaaataggaaatccaattgtagagtgaatttcaatgaaaatgagctaattagtaaataaatggcatgactttctgacaccttggtagaaacagaatagaataaatagaattctaatgataatatttagcagctaccgtatactaataatgtattatatgccaggcagtgggttaacccttaactagataaaggcaggatacattgattttaccagggtgctagatccagcctagaagaattcagttcttacatggaatagataatacaatagttggtgctctggtgtgaactaaagtcagaatgactggtttccccttgtccttgctaaaattactctgccataaaatttggctgttggaaagtcctaaaattctgagaaatcacaggagatacaaagatgaatgtaggattcagtgcctgcctttccagttgctcaccatcttgagtaggaaagacagtgtgtctttgtggttcagttgctcagtcatgtctgactcttgg

SEQ ID NO: 30639 - DNA, 915 bp, Bovine  19866881341051
  misc_feature (1)..(1): n is a, c, g, or t
ncccaagtttcttgagaaataattatatattaggcaaaataaattgttgtttaagttaaggctattcatataccacaaaaggcaacatgccttgaccatcttttgccaaatgttttcatgaaacttgggtgaaagaaatcaaggaagcaagatgttaactgaatccaagcccaacttaataactcccaacaatgtctcccagactggcagggtagagatgaaccattggctggcatccagaggtcttagatcaagaagtaacaatcaccctgttgcattttccaagaaatacaagttgaactttgaacatgactatttcctgaggagcaattagtcaaatgtcagttcttagtttataatgctcaggatgaaaaaaaatgatggaacagggaataatttctttcaagagccatgtggaattgtcccattatccatatccaaagaatgtccatatccactctttcaggaagtgaattcttttggtgtaggattcagtagatttggtaatatgggacgttagtctctgtctctaattctgctgaaagatcttaatgcagatgtaatggaagataaattgctcgtttcctgcccatttctatccatttaaatgagaattctgagcatgaaaaacagtgttttgagagtaatcaattcaagagtaatcaatattcaaagtatttattaagtgtatagcatcatgaggccatctagtggcgaacccacaagaaaaatgcctcaaaagtcccacagaaaatagaaattttccataaagtgaagaactataagagcttcttgatgaaagtgaaagaggagagtgaaaaagttggcttaaaactcaacattcagaaaactaagatcatggcatctggttccaccacttcatggcaaatagatgggaaacagtggaaacagtgt

SEQ ID NO: 30640 - DNA, 1385 bp, Bovine  19866881473476
  misc_feature (1)..(1): n is a, c, g, or t
ntggcgctcccagggaggaggggtcgagtgaagccaggctgccagtttgtagagagtgataatagcaactattattagtgataatagcagttactgtcaaactctctagaggtcatatgaacttctacaacattgtttgagcacccaatataagatgaagggtgaattagaagctatttgtttccctcttattgatgaaaatcctgggaaaggaaaattcagtaactggctcatagcatagctggtgcataacagaactgtgtctcaaacccatctcttgggtcctatgcttttcccaggggaccgcacttgtggcagtgacctattttgtgatctgttctgagatagagcattgatgtgtaaatcaagtggaattgtgaatctaagactagttaaggagagaaagtagacattagacaagatttccagtcttgtaatggcatgaatgtgatactcttattctagctgccttagaggtgaactagtggaggacaagctactcacagccctaataccatgtatctgcctggcccatttccaaatgagaacgcaggaggattcaacatggagctagaaggaatcaaaatatgtaggctgggtgtgtatgtagaagagagagacagagagaaacactaagcagaaatggtaggggagagtatatttgcatattttctgcttcctagtttcttcagtgtgctccaagagcagacagacagactcaggaatggatcgttcttatatattcacattatacctcatgactaagaaaactgttctctgaagatgtctgagttttactaaatgtttgtctcctcttcttccacaacttttctcatactctacacagagacggaaagcacagcagtgaatcctgactgaccacatgctgactgcctctgtatttcagtgcactcatcttttctgtgtttggggaaatgtccagatagattagctgaggttgcgcccagcagcaggccgttgagaaagggtaatgattgtggccctcagctcgcgtcagctgacttgtaaaatgtcctgacagcacactattgcatgttgtaaaactcttggacatgagcttagggaaagctttttcagccacaataacactctgtgtgcccgaaagttctttccagccaagtcagtggcatcagtggtagaacggatttgcttctcaggaaaatatgaagtcagtgccagtaaaatctagtgtacactgaagaaccacattttaaaaaataatgttcataccaataacactgctcacggttagcaaaattacctcttctaggactccccagaagtgatttttccagcaacagggagaggcttggatatttacaggaatcctttatgctggtatttagaggaatgctctgcatgtg

SEQ ID NO: 30641 - DNA, 1390 bp, Bovine  19866881508259
  misc_feature (1)..(1): n is a, c, g, or t
nttccttaaactttccttttggacatacacacatgtgcgcatgcgcgcgcacacacacacacgcgcgcgtgttagagcactctattagaagtccctggacagtctgtgggtacagtttcagagaagtcttgtcggtttcaatctctgtcacgctgtggacagtttcctgtagatcttccctactcagcgaccccagctcttcccacagctgtctgactcctctccgcactcagccttcctggaggcatttaccctgttatctggtgtctttcagttaagtcgctgcagtatggaaatccttccctttcattgccttttctgcagataaagagaaaaatatggtaattgctgtttcattttcaaccttgctataatttttggagcagagctgtttgcctcactatcaaaagcaactgaaaaccttctagtaaaagttcatttgggtctttttgaacagcataatttcagtgtgtgatttttcctttctcttacattgttccacaagagttccatttggaaatgcttgttagtgtaaagttccatcttgactcccagacaagcatgcaaagcgtgcaagtcccttggtattggtgcctgccttttataagccatgtgtcacatggactctgcataatgaatatgatatataggcaacatggcaaaatatttaaaataaggactgtcccacaaaatccagtataagtggttgcttttgtcctgtttaatgatattccatttgggttatattaagtacattatgaaatatgaagctttcaaactgtgagatggtgatggccagatattatgtagtgcaggggttggtaaacattttctgcaaaggacaagacagtaaatattttcggctttgcaggtcatatggtctttgtcagaactatacagcttggtggttgtagctcaaaattagccataggtggtaagtcagtgagtcagtatagctctgtttcaataaaacttttattttaaggctactgaaatttgaatttcatataatttctaccacggaaatattcttcttttgatttttttccaactgttttttccaagtgtgaagccgttttcagcttgtgggttatataaaaacagtctgtaagctggatttggcctgtagatttgctgacttgatagtgaattcataagttaaggatttgattccggagaagaaagaggtaagatttcatacatgtttctgggccaggctgactttctctctccagctactggctgttctgaatatagtactcagttgtgtttcgttgtttgttcctggtgggagtaagtgagtatctcagggaacagatataaggagatttttttttttttttaatttactcctaataacagaactttaaatctgtaagaactcagccct

SEQ ID NO: 30642 - DNA, 1249 bp, Bovine  19866881581777
  misc_feature (1)..(1): n is a, c, g, or t
ntgactgatggaccacaccaagtacagatgggctgggaagggggagggaggagactcacctactgtagacccttttaccttctaaactggtggggaccagaataaaagtaaaccagcctaattcagtgcctgggtgacccctcccttcaatgctttcttcacctgaggggttgagaggtgatggaggaaagggaaggcaatacaatgacaaacctaatttaacagacatcttatcttttgaaaaactctgttattgactaaggaaaccttttaacgagaagacagcgtggagatcgcagccggcagtcctggcttatctgatctccatctacagcccattgtttcctgcaaatatgcaggggaagccggggctgaggggttaatgttcactaggcatcttcccccttaaggtgctcccctggggacagaagggcagcccagcattaccctagaatgggaccaatcacagggagagccagggcttcgcgtttttcaggctggcttcccaacggctccttttaaaagaacaggcactggactttaggagagataatcccacaatggaggtccattagaagtattaggatgtagcccgccaccgagatcctcgggaggagagctctgtcctgacaatagacaattaaagctgataaacccaagctacttgctgctgttctaattccttctaattgtatgctacttgtccccggctccagcattcaggatgaagcacgctactctaatctccaaagtacctgacctacttcctacaggatctttccagcattcttttcttcccatctggacctctttttctcttctatttcccccctcttcctcataactcaaggagatgagaaggaagggtgttggagggaagcggggtgttagaacagaaggctaactccaaatcaatacctctggggcctcagacagtttattaatcggtaacagctaatcttgctttcggacacaccagtgagtaaactgcattaggcatcagactccacaagtggcacggggcacagaggatccaactgttagatcacggctggctgccaaatctgcatgtgctcatgcgtgcggagtatctgcctgggtgattctatttgtggctgacatctcactaattatgctgccaccaccaactacttagaggaaagtgttcattctcaaccagcaccacaaagcatataattctatctcaacaacagagctttaaatgccagtttggtgcccgcctgcgtgt

SEQ ID NO: 30643 - DNA, 1378 bp, Bovine  19866881609304
  misc_feature (1)..(1): n is a, c, g, or t
ntcctgacctgcatacaggtttctcaagaggcagctcaggtggtctggtattcccatctcttgaagaattttccacagtttattgtgatccacacagtcaaaggctttggcatagtcaataaagcagaaatagatgtttttctggaactctcttgctttttcaatgatccagtggatgttggcaatttgatgctctggttcctctgccttttctaaaatcagcttgaacatctggaagttcacagttcatgtattgctgatatctttgtagccttccccaaaagactagaaagctagcattttccagaaccgaacaatttcatcatgacttcagttgtcctggttaaaaatatagtaacacattaaattttctaaatgtgttacgtgattctatcattttcagaccaagacatttcaaagctggtaagatgcctggacacataatgaagaagggaacggagcaagtggggaattaacattttctgagcacccagaatatgcctacactgggtttcatgcattctaaagattgtctcatgtcaatcatcccaggaactctgtgataggtgtcctatactcatttttaagatggaaatattaagcctcaaaatgataatttgcctaatatcacacagctctaaagaatcagctaaaagaatattaattacccagtgctctcctacttccatctgagtttcttcattttgttattggcttcattctacttaatgttccaagtgataataatggaagtatcctttaagacacagctattggaggcacaatcagtgaaaaggaaaatgctaaatctcccagtgctagaaaagcagaaacaccatcttggtcatttaaaggaaagaaactgcttaaggaaaaacttacaaaatgtaagttttctacactgacaacaaacttttcagtactgtggcttcagcatatgttccgagttctcagaaatcatcatgtttctgctcactcctgagagtctctgtcaccctggtggtgagtcctgtgcttaaaaagcctatgctcccctagtgtcagatgtgctatttacatatgaccacattagttgctttgattctcagtttcctgtacatctggctgaagaatggccggatggaaacttggggtgggggagatgcagttgttcaccaggccatggtacacagtggctgcagcatgctggattatataccagatttttaaactgtattctgaagatgacttcacacaggatcacctcatgggggttgaatttggactgcccctaagtcaggctgagaagttcctgtgttttgttcctggtagttcatcatctctgcttctgatagttcgactccactttggtccacatctctctctctctttcaatctc

SEQ ID NO: 30644 - DNA, 1051 bp, Bovine  19866881629343
  misc_feature (1)..(1): n is a, c, g, or t
nctgaactccaatttccgtgtttataaactggtgatggtaattacctctctgcctatctcagagaaccataatactcctcaaaagatgatatataggaaaatattttgtacaaagatatgatttccacaaaatatttaaatatatttcttacactttaagggctcagtttcgataagagctatctttgttagacaaaagttgagttatgaaactaaaagtacaactttccatatgatgtagagtttcctgttctattttacaaggcatgtcccagatgggcggctatttattaccatatgaccaactcaagctttgattgcagttattagaacatgaaaatattgacagggctgagatccctgttgtgaaatatgaggatcatgaaaatctaaaacgtcatggggcatcagcctttactcacaggttctaacagctaataagattgaaaatagtttcaacaaagtgattacagttagaaatagattaaatattaacttattggtgaatttaccaattagacttccctgctggtcctcagtggtcattctgagaggtggactctgatgtgcccatgaggcttacccaaggccgaggagaaggaagtcagtcctcctttctggggcaccaccctggcgtgctgctgggctgcaacccaggtgcctgccccctccactgccctgtaccttacgcattgctcaggacctggggtgggacctccctcccaaccctcctttccctttcagcctttgcctcagacttctcttcactcccaaagagcttctgcttgtctgtgaaactgctgctctggatccaggtttcctatgtctcatataagcgacaataaactcaactgctcagctaagttcaagggcctcactctgaattgattacagggggctaggcagaaaaaggaaatggtaagggacttccctggtggctcagaggctaagactcctcgctcccaatgcagggggcctggagtcaatcccttgtcagggaactagatcccacatgacacaaccaagagttcgcatgactaaactagagatc

SEQ ID NO: 30645 - DNA, 899 bp, Bovine  19866881648268
  misc_feature (1)..(1): n is a, c, g, or t
nccccagaggaggagaaaatatgctgaaaaaaaaaaaatagccataaagtactttttatgttaagaacaaaaaggcaggaaatgttttttttttttttttttttcaaatattgttgcattttctccatctggtgaaataaaataagacagatatgttatactccgctgttacacaaaaacatcaccagcaggccagtgagatggtggagggctgctgctgtccttggagcagtatggaaggcattccctattaccctctctcccccacccctaaaacagcacatggactgcttctctgaggccatcaaagctttttgcttataacttagacatatcttggttgacagaataaaaaaaaattacagaactgtcatcattacgtttgaggaaatcttcccagtttcctaacttccttccaaaacatttttactctaattacattttttgttggtggtttggagagggcaggacaacctaaaagaaagattctattttaattgcatctttccttttccaggaagtctgtgtcctttcatatccaccaaactcacttgatcgctttattagctgttgtccacttgttactgaggaaaaaaaccaccacccaaacaaaccctgtagatgctttgtttttgttttcctctgcagagatcacaaagtccgtgcatactctctgtcaggcaccccttcttatccagggctccaggtgtgatagaggagaggggtgtgtgtgtgtgtgtgtgtgtgtgcgcgcgcgtgtgcgtgttcctgaaatgtcaaacatgcatcccaaagtgttgtgtgttttcaagctaggatacatagcttgcgtccaatgttgaagaaatttgtgaccctccgaagttgaagaaccactgcgccaagcacctacattaatt

SEQ ID NO: 30646 - DNA, 1748 bp, Bovine  19866881652193
  misc_feature (1)..(1): n is a, c, g, or t
ncagtctcactcctgatcttagaagcaagaatgaattttctctttgattcttccagaagaggaagtacattggaattccctacagataccttgttaaaatacccaagcacaccttaagacccatgctttttggaagggaaccaacttcattgatgtgtttttgtttagttaactttctattggtctctacatccaggtttttactttgtgctggaaaagcaacttcagttaagtgtctcttaccttcccagactgtcttctttgtcttggctttgggagaaaaggcaaacagccttcacacagtgggttgtgcagactttatcatggatcagacagctctgaggagaaaatctacttagacttaagattcaacctgttcaggattaggagaaagccaagacctcatcggctcttgtgagcagcaatctggcaaaaagtaatttagaaaattatggttcttcaagctgtagaaagggagagaatggctgagcacttgataaagtccttggctgctgggtttctattgcacagtctctggttctcagttgaaaggtttcctttctgtcatccagttagccaggcagtctgcgtttggaaagggagagtgagtttgcagggcttgccagtccagctgttgagttcctatttccaagtatcttgttgccgaaacagacaggaagtgctctcaccatgattttatttaataaactgatcttggatgtaactgacttgttttgtgagcaaagagaaaactcagaccttgctcagtcctggggaaactgggagaagagctgcggaattgtgaggaattgtggagacacacacctttgtaatattgcaggaatccagagatttcctactgcgtgagaaaggcagtgctccaaggagagccccagtcgattagtggctgatggcagtagagtgtgctgctccttctgtcaatctgggcctctcccatcaccctgcttccagctgtgctttcatttctaacagggtgaggctaaccaggctgtgattgattggtgccaggagagtggtttgcagtgctcatgcatatttgtaagaggaaggaaggtgtgtgtgtgtgtgcgtatgtgtgtgttggggaggtgaaagtatccaaaatgatagaaatgtgatctaataaatggttccatgctgtaagaaaaaaacacctacttttccaactcatggcaactcaccactttcagttagaactgatttggactctggggcacttcaatgcagtaaattttcttggacatgactgtgtctacaaggtacttgtgactctggggagctccaaagatgagtaagacctgggctctgccatttttaatctcacagtcttttctttggcactcgatgcactgtgatgctctgatggggtgaacatggtatgtattgggaggaatgagaaggagccctatttgcttggggacctggttgccctgctctggactttggagctcaaggggacagagcagtcatgacctgaaagcctttttaggaagtcagcttcagaactggcttccgaggagtatctacattgggtttagagtcagggaaggacttgataacagatggcttgttcctttccctttgcctctcctcctaagttgtttttagcagggagtttttgaggagttgtatatggttagttcaagggttgcctatgaagatgaaggcaattcaggggcctttccagcagccatcatctaaatcaagcaagagtcaacatgcggaga

SEQ ID NO: 30647 - DNA, 1003 bp, Bovine  19866881969664
  misc_feature (1)..(1): n is a, c, g, or t
ngttagaccttttagcccgctcctagtttcctatttcttcttctccctcaaaccataaacacagtgtgcttaaggggaataaaatagttttaacctcagaaaccaaagtaatgttctttggttgttccacaaaggcctaaggaaccagaaacaaaacataatatatttttttcattccagatgaggtttttttttttttttctttctttataatttgtaagttctctttagtagaaggaaattctttcaagtaactttgctcttctctagcatcttctgctcaacggtggtcaaaagtcttcctctgaaatggaatttatacctaggagagctgtgggttctaagattgaggaaatggctttgttagactggatggatcacacatttgactttggagggccttgctaaaaagaaacatgttaactataccagttcctccctgatggtaaatttcttggggtcggggggtggggtttaaaaaaaaagtcaccaaccatgaatcaggaagtaattcgtcattattcaaaagaactctgtaacagtcctttacaacactgtgcagtacattttgttttttattcactcactttcccattttgattttcttttcacccaaaacagcctacaaatcacttactgaatgccttattgatatggaccaagaggagaggtaaaaacatatttatctccagtttttattatccctggtggctcctttctaattgtgcacctgaaatggtaggcctttatatatgaatcaataaatgtttgcaatggaatctaagattttggttttgatatacactgatacttcattaaatctcatcaacaaccgaaatctttgtttaaaaagatatagaacacacctacacgcttgtgacagaccagtctttctcatatacatgacttaaaaattaattttaaaaatttaatattcaatatacaagccaatggagcataccgagacggaaagacagaaaaaaagaaaatttcctatacccaa

SEQ ID NO: 30648 - DNA, 2577 bp, Bovine  19866880106619
  misc_feature (1)..(1): n is a, c, g, or t
nattagaaatatgaaaataacatgataggatatattaccatgtgaagcaaatagtattggtttacttcatcttaaaaagtggcagcatttttaaaatagctttattgtgaccatggttactttggaggctttgtttttgttcagtaaaataagcattgaaggaattcttgtatctacactttgtatgaaaggtgcactttttaaatccctgattggatatttcagatgtagttatatacctactcctgaagccaatccaagcatttaaatggaactggcggtctgatttcataaggagacttgcaattatgttgttacttagaagcttagtttattttcttagagatttaatgcacagtgctagtattatcctttgctactaaacaaaatgcttctcaaaattttacatttgggcttactccttggaaggaaagttatgaccaacctagatagcatattcaaaagcagagacattactttgccaacaaaggttcatctagtcaaggctatggtttttcctgtggtcatgtatggatgtgagagttggactgtgaagaaggctgagcaccgaagaattgatgcttttgaactgtggtgttggagaagactcttgagagtcccttggactgcaaggagatccaaccagtccattctgaaggcagatcagccctgggatttctttggaaggaatgatgctaaagctgaaactccagtactttggccacctcatgcgaagagttgactcattggaaaagactctgatgctgggagggattgggggcaagaggagaaggggatgacagaggatgagatggctggatggcatcactgactcgatggacatgagtctgagtgaactctgggagttggtgatggacagggaggcctggcgtgctgcgattcatggggtcgcaaggagtcggacacgactgagcgactgatctgatctgatctgatcttgaatttatgtgacttttatggtgcttgtatatttaatttaaattctgtttagccttagtctaagactaaatccaatatgtgaaaatccaagtttatagaaaaaggtcaattagagggttatggtttgttttacagtagtattcctttaatattttcctttatggtcttagtatttgaatatcctcatatacctgttaaagaatatatgcatatatcatataaggtaaataccaattttacttctgtttatttgatcacaccttgttatattttgttactgaaaatgataatttttaacacatcatttttattttttccttctaaaaagtatttttcaagaacctgtggctagattttgagtataataaatcgtgtcccctacttttttccttcctgaacttgtgaaagtttttgatcttttatgttgcctttgcctttattttcttacttaatttcacacacaaggaacttttgttgtttagtcgcaagtcatgtccaactttatgcaaccccatgggctgtaacccaccaggttcctctgtccatgagatttcctaggcaagagtactggaatgagttgccatttctttctccagaggatcttcctgacccggaaatcaaacctgcatctcctgcattgactggtgggttctttaccactacaccagggaaccccacaagcaacttttccctctatctaaatgataaagtttgatcaagaggaaacttgatttgtatttattttgtttgtggtatcagtaattcagcagatgtttactgatcatgaactgcatgccatagattatgccaagccctagaaataaatatgcatgagtgaacaaacagaagtggtccttgccatagaacttgtattactattgttgttattattgtattaaatcacattattatagctaacaatgcaccacaactctgtgaggtaggtactattattggtgaggtacagagaaattgttatttattcatgtgatttatcccaataagtactgaaatcagatttaaatcaggaattttgttctcttaacccactcccactatatttctcacaaataaaataattatagttgtgacaaagggccacaaaggaggagtgaaagctaaaatgagtagctgtaacaagaaatttgatttagtcagagaggtaatgaaggcctctctgaggaagacattaaatatgagacatctggatgacaggagttagcctgtagaagaaaatgtcccaaatgtaattgcacagcacatgccaagatcctgaggtagaaaatggttaggtggttagagaaactaaaagcaggctttaggctgtaaatgagataggtaagaaaggaatactgatggagcagcatgtactgcagaagaacgggtttatccccacagaggcacaatttgttgaacagtataactttgccatatttctaattatagttgcttcatatgtaatcagatatcttcatttaaaaatgcatattattgatagacaatgaatgatttgaaagtaggaatatcattagctatgagattccccaaatgtttcctattcaagatcaaagagacctggagatacaaagtattttaatctataaatcagttacttaa

SEQ ID NO: 30649 - DNA, 612 bp, Bovine  19866880340143
  misc_feature (1)..(1): n is a, c, g, or t
naggttttcctatgaaaaaggaaaagtttaatggtagcacataattgtactctctttcttacttggtgtttctgcttgtcatgctttcagcagtaaacaaaaatgatatcttatctatagtgtctcacatgtgctttgacttttcatctcacactgattgtttttatctagttagcacagactcagaaatatggacggctgctaacttcaaaagtcttaccaccttgagacacgccaacagagagtctgaaaattctaattctgcaaattataaaacatgggaatgttctcagacagacattttgcctcacttttgagaaacattggtcatattatgcatgccatgaaagacagtccctgcaaaaactgtcatggggttcaccaagtcacagtagaagacaaaacaacttatttccaactgcctccctcagcacaggcagttatgcacatggttttgcattagagaatctccttttgggctttagttaatttagtcctctagttaattaaatattctccctttatcaagtgaaaatgtatacctatgttttcagtgaatatcagagcagtgtccatagagagacagtcaatatcaacttgacctccttggat

SEQ ID NO: 30650 - DNA, 1162 bp, Bovine  19866880412557
  misc_feature (1)..(1): n is a, c, g, or t
nactgataactcatagatcctaattttgtaagaacaattgaaattttatttcctcttacagatcgtcatttgtctacatatcgataccaattctcgtcgctcttctgcttactcatgtttacagttatcattctacaatttatacacatgaagtcagcatttcatttcctggaagaatctagcgtacacataaacttgaatatttcactgtgaactctcacttctagatgagttatacatcagtgcattgagaccatgggcagacagatatccaaagcttcaggccatggtactaaatatgtggccaggctctttctattgatgtgattccttgtttttgatatagaaatggcagaaataagggtggaaaaggcattaccaagatgaaaaagacattattttatagattcttctacatagttaaaatggtcaatattaatcatatttgtacaataaaccatgatgtctaagaatcagtcattaggacttcctttgggaaaagctcaaagatatttattttaagaatgtagtttcccagtaaagactaattagaatatggaagaaaggacaatcacaatgctacaaaaagtagcattaagaaatacaaagatgtttgtgtcatcactcgtgatgattttaaaggttctactataggcctataaacattaattaagaatttagtaggtgaatatttatataataaagccactctcatttactaataaaatctacattccttatgttttcctcacacacacaaaattatacagctaaaataacaaagatatttaaaaatatataagcattagactaagaggctcacttactagtgataagttagttgcaaggctatgcattccagtgagctttagaaaagggacagaatatgttgtttttcgactgaattagtttgccttataaaacagatgtttaaaaggcatttattgaatcttaacagtggaacagaaaatactgcaaggtgaaaaacaatgttttcttaattaaagtgatgactaggtagttagaacaatgataaggaaactgacaccttaatctatcagtacctatcaaatagaactattactgttaaaaaatgaaaatttaactactgtccttgtgatgctggtctttgtacaaagatcataatatgattttattttaa

SEQ ID NO: 30651 - DNA, 756 bp, Bovine  19866880468524
  misc_feature (1)..(1): n is a, c, g, or t
naaaaagcacaacaaacataaggtcgggttctacattaaaagctgatactgttagacacctacttcatattaattactaaagagtcaacagatggtaatggctttctaccaacccaggacagatttaaactggtgacgtataattgcagttctccagatcacataactccttaagttaattactctattttgtcttctatcattctgccctacttgagataaacaaggacaggctcagataaaatggattaaatattattaccaaagaaatgggaaacaaatctaaagaagataaggaaaaataatgtactatgaatgctagtgactcatttttatctttcctatttgacctgccactcttaaactctattttcaacatcaacaccctcactactattacttcattttatgaacagcacttaaaaatcatttgttgttaataatgaaaactactatttttaattatgtgaatgtcatttcaacttaattccaatggaaactggtccttttggcagtctgactgccaaaagttacacctatgggaaatacttgtgtccaacctaatccatttacttcatttgattctgatatcatcttaatgacatacatggatgacataatttgtgaattctgtatttttctatcctattcttccttctgccctcctaattggggttttcagctcaatcctttgccttctacttatttttctccatattcacttccctgtggagcttatttgtactcaaaattttc

SEQ ID NO: 30652 - DNA, 1824 bp, Bovine  19866880542377
  misc_feature (1)..(1): n is a, c, g, or t
ntgagaaacataaaatcactgccaagtgtgagactcaggcaggtgcatttttagggcaggcaaaagggaagagagatgggaacgacagtaagaatggtagtggtcatcatgggtaggaaaaaagaaatcttgctggacagatctttttatttttttattttttaaagggtgtttataaaggctgattctaaaaaacaaacaaacaaacaaacacgtaggtagctggatttggaccagggactgtagtgtaccaatccctgttctagactgtaagttaattccagatggtaaaacaatagattcctgccttctgttctgtttatctaaaataaatactccatactatttttaaaaaaggcagattctaaaccatttagattagtgcctccataaattggaagctttaaaaatatacagattgatagatcctatccaagaatttaaaataatgaaataaaatagatacccaccaaggacctactgtatagcacaggaaactctgctcaatattctgaaataattaaatgggaaaagaatttcaaaaagaatagatacatgtatatgtataactgaatctctttcctgtatacctgaaatgcaatactgcaagtcaactataccccaaatatagaataaaaatcttaaaaaaaaattcagaatctctaggaaggaggctcagccacaggtgactctatgtacagtcagacttttaaactactggtctgaacacttacatgtttttccttaagtgccagcaatgtaccactattgtaacaacccagtactgtcagcaaattattttattccttctttctccaaccaaagacgctttgctgctgctgctgctaaactgcttcagttgtgtccgactctgtgtgaccccatagacggtggcccaccaggctcccccgtccctgggattctccaggcaagaacactggagtgggttgccatttccctctccaatgcatgaaaaggaaaagtgaaagtgaagtcgctcagtcatgtccgactctttgcgaccccatggtctgcagcctaccaggctcctccatccatgggatttcccaggcaagagtactggagtggggtgccgttgccttctccaatagaccctttagtaaagattaaaatttaccctgttggtcatggcagaggactacccctcctttcccctccattttccaccatcttctgtagatgggaatcagatgtatatttaactcgcaacattagccagaaagaataattttgtagtgaaagagaatttctctattaaccccaaactgtatgaaatgctatgtttttagagttgtctctgggacagtcattcgcaacctggtgtatgggcaggatttctcagtgtcagcactgctgacatctgagctggacaattcttcgtggcagcaggctggtctatgtattgcagtatatttagtagcatctctggtctctaacaaatagatgccaggtatgacagaaaaatgtttccagacattgtcaaatgtcccctgggagcataggcaaaattgccccagttaagattcactggtgcataagtttgtaagaattcagcccatagcagaattacaatattcacactgaaccttccatttaccacactgagtatcattcattttgacatttatacaatgacaaatatttcagatttggcttatgtctaagagtttaattatatataatataccctaatgccaagtagaattttctattgaagtcagtttctgtggaagagtcataactagtttcctgtatagctttgggcaaaagagaaaagtaaggtctgacacacattctgcaata

SEQ ID NO: 30653 - DNA, 1925 bp, Bovine  19866880546764
  misc_feature (1)..(1): n is a, c, g, or t
nctcagcagtggccacaggactggaaaaggtcagttttcattccaatcccaaagaaaggcaatggcaaagaatgctcaactactgcacaattgcactcaatctcacatgctagtaaagtaatgctcaaaattctccaagccaggcttcaatagtacatgaactatgaaattccagatgttcaagctggatttagaaaaggcagaggaaccagagatcaaattgccaacatctgctggatcattgaaaaatcaagagagttccagtaaagtatctacttctgctttattgactatgccaaagactttgactatgtggatcacaacacactgtggaaaattctgaaagagatgggaataccagaccacctgacctgcctcttgagaaacctatatgtagatcaggaagcaacagttagaactgggcatggaacaacagactggttccaaataggaaaaggagtacgtcaaggctgtatattgtcaccctgcttatttaacttacatgcagagtacctcatgagaaatgcttggctggatgaagcccaaactggaatcaagattgctgggagaaatatcaataacctcagatatgcagatgacacacccttatggcagaaagcgaagaagaactggagaacctcttgatgaaagtgaaagaggagagtgaaaaagttggcttaaaactcaatattcagaagactaagatcatggcatctgttcccatcacttcatggcaaatagatggggaaaccacggaaacagtgagaggctttattttggggggcttcaaaatcactgcagatgctgactgaagccatgagattaaaagatgcttgctccttgggaaaaaagggaaagagggaggagaaggtgacggcagaggatgagatggttggatggcatcactgactcaatggacatgagtttcagtaaactctgggagttggtgatggacagggaggcctggcatgcttcaggtccatgggatcacaaacagttggacacaaatgagcgactgaaatgaactgatgataatatatagctatggtatatggtgacaggcatttattttcagaattatattatgcaatttatagctctcttttgggaggaagtctatcaaagttgtgttgctaataactatgttggtactacttgcaacttaattttcaataattagcagtaatttttcagaagagttcagaaaatatcctcattgttcagtgttctgggggagtagaccaatttcttgaataagcttctaattagtacttatcttcttgggagatgcgtaggtttctagagcaagtttgccaacaagaatctctgttaaataagtaattttaaaattagagggactgttacgatctatcatttgaaaagctccatagattctaccagatgaagaaagttcatattcagagcttgaaacagcctctgttatgaattttaaaaaactaccatattctaattttaactgcattcatagagcaactgtctagtaggctgcccaagccatttaacagtaagtgtgtgttgcggtgatgtacgaacctgaagctcacagtgcctggaatcagaaagacgagtgggtgaccacagggagctgccattgacaagctgaatacatacttctttaattacctgagggttcagattctctatatgaagatagggttaatctcaacagttattatttaaagataataacatttactcttcagatacttatagtctctctacctaaatagatttcaaggttttggaatagtagaaatagttaattaaaaagaaattaattccccacaaggcatctgtcataatggcttgaacatatgagtgaatcaaaacaattttcagttcacaatttgcttctattctgaatattgccatcaagtttccaaaacaggactgaaaaggagttt

SEQ ID NO: 30654 - DNA, 819 bp, Bovine  19866880587703
  misc_feature (1)..(1): n is a, c, g, or t
ncgccctggagatacctctgaaagcccgttctgcttctactcgcctccgctggtggcaaccatctgaaaatgggcacttctacagtccctgggttatcgaccaggtcggtcccttcaagattaactattataattttgtcatttgcactgaatgtggctttagaaagcagttaggccaaccccttgctcagtagaggaggtccaggacccacaaattgggtgacttacccaagggcatgttactagattagatatggcatttagcttcctttcattctctggttcctcaaatgtctgagcctataaaaatgaatgacacaacagaaggcccaggtcctgctcatagaggattctgccatatggttagagggactttattaaccgcgattcaaggctataattctctgaaaaggaaaatgtgcaaattagcatttgtgccacatacagtagttcccatatcctctttcctaacctttgaagaaaaaaaataagtaaatctccctaacatccttatgaacagttctaaaggatcttcatacataataaaatgcatatccaatagaactcaaagaacttgttaaaaaaacagtagaatccctgcaaagaattggaactgaaatgccttaggatacaactgttcttaaatagaaattttacttggaaaaatcacatataaccaaattttgcattcccagcttgggtgcatgtagtttccaaaggcacagtttggcccatgaaggctgtgaatggttttgtcagtctttcaatttgtttctgtagcttcttgccagatgggcaagcagaccacataaacaggag

SEQ ID NO: 30655 - DNA, 1019 bp, Bovine  19866880588700
  misc_feature (1)..(1): n is a, c, g, or t
nttcttctaatggcacactttaaaaaaaaatagtatttcacttccctttggaagttcggccagttgtgcttagtggaagttgccttgataacttcagtttgtcggtactcttttgtgatcttaggtcacatctctgtagataccatcttatctcttctgtccaagaaagaggtatctgatacttcattgttctttttattgacaaggttaaaaattggtggggtgcaggtacgggggcagaaatcgttggctaaccagtcttcattgacttaagcgtcactgtccacttagtgctctaaactgttctgtcctctgacgtcttgtggatgtaatttcttacacacctaattagtaaagtttgatcacctaattagtaaagcttcatgaaagaggtgaaggtgatcagttttctctcttatcttagaacagtgttctgccttctactctagagaatggatattgagatcagaggaggtaaaattgtggccatatgaaaaaggagcagggaatcagggtcagtcaagaggagaaagtattgtacttggagaaagatgactgaatgagacctacctcatgttgaaaaatactggttgagcctgagtaaggtaaaatgggggcttcccaggtgatgcagtggtaaagaatccacctgcgaatgcaggagacgcaggttcaacccctgggtcgggaaaaatcccttgaagcaggaaatgacaacccactcattttattgcctggaaaattccatggacagagacacctcgtggactatagtccggggggtgcacgaagagtcagatatgactgagcacaaagcacacacaactatgataaataaactcaaaaatttcccattattgcttgtatttaggaaagtcacaggaagtatcatcattttgttagttgaaggaatttatgagattatttaagacctattactggatttctttaaaggctggcatgattttagaataagcatatgttaatgcatatgaataatcattgcaatatacataaat

SEQ ID NO: 30656 - DNA, 1738 bp, Bovine  19866880614998
  misc_feature (1)..(1): n is a, c, g, or t
nttaaagatgtggcttcccccaatacccttccctggtgacttgttttcctggagtataacaactgattagcatatttatttctgttgttaatgccaagcttgtttgccaccactggctttgcctgattggtggcatttagtgcggtgcttggcagttctctccggagctcttagacgtcagctgtaaatcacctgctcagcatccctgactgcgcacaccatacctcccaccaggtgccctgggcacaggcatccacacactttccatatgtggacagaattttgctcagcatggagggtggggtgaaaacactgcaaattagaaggtgaattcgtagctctctgggcaggcccttatgtgtgtaaattgttccttgtaattggaaatgtgtttgtaaatccctatacacccaagtgagactgttatgcccctgtacattgtttggaaaggaaaaaacaatctgctaaaagaggccaaatatatttatgaaaactgggaagtatgtgtgggctttttgcaaccacattatttcatgaaattcaatttcgatctttcatagagtactttatatttcttaaaaaaaaatcctgaaatctatattcagtgatagcttgctgctgctgctgctaagtcacttcagtcatgcttagttagtggtatttcaatctttagaaagagatcttgatgtcacctcttgtgacatctttatagggaatcattattgtaatctaagctgaaagtctgcctggctttcaggttgggtggggtggtgatgttttagggggtggtagtgaagttgcattgtattggcaaataaacttaagatagcttttactaataacttttgctaagtacaaatgatttttcctatttgatgttctttaatgaaaagtttaattgtcaaactttatcactgaatttatcactgtaactgtttatatgttcttttagagtttcttagtcagagattttcaatattaaaaaaaaaacacatgtatgaaaatgggggttacctctctgtaaaggtgcatgttgatttcaaaagtcatgtggactcttgcagtttccagttgagaacctagaacttttttctacacatgtttgtcaacatacttattttatgacataaattctttctcaccttcctgctgtccacacatctgactaatgtcctgcattgttttatgtggtgttacattctcttatactttgtattctaggcaaatttgaatcgtaaaatcactttttagaaaatgagttatttctttatgaaatgaaagtgaaagtcactcagttgtgtccaactctttgcgaccccctggactatacagtccatggaattttccaggctagaatactggagtgggtagcctttcccttcttcaggggatctttccaacccagggatcaaacccaggtctctcacattgcaggtggattctttaccagctgagccatcattgcctctcaacctaactctgagtcacagaaacatttttctctgagtaagagcagtgcagctcctcatgatcttcttcatttatttgagttatgttatgaagtcctaatccctggtatcccagaagatgaccttatttggaagtaagatcactgcacatataattaattaagatgagatcatactggagtaggatgggctcttaactcaaaatgactcatattttgagtcattaactcaaaaatgactctggactcacagagacacagggagaatgc

SEQ ID NO: 30657 - DNA, 3100 bp, Bovine  19866880642647
  misc_feature (1)..(1): n is a, c, g, or t
nacataaccgaatcttttttgttatctgttacaatataactttttatgaactattataaatttgatagtcagtatatgttgatgggcatgaaaatgccatttgaatcaagagatgttagtatttcagagattttgtactgatgttctttctgcaaagaatattcttgcccagccagcatggctgactccctaatctcctttagatatttatgatgatgtcactgactcagtgaagtcctccttagacatctaaaattgcaacctccaatacacttatacgtgaaactcctcccaatctgctttaattttctcattaagaaatatataaaatccaaactatactataatataaaaacagtataagttataagacatatcttgtttgctaaacagtctcatttaacatattgcatttttcatttacatatcttgttcatgaacataaccaaatctttgagtccagcagtggtatttacagagctctatagttttagcaatatcttggatggtactgcaattttcctgaaaaggagtgttacttctctacagtttaaattgttttccccaaggaaatgtggttctttgtgaactgcatttgaaggaatgactgcctagagggaagaactctctacaataaagcaatttatatttattctttgatggctaattctaaaaaaacattccttacattatttattataaatacatgggtatctattatttataatagaatggggcaaagttgcaatacgcaaaaaaatttaataatcaataaaatgccttaaggcaactttgttccttagaggtagaagggcaaaataatatttaatttatattttagtgtatatccttctactttttgtatcaaaaagagaattctttttgtaagcaaaactaatttaaagaagtttttttttacctggaaagcttgtgatcctccctattagctgctttggaatgccttgagaatataattatattttaatcagctcacactttaatagttttaagaatgatacaaaagtataactgattcattttgttgtacacctgtaactaacacaatattgtaaatcagcaataccccaataaaaattaaaataaaaaatgatatggagtaaaacttaaaaattctcaccaaaaaaaacccagaagtgaaatgatagatatgctaattaattagattttatgtttatatatatcaaatcaacatgatgtacacttcagatatcttacaactttatatgtcaactgtatctcaataaagctgaaattaaaaatagtgttttcataagctaaaaaaaaatgatgaatactcttcaaagggcaatctggcagtacttatcaaaatgaaaattacatatatacatatatatgtatatgtatatatctgattttctaattgtcttttttcttcttttaggaatttctccttcagaaatactttaagtatacaaaaaatctatcacaatattctttgactatcaacagaggtccagatagataaattggtacagtgacattctgaaataatgatatatattcactgactaaaagagacattcataatatattgttaaatttttaaaaatcaagtttagtaaggaaaatttgaccctagagagtatttttgtatggtcatagaaaaatttctgaatggatatataccagaaaacatgtctacattttaacagtagggattcacattggaagacttttaatttttactttacacatttcctttcttttgcaaaaggaaaatcactttcagaaaaaggaagaaaaacattcaatttatatgtgttagaattcagaatgaaaagttaaattatttcatcatagattgatgaaaatactaagaatatgaacatagggaaacagaggtcttatattttaaataccttttcccccctactacaaatattgggtacaaaagcctctaaaaggtagtggaacatttcacatgatctatgaagatctgtttttattatattttccagaatatattaaaccacctaaagttgatgactttaggcttgaactaagatatagaatagagcctggctataagagcctacatttaccagattcataacatttttttatctactagaaattctctgagactgaataagttcattacatccataaggtctctatttgggatgaattctttgatatttaataaggaatgtgccatatgtaaagattcttccacattcatttatattcatgaggcttatctctagcataagtcctgtgaggtctagcaaggtgtatactttgactaaaggcttctccaccttcattgcatttataggtttttcctccagcatgacagcttaggtgaaggtaaaggatgagttctctttgaaggctttcctgtatgaactgcatttaaaaattcctttcttcaattggttctgctatatttcactcaaattcaattttgtcttaggtttttattacatgcattatttttatttacactcttgttggaataacattaataaagagtattggcttcagaatggtagaaaacactcagcttcctcaccaataaaacagaaatatgacctagactgaggatgtttagagaaaaagatatatcgcctggcatattacagtttcaaataatgtttgtttccttttctccccacccccaccacctcgtaaaatatagtgctatttttgttttaaaataagtcaaagtggcaattcaagtgaacttttaaattacaatgagtattttttcatattagaattagcagagcagcaatcttgcacaaagttgcagtacaacatgcaaaatgtaattgcttaatcaatcaatttaagcaaggccatacttagctgaaagaaaactgtactttctatcagtgggtcttttgtacagtccaagatttgggctacaaacctatctgggaatttaaatttattacttatgtgatctaaatggtcaagtggttttgctttaataataacgaatgtgcctgttaaaaaaaaaaaaaaaaaggagacccacttaatacaatgttaactcagactgtcaatctgtccttgattcacttatcctgaattataagcttaaataaaatcc

SEQ ID NO: 30658 - DNA, 1320 bp, Bovine  19866880649245
  misc_feature (1)..(1): n is a, c, g, or t
ngaataagcgtccccggcagccggatgccccacgggtcccggctaaggcccgatccgcaggtggaggtgtgtggggcggacgcccgcggcccagccgggcgcccgttaactcagggtcgccgcacagggtcctgcgggtaaggcccggtctagcctgattccaggtggcacccagacaagtagacggaagctcacccgcccagcagcgcctccgattaggagcctctcggtgaaaccgcaaagccgccgccgcgccgcagaaaatagcaccgctcgggccaccgccgccgccgccatcgtctcagtttgggactgtaggaagggtgtgcttccggggtcatgacctgatgtcccagaggagagggcggaccccacctagcgaccatgatgggaatgacagtcctgtaagcggtcttggaatctttcaggacgtggtgctgactgaagaacacgaattagggagtctgtagaagcccctgtatcagcggttacttttatctcctacgacgtgcaagtgcacaaatgtagaaaaaggtaacttggggcaacatattatcccagtggtgggtaaaattgattggaaaaggagggatttgatccgtaatatgaggaacatgattcctcactgtccttagaggaagtctctagtgcatgggacgggcgtggtaaggggagagaagcaagtatcagtgttgacacctattcacatttcagcaccttacagtctggctcatcccatgccacagaaattgttgtgaagccactaactgctgaaagatggacatacaatccttgacatggatttctttcttcattgtatctgtttaaaatttttgtttatttattttcctgcatggggtcttagttgcagtacacggggttcttccttgcaaagcgcagacttctctagtggtggtggggctccagagcacgggggctctttagtttgggcgcctgtagttgactatgaactattgtagctcagtaattgctcgcggtgggtgtagttgcactgtggcatgtgagatcttagttcccgtgaccagggatcaaacccatatcccctgtgttggaagaggactctttctgttaagatttgtttgtttgtttggctgtgctgggtcttccttgctgtggcagtggggctttctctacttgcagagagaagggtgctattgttccattatatactgttctgttatcttgcacgggcttctcattggagtggcttctcttgggctcagtagttgtggcacacaaggcttagttgctctgaggtatgtgggatcttccctggaccagggatagaactgtgtccag

SEQ ID NO: 30659 - DNA, 2745 bp, Bovine  19866880683089
  misc_feature (1)..(1): n is a, c, g, or t
ntctgttctgcttttcaatctctctcttcttatcatgacattctgctttttttccccttcatttaaataagaaaactctttccaagaataaaaattataccagcaggaataaaatgcctctacaaaaaggatgaatgcatatcattaggtttacattttcttttttaccacctggaatacatttcaaacacttgggaaaacatttagaagaaagtatccgttgcttcacttctagaaggaactgagttatcaaaagcaagaactatattcttaatttctcctcttttcactgaatcagatatttcataagctctatttatgcaggtgcagttgtcattatctccttctttaaatggctcaccagctctttgggtactgttttaaaaccgctgctttacatgctgctttcgtctgtctctgtccaaaaactgcataatgattctggtacttccagtctttgggtttaagtgttttcaggaagagaaactactctaattgcagttcctcatctcctgtttcctctgacccctcttccttgtcctctggttgaaaggtcagagtgtggtgatggcagtgctcaggacccaccctgcacacacagcagttcgcgtcctaggggcgggcattgagcatcctttcttgctctgcctcccagtctcagcctcccaccttaactctgcagaacccaggatccagcacatgaagaaagcaaaccacttccagttggagacttcctggtatggtcatttctttcagactttcaaaataacagattgctttgattttctacagactcctccagagactggaaaagatgggagtactttctttctctccttcagtcatattcattctgaaaatttagtgccagaaacactgacaaggatactgtgagaaaaaaaaatttacaggctatctttctcatgagtatagttgcaaaaggtcctacagaaaagtgtagcaaagtgaatttaagaatgtctttaaaaagataattacaccataagttgagtttaccctagggatatcagaatagtttcattctagataacctaaaaatgtcatctaagctatactccaatactttggccacctgatgtaaagagctgactcatttgaaaagaccctgatgctgggaaagattcaaggtgggaggagaaggggacgacagaggatgagatggttggatggtatcactgactcgatggacatgaatttgagcaagctcccggagttggtgatggacagggaggcctggggtgctgcagtccttggggtagcaaagagttggacatgactgagcaactgaactgaactgaactgaaccgaagccactctctcagtccgcccaacttctccctcccacactgtgtccacaagtctgttctgtctgtgcttccattgctgccctgcaaatagcttcatcggtaccatctttctagattccatacacatgtgttaatatacaatatccatctttctctttctaacttacttcactctgtacgataggctctaggttcatccccctctttaggactgactcaaatacacaaggagctcaatccagtgctctatgacaacctagaagggtgggatcggttgggagatggaaaggaggttcacgagggaggggacatatgtatacctgtgaccgattgatgttgatgtatggcagaaaccagcacaatattgtaaagcaaatatcttgcaataaaaaaattttttaaaaatgtcatctgttaacagattaaggagaaaaattttataacctcctcgatgaataagtgcataaaaacttttttcaaaacccattcataacttttaataatatctcctagtaaccaaaattaggagtaaaacttcctggaatctaatcaatgatgcactaaagcatcaaaccaaatggggaaatgttagaaggattttcttccaaaagaagatcagaataagatgccaactatcataaggtctacttaaggatgtatgacagtcccagccaatgaaaaaggcaagaaaatgaaatctaacaggggatggaataagaggagtggtcagagcatacgtaagagtacacaagaggtgtttgatacaggcagccatggagaagctgaggattaaatggtgccctatcaggagcactaaacataaagggaagtggataattttaatgaagttctttttatttgctcatgctactctgtacaatactttttcaaagctagcatactttatcaatgaaaaaagtaaacaaattgagccagatgtttaaaagctttaagaaaataaaaatacttgtacaaacctgaattttctttagtaccactggtgtttcctgatcccatacgtgattagttcccccatcagtaatatatgctttacatgctgtcaccatttggttggttacctaaaataaatataagtccaaaataactatatatagagaaagaaaaaaaacaagtttttaaaaacatgctgctgctgctgctgctgctgctaagtcgcttcagtcgtgtctgactctgtgcgaccccatagacagcagtccaccaggctcccccgtccctgggattctccaggcaagaacactggagtgggttgccatttccttctccagtgcatgaaagtgaagagtgaaagtgaagttgttcagttgtgcccgactcttagcgaccccatgggctgcagcccaccaggctcctccatccatgggattttccaggcaagagtactggagtggggtgc

SEQ ID NO: 30660 - DNA, 807 bp, Bovine  19866880754294
  misc_feature (1)..(1): n is a, c, g, or t
nattagttttgcccaaatatcaaaatgaatccgccacaggtatacatgtgttcccccatcctgaaccctcctccttatgtcttttctgtaaatgtgttttggtttttttcttctatatttggactaacaatatctatattattagctatttatgaacagaatgtgaaactgccttgtattgccactcaattcccatgcgtctggtatgatattccacatatgctcataggggacccagtataacatgcatgaattaatactaatgaattccaatgcttacaaataagattatgaaaatctgtattgatggttacattaaacaactgaatcttcaaatgtaaaaataaggttggattaataggttacatgaaataatatttcacaagagctaaaataaaattgtaatttatctgtgtttacaacagctttgctctctcccaagtgattatatagatccaatcctaggttttttccttcaaaatatgggggactctagcagattatatagcagcttgagtagaaagtgtatttctgtaggcattcaaaagaactcaatgtcaaattcttctcgggcataaatcttgatattttgactttggactagataaagctgtcaaagagggaatgtatatagccctgagaactgaaaagaaggttgtttaaatctatgttcaatcatcttagcataaacagcatcagtccaaaacaccattcttcaggaaattaaaaaaggagtcagacccacctagagccagtggcaaggaattttactgtggccccggttagttctctctttatcattccctt

SEQ ID NO: 30661 - DNA, 898 bp, Bovine  19866880869048
  misc_feature (1)..(1): n is a, c, g, or t
ntcttctcactgccccatgcccctaaatggaaactccatgtgcgcataagaaataggattcttctttgtaaacaattcacagacctcaaattttcttttaattaaataccgcagcacacaccaatctcagtcatagcccttgagtgaaaaacatcccaagacttggacttggcaccacaactgccccagtgtttgatgctcccagaggctctgctgttcccccacaaccagtgcccactggggtgtgccaggctgatcgggttatattgaattgcagggtaaatataacggagcacagtcttcctagagtagcatttattttccccaaaggtttgcaaatgacacaccactgtaggaaaaatggatatgggcttattatggaatagaacaggaaatgcacataaatttttgaggaattttgggggtttacttccagaatctgaggggtacaagttcactcacttctgccaattggatgcttcgggggaaagttttagaagcccttttcttggaaatagcccctatctccagagactagaggctggacacacccatgggcaataacagcctcctgaatcccttctgctttcagtgcaacacagttccgctggatccagaagggcgaagaaacagagaagcagagctgggcaatcgatcacgtgtacatcggagaggcttgccccaagctctgcagtgggcacggatactgcaccaccggtgccgtctgcatctgcgatgaaagtttccaaggtcagaatcctgttttgttgttcttgacccaggagactatagggttctcctcatctcaacatgtgtgcaaaggccactagggaatggatagaaactctggcctgagggatttgagatagatgatgcactctttgatcatgacttattt

SEQ ID NO: 30662 - DNA, 1863 bp, Bovine  19866880899262
  misc_feature (1)..(1): n is a, c, g, or t
nctatacttcctgcaacacgtgaatctctctgccaggtgtctccattctcaacgctgaccaggccagccctagatagaacagatggcccagctggcagcatatgcattttcatcattttgtagtttctcacaggtgcgatgagaaggtgggataactcagtgttttctaatgttttcataaccttggctgctgtctttcccatgggtcaattttgtcttggacatatttctaaattttaatatttgacaactgaagacattggtaggagaaataagaacgctttcctaaaaattgatcctccacacaggtaatcatacagctggctccttcccagacatcattaatctcctttcccttgagccattttttccccacttacatattactgcaatgtttatcaaaatatcataaaaactgcttgtaagcactttccacaagctgaagtttaatatgatagtgtatttaaataagacattcattcttttctaaagtaaaaaaactacaaaaatatgtttcttcccaacagtatcccacttgtttttcatctgtgttacttccagactacaaacagatggctgatttaagcagtcagttttaacatccatcgtcacaagcataaaggtggcatagcacatctaggtagaaaggcttacagatcctaagtgcaatttataagtaactttatttagaacctgtaaaatgatttaaaacacagatttagaattttatacctgcaaatacttcacatctttttaaagctgttttatctgttttatttttagctgacttgtaatgtagatcatgaatcattaccattcagttcagttcagtacagtagctcagtcgtgtccgactctttgcaacccatgaaccgtagaacgcctggcctccctgtccgtcaccaactcccggaatccacccaaacccatgtctattgagtcagtgttgccatccaaccatctcatcctctgtcatcccttctcctcctgcccctcaatctttcccagcatcagggtcttttcaaatcattaccattacaaagctacaatttcaactgcaaaaaaattaaggcatcaataattataagcttcgtatacacaatatccatttcattaattttttctccttcaaaggaagaatccttgcattaccatcacaattatcactaccgttgtcgtcagcagcagcatcttacatagtggtgaagagcacaatggttaagagtatgagctctgggaagtgggacctaggttcaaatccctgttccttcccttcctagccgtgtgacccagaacaagttgcttaatttctctgagcttttatgtctccatccaggacttaataagccctcaataaatatactttgtttgttgtctgccagttacttctcatagtacaccaaggcctctcctatcttaaacaaacaattctttccatctccatctccctctagctactgttctctttctcatttccttacttcctgttaaatgctcaatatgtcataatttggcctctgcttctactacaagtggtcttactgaggtcattggccacaagttctcattgctaaatctaatggacacttctcattcctcacctccttggactgcttgggagcatttgatcttgttgatcatgttgttcttctaaaaactctctcctcctttaatttctgtgacaaccctctctcttagttttacttcctatctctgtctgctccttctgatttcctataaacctctcctccttagtagaccctaagtaactgacatcatcaacaccctctgctttggattctttctggtacaacaaatatgaccctctctgatctatccctgcttacttctgcagcttcagtt

SEQ ID NO: 30663 - DNA, 3082 bp, Bovine  19866880910564
  misc_feature (1)..(1): n is a, c, g, or t
nctcaggccacctaccacgctgcttccagcctctgtgcctgtgcccagaattacattcactctgacaaggaatgctgtttcttttccctcactctccttccatttcccctacatcctaatcatctttcaaaagccaggttttgttctttgctttcctgagtccttgctcacctctaatctcccatgaagtgggtctctactcactgttatgtataatatcctatctctcccctctatataatcatcggtttcctcttctagactgtaaatccctcgagacaataccctgaattcccaggacccagctcagtccttgtctcactgatgaacacacacagtctttgtactggtgcatcatggttattgatagtgtatgtcattcttcctctctgtacttcacattatagaagactaagattactctgacatttttatttaattatttttctggagacctcttcctttattgtcttctagcctgtcatagaaagataacttcttccttcacatagccaaagagaaaaagatcaggtagatctgagagaggtctcataatatgaatccctattgcaaaaatctagttttaccactgattttactgttactcttcttgaatttgcccagttgtcaatgggatgaattgcaatgaattgggatgtgttatcgtaaagtgcagcagtgaccaaacctgccctctcaccacaatgttctgggcaaggttttaaaggattagtgtctggcctcactctgagcctcctgaattagggtcccataggtgaggtctggacagtgagtatttacttcacaggggtgtgggcatggatccctgtacctgagtacagcaaactgctttgaagctttcagtgcaacacaataggtcatgttaaagtatagcagaagaaataaaacatttctaaaatattagacatccttatttttattctcaaaagtcctttggctccccccaacagaaattcctcatttacacctattactatgaaggtcatttatcatttcctcatttctcttcctcctagaacctcaaaattctttctacctccttaagcatggacagaggagcctggcgggctacagtccatgggatcgcaaagagtcagacacaactgagcatgtatgcaggttcaggttcattaagcagggtaattatgtgcatgttttaaatgttcccaggaagattcaaaacatcttttgaatctggctttcaattctccctaaacttggaatctcctgaggtgctttttaaaaacttcaatgattgggctctataccagaccaattagcacagagcctcccagcagagcctctgggaggtggggcccagacatcttttttagcgcatcctaagatgaatcttggagaaggtgatggcatccaactccagtactcttgcctggaaaatcccatggacggaggagcctggtaggctgcagtccatggggtcgctaagagttggacatgactgagcgactttattttcacttttcactttcatgcattggacaaggaaatggcaacccactccagtgttcctgcctggagaatcccagagacgggggagcctggtgggctgccgtctgtggggttacacagagtcggacacgactgaatcgacttagcagcagcagcagcagcagcaagatgaatctaatgagcaggtaaagttaagaaccactggtttataacctaagacagacatgtatatgaaaaagacatcagaaaatcacaaataaatatttgaaaacaaagccaattaggaagctcttaggaaattaataatgaatcagtgacatgattaaagacagatgagattttttttaagtaaattttataaaatgacatgtttgctgtaattcaacataacattatacatatatatatatacacacacacacaccatgatataatatacttgctgaaaaatacatgaagtaagttatgaagaggaatgtgaaatataaggagatgatttagcagtaaaaaatgtatctttgcatttgccattttcgttctgggcactggttctcagccctggctgcacattggaatcatctgactctactgccagcaattctgatttacctggtctaggaggcaggcaaggattgagatttaaaagctccccaggtgattcttaatgcatagtcaaggttcaaaaccactgacttaggagatggcaatatatacactcacacctacctatcaaaccaaacaaaaagaaggaagctgaatagggtataaataaattgtgtgcaatgcattactattactactctttgcttatgtgtatctttgaaatacttaataaaaacttacaaaggagagaattatcaagcttgggtttctacagaaaagtcttatttctattcttatattctcacaacaaaagggaattgtgtataggtgggcagtgcaaatgctaacattttatgaaaatgctaaagaaaactgaaatcttagttattacaaacattccattcaagttttaaaataagagcaaatattaaaagaatttagaccccaaaacattagatgaactaggaaagccttagctatgtactctctgcagagttgccaaataaattataggatgtctagttaaatgtgaatgtcagataagtaacaaatggttagtataagtatgttccaaatattgcatccttatattaaaattttattatttatcccaatttagttacaattgagtatcttatattgtcctttgctaaatctggtaacaaatggcaacccactccagtgttcttgcctggagaatctcagggacaggggggcctggtgggctgccatctatggggtcgcacagagtcggacacgactgaagtgacttagcagcaggtcaggaagagacacagaaaagaggggattctcaaactcttttgaggtttcaggatcctggctacaatttttgtcctccttgagatatctatttggaagttcaaagatgtctcaactgagaaaggaaaaggactgctgggaagagtaaagaagaggatgttataataaagattgtcctttgggggaacttgtatgctcatcacaagaa

SEQ ID NO: 30664 - DNA, 1413 bp, Bovine  19866880919103
  misc_feature (1)..(1): n is a, c, g, or t
ntttgcctgcaatccgggtgacctgggttcgatcgccaggtcaggaagataccctggagatgaaaatggcaatccactccaatattcctgcctggagaattccatagacggaggagcctggcgggctacagtctatggagtcgcaaagagtcagacacaactaagcaactaacacatttgtctttccattgaagtgtaagctcactgctctgcctaacacagtgtgtgacacatgaattcttacaaaggccatataggtctttcattccaaaaatatctttagcagcatttcagaggttttgataagtagcagttccactgtcatttggttctaattatttcataattttctcttatccatgggctgcttagaagtgtttttagtttccaaatgtatgggggttttaagccatctttagttatcgattgctaattatattgcaccatgtgaaactgcatttttttagaagttgtggtcagctgtacatgaccattttcaacatgatcagttattaccattgttacctacatgcttgtaaataatttgtattttctctgagttgggtggaagggtctatgtacattatattagattaaactggttaggtgtgttagtcaaatcctttatagacgtccaattttcgcatgcttgagcaagcagtttttgagagagagatattatcccagaatgactttaaattgacttccttggtggctcagatggtaaagaatctgcttgtaatgcaggagaacataagagacacaggttcaatcctgggttgggaagatcctctggacgaggatatgccaacccactctggtactgttgcctggaaaattccatgggcagaggagcctagtgggctactgtctatgggaatgcagaatcagacatgagtaagcaactttcactttcactttcccaaagagaacctaatctgatcttatgaagaagctgtctctggagctaattaggctaaagttgtagtcaccaaataaatacctgacaaaaaatttcttgtgaggtagatagtatcacatattaatgaagtgaaactttaaggtttaattccccttgtaatgctcttctcagaaaagccttagaatgactaaatcttctccattctactgaaattcttagaaataagcaaagtgaaccttgagatacaggagaggaggaggaaaaatacagaagggaaacaagtgccagtcagccgggaagttgcttacttacatacaccactgaaaagatcccactgtaccgctttgttttaactccaaacaggtattttaacatggaggtgaagacatgcacggctgcagcagtggtaaacccacggaccaggggctccgtgagatatatggccacaaatccaaatctacagacacctaggcaaaactttttttttttat

SEQ ID NO: 30665 - DNA, 1284 bp, Bovine  19866880951175
  misc_feature (1)..(1): n is a, c, g, or t
nccacgtcagtcagtgctagaagtggaatgctgggttggattagccaagggatcctgagaatgtgcttgaactacagtatgtgagatcatccccatttttaattttagggatagctctgtcctgacgggatctgtcacttcttttttttggttttaatttttatacggtagttgatttacaatgtagttgtgttagttttgggtatgtagctaagtgatacatatttatataaatccattcacagagtattacttaagagttccctgtggcatgcataggtccttgttattttatatatagtggtgtgtatacgttaatcccaaagtctgtgagtctgtttctcttttgtaaataggttcacttgtatctttgttttttaatattctacatttatataagtgatatatttgcttttctctgacttagtatgattattattttagaagtgggtgcaaattctaaggattaactcttttaacattatgactttctctgaggatgatgcattgggctggtgaggtaactataattcttagtttcattgaattttcactttttattgagatattgctgaataaaactgagaaactcagcctttttgggcagtcactatttctacatgtcatttttctttctggtagtctgcacatgtatacctacagttcttctggacaatttcttttcctttcagaatttatctagcaagctggcccagcttacctgtcatggcaacctctgccatagcttccagtctttcaacacttcctacacagatacaggattgtggggaatctatatggtttgtgaaccagccactgttgcagatatgctacatgttgttcaaaaagaatggtgagaaaataatttaaatcttgcttaagaattaccaattcagactattttcttttacactgttgacggtgattaattttttatggtgatagcattttattaagagaacaagactaagtactgttctacagtagcaactgttgcaatgttttaaagatcacatttcttctgggtttcatgtgaagctgatttatattatagaaacttctttttttttttaatattttgctttatgaatattcacagagatatttaatatccaaagagatctttttttttttcttttcatgtagacataagttgtcaaacatcttaaaacctataacttgattatcatcccttatgggaagtccctgtagcaagtttttactaccatactggctcaacatattgtaattcatacactatcaagatctctgaaaaatcattgt

SEQ ID NO: 30666 - DNA, 1912 bp, Bovine  19866881029376
  misc_feature (1)..(1): n is a, c, g, or t
ntcacagttaatcttcctaaggcacaacaaagtgtgattgctcaaaacttggatagcctaagactttcttctaaaggccagctttttggagtgggtttgagggcactttcaaatcttgcagtttatcaactcctttcttgtctcccattacctctgcctcctgatgatcacaaattggcagcatatcccacaattccctaaacattccctgacttttctctttctccatgcttttcccttagcttggaatgcgtattctctcaaattcagttgttaaattcttactcattcttcaagctgccattcattcttaagtaaaaatcttttataaagctttctgagatatcagcaacataattgatgtgtattgtcacattttgcttataactctgttattcgtgtgtactaagtcacttcagtcatgtctgactctttgcgactctatggaccataacgagccaggctcctctgtccatgtgattctcttggcaagaatactggagtgggttgccatgccctttcccaggggatctttctgacccaggtattgaacttacgtctcttacgtctcctgcattagcaggtgggttctttactattaatgccacctgggaagcccaactctgttataatgctgactatattttactatttacttatatttgatttaaattcttgctttttctattagattagattggaaaaggacaaattcttatttcttcatgattcctcctcagttggttcaaggacttatatacacaggaatcacagaaaatatcctttgaattctgcatcctaggagactggggaaggggttattctaggaccttccacatgttctcaagtcccttatattaaacagcatggtagagtggaccctctatatctatggtttgtgtatccagggaaaaatccagggatattgagtgccaacattgtatcttttgtacaatgttgtctatttctttagtttaatagtaacctctgactcttttttggcacagtttgtcttactcatgttggcacttattaggataatttaaattcttgctattcataagctcttcatttaaaacaagaattactttaaaaaaaaacacacaaagtaaatctgtgccagctgtacagaactgcatatttacaaatagatacagtttttaatttaatctgttttaaaatgatatttaatggcttgtggcatcactgttcctgggatatcaaattgtattctcttagaaataatgtattgtgtgtcagctccaaacaatattttattagcatttggtaaaaaaaaaaaaaaaatacaatttggtaataggtaatttttactgattacaaagaagtttacataccctcacttatatttcctaataaaattttgatgatgcactttgcacctttcaactttcttagtaaatgtttaagtctatgcttattgtaagcaatgactatgttgaatgttacataacatagctgccacctgtgtgggcaagatgtttttattgatctcttttcctaattagtttgtgagagagtgtagggaaactgaagattaaacatgaactactgaacaattcatttgaaattttctgagctaaagtcttacaatttcttacctttgtttcttactgtagtatttattacatgttgagtagagctatatgtaaggatcagtatctgtaattagtatgtggccagcaatacttgaagaagatttctagtgttcaatattaatttaaacattacacacacacagaaaaaacccacaaaatcctatggcatttgaaacataaatatactttgattctgtattttctgactaacccccaaaattaaagcttttactttttaagatagggaaaattacttttagtaaattaaacttcaaccctacttacagcttttgtaa

SEQ ID NO: 30667 - DNA, 2036 bp, Bovine  19866881050178
  misc_feature (1)..(1): n is a, c, g, or t
nacgcaacattcaaaaaacttagatcatggcatccggtcccttcacttcatggcaaatagatgggaaaaagtggaaatggtagcagattttatttttcttgggctttagaatcactgcagatggtgactgcagccaggaaattaaaagacacttgctccttgatagaaaagctatgacaaatctagacagtgtaataaaaaagcagacatcactttgctgacaaaagtctatctagtcaaaactatggtttttccagtagttgtgtatgaatgtgagagttggatcataaagaaggctgagcgccaaagaactgatgctttcaaattgtagtgctggagagaagactcttgagagtcccttggactgcaaggagatcaaaccagtcaatcctaaaggaaatcaaccctaaatattcattggaaggactgatgctgaaactgaagttccagtactttggctacctaatggaaagagccaactcattggaaaagatgctcatgctgggaaagattgaaggcagaaggaaaagagggtgacaggatgagatggttgaatggtatcactgacttaaaggacatgagtttgagcaaactccaggagatagtgaaggacagggaagcctggtgtgctagtatggggttgcaaacagttggacacaacttagtgactgaacaacaacagcagggataaaataattacttaaaaacaaaataacatgcataaacacagagtgaaagaaatatgcaaaattgaaaattgcctttgagctggcaaatactgataacatattttctaatattaatgtttgaattgaagtactattataaaattatttgaacaaaaatttctctaaaaaatatttgttggatggatgagcaaatgcatgaatatacgaatgaaaaacataccttaatgcataaaggtaccagaagactgtgttagaaaattaagagtttcttctatgttatttaaacttccatgcatgcactcgtgacatctgggtttatgttgcaacattttaaatttaaagtcacaagtctacataaaacttttgctgttaaattaaaaaaaaatagtttgaggaaataaaaatatttaaaccacatattttctggaattcgtagatcatcttttaaaaattgaagcagttcattttgagaaattgtcatatttaccactgagaaatattgaacaaaattatttccatctccatttagcacctcacaatactgagatcaggttttgtttatccacattggcaagtcctaagctggaaacaaaaatgtgttagtcaaatctcttccatttgtctccactactggtatttatagaagggattatgaataatatgaacataccagttatctgggctgacatatatttcaaagagcaatgccctaaaatattgtgcgaaagataaacagtagaaatgcttttaattaaaaatgtacactgtagttgcaaggagttggtcccttaatcaacccctggttttaacgtaagcaaatatattgaaaatatggctgtaaagctaagctacataagcctttcttctaaatctgcctgcaggcattaatgctcagatttgagatggcatccttatttgctaagtgcaaagatggttacaaaagggcttttctcactttgaggataaaagctaaagtattctttaattttggttactgcctggctcctctcagcaccataatagttatttggctcaaaaccaaaaagtagcaatgcagtgcttacatgtctatggatcaaaattagatgaaaaattgctgtttctcatctccaaagctatttgctgcacattttataaccctcaagatgccttttgtaatatatgataacagagccaactgcagcatctgcctggaaagagattactttaattatggactcaatgtcctattttctgcaagtgatccccagagacaggcttcctgccggaggagaggtgcaaggatgcacattaaagcttacatgtcaaccatgaagaggtggataaagtgagacaaggacacccata

SEQ ID NO: 30668 - DNA, 1479 bp, Bovine  19866881071403
  misc_feature (1)..(1): n is a, c, g, or t
ncttgaaatgtaatatagttaaaatgctactatatctaggacccttgtattcaaatactatataatagcatcagattaacactctttgctgatgagacctcatttagagttccttgattacagattacaaagcagtaagaaaagggaaagattagtctgtattatatgtatgcatatatactacagcccaggaaaatccagtgctagccagctacaaaatgaaaaaaaaaaaaaagacttcttttccttcaaaatacatcccttacctgtctgaaatagtgcatgaggttttcatctttaagatccaccacttttggttaggttgctgttccaactgttcccattaaattgtatactagttgcctgggaagaataaatctggaaatgaatttgtttgaaacattctttagcaaccaagtcgcagaggcaggagtctgagtagaggaggcaggacagacaaatgtgtggcactggggaatctgtacaaaggttggaagggctaggtggggccagatggtgtccccttgggcagctagaggacttgttctgaggacctggggagagagagcagctgagggcgagggttcctcatgaggtggaaactggtggggggtgaagaggttagtgaaactcacttgaactcagtgttttctgatgcacctaagaaggcaaaatggctaatttttatctattttctactggtcctgtagaggcaacaaggcaaaccatttgaataactagcctcattgtcaccagcttattcctcacagaaatgctgttagctcattcaagcgctttatggcagaatcattcactggatagactcataatttggggcactaaaaaaagttctattggattttaatacgtgaaatgtgtttccctctgatgaaagaagttttagggttgattttttttttaattgtgttatgtctgccaagggaaattcacaatgaattaattctgctcaatgaatttttgctcttataaaaaattgttttaataccaaacattgcctgttccaaatattgtaccagaggcatttatttacaacctggtacatatgtagtttgagcttcttagcataacttacagtgaattaatgacttgttatttactgctcaggcactctttgggagtgatttatagggctgtgctgtgcactggcggttacttttcagtgtctgtgctggctgtctcatcaatatcattaaatgaattcacagtgacacagctctgctactgtagtttttgatatgagggataactgaacataaatcaggacttatgtttaattcataagatgtaccaatctctcatgtaggcgtgagttaggttagaggatgtcacagatgtatttcacagtacctcttgtgattaaacccaagcttttctgtatggctgtatgcaccaggtaaaaataataggttgctatacactatgccatttttcaggtaaatgcaattattttatttaggt

SEQ ID NO: 30669 - DNA, 1385 bp, Bovine  19866881073586
  misc_feature (1)..(1): n is a, c, g, or t
ntagctcctgaatcattttagaattcaaaggccctaggtagttttgcctcaggatctcttcacctaatttgaaattcaaatgtatgaaacttccaaagctaaatatgacaaattagacacagtctgtgaagttaccatttaatgagctatgaacctagactttcatctccccaggaataatttctttattacttttttgtattttattgcaataaagcaccatttgaccttcaagtatgataattaagcttccaaaaatgttataaatttagagtgaaaatagttctctgtgtattcaggaatatacttatgatcagtataaaagattacttaatatttaaagatagttaaattatacacagaatcagcaatattagaaagcatttttctcttcccttcctctcctatttcccatctcaatttgatttgtgtctcataacaatttatcatcactcatattctaaaatacatgaaagaggagcaaaactaaaaaatatttttgtaacctacaaatggggaacagagaactctttcagtaagacttcttctaggagctgtcaataatgggatcttatacactaaaacctgtgactcattgtcttgctttaccttttctgggggtagatactcatgtactttctcatatacttggcttatgatatgaaaaaaagttttaagtgaaaaatcagagtgtagaacaatgtaacatctgaatcgctggtgaactgctttttttttaaatactactactatgtactaatttttaaaaaatcttatatcttgtacacccatggctgattcatgtcgatgtatgacaaaaaccactacaatattgtaaagtaattagcctccaattaaaataaataaaattttaaaaatcttagatttttgagaactttaagagatgaagttcatagatgggacaggaagtgcaactataaagtgacctttagcctggtcatatatgacctttaaataatgttcagagcgggcagaaaaatcattaaaatcaccatcatccaataataataataataacaacaacaatactaatatcactaataagaagaacaggaacaagaagaaaccttcttgctactgttagtagaaatttgttagaggtctcttgatatctattcttcccttatgtatttccactggactgcagcccccagttaaaggtgtatttgatagtgtcccctgcagcttctgggacaaaggtattaaattctgcttgtcggaaggtgaacagaagtgatgtggggcactttcagagccgcgtcatgcccttcaaaggagtgggcatgcttcttgaccctctacccattaggctgggaggacatggtcccaagatatggaagctatgtgctgtacacagagagcca

SEQ ID NO: 30670 - DNA, 924 bp, Bovine  19866881075125
  misc_feature (1)..(1): n is a, c, g, or t
ntttctgcatttaataataaagtttttttttaaaacaaaaccatttttagcatatgtatagcatgaatgtagaatatttgagtttttactgtactttgacctccctctcttaatcctttcagtttttagtagttgcttaaaatggaaaatttactttcatataatggttctttttacaacactgtccttgaaatatgtttttttttttactggaaaaaatggtgaattccaccaaaagttatttcttggtgggcaaaaccaaggtatagacataaattctagattttcatattcagataatgcttaattgatcttttggggcagctgaagattttggacatgttgatttctctgacttgacaatttctgctaataaaataatgattttggtcaactttggtcatcatattttaccaaaattgaattcacttgctcttgacagatccaatagtaattcaaggatttcctctcatacagaatggaactattctaattaaagtaatatcctttcagtcacaattcccatccctgtcatttggaactgagaagccccaggatgcttcccgcctgggctgccacaaagcattatccgatacagtaaccatttttcccttccctgcctttagctatagtctgtgagcttcaacaaagcatgagctgctatctctgtgcaggcacaagccaggcaagctgagcctgtattttgtgagagcctgaagcagcactgcctggcaggcagtgtaggcagcgttcgacataggggcaacagtgcaagaatgcctcagaggagctggggagactggtgatcagccaagaacagcatccacgtactctgtggatacctgcggtccatgaaggtaataagtaacaaaaacaacttgtttcaaaggctatcaggtgagaagctaactcactgctagagga

SEQ ID NO: 30671 - DNA, 965 bp, Bovine  19866881171272
  misc_feature (1)..(1): n is a, c, g, or t
ngtgtgtgtgtgtgtgtgcgcgcctgtgatacgtgatgatcagtagatagaaacagtacttttcccacatggttcttttcccacaatacaaaattattttggaactgtaacttcttttttgcctaaaattcaactttttattttgaagtaaaagaaataatatatagagatcttatgtaccttttatctatcttgtccaacagtaatattgttcataaatgtaatacaatatcacacccaggaaattaacttttgatatcaagtctaaaaattctttacctagccctacatcccaaagattttatgttatgtttttctaaaagttttatagttttacgtttaagtctatgattcaattttagttgatttttatataaggtgtgtgatttaggctgaggttcactgagggaagtggggagggtatctagaaatatccaactgctccagcaccatttgtgggaaagggtatcctttgaccattaaataactttctcatatttgccaaaaattagttggctagatgtgtgtgggtctatttctggcttgagataatcacaaaagattgagatgaaaatgacaaagcttcaagaacttggagagatgctaataaacatggaagacagataaagtaattcatcataaagagaactgttatccccaataaagaactcactgagtggaatgccagaatatgtaaacaaagagaattttcctaaaatgaagaaagatgtgaatctgcagattgaaaaaatatattgtgttccctgaaattttgatgaaaatcactgaacacaaaaattactcaaaaaaagaaaaaaattactcaatattatgatatatccatagttaagttattagacttcaagggtaaactatttttttcttagattttcaaacagacaaagtgagccatacttagggtagttaaatctggttagccctctgtttctccaaagcaatactga

SEQ ID NO: 30672 - DNA, 1519 bp, Bovine  19866881229391
  misc_feature (1)..(1): n is a, c, g, or t
ntcaagattacatatctgagatataatacagttgcatgtctttctatgtctcaatatatctgtgttcaaataatcctataagataaagacctttgtgaaagataactattttttattcataaaataaagtctcttataatgaatgaaatcaatcatttccttatagttgttcaaataagctttctctctgtactccctcccccaaatgtaacaccatactgcctggaggagccgcttccccttactttaaactgcatcatatatcctggctgtataatgagttctctggaggagagtgcattgtgagtcttgtccttctttttatttggccagtagaggtggaaggatggattgccacagaatcctgctgtcctcactgcattaggataaaaactccagttttcttcatgggaggtgccttctgttaagataaattggaagtaatatggcatgttattctcttaaattaattggtttattgttgaactacttgaatgtctatgctctagctctttgcttaccctttaagattgatttttattttctttaattggtataatatatatatagcaatcaaatctagaaaagattattaaatgctagtaaacaattacccaacttttaaaatataattgctagtctgggtaacttttaccattgcaagatttttcctggaatactttcaaaccaataaaacatgtatctctgcatacagaaattcttaaagaaactgaaattatttggggctgctgaaatttcaaattatatttagagcaagacattttgtctttaatgggatttattaaattctttgttgacatttcaacaagcagtcaaccttgaagatgtataaactattaggcaaaataatagctaacattcgttgatcagtaaatatacagtaggcactcatctaaatgcttttcatgtagtaattcatgtaaagacataagcagacaaaagatacacagggaagattgctcaatgtcttgtttcttaccatcatcaaaagtgtcaaccagctgactgggattgatttccgctccgccaatcaaaatgttgtctagtgcccactgagcacgctctaccccggagaccacaagtccattgctgatcacaaaaggctgccaccagcggagtcgagttgtgttggtaagagcctcctcgggaagaagtatgtagtcatgtctgactgaaatgtatttctgataatccatctcatggagcaaagtccaagtaattcctataaaacaaatataccaacatagtaacatactggaaaaaacacaacaaaccaccaatatattgaagttactgcaagttctccaaagagatcttcagccatataatgagaagtgatttcactgactttaatgtaagtattcacacactgtttcaaaatgagagtgatgatataaagggaagggtatttagaaagtacttgggcaaaaataaaaatactgaggtaaaaattaaattttctgcttctaaagttttgtttcttgattcctatatccat

SEQ ID NO: 30673 - DNA, 2879 bp, Bovine  19866881289775
  misc_feature (1)..(1): n is a, c, g, or t
nttttactataattttaaaaaatagagatgcagagaatgaaatcgtataaatgatatatagagacatgtaagtgaccctcacatgcctatcaatctttagattcctttctcagaaataatcactcttaattccttgtgactcacctttctttttaatgcattgctatataagtcactatttgcatagtaaattggggcatttatttggaatatttttattccaggaatttctttcacctgaaaaataaaatgtcagtgaatttaatatatggaaatatttcagaatcaaaacttcaactgcctcccttttccaacttgaaaattaatacagatgttgccaaggaccctttgacagagtttaaataaaatgtcagtctagctgacctactcatgttctgaaggaaggcatgttgaatggaaggcctttaaaaatgcacatcttcccatttcttttaaaagtctttgtttcatttttttttaaaccataaaatacaaagaagaaacttaaagcgaatctaggagaggggagctgccactcaaactgtgagaagcagtcacataaaatgaacagaagtgtatattggtttattcacagaatgtaggtaggagtcaaaacagactcaggtgaaaattatatcaagaagcctcgtgaaattctggaatgcagatggaaacaggtaatcaagcacataattctttggaaggggaaaatacaccaatcctactagcagtctaatttattaatatcttacagtgagtctgagaaattcttcccaaacacaaaacaaacagataaaactagtttaagaagactttgtaaaagattctacataagagattccacatcagaaaagaaaattcaaagtcaaggatattttaagccatggttttaaccactaaaaatgaagcagaaaaaaaaaagaattccacagctccaccacctacattgtacacggttaatgttagaattttatcacccctttgaattcatcagaaggaaatcacgcacatacagaccaccctggcaaacagtcttggtattttgtaaacatatactttaagtccaagaatatatatttatcctcattaaaaaagaggaaaaataaatattaagagactgtgtaactgatgtatagtataaactataaaactgaatccagacagcaaatggaagttcagacttttcactctgaccaccacactttccacatctccacccctaactctctatcctgagtaaaaataataattagccaatcacaacatatgcttacaaccatttaaagtgatagaaaaaaggacctacctcctcatacgcatctatatcaatgtacacatcagtgtcaggaagctgcccaaggactttgtagcttggactgcagacagagaaggagtattatcatgctgacgttcaggtagtgatggaaacacaagattctgcacatttgcaaatccggtatggatttgctagtgacttcagggatacttggttcttttctctttttgtttatttggtccttttatggtcccttttcagaagggctccacttaaatttgcattcccagtaccatcccaaacctaacacatcccacaccccccacctacatacacctcacacatatacaatttacatacacagcacatatgcctcacaccacatacacacacacataacaccacacacatgctggtatataccatccacatattatacacacaatctgttccagacaaatgacttaaggatttaaatatgggaggtaaaatgagctgtgcagagttcaaaccacgtctaggacatgatttcatgtcactcggtacacagaattatcttcctgctctaattctgaagcaggagaggggattttcattttatttgaaataagagaactgacttgtggagcaagaggttggaggatcaacataaggtgtggggagaaaacaaaaaattcaaatcagcataggagtttccttaagtttagtgtgaatagattttttaaaaatttatatttaattgaaggacaattgctttacaatattatggttggtttctgctgtgtatcaacatatatcagccataggtatacatatctctcctccctcttgaccctccctcccacctccctcctcatcccacccctctaggttgtcacatagccctggtttgagttccctagtcatactgcaaattcccactggctggctgtttcacatatggtagcgtatatgtttccatgctgctctctcgatctgtcccaccgtctcctccccgcctctgtgtgtccacaagtctgttctttatgtatgcgtcttaactgctgtcctgcaaataggctcatcagtaccacttttgtagattccacgtatatgcgttaatacttgtttttctctttctgcttactccactctgtataataggctctaggttcatccacttctttagaactgactcaaatatgttcctttttatggccgagttatattccattgtatatatgtaccacagctttgtaccacagcttctttatccattcatctgtttacggacatctaggttgcttccatgtcctagctattgtaaatagctggggtacttgtctttttcaattatggttttctcagggtatatgcccagaaatgggattgttgagtcatatgggagttttattcctagttttttaagggatcaccatactgtattccatagttgctgtatcaatttacattcccaccaatagtgaaagaaggttctttttctccaccccctctccagcatttattatttgtagattttttgatgatggccattctgacaagtgtgaggtagtatctcattgtagttttgatttgcgtttctgtaataatgagtgatgttgag

SEQ ID NO: 30674 - DNA, 1602 bp, Bovine  19866881310832
  misc_feature (1)..(1): n is a, c, g, or t
ngaggcacctcttaatattatgctccctggggtctaatggccctgatgattctttcggtatctgtagccttacaatttatttttgacgatatccttttagttggagtgagtatactgggcatttgggcaatgccagcttgcagagagctggtggcagatggaatgaaatctgcctggtgtgccttcccctccacatgagcagagagccatccatttcctccattaaggagttgtcactcagcccacccagctggaagaccatttttgatagccaagctggctggtggcagacaattcagatacaaagtgcactttaaaaggaagctaaaacatcatctgtaggaaaattgaaaatgcatggcttccaccacagccaattttttaatgactgtaatattttaagtgattatttttgccacttcagattgctccttagagaggagaggttttttaattaaaatctaggcaatgcaaacagatgagatatgaggagcagaggaaagagaaataagatgaataaaattaattaaaatggcattgttggcagagacataaattagccactgtctggttggaaacaaaatatactggtataaaagtttctggattaaagggagatgtgtgactgagtgaccagaaatggactgacctatagcattacatatcattgtgttttctaagcctgtcaccatgctatagccattatcatatagaaatatatattttctacatcctggttcaatggtctttaaaggtatagactttcatgtttataaagaaaaaaacaaaataggaagagagtgatttctttcatgaggcaaaatgaaagaaattcattttgcacacattaaatttctaggtaatttaataccagttaaaaaactgataacttggctataaacacagtccaggtgcaggagggctgaagtgcatttgagtcaacacaatagattcaaccacagtgagcaaattttagggagttctaagagtctttttttttttttctcattattttctggattcattaagcatttgaaccactttgtactatgattcataaagattcaatttatggtatattttatgacaagtgtgtaattatttggcaatagttacgacaattctaaaacagccatagtgacagatttgaatcggagtaatgagagaaagaataacaatgaaaaattccacagagcagttgttaaccttgtctgtagagatcaatatgactttcacagtgtctgaggttttcagtcctgcctcctcaaattaaggcccagaacaccagacacaacatggtgggctgcaagatactgaggaacaaaagggctgggactttattatacaatgtagctggctttgaaaatcaaagctgtttgatcttggagaggtcacttagctctaggacactctttattttcatctgtgaaatgggggcaattgtgaggattaaatgagatagtgcaagtaacatgcttattctaaagattgctaaaccttaggaaatcagtaaatgctaattcccttccttctttcatcccctatcttcattcatttaacaaatcttaccttaatgagtaccattatgcaaataattgagct

SEQ ID NO: 30675 - DNA, 734 bp, Bovine  19866881329598
  misc_feature (1)..(1): n is a, c, g, or t
ntactagttattagagataaaacagaatacaaacccaggtttactgtactggtcatagaagatttccattagtaggttccaggtaatgcctccattgacagaatattctaaaagaacaccttggttacggttgtttggtgtgatcaggcatccatacatgaagtaaaactggataaactcagcattcgtgaggtttagatccacggtgaccaatagccgactgcagccctaagaagcagaatgcaccgatacggtgataaggaatcgtcatgacaggttccaggtgttctttggcttccatcctttcttttgtaatacagctcacacagtactgcagtaatgattttcttataatttctcctactatactagcttctatatggtctctagcgcacagtaggtacacagcaaacatatgctgaattttgaaattttagtattagaacttacaaagggcaatgtattctaaggagattctcttgtttttttctaagcaataggagagctgtaattaaagtaactattttatttctagttacttataggtatctgttagatttttaaaaaggcattggctattaacaaaatagtgcattgagatgactattttcatatggaattttaaaatgatgttcaaaaatacaacttaattataattagcaatactagttgtaagctttttaaacttttacaggttgattttaatattttctatattaattcattaacataga

SEQ ID NO: 30676 - DNA, 858 bp, Bovine  19866881345186
  misc_feature (1)..(1): n is a, c, g, or t
ncttctattattctaaatttttaaacacaaacacagagggaaccacacagtctcatgatttttgttaaccagaggatttgtgtaaactgagatacaagattttgtccacaaacaaaacgtgctcatttgttgtccttgtattagaggatcaatatagggagtttatcccagatttaagaaaaaacaccctgaaactacgagtgacatcactctacagaaggcctgtaacaacatatgtgtgtctttagtcacatgccagatgaagagcagaacactgaaaagctgggaaggatcctttgaagttaattccaggaaaaattctataaaaagattacaaagcttataatattttctcccattttactctttaagctcagcttcctttttacttttgcttgtagcaacatctaagggtgattgtggtaaaaaaatacttctcttgttaagtttttgtttggcagtcttgcatttatcatttcgtaagttgacttttactttaaatgtataaaattacacttcgtataaaagcaatgtaaagagcacaggacgcctaatgcttaagagcttggctgccagggattaaagctgagctctagcaacatttagctgtgtgaccttgggacagttactgtgtgtctttgtgtctgtttcctcaagtgtaaacagggacaacgacagtactatgttatagggttatctgtgaattaaatgaggtgaaataaaaaacacctactgtagggcttggcatgaagtagggattcaaggtaatgttaattattatcactattattagtaaatgaatatacttaagggatgaaatatgtgttatcatgctttcccttcttaggcagctcaaaa

SEQ ID NO: 30677 - DNA, 1672 bp, Bovine  19866881404265
  misc_feature (1)..(1): n is a, c, g, or t
ntccttgatatctgcgtgctttgctcgtcctgttaataaatgtttatatctgctcagctagcctggttaccctcagcttgcaaaggcataaatcactggcttctgtcaactctggaattgacccacagattaaatgcagatcactagaagataggtgctgttccatgtattttttatttttaagaaatcttcccactctgattgctgtgcctgcacctgctaatctttttctatttattatcctagttcattgtatggatagcaaagaatgccagattactccttctgcacatttatgtcaacttgtgttgagaagtaaatcaacattaaatgtcacagattctgttgtgaaggtttgtcctttagaataggctgtgatcaaatgtatttaaaataatttttcttaaaaagtaatttattaaattttgcagatgtatgtcaaggattgggagtaactaagtatacagaatttagaagggccatatcttaatcttttatttctacttccagttagactgcttcctctctctcccatttactgttgataaatatccaataataatgtcaattttcctagtttaacaaacaccaaaggccctaatgaggagccattaggtgaattaggtaaatcaacaacccattaaggaaaagcattaagtcagaaaagagagtctattaattttcttatagctcttgtacattatgcatttgccaaattcattatcccagtggacactaggcagatctccagtcctgaataagaattggagctttcattctggggttctgctgtcacttgtctaatactattatcacaaattgttgaatcattaatggataataaaggttataacatccaaattatggaaaaaatataaactaatttgtctgaaaatgtaaagtcttaacacaagttgacgctagtgaaaaaagtcaaagtcaaatggttaaagggatgattacattcaaagcagaatttatttctaaatgtgtgttttgagagtatagtcccctggcagagcaatatctgcctgctataatgcctaacttttcttccataagttgggcaccccagaaaaagatttcaaaaatccatttaatgattttctttttttagactgtaaggacaaacaggaggaaatcagatatactttccagaaatatgctttgcaaatcgctgtactggaaactatctggtctgtgacttgagggatttgagtactggctttctaatgaggataaacctgagctcagtaagacttgtggctagaccatgttctcatgtctttttctattaagaatcggaatgttaactacgattttctggccagattccagcttggttaattgcatgctgtctctctaaattcgctttgcttgggatgttcttcattttggattgcattgctcttattgtcatgtttcccccaagaggtgggtacatgatattgtaaaatgagccagaatataatttgttaaactaataagagtactttggggatgaagggttaaatgtaagtagtgtgttttccacaatttccccccaatgaggcctatttgtacagtaattaatgtggaatagcattagtgaaacatggaattgagccaaatcaccatgacaagagtggtaataacacagaaacaaataatttcaataaattctactaaaaat

SEQ ID NO: 30678 - DNA, 1108 bp, Bovine  19866881541207
  misc_feature (1)..(1): n is a, c, g, or t
ngcaacgttggttggatccctgagttgggaagatcccctagtaggaaaacatggcaaccaactccagtattcttgcctggagaatcccatggatagagaaacctgacaggctggagaaaatagagtcgcacagagttggacatgactgaagtgacttagcacgcacgcagattgaagtacagagatgttagataacttacataacataactcagtgactgacacaacctggattcagaagacaatccagtttcaagcaagtgatttttgccactttactacattttcctctaaaatcatcacttaacctgttttatatgataaaatacctatggtattgatatgatgaaaactagagtttttaatgaaatattagacaagcactgatttaaacttctaaaatatggctgattaatatgtcaaacatgggcctgatcttgatatgcacgttataggttcattcattggatgctgattatatcccatccattgtcacaaggggaatcacatatagggagagaatgtgtgaattaaaggcaaaattgaacaccattagatttaactgcttggacagatgctagcataatattagaataaaagtggaacataaaagaagatcagatttgtgtctaaattaatgctgatttaaccttaaatgaacttgctgcaaacagcagactttatactgagaacagtataaagcaagcagtgttctatttaagatactgaagcaacaacaaagaattgaactcaagggcccaaagaagtacagaggtggaccatatttgagcatttgatattttaaaggaagattctcctagagggaccttaaaagtacactaaacaagaagacaaaaaaatcatttaaaaaattgaagacattagaactttctgaacactgaacatactcaaagtgatacagatgcagagatttgaaattctgcctagagtatatctctggtgcctttaatttttgatgagagctgttctagtctgtctggaggatacctcatgaaagatagtatggttgcccatttatttccattgatcagaagaaaacattggagatgtttgccttgttacttaaatgtttaaataagatcaggaac

SEQ ID NO: 30679 - DNA, 1438 bp, Bovine  19866881582733
  misc_feature (1)..(1): n is a, c, g, or t
naccagtcatttgtggcaaacatgtatacatttcaaaatttcccttgagagaagcaaggtcattgaaggccagaggccacatatttgaacatgttcaaaaaatttttacttaataagataacatgctccaaaggttctacattgaaaaagaaaaaacaaaaacaaaaacaaaaaaacaacttgttttaggactagggagttacgataaatagttggtcaatatcatcatttgaattttaatattgcaataagtgtttcttaaaaacatcactaaaatgagttcacactgaactcggacaatatattcctcaacagcagcagagagaaaacggtgtcattaaaagaggctttattctgattcattggctaagaaaatgggaacagtttgaaaccttccatgttgtttcattttaatgagtagagagcatttttcatgtccttattaaagtggttaatgtgtttctctagtctcattatcaccaccagagtatactctctgttgtttcataaccaggacaactccttttcgtttcagagaagattagaaagtcaaatctgattgctcacatgtggctgttaataaaactcctatggcgttgctcaaggtgcccatggggattgtacaattatttatattttcttatggctttctataattactgtgattgtactttcacaaagtaaatgtatctccaccaattaaagcagtggtgggttaagaatactcatcaggcttgtgtgaaagaatattgttcttagggttttgatcaaagcacagaaattaaactgctgttatcatgcattcaacccaagtgttaaattaaaatgctcagcaactttggagtttatttgagcagatgtgaactatttatgaaaaaataaacatgatacaggacttgcattcgtgatatgattctttgttgtattagaagtgctggaaagaaaaactgctaaacaaacttgggggatacagtttatgatataagatcaatttggatggtggttaatttaggtcaatttaaaatttcagaatcataaaattccaagaactctcattttgctttacatttttgtatcttatttgcttcacccctttattttctttgaagactctgggactaagaaagaacatgcacaaaaataagcacctgaagctatcaactagaaaatacagaatataaccttttatattttgtcatatagaaatttcattttatctagttggacagtgctcacagcaaaagtgatcagctgtacttccattccattagctgtcattttgatgctagaatttcagcctgctgtgtgagatgtaactgtccatgcacagttcccatcaaaggtaattttatgtgcaatggtgtgtaaaatttacctctaattatgataaggtcactgatgggtcatttatgatatactctctggagacaattgcagt

SEQ ID NO: 30680 - DNA, 2127 bp, Bovine  19866881713835
  misc_feature (1)..(1): n is a, c, g, or t
ntgataactgatgtgtgttttttttttttcccatataagtttgtatgtatatctgagttaatttctgggtcatttgacttgattgttctatctatgcactggtatcattccactttaattatgtaggttatacaatatattataatatcgtgtaggggatccctctatatttaaccaaaagtttaaactatttttgtcagtttatatttctagacataaagttcaaaaaaaactaccactaagactctggttgcaatagtataacatataaattaagagatatcttcatatcataatgttcagttttcctatccaaggatgctgtattattttccatttatttgttcacttccttcacaatttgaaagaagttttgaagctttattaaagttttctttacagagattctcagtattgttaaacttattccttatatttatgtattttccggcatggggtcttctgatagcttccaactcagaatctcttaaccattttagtgtcatagaagtctttgaaaatgtggtgagatagttaggacctaaagaaaaattcccttaaataaaaatggaatatatctggaatttaaaaaagctattgaatttttgtttgtctatatagtaacttcttactttactgaattctcagtaatttccagattgacaatgctattccttagaaaaaatatactttgaatagcttcaaactgtttaaaccagttggccccattatcaatttcctttctactgtatagggggaacctctccaggcttccatctcccacctaccatacctgactctcttcctggatattatgattctcgttagacccagttggctttcactggtttctgcctttcccctgtgtgccttagaagtaatgcttttggttggtctctctgcatatctaattgtgttatatcatggagagttatctctccttgaaatgactcaatgtttcaaacacagcaacatcacccttaaccttcctgaaaccattagaaggcaatcagaactggttacctgggtttgctgaagtctgagaagtacatttctgccagcaggtgccactggatgcccccgttgttgctgtacttggaggaggacaccctcctctctgctgtcaggcttgttgcaagcagaactctctccaccgatttggatgtagaactggacaaagtccacccaagaagtatccagatcccagctcaccaactgtcttttcccagcctttccaaagaacagagaaatcacagatccaattatctgggagcaatttgcggttttcagtttcaaatttgtatgagcatcctggctctatgtgaagttgatcatgttctcctttattgttgagaggagcaagttatgttatttaactgttcctggatacattctattaatatccaggacttgattatgagacccctgagaactgctaattacaccaaagagtattcaaaagtctttaataacaaagcaaaactcattttaattaaaacacttccagtattccctttgtaaatctcctccaggcagagtcatggagcagaaagatcatacacatactttgaaatcagttggagctgggtttgaatctcagcccatgattcatgctgttctctagctgcgtgacctttctgagcttttattttccttaaaagtacaatatgggtaataataccttccacatagggtgttgtgacaattaggtgaaataacatgctacataacttgcctatcacatggcatgctttcttgagggaataatctctgcatacatatgccttgaccctactcctacctgggcactgaagtgaaacaggtaagacagaaacttctgaacagagtgtactgaagtctcttgggctcccagtcagtcagcctgtgtgtctctcttggaaacagagaaggtaggagggatcactaaataagtttttgcaaccactaaatgatctctttgtgtcttaaaaatgttaaaaaacttcttcaaatccggtaacttgcttcctttgtttagtgtcacaggaagtgcccctgcctgtcacagttctgttgcaaaatgtattagacacaaattgacaagtttgtcatcatttatctgtaaatggtctcatgctgctgctgctg

SEQ ID NO: 30681 - DNA, 1594 bp, Bovine  19866881746860
  misc_feature (1)..(1): n is a, c, g, or t
natcccttttgagaaataaccctacctggaaaatatctgtaatattttaactttgtgtaacctgttgggatcaatagtaatttcaactttttactaaattgaattcataatcaattgtacattgtggtataacagagaatatagcatcctttctttctttaggtcattaactcataaaacacgtaacattttcaaattacttgacctttgatttttccaaatggcttttaggatgcgactgtgtacaagtgtcactgaaagtgaagttgcccgtgccaaaaatcttctgaaaacaaacatgttgctgcaacttgatggtaaaagaataaagacttaggtctttttttcacatggtttatctagattccagtccttagttttcttttttcattaaaacaggttccactcccatctgtgaagatataggtaggcaaatgttatgctataatcgaagaattcccatccctgagcttgaagcaagaattgatgtaagtagtccttagatactgttggatcttgtgtaaaacaatctttgttattaatacaacagctcaagataggtatcataaaatttgctttagctctaaaatattccaggtatacaatgtctttactaatacaaaaaacctcgaatgcttgtatcttcaatttttcaggctgtaaatgctgaggtaattcgagaagtgtgtaccaaatatatttatgataagagtccagctgttgctgctgttggtaagcctgactcctagtctcccatgcagaaagttggctaaggactttccttttatttagttataactgtcttttcttttaaatccttaggtcctattgagcaactaccagattttaaccagatttgcagtaacatgcgctggcttcatgattaaaaatgctcctaataaacatttggaacattataaaactgagaccctcaagttgtaaaggaaaaaaaaaaaatctatactggtaaatatgaataaaatactgtatgtcagactttgaaaagataagaccaccacagtgaatggtagattctcagagttcagagaaattatgctgggacacactttaagtataattttaagaatgaaaatttgtatagtattttcagttttattataaaaatgcacacgcaacaaagattgtcataagtcatttcttgcctctacttgcattcagcacttgctcttgtgcagctttctttgcttttaccatttcaaccagttcctaggaagaagacaaacattttacttagacaaaaagttgtcaagatttcagacatttctagtgtttgatataaatatgtaaaacattcaaattggataaatctgtactgaaaaggttgatttttttaaattaattgccagagctaggaaatgtctaatactggccccacaactatggtggtattgaagtaagtataacaccataatttaaatgataatggaatctataaactcaagatctacaaccttgtatcgtttcatgcagtccttctttgtcctgccaggcactgcttctgctattttttcccatctttcaggtgtatttactgggtatgttttcaaagcttgttccaaaagcttctgttctt

SEQ ID NO: 30682 - DNA, 731 bp, Bovine  19866881939280
  misc_feature (1)..(1): n is a, c, g, or t
ntggaaaggtctattacccttctttaattctgaactgacgcactctgagcagccagtgtctgcttttgcagaggagcagaatggaaggaacagtttggctggaccatagatactagggaaaggcccccttcctttgtcatgtggacccttaaattatacagccagtgttaaacaattcaaacaagctaaaatgttgaaaagacctcttacccccaaatctatgacttaaatatttgtgacttcatattttaaaactacacaaagcatttggcatattctttttaaaaatatgtggctatatttggggtcataggtaaaccacattttccattcttttcaggtcagctagaatctgatagattcttattaatgagtggtggaaagccatctcggaagtgtggaatcctttccagtggaaacaacctctttttcaacgaagatggcttacgcatgttgatgacacgagatctggatttatcacatgctaggtaatcatttttaaatgctgttgaagaactaccttgtaatgtaaagtagcagaatgtaatcaagtcaaaaagaagcagacatctcaaggacaaggcctcccattggaaatgctatgcttctggcttgtcaaagactccattaagacacagtttacacaattttcattctaaaactgagagagatcatgcaataactagatcagaaatgaaatggagctaaacagaaagaggctaatacctggt

SEQ ID NO: 30683 - DNA, 1621 bp, Bovine  19866880290503
  misc_feature (1)..(1): n is a, c, g, or t
nttgaaaagcagagacattactttgccaacaaaggtccgtctagtcaaggctatggtttttccagtagtcatgtatggatgtgagagttggactataaagaaagttgagcgccaaagaattgatgcttttgaactgtggtgttggagaagactcttgagagtcccttggactgcaaggagatccaaccagtccattctaaaagaaatcagttctgaatattcattggaaggagtgatgctgaagctgaaattcccagtactttcgccacctgatgcaaagaactaactcatttgaaaagatgatgctgggaaagattgaaggcaggaggagacagggacgacagaggatgagatggctggatggcatcaccgactcaatggacatgagtttgagtagactccgggaactggtgatggacagggaatcctgcagtccatggggtcgaagagtcgaacacaactgagcaactgaactgatgctgttatcagctttaccacacataactagttagttactagtgagtttctagtttgattccatagtggacaaaaaattgtaacctgagtaatttccttttttgttttttaacttgctgagactttctgattgattttggttcattcatgtgcatttgcagggactgtaaattctgattctgttggatatactgtcaattagactaaggttagtaactacattgtccaatctggtacatacttactcacttacttgcctgcctatgctttcagctactaaaaggtgtttttcagtctttcagtatgactgcagatttctctttctttgttgatttttgcttcatgtattttgaaaatacattattggatgcatactgattcaggaagctaacactatctttaggaactatgattctttatttctaacaatgctttatgccttaaagcctactttgtctgacaataatgaagccaagtgctttatcttatttttttagtgcttccttggtatatttcccccatcttttcattttaggctttctggtgttaatattttaagggcatcttccttgtaggcagcatataatgttgtttcaatcaagtcttatattcttaaggcttttacttaatatattttgtccttctatactacatgtgattactattatagctgtatttgaatctaccattttattattgttctctagtttgctcatctatttattgttcctttttactttttttgttttcctatagattaattaaatatttcttaattgtatcattttccagcatttataaactaaagcattaaaactttagatttatctattaaaaaatatttcaaatgattcagcacttacctttaaacaatgcagtgtatcattttttgtgaacatcttaaacttagtgagttctccaataaaacgaacagttttgttctttgtttcaatattgatctggtccttttttcgtacctacaaatgaaaagaaaagaaacactgcttaacagtctgaaatctgtgataagaactgttattttaataagattgaattcactcaagatattttcaataaatttgggtatagtttcttgctatattcaaattattctaagttaagacataattagctccgtggaaca

SEQ ID NO: 30684 - DNA, 950 bp, Bovine  19866880367686
  misc_feature (1)..(1): n is a, c, g, or t
nagcacgtacacatgtgcgtgttggacagatttaaaatcacggggcttaacttgacgccattcgattttatgggaacaagcattatgagagccagtggaaatatatttttcaggtgctggtaaaaggcagatccctcaccggggaactaactttctgaattttctgaagatctgagatgtgtgagatgcataaccccgttgccgggattaatgtattggagctgactttatgtttcctaaggaaactaaaagcgctgctcagtcctgtgtggcgtatattccacttttacttaagattctacacacatggtagggagagtaccagctttacaggggaaagaaaaaactttttaaatctaaatattgatttaaatcgagtcatggctctttggacaataccatttagtcgctgttgtttctgaggcaggaaacttgatgttctgggtggttgtaaaggagagagaacatggttccctggtgtacgtctcggggtggagtagaccacaggttatttagagtcagatcaggcgggaatctgaacctccctttttctctttattggttctgtgagcttgggcaagctaattcaccttctgaatcccagtttcccatctgtaaaacaagaacactcattcactttgcacagtgttgggaatttcaaagccaaacaggtaaaccatctgcccccagtaagtactgagtaaatacttgttcccttcattgttgtcaagtatcttgctgtcaaggctggagaggtgaaggaaagtatgaaaacatataatcatagagaaaaataatgaagcaataatgggcaacttcacttatttcacagaatatggtgagaaaaacgaaactgagttgggatccacttttcctaaggtccattgagaacctatgctccctgcttgattgcaggtgctagggatcaaaatcatacataggcttgccct

SEQ ID NO: 30685 - DNA, 2389 bp, Bovine  19866880426608
  misc_feature (1)..(1): n is a, c, g, or t
ncatgggatctgcttccggctcttttttttcttctatcgattctgactattgctgaaataatattaatctttttaaacttcaggcccaatcatgtcatttccctgcttcaaaccctttaatagagtgccagtgtgtactgagaaaagtccaaactcctcagcagagcgtgcccagtccgttctaatcttgtctcaatcaacactctccgtctccgtttcccattcttcactgccttctccagcccaactggattcgtcactcttctcccatggcttcgccctgctcacgctactcacgcagcctcagtgcattttcctcttgtgggtataagttgatgcccttttttcccccctcttttccagttttactgagatatgacatacagtactagataagtttaaggtgcagagtacagagaaatgacttcacttacatatatcatgaaatgttatatattcactattaagtcaatattcactgttaatcatacctactaccaatttaaaatatgaaaagtgaaagtcacccagtcgtgtctgactctttgaccccatggactgtagcctaccagctcctctgtccatggaattctccaggccagaacatactggagtgggtagtcattcccttctccagggtatcttcccaacccaaggagtgaacccaggtctcctgcattgcaggcggattatacctcatcctacttcatatataactgacaaacaatttatgtatttccaattaagtgtttttttaaaaaattatttttaattgaaggataattacaatattgtgttggtttctgctatacataaacatgaatcataggcatacatatgtccccttcctctcaagacccccatctccaacccgagatgcccttctttaatgaaccactttgtctcccctgaatgccctcagcattggaacaccaccttcaccctggcacacctttcatcttgtacaaagctttgttttttgcatcctgtctcctctactggactgcctcattccccaagagtacagataatgtctgggacatgtctctgtcccagggtctaacactctgcctcgcacgttaaggggtattcagtttctctgtccttgctgtgattgtatcagaaagacagactgtgttggcaggaaaatgttgaatcactggttctggaaattcttctgccataatgtttaataaatttgaatgaggcagaaggtggctgtgggaatcaccacctccagatcctcccgggaagttcagggacagcagaatagctttgcttcaggtagaaacagagaaactgagagtgaaattttaacttcaggtgcccggtgaagaacactctggccagtactctccagcatcgatgagcccctgattccgtaggcacatactgttgcgataggtcaattattcctgctgactgaatactgtggagtcaaatctcatcataaatgtgatatatctcattccaggccctgctgcagtgcactggcattttgataacaaaatgatggacaggtgcagcttgtcattacaggatgataaagccattgcccacatcaactgcaatgccatcagaaatacattgtgtaggagggggagctagtaatttccttcaccagggtgactttagggagccctctttccaacactcaattagatacatgtttttgctcctggccaaagacctgagagtttttaagtttaagatagcttggtatcacatattcaaaaaatgttaccatccatacaccactccaacatgtaggagacccatctctcatcatccacatactcttctgctgccattcattctgcttggtacctggtatctggtgagcactccggaggagataaacacagtctgggaatgtgaagcaatttctccaactcagcaaaaatcctgaaactcaaaatgtcaacttcacagaaaaaagataccatccccttgctttctatttttttccctgtgtattcttctctgagagactggaactgcacaattctctgtctctcatggtccaatctctctccaaactacctcccagcgacacactgacatgcaagccggccagtgtccctgagaaaatcaaacacacctaattctttttaaaaacccaatccgcgatgatcaatttctttctccgtggttcctcccctccatctcctcctgcccctttaagaaggaggaaagcacctttcccgggaatgtgcagaaacacatttttagataaaattttattttggtctcgccaggcaggaagctattacccctccgttgttatctttatgtgcatgattaggaataatagctgatttgtgaagttatctattacgggaaataatcaagattaatgagccccgtggcacttgctgaatgcctccgg

SEQ ID NO: 30686 - DNA, 2455 bp, Bovine  19866880445303
  misc_feature (1)..(1): n is a, c, g, or t
ntttaagataaaagatattatggagtacatgctgatggaataatcctctagagcagatggattttactttcattgttgctactaaggccaaaagctatgataatgtataaatagcagttcagatacattagtctcaggaaccaaaggaacagaatactttggtagagtgtaaaggaagatccttttttaaatgagataatcagagaagacatctctgagatcatgacttttagacaagacaggtacaaaggaaccatctaggtgaaaaattaggattaatgtaaaaactgtgtcagaggtcctgatcagggcagaaaagtacttgtttgaaaaacttcaaaaagggcgccagtagtaatagaacatagtctgtctgtgggagggtcacagcatgagacaggtaattgggagtggcacagtcctttaaagagctggttcagattgtgtgttagtcgctcagtcgtgtccgattctttgaaaccctatagactgtaacctgccaggttctctgttcacgagattatccaggctaaaatactggagtggcttgccattcccttcccttctccagaggatcttcctgacctagagatcaaaccctggtctactgagacaggactaaaagcagagagactaaccaggggtgtggttagaaggctgtggtggtaacctagctgagagatgatggtcatctgtctaggagagtggcaggacacatggacagaagtctggatttgaaaagctttttaggcagaatgaactggatttatttggtgcttgattaggtagcagtatatggggccaaggagtcaaggatgacaccccgtcttgtggcttggatcactggcttgtctctaagaaacaggagagtgcgagtaggagttacacttggtaagtttgaggagcctttgaaggcatcagtgtaaatgtctggagagcaaaagagaaacataaacagcggttgttagagtacttttaaagccatggcaataactggctcatccagatgtaaagtgcggagacagaagagaagcaggttcaggattgagccctaacaaaccccaacatttagaaaaggtggaaaagctgatgaagtcaaaggaatgggaaatttcggtgtggttctgtggtcatcacttattgagagtgcttaagaagtgagctggaaaggtgagaggatgtgatcagagaggagggaagtttgaattcacatttttgcagttgtgtttatgtataggagaaaacttcatccactgttaggccctgattttaaatcattatcagatacccaaaatgaacagttgtacagacttttttcttttgctaaaaatcataggaagacacagtattgtaaagacatcatttctccataaatcatgtccttaaatttcatgcagtcctcattctgtcccatcagggaaatttgggggatagggtgagggttggaggaagagaaaaacagggacatggatgtagaatgaacctaataaaattgttcttaaattcttaaagaataaccgaacagttaagaaacttgtagaaaataaagtgtgacacacaagataataaaacattttaaatatacagcaatagtttggtataggaatggatagattaatcagaggagggtccaaaatagaccttgcattgcattgcctgtgtactcagttatgtgtgactctttgagaccccatggactgtagcccaccaggctcctctgtccatggattttccaggcaagaatattggaatgagttgccagaatctaaaatacaccttagaacacggcagtttaatcttgatgaagttaacatctcaaatcatgtgagggaaaatggtatcttcaacagaatggatttctgtttttaatttccaccctataattaattgcaaatctctcaaataattttaaagattgtaaaaactgttgagcactgcattgactttatgtttattcttcatacagtgcctttagctgttagatactgttcgtattcccatttttcagttaaagaaacaggcttggaaaaaacaacaaaataaacttgtttaaagtgaaaggggtagtgagtggtgcagtctcttatcaaccatttgttacactactttccagcacgaaatgccatagaaatctctttagaaataactaaccaggagaaaaaaatctatagctgacacaacacaagagtcagtatctgtactaagctaaagagattgtacaaaccagtgagaagaaatgaatgactcattttgttgttagaaagaatatagtgctaaagctcactgataatcaaatgataagcaaactaagaagggcctttttatcaggtcataaaatattaagatttaaaaagtgatggtacctgttgtggttaagtgtaggtaaacatctatacttggtcaatgttaagtgagtccagccttttttagagagaaatttagtaaacctgtcaga

SEQ ID NO: 30687 - DNA, 2734 bp, Bovine  19866880465662
  misc_feature (1)..(1): n is a, c, g, or t
natttacctctttgtcttatacatttcacagcaaaaccaagtgcatgttttctctttgccatccactgtcagcaagcctcgcagatgactcacacaagatgtgggtgggtcagggtgctaaaaaggaatttctgcttctcttttttgggacgctgaattcacagctggattcatctcttcctcaccccttgtcctcagaaagagtgacaaggtcaagacccttagccccactctggattgaggatggggaggacggaggttgcagaaacttggaaaggttttaactctgtgagcaccagagttttggagatcagggcataacccacctgcagcaggacttctaaaagaggcaggcaatgcaaagattgtttggtcatactgaaatcctaatagacagtggagcatatgcctcaaaagaccaattagaatgctcttttccaaaataagaaaaaactcctgcttctgtatttcattatcctcactgggcttagcatatacagttagccaaggaaatacacactgtactttgtgtttattggaattataagaattccaggcatattaaccaagtaaaacagtaagttaaacacacacaggaaagacaagatgctatggatggaatagtcagttgtccaaaactgcaaatgaaggctttgctccaggaggtgtgtgctgattggaagccaagaatgcgctcagcttggatggagcgacacagaacacagcctgaaacagagctggctcacagaacactggtttccccactcccgggatccaacacgtcacctgttctcatcagcacaatcgtgcacctcagtaataatctggactcaaaatatttgtgggaacaatagtggggtggggaaaatcatggtgcgccccattatcctctcttttggagatctggaatgcaccccagtatcttttttaaaagattttgtaaaatgtggaccatttttttaagtctttactgaacctgttataataatggttctatttttatgtgttttgttttactggggggacagggagcatgtgggatcttagttcccccactagcgactgagcctggacccctgcactggaaggtgacgtcttaaccactagaccaccaggtaagtaccacacccccaacatcttcctagatctctgacctctgaacttagtcttggcccacagataaggagatgaagatgttctagagggtgaagatgatgctctcagggttactgcccggtaatcacgcttagtttgtcaacagggctgataataacaagcagcagtgactgaaagcagtccccattcccatttctagatggcaagaagatcccatgatgaagcactggactgcgatcagagaatgaagccacagctctgcccttaaaacaagcagattttcacattgccttccttcatcatcatgtctgagagttagagagtgaatatataaaaatgaaggaccttgccaggggagacgtactatgtacaacctaaggtactcttttggagcaagatcaacatcatgtaaatgatttggaaccagagaccctgcagagagagggttttgagctatctccctagtcacctgtgttgagagctgaggcagggctcacctcccgtctctagagctctctttgccctgtagataaacaggggcaacaaatgctcattttatatttttaattaatttattttaattgattgctaaatttatactttattattaatacatatttagtatttattacatatatcactaatatcacctagctgtgctgggtctttgttgctgcatgtaggttttttctagtttccgcgagtggaagctactccttgttgcagtaaacgggcttctcattgtggtggcttctcctgttgaggagcacaggctctgagccggcgggcttccgtagttgtggtacatgggctcagttgccctgcagcatcttccttgaccagggaccgaacccatttccgctgcattggcaggcagattcttaacccttggactgccaggaagtcctgctcagttattttaaagccctggaggtgtgtataatgaaacgatgtattctgttagtgcaaatattaacaaagagtggaatgagtggcctgacacaggccatggttttgtgcatcagagcaaagtaaaaatacactgttctgacacaaaaccctattttaatacttccatccagtttctgacagggctaaactccgaggcaagtactaacatgtagcactaatgcatttgctaatccataaatagattcttagcactggaagccagggctgctgtgcatggggctattcctctagtgaaatgaattatggatctggagtagcaaggactgggatggaatcaaaccattaaatattttatattccctccacttccatttgagtctaggcacctaaaaaatgagaaagctattgaggtaagagtttagtgcttatccaaacaccagtaaggtgacacattgggggtcttacactctccagttgcctgtgctgaacttggggatagaaatatgagtgaatataaggcaggtgtgtcatactgcataggaatcctctgactccagatccacactggatcaatctttgtattcttaatccacccaatagaataaacgacatctagctgattcttaataagagtttgtgaaataaaggaatgaatttgtttttaacacttgagaagacttttattttccatattcctttatgtgct

SEQ ID NO: 30688 - DNA, 1357 bp, Bovine  19866880497830
  misc_feature (1)..(1): n is a, c, g, or t
nttgctccttatttactgggtacatccacctaatctgaaccccaattatatccaagaagaaatatttgtaattaaatatatctactttttaaaatttgccctttaaaataatttcccttctgtttctaagtattaggttctaaatctcaatgaatttatgagtatttttcaatctactgctctggcacaaacagctaattaaagcaaaacattaaaatgttagaaaagacatattctttatggaaacaaatgtcagtgatatgattttcatgtatatcaattaccatttaatcttctaggatcagttcctttatatctagtttgagaataaaaatgtttttaatgttggagaagtttgaaactgatttttctattttttctttttgaagtctcactgttttcacctgagaaaccattgcccatgttataaaaggaaagatttttgaagatgtgagacatgtttgccctgcgtagaaatgcattttataagcacataatcatatatcaaaaatcaatatattctgtagagacctttaacttaacgatttaacaggctggctagtgatagttcgtgaccaaaattaggagggcgaaagttctgacttctccttgaatttctaaactgtttatgtacctggatgccaaaagaggaagcagacatcagaaatcataatttacttaaacattagaaatattcctcttaactttgctttagtgctatgttccgtaagtccaccaaacaggcatattttaaatctccaagcattaaatactgtagaggcatgtctgataacaaggtatttgctagaatgataatggtgttacaagcgttctcaatcaatgagtttctttctgtagtttaacagagaggtaagtaataaatctctaacttaatccaaccaacatagctgcaaaatgcaaaaagccctatgaacggcagatattaaatttttcaaatgcacaaaaccacaaacaagcagtcctaaaagctcttcaatctggatagtctatacaaacaagattaaaacagataaaaagggtgttgagaaagaagaagaaaaaaaaaaaaacccagacatgcattaagctagtttgacagctccattgttcaacgggtcccattgtcagacccatagatgtattcagtgctacaatgtctgctagcaaataaacaaaagactacatttttcaaagcaggatgccaattctatcataattctttctctgcttccccaaaggtggctcattcttggtaagcggtaggacccttacacagatgcaggaaacaaatatttgctttcaatacagagggacccaggacgccatgcagaatagaggtctttaaacaggtacacat

SEQ ID NO: 30689 - DNA, 1735 bp, Bovine  19866880498801
  misc_feature (1)..(1): n is a, c, g, or t
nttgccagccctcaaggtaaaggggaatggacaggtcagaactcaagaaggaagagtcaggcaaagctgtagaaggtagtcccatcccactttcatcctgacacctcacagctcatgtgagcactgagctcacatcagaaaagggtctctctgtgaggcttgtagtaccttacaatgccttggttgttcagaggcctagggaagggaaaacaatgaacataccatgcagcctgtcagcacattacatatagactcacatttggattattattgctgttgtttgatgattgtgtgtttttatgctaatttaaaaaatgttccttgggcttccctggtggctcagtggtaaagaatccgcctgctaatgcaggagatgcaggttcgagccctgatccaggaagatcccacatgccgcagggcaactaagcccatgcaccacaacttctgagcgtgcactctagagcccaggagccgcaactactgaagcctgcgtgccaagagcctgtgctctgcaacaagagaagccactgcaatgtgaagctcgtgcacagctaaagattagccccgactcttcccaactagaaaaaagccctcacagcaataaagacccaacacagccaggaataaataaacaaaatttgagggggaaaaaaatattcgtttaagcaaaaatccactctgccttttagagtctgacatccatcaccagccgtgcattctgaccatgttgggggtgagtgacattttcctacaatgctggctcattatttttgctcctggatttgcaaatccaaggatcaaatggcacagtctgaatccagctcagaggggagggaatcccaccagaggtgccctgaaacaaagcaaacaaacaacttcaaaaccacatcaggcaatctggacctgttacaggacagatggaactctgaattgtttgattccatcagcagaacagaggaaggaaatgttttaaaatgagattatgttattttccccagttcttattatgaaaccttcctgaaatgaactttaaatatcggcagcccctttcatggagatgaatgggtttcagccagcaggagcattgcaggaaagtggctccattatgaaaaatgtggagaggcagaggttgagctgaatagtggatccctgtggggtcctttggctgggtgaaaaatcaggctctcaaacacagctgtgtgtgttaggaagggccagatgtctttgaaaaatctatgtgccccatataaacattaattaaggggtccttttgcaaaagacatcaattgtaatgaataaaaagtcctctgaattctttgccctcaacaggaaaatgattgacaactaactattgtgtggagaagaaaaaatacactggaagttatgaaaatttcccctaaataaaatcatgtgatagttctttataatgctaggttttctatacagaattttccaagggatgttgtctgtattatccagccccaaaccttgttaaataaaaataaaaactttaaaaaaaaatggtgtttttctagtgttccttgtcagtgagtatccaggcatggcttggctagggatgttttcatttgtctctgttgtatacacacacacgcacacacatgcacacacccctctaaatattgggttcctccagatcccctgagttatggagcgcatatccaactgctgatctgacattgcccctgagaagtctcagaacaactgaaatttaatt

SEQ ID NO: 30690 - DNA, 1471 bp, Bovine  19866880504800
  misc_feature (1)..(1): n is a, c, g, or t
ntctctaaacagcatgcatgagtttaactcactgacttcatagcatctactttggaagctattagcttccttcagcccatgaaataacctttaaataaagtaaaggattattataaaaagaacaatgatagcaactcacactaatcgtaccccgcccctccacccaggcaggcgccacacagatcatgcatggttatttacactgctcttcacccactatactcccacacgcgcagactttactccagttcgaggagcaccttcccctcccttccgctcttctgcttctgggccagcgaatatccaatccccttcagctggcactctcctctccatgccgactcgtcccttgtcagtccaggagcggcctcttcaggaccatcttcaggggttctcttatggtgccttcataacttccttgacaggaagcaccacatctgtcaatgatttgtttgctttctgtcttctccactgaacccacaggttggtccgggtcattttattttccactgtaaaccactgccagccattacagtgtctggcacaaaactgatgctcactaaacttactgcatgactaagtgaacagacaagaaattcctaatttaatcctcatcacagcaccagtgacacaggaaccacggaagacttggagaggggacactggccattacccagtgggggtgccacaacccatacccaggtctttccatctccaaatcctgtgcacctcactgtgtcaatgcctgtaagtggttctataatggactgctgaggtctattcatctagtcttgaactactggtcaaaccctatcacaaacccaaggactattcagattatttccctggaattttgtttgatcaaatattctttgaaataattgggccagttcaattattaagcagaaatatttactaggcctcatggtacttcctggaaaaggctttaattgggtatgactaaacttatagaacattcctaaacaataggtgtgtattttcactaaagtacgctcaccctattaaccacagagcttgcagtctcacggttcttatcactaccagctctcactcgactgtacttcctgccaagaccaaacaacaaaatgccagccatcataagtaaaaggctcaaatatgcctagaggcgtggcatatacacaccaattaagaaaaaacaaaggttatattcagcaaagtgagacttactacaataattctattcatcaagaaaaaaaactaaaagccaaaaaaagaacagcagaataaaagagcttttgaatgacagtgaatttgaacaagtgagtcaggatagtgagtcatccttaagtgtgtacctcaaaaatgtgaacagataactaccgcaggtcctaagatgctaattataatcactgtcaaaataaggacataatgtagctttgtgctgaattcctgttttcaatggggttatagttttgccacctacattaga

SEQ ID NO: 30691 - DNA, 880 bp, Bovine  19866880524934
  misc_feature (1)..(1): n is a, c, g, or t
nctgctttgcaggcagattctttactgcttgagccaccagggaagcccttggtctgctttatttcaggattgggtaagaggtcctttctctaagggttccccaagtgaaaggcaggaattttgcccttcaagaacagggttgattttgcttctgtctttgtccttagtttttgtactcctggcttgagattatacatcactacaactcatggcatcatgggttagaagtcacagctgaaatcattcaggtcttacctttgcaaatataggtcagttcccagtactgtgaactccaggtctcacatcaaatattgcttgaagtacatgggctgtcagccaaagcttggaagagtttttgttatagagacatctctgttgtaacggtgtttgttgtgatgggatttgagctgtataatgacattcctcttggaggattacagcccttagccgcttacacatggagatcaaccatcaccactttacattatctttgtgttcataggtaaaacaatgagcccacatttacactggttctgactctattaacatagtaaaattgtcctgctttcctggggctgatgtcagagcctcagaaattagaaatttggaggctctctctaaacatggtttaaattatcgaaggctttcagggtagccttgatgaattgcattactgacatcagtggttccaaggaaggagacagaatcaggcatttacctaatacaggtgaattatgtttttcctctcattttctatgtgatgtgctatttaatcttgcggaataaaaacttttttctatctttgaaaatatcctttaaggaaacctaaactgtttcttctctcacataagtgtatgtgttcactgagcagcctcagcaa

SEQ ID NO: 30692 - DNA, 2150 bp, Bovine  19866880634069
  misc_feature (1)..(1): n is a, c, g, or t
natgttctcttgcccctcctccgtctcccatcccctagccctgtcatcaggccactgtctgaaaagcgggttggattcactatgtaaatgtgtatcaaatgcctggatttgagacatgagaaaaaggtaagatgaggctgataacttcattatctttctgtgcaaaattccactgtatgaggaaggaactgctgttgcctgcttctcaaatgtacatgacggagaaatgaatcatggaaaaaagactcggtgtagagaatctctgaacctctggggactcaggcatggagtctgtgcctggctagtccccccagacctgtcagcagaatttcgtttctctccattcttttcttgattttcattagcccgcaattcattctagtaagtagttcctctttgagatacaaatatatttaaaatacagatattgcaagtagaaatatcacggcactgccatttttcttcattcttttcgtcagcaaatattatttgagttcctgaataaaccgagagagaagtttgggggtctataatgacagtgacactcacagtagttgctgatgatttggggggcttatgtcatgccagtcactgtgctcagtcacttcaatcattgagttatttaatctgcacaacaaccacgtgagtgaggaggtaagtaactgttactactcattcaggaagcaagaatcagagaggttaagaaatctgtccagagtcacacagcttacagatcctggaatacagatcagtgtaacttcagagcaataaagcatcatttcttctgtcacgccctgaatgcacacctgtcgagtctaaggatggagagtgtaccctgaagccctccctccaggtgacagcctcgcagtggaaggccctgccgtgcgtggtccacacggaaacctcttgcttgttttttgtgctgagctgcaccgcccaggaaggggcagttgggcagagggtcctgggctgggacgggacatgtggtaccgcacgagtcctcagggcagctgggtgagtgtgccagccccagggccctctgtgctcatcacctgccttttcttttgggaaacgggtaaagggcctgctgctgacgtgccctctctctccccgctgcaggcatgaatgctttacagttacagaacctggccacgctggcggcggctgcagccgcagcccagacctcagccaccaccaccaatgcaaatcctctgtccaccacgagcagcgccctgggagctctcaccagtcccggtaaggggtggtcctgccgctgggagacaggacgcgggggcagggccaggtgcagagtggacatgcccagaccccgccaggcaccaacttagttaccgctttactttgtctttttaatgtatctttattgaaatagagttgatttacaacgttgtgtttgtttctgctgcacagcaaagtgactcagttacacatatgttgacattctgttttatattcttttccattacggattatgcctggattttgaatatagttccctgtgctgtacaggaggaccgcattgcttatccattctatacagaacagtttgcatctgccaattccaaactcagttcattcccgccctgctcccctcctggtagccacaagtctgttctctgtgtcgtgagtctgtctctgtttcatgggtaagttcgtttatgccctaatttagatccacacataagtggcagcatgtggtctctgtctttgtctgactaagtatgataacctctagttgcgtcttgtctgacttactacacttggtatgataatctctagttgatactgctgcagatggctttttttttttaatggctgagtactgttctattgtatacatgcaccacgtcttgtttatccattcagctggcagtgggcatttgggctgtttctgggtcttggctactatgaatagtgctgttatgaacataggtgtgcagttaccctttaaagaaacaaaagtttgagcatgtgcatttttatcttccaaggataaaatgagaagaaaaactttgtgagggaattctcacacattccttttgtttgaaaattgtgccgtcccttccatcctgctgaagttgcccagtgacgaggcacctcattccctcaggaatgctcttttctcctggttt

SEQ ID NO: 30693 - DNA, 857 bp, Bovine  19866880642651
  misc_feature (1)..(1): n is a, c, g, or t
nagtacccaaagagttaatgatactgatgatttatacataatatattaagaagtggtgctccttcttgatggaaatttatcactatttttgtctggtcagataggatcagcgtcattaggaaaagaacaaaagttttcctgaaggaactctccagagttgagaagagagggaaagaggaagtgtgtgtgtgttgggacagggaggggggagatgcataaagactgggggccacaatgagttgtgagatagaacgttctggagagactccataaagacactgacacaagagaactgttttgttattctgaaccttttagatgtacgagggaaaagaagggacgtgtgtaactagttaggcacatcagcggggaacgtgtcagatgttcacagctttagaaagggcgctgactgtgctctcgagtgtctgaaggcacacctttgcagtgagtgaaaatgctaatgtatggacaaacttgacatcttcttacttgtttgttctgtcctttctgtgtatatgtccctgttcagatctaaagaggagacgtgagaggatccaagagtgttaaatttgatcagttaccaggaatcctttgaaaagagtaacaaaagtgatttaagggactagtctgagctttgtgtttgtaactttcaatttatatttctttccataagtttcataggagaatttacaaaggaatccctctccagctcagaggtgaagtctgggcactgctcctagagatcccaaaaatgaaggaagagaccagagacctgtacagtgtgagtactgagggccagcctggcgttttgaaaccatcagtcacagttggggcatattcgtaaggaaaattaacac

SEQ ID NO: 30694 - DNA, 1025 bp, Bovine  19866880684189
  misc_feature (1)..(1): n is a, c, g, or t
ntggattttgtcggagtttctatgcagtgctcagctgctaatacactgcatttgttttgccctttaataacatcattaccaagttgattaaaattacattagactcattatatacataaaaaatattgtcacattcactagctaaacaaatgttactctcattttataacatatacttctgtaccttgaaagcttaaaagccccaatttacaagaagaaccatcaatgttaggttttctattctctactgttcgaacaagagcaaggtaagggtgaaaacaagctctccagtgaaacccaaagacatactttcttggagtgcccaaaacttggtcgctgttttggtcattgtagtgtaaaagaatattctgaaatacattgctgatttgttaccatgaaactgaacttttttcactgaaccaaccaaccaaaaaaaagatttctgaaaaaatgatagccacgctatttaaaaaaaaaaaaaaaaggaccaaaatctgagattcctagtaataattaggatcattttttacaattttacaaagcaataatttaatggcctaagagcagcaatatccactgactacattctttaaaggaagagggcgaggaaaagaccatgtaagtatctccctgccctttgtagggaggtttcacaggaatttaagggacagaagtaagaaaggaccatattattaatcctgctttcaaatgaatttcaaagcagttggttctgctatgagtgactggtgatcggtaacttgcaacttcagctggcatccactggagagttatgcacacacttcctgggcgtctggcaaagcatactctgctctgagctttgtaggagtcagaccagaaaaaagggcacagacacacaaaagcggacttctctgtgaacatggacacactgcgtgctgcacttctgaaaacaaaacttaaactgcactgatttttttaagcaccattaagtggttagcctttctctccaatgtctttaattttcagactgaaagctgaatgagaaa

SEQ ID NO: 30695 - DNA, 1199 bp, Bovine  19866880731638
  misc_feature (1)..(1): n is a, c, g, or t
nccaggctgtgcagaaccatcacggcactgggtcctttcctgtcactcaagcatatttcttcagaaaaccttctctgtcaaatctaaaccagcataatctctcatgttgtcatatttctttttctttaacatctttaagatgttaaaaaaatacattattttttacacatttgtggatccatatacattgtatggcattttttttacaagttttaaaattttatataaataatgtcatacatatatatcattctgcaacttgggtttttgctcaataatgtttctgaaatttgtaaacattgaagatatgcttctaggtcatttatttgaattaacagaagtgtaatccattttatgactgctgctgctgctgctaagttgcttctgtcgtgtccaactctgtgcaaccccatagacggcagcccatcaggctcccctgtccttgggattctccaggcaagaacactggagtgggttgccatttccttctccaatgcatgaaagtgaaaagtgaaagtgaagccgctcagtcgtatccaactcttagcgacctcatggactgcagcctaccaggctcctccgtgcatgggattttccaggcaagagtactggagtggggtgccactgccttctcccattcatacctataattcacctactctctttttgatggacatttagattgcttctgatgtttttctgctataaacaatattggaatgaacagtcttgggcatgtgtccttggagacatgggagaaagcatctgtataaaaaattctgtactcagaagggtcatgggtcttgaaaatattgaactttactagatgttgccacgtttctatctgagggagatgctagcagttcattcccccaacagcaatttatgagactttctttttctccatgtcaaacaatctgattttgttctgagaagatcacactagtgatgagtaaaaagtgagctgggtgagggtaggaaggcgtgcacgggggtccagacacacagagagctaagaaccgggacagtcaaggtttctcgctccaaactggcggtggagaacttcctgcacgatcctctgctgtctgttcccgttttcccttttatcattgggctggcgaggacggaattatctgcttgtcaagtgttatcaatcaaatatcaaattgtgtgggcaactgaaccgctcttctttgtag

SEQ ID NO: 30696 - DNA, 1343 bp, Bovine  19866880750399
  misc_feature (1)..(1): n is a, c, g, or t
ntttaattatagacgccctttacactaaccctcagaatatgggacatctatatcttcgaaggagagcgagttcttactgctatgtcttacacaatcttaaaattacacagaagtaagaaagcatttaattataaagatttcacaaaagctagccttgttttaaatcttgacttctcgttacccacccaacttcaaggtcatttctttttagtaatgagtttaaaaattctttaaaatcagtgaagaaattatcttcagttggtggttttccctcgttggttcttcgtcgtgactagaagcttactccttgcaaaactcttaattcttttctctgtgtcagtttcatcttcacatttaagttgaatgtagtatgttggttttactactactaatattcctactagttacttgtttccatggtgtgtgtgtgggggggatgtcccttatttatttattttttttctttgataagtttaatacgaaaagggagagaccaaagaagccaggccctttagttaacaggtctacagagggcgttttctgtgattgcttcaccaggaaaagagcatccagccccacgccatagaccagagttggggaccctccccctatctccctgtctggctgctttgtggcctctgtagcaagtaccctccaggcccacagttgtccaaatgtagcaaaaggccttcagttgcaatatcgcaagggcttggtaaataggatatgctgtgccttactctgaaagtcaagaagtgagagttgctctttatgaatatgagggaccttattcaccttaaagtcttaaactacccttaaaacttaggcactccttttgtgaccatgcagagaagggaagagaagctcacgtgggtgcccctcaggcagcacctcccgcctgcggcacagccctgagttcacgctcactgtatactccgcccgcttgccttgttcttgaatggtcatctcttcagtttcccagctcagtgacacattagctgagtgcttggggtcctgttctctagttttcctccccgctgtggctttgttctaagaatgtccttggtactttgataggaaatggtttgattgcttacttgaaaagcatggtcttcaggagcaccagattattcagattctagataagactgaaactttaaaatcacatctgtgttgtttactctgagagaagaggattcagaagtcttgaggttcacgtccctgcctccccaacaccaaaccacagccctaagatgaagcagtttggcagtgaactgcctcccaaaactcagatctgggtcataaccgcaggaagtcagtcagtctccctccctcccctctcc

SEQ ID NO: 30697 - DNA, 1370 bp, Bovine  19866880840815
  misc_feature (1)..(1): n is a, c, g, or t
ntgtgatcccatgatgagctgggaacattccacatttcctctgatcatggccgttgtgacaggaagtgctgttccctttaagcaagccaaagaacagagtcgtttggaagtgagctgccttcgacgtatctgggttacagcagtcagaggactgctgatctctaccagctgtatttcttttttcttcaccacataaaacagttgaaaatgtatattcaactactgatagaaggtcacattctccagaaacactgatccttaattaaagaaatacaaaagcattacagagcagtttccatattacttgtctgtggctgctttaaaatactgatgttgctcttatttataccaccaccatcatcaccagctcatctgctaaaaattcttactggaaaaaagagccaggaaagaactgggcaaaatccggcaggcattctggcaccactgaagaaggctgcacagctcagctgagagcccagtaagagtcggaagacaaacccatcatacgtcctaacagcctggtcctagccgaccaggcactctaccaaaaggattggcgattaaacccatcgcatagggcccacgaggacatcagatctcagcatagcctcatgtggcaatgttcagtatccaccaaaaatggaaacatatacttttactgcacagtaatgtttgctataatttccacagcagatagtgtcagtacaactttaggctaatgccctagttaactaaagaaatttgagacacctcttctgggttctgcagaatgctgaggatggacatttcatcaatacctgaaatgataatgaccttcagatcctggctttcagcttcatgaaggatgtcgctctggagagatttcagcatggccaatgacagcgcatttctcctctttggatcactcaagacgatgctcctgcaaagaacattttataattactgggttgtgtgccagtcaaaacaattgctgctgaggacccctgctgcaatttgggagctgtttggttttttttttttaactttgtactatgtattgaggtgtagccagttaacaaagttgtgacagtctcaggtgaacagggaaaggactcagccatacacacatatgtatccattctcccccaacccctcccatccaggctgccaggtaacactgagcagagtttcatgtgctatacagaaggtccttgctggttatccattttaaatatagcagtgtgtacatgctcatcccaaattccctaactatcccttccttctaacaaccgtaagttcattttctaagtctgtgaggctctttctgttttgtaattaagttcttttgtatcatttccttttaaattccacatataaagggatgtcatatg

SEQ ID NO: 30698 - DNA, 1190 bp, Bovine  19866880887973
  misc_feature (1)..(1): n is a, c, g, or t
ntatatagcaccagatagttctaagttttgacaaatagtatgttcctctgtgcccacaaagtccaccttaaaatggttgaccattgtctttatcctacagttatgactgtagctttggagctgtgaatagatacatttatctctgtaggtatctcagcggtttctctgttagtccaggagtcggggaatctgtgcattcctaatgaaggttgtaggacagggagctgtgaaggaaagcggaggagacccagggttggaccctgattgacagagatgagttacgagaactactaagctccagagagatagcattagtcacgccatgttggattccatagatttaacacctggttgttaaaaattgtaaattgatgaattgtttaaggcagtgacgttattgagtctcccggtgtctggttacttaatagagattagacattaatatggatttatggctccaacactgggaacctttagctggttaagaggcagcagtagctgactatttgaatgtaaagggaactggatgtgcccctgtggacgtggcaagttcctttgtcctgagctgcctttctttttgacaggatgtttctctgtttttggtgttttttttttttttttttttcagcttctgcagcaggccacctcctccagcaacctgggtgcattcagtggcattcagcagatggcgggtaagtcatgaggcctgcctggcctttggaccgctctgttgtctgaatttgggatgggttcagagggtgaagaagatgggggaaagaaccacaaacctgtcctgttggcttaggtgttacaccttagagtaagctgctcagaagttgattttctatccctggcatctccaacagttctataacaagaaaactgggggctgagaattcctgcatagtaccctcgagaaagtggaaagtgttagtcactcagttgtgtctgtttgcgaccccatggactgtagcccaccaggcacttctgtccatgggattctccaggcaagcatactggagtgggttgccatttccttctccaggggatcttctggacccagagatcgaacccaggtcctcccacattgcaggcagattcttttaccctccagagttgtgtttattttttcttaaagggtttgactgctggaaggtggggaagggggagggggggatttccagcaagag

SEQ ID NO: 30699 - DNA, 800 bp, Bovine  19866880904658
  misc_feature (1)..(1): n is a, c, g, or t
ncttggggatggtgggaatacctttcactgttagttttaatacacgggatcacagtgcacacttaggaaaagcacagagcccctcaataaaccaaacaccagttccaggctcaatcctacttaatttatgcataaacaagaacaggtgtttttctggcagctctggtggtgctaagctcttgtccccctttaatgtaaaactcatctgaatctaacatctgcatactatttcggacaacgtcaggcccatcgtccttctgatgtgtgactctagcaacctcttggttgcaaatacaaccacctccccagctggaggaaggatacctccccacttgtgatacctggacatggttctgcacggcagtttgacacactgtggtcacatgttcaaaacaattttttttcaagtgatgcagaatgaactctccattctccaccttggagacaaggacaattacagcagtttcctcctaataaaaccagcaaacagtgattatatatgtttctataacttaagagtctacactcttaagagaagtgcaagagaaaagcactcactcgcatctcttgccatgtggttacaaaacactgagctcaattgttctaacaggctcaccctacttaattaacaaagacatcctggtttgtatgcgcaggggccacgctcaaaaaaaggcttatgaggacaagttctgcacaagcattttattttttaatgactacagaagctcttggggcccatcatattaaaagtaacaaaaaaggagggaagtggaactggttcttaattacttttaact

SEQ ID NO: 30700 - DNA, 1037 bp, Bovine  19866880946791
  misc_feature (1)..(1): n is a, c, g, or t
nttaggttgctcctcggcggccgcggcgcgggctctcactgcaggctgctgttcggcaccccccgcccgagcccggggcagcgcccccaccgggtgtcacccggggcgtggacatcttgaaacccggctcgggaggcagctgcaagttaagtgcaggtctcgctccgcgaggctgccatcaacgcatccgcagcgttatcagtctcacactggctctcatgtggaaagaaaggcaaggttggatttctgctgcctttcccaccaccccgccctccacccctcttggaaggtttttggaagacaggagagaggtggtaataataaagtcacatgaaaagaaaatgaaacacttggcagtccgtcagatgactaatgcaagatgctggtgatgaatttgcagagcgcgcgaggcatccatgtgtgcatcaaattagtacgttgttgctgctcagaagagaaagtgctccagcaatgcggctgggtgcacccgattggctacccacgctggagaaaagggccctggctgggaggagggctcccgtttaaaaagcacattgtttacgggaccggggcacaaaggctttaattcagagaggcaaaggcgatctcagaattgcctgctttgtgataggaggggggaaaaaaaagcagtcccagaaagttgagttcccgctaaaggacactgaatatttcaaatctttcacactccataaattgctctctgtatatctgacatccagatgttgcacttgagttctaaacaatcacacgtttgggagagaaaagagtaagtctgcctttccttctcccagcttcaataaatatctggggctgatacaaagagcaaagaccataagcttttacatatcaatcctccttaatgctgttttccaaaaccctcatttgaaagagagaatgcttgtttagaacctgcaattcgagtcaccaacatgtaaaaggatgatgaaggcattcatatttgcttggatccctccaccatttaagctgcagtaaataataaagcaaagccacatact

SEQ ID NO: 30701 - DNA, 3407 bp, Bovine  19866880965818
  misc_feature (1)..(1): n is a, c, g, or t
natcaggtgtccaaagtattggagcttcagcatcagtccttccggtgaatattcagagttgatttccttcaggattgactggtttgatctccttgctgtacaagggactctcaagagtcttctccaacaccgcatcaattcttcagcgctcagtcttctttatggtccaactctcacgtccatacataactactggaaaaaccatagccttgtctagacagacctttgtgggcaaagtaatgtctctgcttttgaatatgccatctgtgtctatccttgttggttatctattttaaatagagcagtgtaaagtgtgtacattgctttttaaggcacaatggtattgcacgtggaatagactaatagttacagtatgaaagtgttagtcaagcagtcatgtccgactctttgcgaccctgtggatggtagcccactaggctcctcagtccctggaattctccagtcaggaatactggaatgggtagccatttccttgtccaggggatcttcctgaccagggaccaaacctgggtctcctgcactgcaggcagattctttactgtctgagccaccaggaaagcccagatatagtgaaaaatatacatatacgtaacttctgtatgcaccagaaaatcaaaaaatgtgtgcagctcactttgttgcattattcactttattgaaggggtctggaacacaacccatagtatctgcaaggtaagcctctattgaaatttttcaaacattaaaatgctagcaacttccagaaaaatacattcactcctttccaggtcctgaggacatactcctgcagctaaagatctcactactttttccttccacttcacattacctgttgtcctggcccacttaccctccagctggaataattcttgctcttactgagttgctcccttcatcagcacttaggattctgcgttggaaatgacgttcatgctggatgagttggttggaagtcttctaatatgcacaccattttttgtctttttcccttattggtaatgtcttgtatccctcgcatgggttacttgagctccatgcaaaccctgcaggatttcatgttgtttttccccagttcagaatccctacctaaggcactcatccaggttaccttcaccttttcagtgctccatgagcatcttcttatatttggaagtttctagaaatagctctgtatttatggtcatctcttttcttcaactctgtttctcttcaaaggctacccttgacttaaaaacaaaatcacagtgggggtggaatatctttactcctcacacaagggaaactatgaaataaaacgcacagatgtgcagaagtcagttcttcagctaaaaccgtgtagtcccggtacagccctggaccaatggcgctcatgtccagaccgcatttcccggttaatgccgggccactgggcacattttcattttcactctgtgggcctctggtgggtgtgtttcataaggacattatctggtggaaatgccacattttctgatgttggaacaaagtttcaacataattgcctctgaaagacattctcagctctgcatttgcagctcagtatctcactcatttaaggcaaggtctgaaaagcagcaggcgtgtgagtcaagagaagaagggaaaaacatctgtctcccagcctcagactgattcgttacctgggcaaggaggcaaaatacctaacttgtagtttgatgttgcataaataggtatagctgcggggtgccgtctgctcaggacagagcatggcgttctgtgtcagaatgtttactcttaggctccacaaatgggcagtgtgtcgtttgcagtggaatcatgcttattttgctttctctcccaactccgttggtagtttgatcttgagcaagccacttacaaaggaaagaaacttcagaaacaaatttaaagaaacattgaaagatttttttttttcccatagggttttcttggccctccctccccatggagccttcatagggatgtgctgattggagtaccaggaagctgaaaatacactacacaccaaggctctcttgtttatttctgtgttgaagccagggcagcttaatacaacttgagaatgactaaatccagccccgtagcataactgtctgcatccccgtaatgcagtagcccaaggtaatctgcttgtcaggcactttcctttctgatcccagcaagtcccacattctggaagcaaatgttgtatttaccataatccacgaaaggaaaaaaagccccggctaaaaatacaaaacagaacaaatgtgaaatgtcgctgccgctccagtcctgtaattggtccataaatgagtctccagcatctgtgaggcagagatacttttatgtatcactgaaagcactggctgcacttcagataggtttgcgagggcatcaggacgcctaagcggctgcacgaggcattttctgctgaccaagcaaatagcggcaggttgtacacaggactctcacgtttgcaagcgcgattgcctggtgagtgattacatttaatatgagaatcaggtagggttgttcgcccagaaccgattggtggggtggagatattaaaggctagaattgcttggggaaatctctattctcaaatcagttactggagaagggtggagatgctgaggaagtggaaatagagagaggaagtgagctgtggggagatgcggggtgactacagagagaggctggtaaacactgaactccctttaatctgaaagtggaataaccacagctgaaccaagtggatgatccagacaggcctctgtacagtacaggaagttgtttaattgatttttcttcatttagcatcattgtcaatattagtttaaagctgtatagagctttctgggtggtgcttggggtgtcatgacttttatatcctgctattcaccttgtataaagaaggctgagcactgaaaaatgatgctttcaaattgtgatgctggagaggactcttggacagcaaggagatcaaaccagtccatcctaaaggaaatcaaccctgaatattcattgaaaagactgatgccgaagctccaatcctttggccacctgatgcaaagagccaactcattggaaaagaccctgatgctgggaaagattgaggacaggaggagcaggaaatgacagaggatgagatggttggatggtatcagtgacttaacgaacatgagtttgagcaagctctggaagatggtgaaggacaggaaaggctggcatgctgcagtccatggggtcacaaaaagtcagatacaacttagtgactgaagaaccagcaccaccttgtatgagaaacagttattccttatttaagcactttcccacttctcagatattacttaaaaattaaagaaccatgggaaaacacttccatt

SEQ ID NO: 30702 - DNA, 744 bp, Bovine  19866880970248
  misc_feature (1)..(1): n is a, c, g, or t
nttcttctttctttttaaaggcaatttagttaagtgagcaaatactgcactggaaaaaaatcgtaaatcatcccaagtgggtccggtctgatttagttcaatatttaaggtgttctttaagtctttagtaactagaggcttgacaccataactgggagcaaaacatcaaaagtaattaggtcagcctgtggtgttagaagcctctgtcctccaaataatgtggttgtaaatatgtattcttctgcctcctggaaaatgatgcaagtcctctgagccctataaaaaatacacgttattagttctgttagcaaaacttaaagttggaactggaaagtcattaatttcagagttagctatttattgctaagagtgttcagcaccctgacactctcagaatggaaaggccaagtgagcctcttgacagctgaattatgaacgattcccccataatctttaccatccagcacacataaacataaagctaatttcacttttatgaactccagtcccatagctgtagaagttgtgtgtgaatagaagaaaaatttgtaggaggaagacaatcgtctgatacataaactgctacatcaggattgagacataaattctatatatgaggagttttgcaacaaaagcccaaaataatccttgagaaacaagtactgaagggaatggaaaaatacaaattagtttgggaaatgacctgcttagactgactagagcaagctgttttctgctggttca

SEQ ID NO: 30703 - DNA, 1719 bp, Bovine  19866881004646
  misc_feature (1)..(1): n is a, c, g, or t
nccccgtaacccttattccattaatagtcctctgagccggtcagcctcctccctggccttctgtcttcccacctgctcttaccaaccaccctccacctatgtgctgtagagatactccaaaaggcagatctcttcctgtccctctctccctccagattcctctttggctccctatttccctcaggataaagttcagtctccctgatgtggttcctaagtcctaccatgaccctgcctctctgatgctcttttctactcccctcctagatccttgcatggcttgtagttccctgtggacaccaagccttcgctcactctgttgctctgccccagtgccgttcctgcctcccttctggctgtctcctacttgtcctttccttcttacctgaagggttatttcccgaagacccttcctgctaccccctaccccacagacagaaaacttgtaacatttcacttggaaatgctgcaccatcttcgttggcttcagaaatctgacctttgcagatgctgcaataaagagttgtaattttaaaaaaaaggtctatgaagggcagggtcagctgtgggaactggtggtgttttgccccaggaggggtgtctgtggggttctgcgcagggaggggcatttgcaggggtcagtggcttcagcccagttaccaccaaccttcctgttgttcatcttggctgaccaggtggccacccagttcaagatgagcctcctggagctggtagagatcttgaagtcaaaggagcctgcctacgtccgctgcatcaagcccaatgactccaagcagcccggtaggccctccgccccgtaggccggtgggggcttggcctcccctgcagaggccggtcaaagcccgctgaccagccagtgatctctgcccccaggccgctttgatgaggtgctaatccggcaccaggtgaagtacctagggctgatggagaacctgcgtgtgcgcagagccggctttgcctaccgccgcaaatacgaggctttcctgcagaggtgggggcggggcctggcttggcgccagggggaagggctgggagggtgtgagcctctgagatcctgggcgggaggacagccctcagctgcggtgggagccacaccaggggcccctccatgctgcaggcctaatgttaagcttgagagggcaaagaccagccctccccacgcccaggccctggcctcacagagcagctggtcaggggtccaatgaggcacgcattcacatacctatcaccagtggagacagtaagagcctgtgaaggggacagagtttgcagtcagttcagaaagcaactttcgttgttatccctggtcaggggtctgaggagtcaccaggcatgtctttctaggcctgtgacctcaggcagatgttcaagttcagttcagtcactcagtccgactctttgcgaccccatggactgcagcatgccaggctcccctgtccatcaccaactcccggagcttactgaaattcatgtccatcaagtcagtgatgccatccaaccatctcatcctctgttggccccttttcctcctgccttcaatctttcccagcatcagggtcttttccaatgagtcagttcttcacatcaggtggccaaaggattggagtttcagcttcagcatcagtccttccaatgaatattcaggattgatttcctttaggattgactggttggatctcagatgagaaacctcaattt

SEQ ID NO: 30704 - DNA, 2515 bp, Bovine  19866881023636
  misc_feature (1)..(1): n is a, c, g, or t
nttgaaaagatgacagacctcacttgtaaaaattccaaagtttaagatatatgctttctacctgtcactacaaaatcatacattctcacttaaaaataagttgtttctctcttcaaatgtcccccccacctaacaaacggttaggaggaagccatgggtccacagttgtgagcaggcagatgccaccttgctttcatgtagctcatggtttaggtgatggtaactattatttacccacatatcataattttaagatattaaaaaagttcaatgagcttttccttggaagggagcggagaatgatggtaaataacctttaaatagatgagccgccagactcagagttactgagctaaaaataaactttgtgtttccctaattcagtgggtttttttaactttttaaaaggaaattcttcttctctaaccaactctcatatgaaactccaataaataaaaaaatataaacaaagctgctctaggtaaagtggaaggaagaagtaggggaggaaagaagactaagagagaattgaacatctggggaaaataataccacatcatatcctgtccctatgttctcatatccagagatttccatcctgaaatcttccggatacataaaaggcatgcatcagcaaagactaataggatgcatggtaaaatgcagaattgcaaatataaggcatgtatttctcaggaaaaggaatgaaaaaatgaggaagtaatagactgaggtggtaatttcatgcctgaagcaaaatggaaaggtatgtgttatacatatgagggatttttaatttttcaatataaagggtgagaaaagtattcaccttacacttaacactactttatattcaagccaatatacacatttctctaagaagagacattaatattctatgcatctacacatcatattagaattaaaagaaaattttagcatgttccatttactgaatggtcaagaggccaaaatccacactgggagggaaaaaatctgcaactgttttaaaacatccaaaaagtagcttcttaaaggtctttcacggtcacccataatacatctccctttcaccttaggagtcgataaccagctcaaagtgcagtcctacttattttgcagtctagtgtctaaaatagtaacagaatcacaactgaggttttgacagaatgtccactcattcatatgtaattattcttaattagagtaatgatgttatcactcaaataaacagtacagagacataacagtaataaatacccaagatctatatagctaagaaactagatatagcaggatttggagggaaaaaaaaaaattcagtgcaaacaaaaggacatgatgtctataattaactgctgaatgtcagtctctcactaggaacgaggactctaagaggtaacgatggatacctcaacttaacaaagctatttagaggatacagcccttagctcccataaagattgtaagtaggaaaaaaggagagtgctttgaaaggagcaatagacaagcatataagaaacagccttctaaaacctaggtgcttgaaaaccctaactcctccccatattatggatagtactgaaggttaagccagggggcctacgcgggagggtcagtgtgttcccaggcaccagggccggacccgcagtgctggggtctgcacaacttagaacagcacgggacagcagctcctgtccacagggacctgtgaccggggagcgggcagggccgtgactccgcacccacttctgtcctctaccagcagtcgctgactgacccaagccctctgaacagcgcaaatcctcagcagttcaagggcaagcaaatgtacacttgttcacgtttctaagggcctccgtggcagtgggaagggccctgtctctcaagaggagggacctaggagaaggaagggaaagaggggaggggaaggatgggccagaatcagggagaataatgggggcgatggggcggggagatacccacagcagagcgctgggcctcctgaggccgctgctggactgagtgaggcccaggactcatctggcaaccacagcagcaaaacccaggggccctgcgcccaggagagctgacctctgtgtctaagtacaggatcaggagaaaaatattctccgacttcattataaagtgattcctttctgaagcacatacaccattgtctcatgtgctgaagtacatataccattgtctcatgagctgataaatactctctgcccttttcccacacaagtagatccgtataagcattaaacattcttggacagtatctttcacagattcaaactattcaaactatgcagcgccccccccaccccgcccaacgtgcctaatacacacactgctgcatttggtctttggtttaaatatctcctttcacacctaagcaacggggtataactaaaagattcaagcataattgatgtcaaacagacggctataaataggcaataagtattaatatttattatccaactttcattcggacttcttttca

SEQ ID NO: 30705 - DNA, 2515 bp, Bovine  19866881070484
  misc_feature (1)..(1): n is a, c, g, or t
nataaattcttaaatatatggtagatactcttattaaaaatctcagaaatgagattttgttactttttgagaaccgtgtcagtaataaatgcattcttagacccttgattcaatgcacaggtgaaactaaaaaaatgggaaatgggtgaataaaatgacagtgactgtttaggaatgcaatgtgtagttttgctgtcctctgcatcagttaaggttcagccagagaaacagaaaccagtaagagatgtaaactgcaggatttgctgtgcggaactggcttacagcgtgccggaactgactagcaagttcagggtccgaagtgcaggtgtcaggaagggccttgggcgctcttacgaccttttgaccgattgcaccagggcttcccagattatggagggtaatctccctgacttcaagtcaactgattatgtgttttggttacatttacaaaagacctgtttcacagccacacctccattagagtttgaatatctggggattgcagcccagccaagtgtacataagaagctcagtatcacagaccacactcatcaacttaatttttgaataacgacaataaagttgtacttccttataatattcggtacttccacaactattctgcttacaactcaaaatatgccaaccccctcccgacagaatgatgctgagtccttggggatatgtactccttttgctttgatacgtataacctaaatgctgtgatataaagtcagctattattaaacatcttatggtagatggggacataagggaaaagagaaggagcaaagcacattaaaaatatatatgtatatccacagacattgataccaaaataaggaaaacatactcttaacagatgcagtcgtcatctccgtgactgggcatgtggtccctgctggtcataacttacttaccttccacttcccatcccgtgtaccctttgccctcaacaggcaccttggctgctgggggccctaaacctttattcttgaagagtctaccattagcagtcctgcctgaatttgattgtggcggtgttccgtggacttgaatcactgggttcggttatactcaaaggcaccttcagttattctctgtcccagacgtgctcttgcttatgtccaccgtgtcctagcagctcacctttccccttaacgaccaggatcagtcaccagccggcacactcgccgcctcctttgcccgctgattgagaggcatgcggagcccatagtggtaggggtggccaacctggctcccagttcggtggaagtgtttgtctcctagtggggacactcctctctttggagccaggacctctagagcagcagagcctaaggttgatggagcagaaagcaaacatgttgttagtggacaagaggcaacggtgggtggagccactcctgttcccacgcttggatcctgggccctgaatcctggccaggggagaggtgatgccagtcctggaagtcgatttccagcggacaccgccccctaggggacgtgcccccaccctgcaaggtgctgcgggatgctggccctgtgaatgaggcttcagcaggctggtccacagctccgtccagccggccccttctgtggcgatgattctatagtgagaactgaaagaggacaccaaattgaagacatggtgatgtgctttgtgctttttgttataaatcctttctgtcaaaatgagtgttatctagcctcaagtttgggctgtgtattgtttaaatttgagcttggggtcatttctttataataatagtagctttatctggattatctatttatcatcagtcaaactgtgtggtttttttttttttaagttcctaattttaaaagtgaaaaaactaaattgtgttccatgtaaatttctttcctctaggcaacaatccctgttccacgttcttgctgcatattctatttataatacggtaagtcagcgcctgcctgcctgcctgcctctttgagctgtgttctgagcacctggaggaaatctttgggcctccttcctgaaaaaacccccttggcctgtgttgcttcatctcaggactggacggtctgtgtggaccttcccaaggctccctcatctgccccagggtatcagagcagagttgcttggaaagtgggaagaaccacagtaggacagcaaagctcacttttccccccttactacagattgctttgttttgtggtggtgtttttcttgtttttattttaagcacttaggactgggaattggcagggcaagaggggcaggaagtagtggctagattaattctgtttgactcttggtgactcttcgttcccctggggggttgcctttcagaatcacatttcgtttatttggtgaggtccggatagcagaacgtaggtacctacttgctgtctcctggagtaagccaaaactaaacattttggtattagaacatgttattcttaaggcattgattactcttgagggagagagatttgggggaagagatcagctagtgtcaacgccagtata

SEQ ID NO: 30706 - DNA, 1358 bp, Bovine  19866881079112
  misc_feature (1)..(1): n is a, c, g, or t
nacccttaaaaactatattgtttgtattattatgtatcagcttcaaaggcgactgatgctatgagttagggctgtgatagttcagcggtactaaattccaccaatctaatgtcctgtgagcaactggaactgctcagtaaatgaaatggacgagactgtacaccaatagagtaatggggaccaatggctgcactcaaggcttctagctttattcttggtataggtgggtgtaagtcaaggtcatatctacctaccaagtgctgcttaagcttggacaaaaatttattcagtattttttcatgatgttcttgaaacctcaagagtttgggaaaaccatggacaaaaaatcctagaatacaaacataaaaacaatacttcataaataataacaacagaaacccctagtttaaaatgcaacatatttcttttatcttttagctgttaacaacaataaaaacaaacctaatagttacccaaatatttttacttctctccaaggtaacaattatgtataagctttgattaatgaaaacttatagcctagtatgtgtttgctaaggatcgcctatcaccttgtaaaaatataaaagaggacagagtatttctgaattaaaagggaaaataagaaaataagaaaaaatggaaactgaagctttttatcaagattatctgtttccttgaagtactgggtaaacacacacttctataagttattctaatcttgatcacttattttgcttccgcattatataaaacaaacactgtattacttttttcgggcttactctaacagtatcattagagtaaccatgattcccaggttaatatcactttttaatcctttttataagtgatatgtaacataaactaaaacatacgggcatgtatgatcaatgttaacatagtctatcccaaatgattatgcaatacaatctataagatttctaggaagtaactgtaaatgggaagttagtattaactttgtgtatgtaactcatggaaatttacatctatttttattcacaagtttcctttcagatattctaatagtccattaaaaaggatgcacacacaatgaatttgatttctccatatgggttcttcagcctgggttctaggtaacttcaaaagacgttaataagtgttctatgtttttaaaagaatccaggagaaatactgtatgtcacatatacccttttttgcatatgttcacaggcatatgagcttttgaatgtttctaagttgtttcatagactaaagacacttgtttttcttggtttacctcatctcccagactcatctgattcttggagtccaatatttccccacagaacgcatgtttccaaaacgtaaaagta

SEQ ID NO: 30707 - DNA, 4249 bp, Bovine  19866881087837
  misc_feature (1)..(1): n is a, c, g, or t
nttggcttatctggaacattgacccccccaccccctggagggggaggattaattaatgtgagctccagcagcacttggaaaaggtgaagcctgatataaatcttatgcgtgatgattatttccctgttgccatttctaaaggttcatctacaaacttccctgacaaatcccttatgctctgcagtccacagaactctttctgataaatccctgaggacagtgagctccctgagccagggctgtccagagctgatacccaactgccttcccagcgagggcggtcatgtgttcagactccagggaccccctggatgtcgccacatttgctgctttgtggggcttttccagctttctgctttttaccagcagtccagttgagataagctagtaaggtctcccttttccttggtgagtccatatgcctgtgttgtgcagttttctgccggaatggtttcctgccagtcaggattgcgcttcatcctggcaattgaatgtacagcttttagacctgctgaatccacatacagtcctgcaccgactccagccgtccagtggaacacccatcacaagtgcatgctttccctgtgaatgaaatcgctgtcctgtccactgttaataaattgtttcttttcaaattttgtcaaagtccaggggtgaacattgtacatgtggttacacttgtaggaaacttggacttttcttcagaggagcacaaactgatttatttacaatttggagaaaggctttgccttcttcaacgatgctgggtattacttgatccatttgattttctgtgaattctcccatcctgtctgcagaagtctcacctccaagactgagggccccgtcctgttactggtgaggccactgtggggccctgttctgtaattggtggacaggaaactcacaaagcttcagctgcacatgagaaatgatatcagacccttccaggtaaatatgggaatggccttggtttcatcgtctgatgctgagaaaactgatacccagagagttttgttaggtctaccagaatcttccagccatccagcgtctccctgagtgagatgcagctgtgtcggtccactggcagaggtgctctgttgaaaggcagtcagagaagatgggaggtgttcttcacggcaaccccaaagtggtgtgttttcaaagggagctgcagttcgcagaactcgaggctggtgacggctgatgcctcttcctaaagggagaggttaggtttagagcagagggtcacgacactagtagtgcaggaccagtctctgatacgttcccccagagagtggcatgagaaagaactgatgatgtaccccgcgcaccgtgctgccagtccatcaagagaattctgctcttaaacagtaagccacagcaagagggacagtgtagaaggctgagtctcacgctgtcccgttccccaccaggaagccccaggcccattgccaagctcttctgcttgtgcctcacacagctcagccttgggcagtttcctccagtcaccacacaaagcctatttctccatgggctattacttaagtatgaggatattaaaaagtgctccctcggcccattaaaggagcagcctgtccactgactgcaaggatgggcctgcagttgggatgccaagcagacctggcacaagttgagagaaaggatgctctgggggcagccccgagccaccagccacttgcagaatcagagaagcaaagagccatatggggactgtggcgtctctttgttgtacacatacggaaactgagtggttactcgattaccgtgggatctcactgttaatttaatgctgagccaagacaagaacccaggcaggctggccagtccactgccgactgacttaataacttctgggtgactcaagcattggtgtcatattcatggcccctcattttgtttacccgaaacaacttcctgatgaaatgttttggtgaatctcaactctctatgggggctttagaaaataaaccacttacatttacatttatttaagttcattaaagtagaattttgaaatttggtttttcagttgcagtaacttcaagtgtgcagtagccacatgtaacccttggttaccatattggattgtgtgggctccattcccatcatggcacacagttggccgcactgatacaggaagtcccaaggaacaacaacaacaaaaaaattaaaatggataaaaaactatggagtaataaaactgttagtaactgtcaaggagattgggcttcccaggtggctcagtgtttaagaatctgcctgccaggcaggagatgcgcgttccatccctgggtcgggaggatcccctggagaagaaaatggcaacccactgcagtatttttgcctgggaaatcccatggacagaggagcttggtgggcagtggtccatggggtcgcaaaagagctggacatgacagtgactaagcaacaacaaccaaggagattggctaattttatccaaagtttttccaaggcaaggcatcttcctgtgttgttttcaggttggtatattttctgacggtggcattttatttacttttttcaacttttataaaattatttatagccacttgggatttctcatacccattttgtaagtttgttattctttcttttgtatagataagggagatataatacagaaagtttctgtccaaggaacaagataaaataatagaagttgtcatttattttgtttgcattctccaaaaagaagcctgcattccctgggcttcataaaagcttgcatcctagagttaataacaataataagaatgcattgaatcagttattataatgtctgtaatattttgctacttagaggaacctcagaagattttgcatatcctctgttgatctagttctctctactcgaaaatagagtagggaagtaggtcagtgtcagcacttaaagcaaagagtaagcactatcatttttccccccaacatcatcatattttcatcttggctctgagatcaatatcaccagtgcctgctggcttagtgccctccaacttgtggtccgattccatgtggcatctggcctggaggaaccttatgtggctctttgccaagagcaaaagtagaattgacacccaggatagtatcgtagtttgtaggtagcagagatgtatgggcttgtgtctcaggcctgccagcggccactgagtccacaggacacatcaccctcaagaaacccagttcacagactattaagcagtaactgttggcctttgttactgtgtccggattctgtgtactgtgttcagattctgcagacacctcttcttaggagagtgacattggaaaagtcactttacctctatgactctcagttgcttcatttccaaatcgaggataataatttcatctttgtgggagctgttgtggtgctcttgtgtcctgtacctggaaaacgctgtttggcaaagagtaggctgtcaataaatctttgaattagaagctaattcctgccctgtgctgggggccgaggatcgctagggagggtgggaagggagctagtctaatttcctaagtctgagatcagattgcaataaatagaaggtgttactgagagtcttagtgagagttggggtatctgttcccataattacccttctttgtagatcgaattgatttccctgtggcctctggcaagtaccccgaaaggtttaactgtcacacacatgatttctggcttccttagaagtatcagcgcttatagccccatgaggacaaaagagtcgttaagtcttctgtagagatgaatatcagccgggaagaaagttggaagtccaaaggaggaggagctcgtgtgttagaactaacttacccaggctcctgataacataccatcgggatccagggcatgggattcagcaacacaggggtcatcaatggggtaggaccactgatgcttcgatcaggaagatgtgcctttgctgtgagtttgtgtaacagctagacattgttggacttagttaatggatagtcatgctcttagcatttgatgcaaacctttgaaacatttgtttgcaaaatggccaggtagtgggaaggattcagatatggaggagaggtgctcattcatgagatcctgtgggagtagaaagggaggcagtctcgggagttggagacgctttgtgtgattatggagaaagtatgggttgtaatatagtcttaatagactcttaggttccatactttgcacccggattctcacaca

SEQ ID NO: 30708 - DNA, 1462 bp, Bovine  19866881101328
  misc_feature (1)..(1): n is a, c, g, or t
ntttctggttggcaaacagctcttccttgagaagagaaccaccctcttttaacctcacaaagcactctgctcgggtggacatccttcaaaccaggggcaaataatctgagcgatgagaaatgcaaaacattgagataagttttaggaaatccaacaatgtgccaagatggccggggggtggggggaaagttaggcatacaggggttccacttttccctcattactctggaaaagacaacccatctccaaatgaggaaagtatgtaccgaagagtgcacactgtgcctacttgaaactgaaggtttttttttttttaaattatttataaggagaagggcatgaaaatttaattgaatgttcaccttaggtaattctgtgtcttattgttcagagcaattaccataaatctgcatttcaataagcgagaacagatgtcagttgttaccagcgcttgccaatcaggtctgttagaaagtgacagatgggtggttatggagcattctcgcattctcctaaggactattagcagggagtgcggggtgtggaggaggggaggctgggctctgggaagaacccggggcctttgtgggtccagtctgcacacctcccaggtgtgtccccaacgcgaggtccagttttggccaaagtcttccctcttctccgctcgtcacagacacgctgagaccgtctttgctctgagccggatctccgaccagtacagaagtcgctatgtggttctttcaggcagacacttgcccactatgatttccctctgactttggaaacttaggccagagattctgaaagcaaattactacacgcttctgactgtcggaagtcaagcgaagcagttttccctttgtcatcagatcttcttcttaggccaccgcttcataacctctgcaatttcttactaacaagcccccctcaccctagaaaaacatttcctctagcagaaaaccaccccctgataaatctgtgacgctgtccagaatgaaaggaggtttttctgcggccgacactggattgcttctcttggagcagttttggggttcttgtgcattgttcactgatggctcagatttgcttcttggttggtctcctcattcgtctgagtgattccatacctggatttgtggacgcgcagtgcactgagtggcggccgggggcgggggaggcgacagggagctcaggccagtttgaaatgcggacccgccatttcttaccttggtgactctgggcaagtttgttcattaacttctctcaccctcagttgccccacctgtagaatgggatgctaagagtccctatgtcacaaggctgctgcagtatgtgggagtgctgtagtggtggttttctccctggcgtgccgtaaagtgtgaggatgaaccccaggcttatttcaaggtgctctgtgaaaagcaaactggtgtactactacccttgtttttctaacatgatg

SEQ ID NO: 30709 - DNA, 1124 bp, Bovine  19866881111856
  misc_feature (1)..(1): n is a, c, g, or t
ncatgttctttcaacttgttgagctgaccaagaaatgtttatttaacatgtctttcttagaagtgaaggttccaatgaggtaactataataattaagctaataggtcagtggttcttaatttcttctggaaatcgacccctgctgagaatctaaagaaagctatagaccctcttccagaaaaatacagtcaggtccagagatttaaaatcattaaatgtcagaggatcatgggcctccaaaaacctactaaaggttaagaacactggtactgaagcaaaacatttaaaggtaaattcactagagtgtcagagactaagtaatagtttcaaatatacacagcatcaacagtaaatacgaagagaattaccattttaattaggttaaaaaggaaaacaaaacatatgtcccataaactaagtatcatcacataaattccctctagtgatgacttacatggaatcaatcactgtactgccgagactttaatagctctgcttcaatttctccatttacagatttgaatattgaaaattacttacatttcttatctatactttgtggggcactgaagcaattgataaactgagttaatttaggaaaactgaaatatattttgtccttgacctagaacaatttggtgcgggctacaaagaaagtgaactgcatcagtacaattatcattaggatgaaaaagaattaatgtggttgaatgttattaatatacaagctcagcactaccacaaatctcaggttgactactgttctatttcattaaaatttaccttctcggtggtaaccttggagagatctttgtacaagagcttccggacatattcctggagaggaggacgtttctttttcactgttttttcagctggaggggggtagcagtagtaatatgcattctccaccattgtgacatatcttgcatcaagatgcatcgcttgtttctttctcatcatttgttcctaagatgtataaagcttaaatcagtcaaaatactttctttataaggtttctttgttcctaactaaaggtgccctttcagggataaggtttcaagataaagagctagaaaagggaaaaaattattaccagatatttctaagagtatacaagcata

SEQ ID NO: 30710 - DNA, 1726 bp, Bovine  19866881124143
  misc_feature (1)..(1): n is a, c, g, or t
nggatccagcagtacgcggccgcggcgctgcccacgctgtacagccagagcctgctgcagcagcagagcgccgccggcagccagaaggaaggtgggtgcccgacccggcccgcgggcagcgtttggccccggagcagagtcccaagggaagttgtgataagccgctgtcctaagaagagcggcctcttcatttctcctactcacggtttaagacatccgacaggcctgaacactctgttgcagttttctagctgtcttggacctccaccctctgtgtgccatatcgcagttacctggtagctgctgcggccaaaccactgccaggagccccctctcccgaatcagaagggccatctcctttctcccctccacgtagactcctcgttagaagaaccccaagtcatcagtgcagcgtcctgggggctcaccggcttttgcagggtccacgcccccctgggcgtgacggggaagctggccttggagttggcgatgttgtccaggttaatgacgaaatccactcctaggatcgacccggtctttgtttagtcagggtcttctggggaagcaaataagtgattgattgccttgcttctctgccaataaggcaaaataaacatcaggaagtgaatgctaagaatacatgaaggctaattataaagcagttaatgaactggcccaaatagggagggtttctctctttcctccttttggttccttcttcctgactgaagttgcttgtaaagcaaaatctgcactgagatatttattctctttctgacttgttttgcataaaagaagcaaggataagaaagtgttgaagacatttttaaaattccttttcgttctatcctcacccatagttccaaactggtttttgtctgaagactttgactttaaacacggtctccaataagtagaatggttttactttgtcaagttgggaactgtaacagggacacaactctaaagatcgtgtcattttgtttgttttttttaagggtttttttctgtttatcagtaaacagcattcaaaatagaaggaacttgaaaatctgagtttctctcaactctctttcctctcagttatgatgttattgtagtttattttaaagctcgcatgactgttcagacagctgcattttcccaggtgtgtggagaccccgtgccataaatacctcagcttccccaaggaaagcctgtgtggcagtccctctttctgaggtctgacttccacggtaacagatgagggtggtaggaaatagcctgtgagataaccatgtcctcgggagacaccaggaaagacagttccccccgtgcatctgagtgctggtcacttccctgtcagccatggggcaaaccgtgtaacgtggatcccattaggcaccagcagactagaaagttagtggcttaggagagtctgggccccgaagttgcttcaccccagctcagagccctgaatttctgtgccttgagtttcaggcactgcttgtgcaataattaaccctctgggattaatgtaaagtaattcagaataaatactgtctccccagattacttatatttaggtgtgcgggctaccagtaacatgggttagtgctcagtctttgttggtgctgtttcgggattattcaggtcaggtctttttttaatctcccgcgttttcatatgtctcttctgatcatcatcttctcactctgttaacgtgtactcaacaaatttaaaccat

SEQ ID NO: 30711 - DNA, 699 bp, Bovine  19866881331744
  misc_feature (1)..(1): n is a, c, g, or t
nttctactgaaatacagctaattaggccccgcatctgactagagggttaaaaagtgtcatagatttacctctctaagtaatatgcttacaacagttccatgaaaaattaagaaaggattaacatccttcttcaatggggatgcttcgaaaagcattacgctcgcactttgttataacaattatttttcattcacgttctgtgcctcctattttgagcctattcatttttcctctaattttaagaataaataaagcaaaatggaagctcgtgttattacttagtatgaaaacacagaacctaattatagctaatgagtgtaataaacgccgggctgcacctccccttgcttgtgtgtgtttcctatacagaaggtaacacgggctgagtaacgaggacgccaagttacagatggggttgaggaatgctatttgacaggcgattagagtcatctgtcagaaatgatgacttaatcaccagagcagactctagctcccctcctgtaattccacccagagtaatctaattttcctgcaatattttatttattttattttttgccaggactaaatggttatgctgcttgactttccccctctcgtgtaccacacgactgtaactgaaatgtaaatagccagtaacattatagcaaaaaaaaaaaaaggctgcctttggagcccgagaaggcaaaagcagataca

SEQ ID NO: 30712 - DNA, 830 bp, Bovine  19866881353376
  misc_feature (1)..(1): n is a, c, g, or t
ntgttgtattgttgggtagtcattgtatgttggtgatacatctaccacgcctcactgtttcacgtatctgtttttttctatatgttgtgtaaaaagatacagtcgattccacctaagtgaatatctgatttggggaaggggaactacacaccagccacctcggatttatgtacaacagcctattttaaccactgcttccaagacttacgtctgtggtccacctacataactgcctgcagagtcagatttgccaagaccttgtccggtcttttgaccacactggtacattgcactttctctcttctcctctgctctctgctcctctcttcttctcttgatatgtgtacgcagttcttaacactcaataacaatggctgccactttgctgcataaccttaggaaacgtgagaagagaggcagcagcgctggggtttcttctatctaccatgagtccaaaggcctatcattaccatcaaactcttctcagaaacaagtcacttttttttttaaaggtgagctccttaagggaagaaactaaactttacttacctggtgaatagatatgaaaggtattaaactgaaatccatgcgttgccatcaatcaatagctatgtgtagaaaagtaaattattttaaagagctagctgaatccaggagcagctttaattattaaaactaatggaagagaaaatacttgcaaaggctcaaatggaagctctactcagtctggttgggtgggaggggggaaggtaaagcttctcatgcccaagtcttcataacacatcatccatttccacatgaaaaccaagactgccagatacatccacaca

SEQ ID NO: 30713 - DNA, 835 bp, Bovine  19866881898660
  misc_feature (1)..(1): n is a, c, g, or t
naatacatgtaaagcacctagcatggtatctggtctagaattgctcactgaaagatgcctattattattacttaggatatgaactgtgtttgagtccacactaggaaaaactttggattgaaaagtagacttgtagtggtcactcatttctagtgcttcacaagtgcacagaaaagattaacggtgggaacaggtgacacccattagacactttgaacttggggccacatcctgtagttagcacatggctcaacagaggtgaagtctgttgtttccatcttacagatgaagagtctgaggcccagagcagcacagttaggaaatgatagtgccaggattcaaaccccaagtgctaacccccgctggcatcaggacacaagaggtctaaaggcatccgtgaaggatgactgaggggcagggattttaaatacacactccccaacataaagaccaaaaggtgaagcataagcccctcttcacggtgtctctccctttgcaccccagggagtgtgtatttatttatttattttgagaaagtagaaatgggcccttgtttggagacccatgaaagaacacttgctctagaattctaagttgaggtttaaggaccagtgtgctgccacctggtccgtctgttgtgttaactctgttcagaggagatgcaggagccccatgttctgaacttccgttctctgttagccgggacctgtggcaacgccttcctcttttcattctagctgattgtcaacagcggtaaccacaggcccttcctgtcccagaaataagtcttgccacactctcagctctcaacgagctgtgagcgctacattctgtt

SEQ ID NO: 30714 - DNA, 1434 bp, Bovine  19866880103575
  misc_feature (1)..(1): n is a, c, g, or t
ntggtcatgtatggatgtgagagttggactgtgaaagaaggctgagtgccgaagaattgatgcttttgaactgtggtgttggagaagactcttgagagtcccttggattgcaaggagatccaactagtccattctgaagaagatcagccctgggatttctttggaaggaatgatgctaaagctgaaactccagtactttggccacctcatgcgaagagttgactcattggaaaagactctgatgctgggagggattgggagcaggaggagaaggggacgacagaggatgagaaggctggatggcatcaccgactagatggacatgagtttgagtgaactccgggagttggtgatggacagggagccctggcgtgctacaattcatggggtcgcaaagagtcggacacaactgagcaactgaactgaaatgaaaccataattacagagctgggatctaaaattcctgattctgtgtgctttctactatatcacagcaccaaaatacacagctgatctgataaataaaactatgtaattatttttctaattaaaaataaaatttcccctagtgttcacacatccccttagttactcatccatcagatcctttgcaggcagaagagttacgcaaatcccagccctaaccacagccccagtttccactttggtgatgccgtagcttctcccagctgctgaaaaagataaccatcttcaccttggagtgacgtacctgttcctgacatttctactgtagtcaaaatgcagtaatgtacatggacaggcgatggccgttggtggtctcttacctacagacacgagagagcttacgttgtctcctttagtacgacacacagaggctgttggaaatccagccgctctcagaaacatgatgatatgagtctgcacttcaatcaggtctggagttttgctagattcagtgttgcttattttgaggacacattcatttgggccatctgtagtgactttggttcttgcaatgcatacatggaagttttggtcatcatagctaggaagtggctggatcttggaaacttttaacccaaacactgattccactaatgcagaggcttgtacctcactgaaagagggcttggtgagagcctgtgattgctgaccatctccacttgacattatttctaaggaaacaaacaaacaaacaaactggaaaggggacttatattgaatatacttacttaaaagagttttcttaagacaaaccaataatgttttccaatactgatgcggtacgtctcttgtgaattttcactcataaagttaaaaaaatcaaatgagtaatgagatttaaaaagtagattaaaagcatagtcctgcctcatcccttcatatttatgcaataactttgttctttaatttccaagaggcaggtaggctagcggtccgatgtcatctact

SEQ ID NO: 30715 - DNA, 3481 bp, Bovine  19866880406389
  misc_feature (1)..(1): n is a, c, g, or t
nctctttgtgaccctacagactgtatcctacaagctcttctgtcctgggattttccaggcaagaatactggagtggtttgccatttccttctccgtggtattcattactaaaatgcatcaacacgtggaggggggaccatagcctgacaatctggtgggactgcctgcacagtgtcatcaccgctgaaccctctgtcccacacggtcaagcacagattggcccctggctcgctcactctatgatcccagaaccaaaacactctccaggctccctctcctcctttggttgtctttttatgactttttaccaaaacacatactgaaactacttctggaaatatcatgagccatctaaatatataacctctaaaatatacttttatgtatgtatttgatttgagttttgccacctccaatacaagaaattttcttagggattagttctactcaaagcaccgccattttctttttatagaataaaaaacagattcagcgaggttaagcaacttgtccaaggcctcacagcttgtcagaattaaatcccggatatttctgtctctgtagggccctcctacatcaccctccctttctaagtgcacaaacaagtgagtgggcatcaccgtcaacctttctcacaaacatcccaagtcaagcatgcctttcaaaacaagttactgtcattaggccagaaactgaaggccagtcctagtcaagggaggcaggcttgaagatgaagcggaataattgctgaggtgatggaccgcaccctgaccgtctttcacgggcaccgggtccaaaacgttcccctacagatcccacctggtgcttcctgtaactcctctgggcctgcgtcgactaacaaaacccccatcccccaggtctccggccgggcagtctgtcacaatcgttttgcgtctcacataatcctttcctgccggctggctggctccaccgcagcctgtctgcccgtccgttagtacgttccttatgggcagtgctgatgggcaccctcaatcagccaaccccttccccgcaagcctggacggacacacttgctccgtggttggggggattctaacaccccatggaagggacagacggcgggaaggagaaggctgagagctgggccccttccagagagccgactgccccgcccagctgcgtgcagggctacgacctgtcccctccccgactccatccatccggttgggctcactgcacccagtttaatgcgctcaggaatgtgctcggttgagacacccatgtttgctttggccccgttgagccgaaacgtgccccaggctctgctcatccgcccgcaggcttgctccacccagtcttcagagaacgtccatgggcgaaaagcgactgacgcccagaacagggcacctgcgtttaatatgtcttgaagcatagtaaacatccatccagcctggcctgcagagatcgcacgggccccaccctgggagccagaggaggcacagggctttgaagtcccttcagctccgctgtcggttcctttcctccctgactacttcgggctctgcagccccaggggcatctgctctctgaagcccacgtggggtctgaacgctggtctagaagcactgactgtgtgctggtctctgaaacggggtcctgggccgcagctgaacctgagcttccagcctgggggttgggcagatatgacctaagagataaatgggtgtggaaatggggccaacactaccaaattagatttgggatctgcttacaattttgtcccaacttgggtcttaagtatataagacaagaaagaaatttgattttggaatggttccagaaaacttgggttgtcaacttttttatatttatttatttggttacccaggtcttagttgcagcatatgggacctttagttgcagcattcaaactcttagttactgcaagtgggatctagttccctgaccagggattgaacccaggccccctgcattgggaggccagagtcttagccactgggccaccagggaagttcgcagttgtcagctttatagtggaaaaaaactcagatccagggaaggaaattgtgtccaagtggaggtgactggacagagcacatgagctggatctcggagggtgggtgcaggtggttggcaaagtggcctggcgcagatcaggaagtgtccagaaggtcaagcaaaggagaatggcctctgactggaaggtgtgagtcactgagagaggatatgaaattgcatctcacacacctgttcatcctttgtttagtctctctctccccgactcaaacataaccaccagttagacagggcaatttttctattttgttccttgctgcttccaccatgcctagaacagtctggcagatagtagatgcttaattaaatgtttggggaatgaatcaatgcacagaaaaatgatttcctgggagagggactattgaggaatttagtaataatactaaatttttaataatactggttctggggccaacacccttttttacaaaacaaatgtgctttgtaaaaaacacatttggagggaggcaattgttggggctgttagaagactaggttcaagtcccagatctgtgtcttgctctatggaagttgttgttcagtcattcagtcgtgtccgactctttgcaaccccatggactgcagcacaccaggcttcccttcaccatctcctggagtttgctcaaattcatatacactgagtcagtgatgccatccaacaattttcctcttttccttttgccttcaatcttttcccagcatcagagtctttttcaatgagccagcttttcgtatcaggtggccaaagtattggagcttcagcttcagcatcagtccttccagtgactattcagggttgatgtcctttaggatgaaaactaaaagtagagcctgcttttcagaaacctcccttctcaagaggccatgtcactgctggcccaccaaccaccctcaacaagcttctacacacttctttttcaactgggtgcttctcagttgtgggtaacactcatacacttgttctataaagaccatggagacacaccccaccttgggtagcctcagcagctgccattgcccacacagccagctcctgtctcttctgcctggcattcaggtctctgtacacactggcccccactatgatatttgtccaagattttcttgcgtgaagtctatgtctcagccacatcagaccagccagtgaaacacaaacatgttctcaacctgccctttttcacacctttgtccatcatggttttcttcatgcacgttgccttttctacccaaattgaaagcccagatgcctctgggaggcctgcctggtcctgacagttgggaggaagaccctctgctctgttctggtccagccaggcattctcatctctctccttggttttatttatttatttggcttcactaggtcttatttgtggcatgtgggatatttagtggcagcatg

SEQ ID NO: 30716 - DNA, 1153 bp, Bovine  19866880506893
  misc_feature (1)..(1): n is a, c, g, or t
nccgtgtggagctgggagggccttgtttctgagttaggaccctgagcctcccctggccaaaagtaccttcaggtagggaccttgcctttttcatccttcaccccagcatcaagcccaagatctgtgtggacagtaggtacccggggaaggtgttattctggctcctttcgtttccagctatgggaccttgggcaagtggcctgacttttctgcacctcacgttcatctgtggtcaacagatcacaagacttgttccacttggtgcatttgggaatacacaagatcacaaggttcccagaggccccttccccagccccttccaccccctccgttggcatttcatcgtatagccagatctctgaacctggagcctattatacagagtgaagttaagtcaggcgtgtgtgagctctccacccctggggatatgggcaacgtgctggcttgttgcctgcagctgcatgtgtcactgctcccttctccagggagtggggagtgcccaccggagccttcccaattcagttatgtgtggctgcagctgacatttcattctacagccagatctgtttcctaggaaacaagtgagagacattgactgtgcagcgcacacacacatgcacacacacacacccctggctgccaccaagaatgacaatgaacagaaagacagtaatgtcagcggaagcaaaaaaaataagtttatttgtgctccctgctgcccgggctgcaggggagggagggacgggccagcactccttgacgcaagaccacatcgtggcttgtggggcaacttctgaacaggcaggtttggggggacccctactgcacctcgcagcctctctcctccagggccagacccaggtggcctccacaggtggggtcccgattcgttgcttgtgcaccttctctctgaccgagtctgctcccagctttcctctccaccctgaagctggcaccctagactcctgtctgcagccagaaagacacggtcctccaggcacacacaggctgcatgtccactaccacccttgactccctgacacctgccctttatcctgccgatgcctcctccagtctctggcatcccaccctcctaaggtgctcaagccagagacctgggagtgtccttccgctcagttccaccatgcaggcc

SEQ ID NO: 30717 - DNA, 1726 bp, Bovine  19866880642699
  misc_feature (1)..(1): n is a, c, g, or t
naaataaagtagtgaaatgatatattgattaaaaaagaaaaataaaaatgacccatgtcatttattttatccaggatcttattaccagcaatggttctgatttttagatgtcggaacaagtattttctttacaaaagttaataaaatacatgaaaaaatgttataggataaataacagaaagagcttccaaaaactcaataaatacaatagaaaagcataaaaagttttcaaattatttccagacacaaggatttggaacaccccttgctgaaacaatagcaagaagaagaaaaaaaaattataaaaaagaaaaagaaaaaaacagccaaaggtgcagtgtggggcagtaagagatctaaggtttgtgcaaatgtcaggctggggacacagcctcccacacaacagtcttctgggatctgctagtcttcagtccaattgacagggccctggccgtccaggagttcatgggctagatgtgaagacaagatttgagtgcaggaaataatctgatggccattcctgagggtccctttggaaatcagcatggctcctggcccttgacagttggggaggtgttcctaaatgcaagcctcagtgactctttagtgaaggggaagtggcctattcccacatatctagccgtctggcagacttagaaacaactcccaaaggtggagccaggaagaagcagatcctttgaggtatagaagctcaaactggcaatccaggaggcagaggtactcagggacttgggtgctgggaccttcagcaaaccacctgacctcttcgtgcttcagcttctctatctgtaaaatgaagatataatagtgtccactcccagtgctgggaggaggatgatgtgagaccttgcatgtaaaagcattagtgccaacacatgggattcagcactcattcaccgtcacaattcgcctctgtctaatcatccttctcactgcccagatggctgctggcgagagtggaagctgttcttggacctttgtcccctgagctgactgacagttttgaaatttcccatgtggataatgtccatgactccctgtgatgttgtccctcatggcagtgtggggtcaggccccccttcctaagctgggtagttggcaggcaaaggccacagtgctttgaactatgggactatattgagaacaccccaatgtctccagggcttccagaacaatggctaatcagtcccatggcagcaactcagcatcctctttccaagtcaatcaacttgtgcattttcaaagccagttcttactcagcccagttttgctgtcccacgaaaggatgtgcttttttaggcatccctgtttagcaatctgtaccctaaattagcatttaaaattgtgcccttaatttggcaattcttatctatcaaagttacaaacacatatgcccttgacagcagccccagttctaggactttatccaacagttgtactcacctatatgcacagaggatagtcacagcaagagaggagaaataatctaaatacccaccagtaggagatgggtgacatacacacgtgatgaaatgtcaaccatccaacgtttatttggataactgacaatagctactgaatgtgtgttgtatgtcagctactgttctaagagtctattagtgagcaagacagaggtttcctgcccccatggagcttacattactgggttacgtgccacatgctaacaagctattaaaataaggct

SEQ ID NO: 30718 - DNA, 3092 bp, Bovine  19866880671337
  misc_feature (1)..(1): n is a, c, g, or t
nctgttggtccattctaacttttataagtactgaatagaattacattaaatctttgaacaaaattgaatctaacataatctcaggtttcagggtttcagatttctcaagttgccagctttccagaggtctcctggtgggagcatcttttctgaagctttgggaaacttggtgtcctgtgacataggaccaggaacttaagccagtgaggcttttctaagggaggtattgagaactgagttgccctgaaaggaaaagtgttagttgcttagtggtgtctgactctgtgacccaactgtagcctgccaggctcctctgtccatgggattctccaggcaagaacactggagtgggtagctattcccttctccaggggatcttcctgactcagggattgaacccaggtctcctgcatggcaggcagattctttattgtctgagatccaccaggagcttccctgagatgttggcatttagacaaaaagcagagaaggaatggcaaggagatttcagaagttgggttgtgcaatgaactaatgtcagatcatggcccagaccccaagtcacaggcctgcccagagactggagagagcaggttgaaatgttctgaacataaaggattgcattccaaatgtatcttgaagtaggagaagtaagttgccagaagctcatgttaagaagcaaaggaacttcaaagagctataatactgtgggggaattttaaacagtcacatttcctgagctagtctttcttctgagaaacgtcttgtctttcagaaccatatggcagtagcacactcgatgtataataaaatccttggttttggtaattatgatgaagctgttgccgtgttaaatgatgccacctgatggattgtgagcacacaagtgccacactcagcatagctgggagtttattatttttaacaatctctgaaggcccgagagggaatgaagcaagtgccaacggttgctcttggccagcttacggctcagagaagaaagagggaatgaggaggaggacgaggaggaggaggaacaggataaagagaagaaaatgagatggagagggggcagaatagaatctatttttctcttttgataaaagtcattataccgtcaacagaagctactttaagtagagactcgatttttcacggagcagagacaatctgcatgaagacggtcagctgttaagagtgccacctcctggtatcatctcttttcagagctgaggtgtcaacgtcgtgctcacggggagcagaggaggagcaggggtgtggaggggaggatgaggcttcagtgggtgaacatctttgtttacaggaattgatcctccttttcccacccccagactgtatacacacacccaggagtctgtccttcaggggaaaagaaatacaccagaggggccgaccccttcttttgtctcacccacttctcttttgccttgtatctgatacatttgctttctacccttccttctgactcggcaaattcttttagcacttgcattgccagtcccattgccacatttcagggcatttttggtggcacatctctcgcctctctcttccctttctgatctgtcttccaatacagagcacaaagcccttctctgctccccctaccatttcttggattacagggaacagccctcattcagcctccatgaccttccctgagttccatggggcagattcaagcagctgttaatcagggaagggaggggatgtaagaccagggagaaacaaacagagaagagaaacagtagtgcagcctcggggcaaggtcctcctttcccatcaaaggatacacacaacaatatctttgagctgttttgcagatactgaaacccctccaggtgggagaagttaacaattagtgatggtatgctgcccacaagcatgtagaccccagacctgaaggttgatgattctgactcctttttacctcacccaccaacccatcggaagaatgtccacaagccaaaaatatttgccctctttggacaattactataaaacttctcactatcttctccaagttgggacacatagtgttttgaggcaggagcccactgtgtccccctttgtctggcagagtaataaagctattcttttctatttctatctctgagattcgattctgtacggatgcacgaagaagctgagattttggtatcaattggcctgcagactcaggacaattaaaggtccctggttgaggctactcttcagcaggacccgaaggcctctgggatgggactcaactcactggccctaacgtgcattgtggagatgatctttcctcatcttcaacactgccgatggtctgaggtcgctggagatggggattgtacaccctggcagaggtgacttttggcagatctgaaacctggttgaacactgactgaccatccctgactgatcaggtggctgtgtcctttggccctaaccttggggctgctcgcttccacgcctggtgcagtcagcagcggcaatgtatcctggctaattccaggagtgccgtgagatcccttttccctttccattctcccttgaggacagtccacccagatctgccaacatctccagctactttaaatgaattgccgcaaaactgactttcttccatcaagctatgaatgatgacaaagattccaacctctggaaccaatatactcttgaccaggcctcctaaaatttctattcacacacactcccttagtcctattgttgattagcaaactgggatcccacaccaccctttctcagcagaagggagcccaaggtgatgtcctcatgagatgtcgatggtttcactttgctgatctctcaggggagaaacgtggaatgtaacaatagaacagccatcttaggctggggaggtcctttcaagataagacaatcacacccttccctaatggaaaattaccagcagtcagaagtagtcagcattcccggaagattgaacagcaacacgcccagccctaaccaccatatggatggaacattaacccaagcatgaccagaatgggccattaaagaagcctagtttctctccccgacagcagaacccctctggtctcttc

SEQ ID NO: 30719 - DNA, 2806 bp, Bovine  19866880705666
  misc_feature (1)..(1): n is a, c, g, or t
ntcctcctatctctctgcctcagcttcttctagtcatgttgaccctcataattccaagatgctggcagcaagaagctccacaaatcagccaggcccaccagccgtcattagtagagataagccaaagctttcagagtctcctttccagaaggagcaaagcatcctttcccagaacctcctgagcagacctgccctcatatctcattggccagaattgagtcacatgctcactcctacaccaataactagcaagaaacccggaactctgtgactggcttagatttcaccacttctggttgtctgtactgggcccggtggtgtgatgaagcagaggacgctaagccacagagcatagtgacccaagctccagaccttgaggtggggggacgtttatgcaaggttgagcagcgacccctccatggggctcggggaagggcatcctccaggagagctgcggtcgcattagaggagaagctagcaccgggatggttccaaaggcgtcccgcgctggtgccaagtgttacattagctgctggcagagggaggtcctggcggtgctggaggcttgatggtttcgcagtctgggcatcgcgggggcaggtgtggctgaggcctggtctgtaggagggaggccgcgagggcacgggaaactgcacagcctgtttcaaacactcagcccacacaccacacacgcgcgtacccgtacacgcgtacagccttgcccgtttacaattgtgagctcttccaatggcacaacgcagcttttaagccaaagtgccaggcaaggccctggttcttcttcagagaagtacagaagtgttaattatatcttactgtccttttgacattttcaactggacatctcagaagctcccagtacccaccccctggaaataactgggaactggctgggaccctctttctccatgccagtttttccagcgggatggcagggcttttacatgacagctgtcttccaaaagggcaaaagagtagaagctacaggctttttaaggtctgggctcagaggtcctggaatatcactttttcccccctccaggtcaaagcaagttatagggccagcctagaatcaaggagaggagaaacagacttcatctgttgatgagaggaatggtgtggggacacagtgatgagaagccttgttggtggccatcttagaggaggaaagctctctatacagaattggtgagcaggggtgcgggggctcacgcccatgcctggctgataccaagtccacacctctacctcactgatcacatcgcgggcttttccagctggaaatgagatcacacagtggtccacaaccttcaatgtcttaacgtggaattcccaagaagcagatcctgaggccccactggagcatcagtggcttatttgggtggaagccctgatagataagtggagaagcaaaacaagatgggaactattaaatgaacagatgacattgtggcaaccagagctcagtcttgccagggacttctgggaggtcacgtggcgctctcctgaaggggccagtaagctcgtatattcatcctcccatttcctactctcctgcctagatcccatcccagactcctggaactggcgattgagttcctttgggggcttgttcaggacaacttcattgactcccagttctagaggcttcttattggctagagaggccttactgctggttaccctggagccacatgccacaacctgggtgagctctttagcagctgatagaactctagacttttctaaaacgacaaacagtactctctccttgtacccgtaggctgtcctgcctggctgtaagagctgtaattagaacttgtggtagactggtgctttggtgactgccgaagatctatgcctcttagtatagtaagtcccctaaatatcaaagagtttccagtcctagagcatgttcacaagtccaatttgttcctaagtccaacaaagttaatctgggtgcccaactaacacaattggctatatagtactgtactgtaataggtttataatatttttcacatattgttcagtcactaagtcatgtctgactgtttgcaaccccatggactacagcatgccaggctcctctgtcctctagtatctctaggagtttgctcaaactcaggtccattgagttggtgatgccatccaaccatctcatcctctcttgctcccttctccttttgccttcaatctttcctagcatcaaggtcttttccagtgagttggctcttcataccagacaggcaaagtattggagtttcagcttcagcatcagtccttccaatgaatattcagggattattttctttagggttgactggtttgatcttgcatttttcacataaataatacataaaaatcaaacacagaaaataaagaaaacatttttaatcttatagtacaaccttgaaaagtaaagtagcatattataacagccggcacataggggatggcatcgagtgaacaggcaagaagagttactgatggaggaggtgggagttggtagagctgaaggatcatcagcaatagaagacagaggacaagttgaggtgtcactcatgcctgatgttgatggcacaggttctgattccttatggagacaattctctctaccctcttgaaaaaatgattcagtgatgtctgggtggtagctcttttttttttttttttctcatcatagatgacatgatagtgctggattgcattctgaacagctgctgcaaccttcatgtactgttccacatttgggtcttgtgtctcaaaagctaacagtgcctcctca

SEQ ID NO: 30720 - DNA, 1140 bp, Bovine  19866880722378
  misc_feature (1)..(1): n is a, c, g, or t
ngcttttgtgtatggaatgtatttcaatataaccaaatcattgatgaaggaaagtttgtctttatagaggttttccagcttgaaaaatgaaggaataatggaaatacaacatcatcattttgcagtccctaatgcagtctagatgatgatgatcagtcactggtagcatttcagaaagaaaagtgggtatcatggaagcaatggaagtaagatctataaagcatcattgcaaaaatataaaccctgactcttagcaggtcactagatttgacatctggttaacaagaaatacaggagggaaaacaacatatgaaatgatagtgtggcgatgtagtcagtgcagtctagatataggaactgtactacaaatgaccttatgtctttacataaagtatataaggggacaaagagggaaaaggaacatacagattataaaaaagtcttgagaaaactgaaggaatttataaaacatacctggatctgatttgagcaaaccaacagctaaaaaggaaaaccagggagatttgagtatttactggctagctgatactaagaagtttagaggttttgtttatttgtatcaaggtagtatttttaagtccatatcttttagagaaacaaactgaaacatgtccagttaaaatgtgatatcttgataaaaaagtggtttttttaaatgttttacagttaaataatgtgattattttccatctgaaataaaaactaacactcttgcagccttacccctcgtgaattcaactcttatggagcccgaagaggtaacgatgctgtaatgacaagaggcacttttgcaaatatcaagctttttaataagtttattggaaaaccagctcccaaaacaattcattttccatcaggacagacggtaaggatatatacagagtgtttaagcagttgctaactagattaaaatttgtattaaaatttttatgtttgttttaatctacagctggatgtatttgaggctgcagagctgtaccagaaggaaggtatcccactgattattttagcagggaagaaatatggttcaggaaattcaagagattgggctgccaaaggaccatacctgctggtattgcttcttaaattttatcttaaagttcaaagagttttaaatat

SEQ ID NO: 30721 - DNA, 1681 bp, Bovine  19866880727098
  misc_feature (1)..(1): n is a, c, g, or t
ncccctcaccaccactggttctccataaacctccccagagcttaggcaccgttcagataaaacagggagggaaaattccaaattgactgcgattaaatttctaccacctgatagaagagggctcatcagtgaaacttagttcagttacagaccactgtcagttatggactaagttcaccctcattacgataacctcctaggaccggagtgcctctccctgctattgctgcttctcctgcactgtcaccaccatcaggccacctgccgaggagcaggaaagggtgccacctcacctagggtgagaacaaagatatacctactactggggatgtggcttcctcttccttggtcaagggtttctgatttttaggttgagccattccaagtgggtcgggttggggcatttctcttgactccagcagaaagcgctctctgattggctggagccatcaatcaccccactcactcatccaattatgcctgcagttctaccctcatctggaaagaatgaaggcagcaaagcactatggtcgtctaatgcaaaccatttgtgtagtcagaaggaaaatgggacgtgattcacacggactttccagcttcttttttaagaggcctgctgtcaataaagtgaaggcagggcattttgcagaaaaaagggacatttctggtcagcctgggttcattctcccgcaaccatctctggacttctttgggaagcagggtctgatccattcttggttccctgcagatgagctatgtgtgtgtataaaaggtcaggagttttagaaattccaagtgtgtgagtttcacatcatcttaatttctcacaagccatgtgccaagatgcaatgatgtatttcacacaccaaagaacacaaaggaaacatttaacagttatcatgttttagtagattgtaagctccttgagggcagacatgtttatgattggtttgacctcccagacctagcacaggcccctaggaggcagatgcagagttttatctcaacaccccttccagcctctcatccctccatgtatcctctgcctcaaccatccttggactgccactcttctgccacaggacctttgcacataccttccttaagcctggcgtgtcctccctcccttacttacctagttaacctctgtaacttctgagctctcagctcagacatcacatcttcagagaagtcagcctccctaattaggccagtttctgcaagacagattctcattccaggctgtcaccttccttgttgaatctgccacggttgtcattttatgctttttcacgtgtctctttgatgaaggtctgtctccctctccactttgccaagtctaggaggacttaccaccatctcccccactgtcctgcctagctcctggcacttggtaagtatggaatgtattggtcagccttcactgagcacctggtcctatgtaccaaatgctgaataacccccccaatgggtattaccctccctttgcagagaagcaaactgaggcccagagaggaaagaagaattgctcaaagttccatgctttgtaagggccagaggcaggctttgaatccagtttttctgacccaggtaccagcattctttctgctgcctctctatgggttggctgaaggactgacctgactacttgggatggacggcatcaatcttgcatgtgaag

SEQ ID NO: 30722 - DNA, 3039 bp, Bovine  19866880734469
  misc_feature (1)..(1): n is a, c, g, or t
naattgccgggaaaatgacagctctgggcccacatgaaaggcattcttgaaaaatctctctcccctccctccttcccctgctggagaattttgtgctgtgagttattgcagcaattggcagtccggatgggtttgagtagagggggctgggctttctcgttgctttattgctccaatgtgtgcggaatcaactcagtcctctggcaatctttcctcccagcctcttcatggaatgaagatgctcagagaagtggaagccatagacaaagagcctcagtttctttgcagtttgtcctgtaaagcaggggtccccaacctccaggatctaatgcctgatgatctgaggtgaggctgatgtaatcataatacaagcaaagtgcacaataaatgtaatacacttgaatcatcctgaaaccatcccctgctaccctggtctgtggaaaaattgtcttccacaaatctggtccctggtgctaaaaaggttgggaccactgcggtaaagctcccctgcacattgcagacctcctagcaaatagagagggtgagggaagagactggggttgggggggcaggttgcaaatctttgcactgaatccctgctccatgtctcccagaagtgacggccatggtcatgaccaaggtgcatccacagtagtgggcctggccatgaggaagagaaacctgcaatgtcagaccaaggacttcatctggacaagaacgatacttaatgcttatgcatttgatctcaagtagatttttatctgtccgtggccactccaggggtgtcagggaatgtcacatatcacacattgcaggggggcaggggggggtaattgtatttccaacaccttcctgtctgaagagcagggctatccaataggacttcttcgaggaagaaaatgttcaatatctgtgtcctcttaggatggaaggccctggtcacatgtggcccctgagcacttgaaatgtggctagtttacactatgtcttgaatttcaactaattttaattagtttgaatttaaatagccacacatggctaggggctatcatattggagagggtggttctaatgactagcaacatcagcatcacctgagagcttattagaactaagccccaccctagatctgttgaatcagactgagcattgtcacaggatcccaggtgaagcatattagcaattgagaagggtttctctggagcacagtcaagaacaaaggaggtgagaaaacagaaagcaaggaataaagctagtggacagaaagaacaactatcatcaaatctttgtatctttcacacagcatttatctggggggtattgatgcttactttggagtccattctcacagcactggctgtgggatttttttttttttcccccagtctgcagtagattggaagcagcagtagaggcaccatgggagcatctttgccgtctctaatgccacttgtttaatcagcataaagtgtctgtgaatataaggatcacgataaccagagccatttgggaaggtgaggtctggaccatctccctaagaccacactggagtctctcagcttgaattctgcaagccagggcagcatttcagaatctcatttttaagtgcacgttagtgtctgctgtaatgaaacacatgccgtagactgatgaaatttaatgttcaagctaaataataaaatcttttatttatgggcaagttttacgtctccctgaggggagataagctagtgtacaagtctttcccactttccctgggtctgatgtgaagccagcttgttcccccttgacatcacaggggaaatatgagtcggagggaggtggaaggtcgggggagaggaggctctatatttacaagcctgtggtatgatgcagccagatgcagattctactgggtttgtgggtgtgaggacattgagggaagtagttaaataggacttacctttctgacctcagccaagtctccagaaggactcatggggagggtcgcactggagaaattttaactctaaagagaccacagatgatcagacaatgctagaaagggctcccagccctcacagaccccatccttcactgataagcttgctctttcattccaggagtctatcagcaaataagaattgagctccttccatgtgccaggcactattctaggtggtaggggattaaacagtgtgaaacaaatcagagaagccctgtcctcaatgagtctgcctctgagtgggacacagacatgtacacaagtaatttcaggaactgagaagggttgtcaggaggataaaattagtagagaggcatgacagcagtccaagagggcttcatggaggaagtgacatttgcattatatccttagaggtagtgagaagaaggcagtccctgaaggtgtgagggaaaggcacttcaaggaggataggagtgggggtcggggggatggagtgaatcatgccaggccagagtggtgggattttattctaagcgaaatgggaaaccattagaaggccatgtcttaagaagaggagtggtatttcctacgcttactgtggttgccatatagagacaggactataactttggggggaagagcagcagcaaggagaacagggaagaggctgttgtgttccagatgacagaggatggagactgggttgagggttcatagtggaggtataagaagaggctggatttaagatatatcctgaaagaggggcagacaggtcttcctgtgacctggatgcgtgtgggaaggtcaagctcaggtgcctgaataaacgggtgaatgatgccatcacctccggaaaggaaaatgtttggaagaggaaatcagtgtttctctaaatctgagatgccattaggatatccaggtggattaacatttaggagtctggtgtgcaagttcttgagatttttaaaatgtggtcgtagtcagaatatagaaaagattgggagctacaggactaccagaaaacaaagaatgcctagggagggataagattaaagactgagcctagagggacaccaccacctagaaatctaaat

SEQ ID NO: 30723 - DNA, 3808 bp, Bovine  19866880734630
  misc_feature (1)..(1): n is a, c, g, or t
nttccggcaccaccaccaccaccatgagcaggaccacggaaggaagtggcagaaaagcctcaaaccactccaacaaccgccccgcactgctgcgcggaacccagaatcgcgcgagattgtgggtcccccgcgttggtgtggcgggagggagcccaggccgctgcacccttgtgggtagctcagagaagggtggactgaataaactccagaaccctggatatcagcggcctgtcttgcagaaaagtgagactttgcacttgccggcaggctgggagggccaagtggaggaaatcgcctcttttctccctttaatccgaaatatggcccaaacctaacgccccctcagtgcctccgctacgaaagtacaaacatttcaccacagctcttagagctttgcacgcagaccctataattcccttccagtctcttcccactcttctgccctcagtatgcctcggcaaactgcacaacccaggattctgggacctgccaggcatcttcccacctctaacatgcctgctgtgcaaccgtaggggaaagcccttttcctcctcgggtaaataaaatcttgctcactcacggaagtccacctttatgccatctctcttgaaattcagcttcctaatcaaatatgatgatttttctctgaacccactgagttctgtgtttggtcctgctcttgtttaaggtttaatcctgctattaaactgaactcctggagggcagtgattgagcctttgtcaacttgtcctctcttccacaggcttagccaggtggggctcagtcaataagcattgatctgaggagggtgtatgtaccctgcagcccagaggtagtgtgggggtgaagatccccagagggactgcaggaattgagtgcctgctgaacagggctctggacctctgcgggtgcctgggtctggggtcctgctctcaggccctgaggagctgatctagaaagcagctgaggacaggagaggggagaggggctgtccccagctgggaaagggtgtgggaagggcctctgtgtagtccacagagccatgcatttaggagggcctggcgtttggttcagtgctctcctactgccatcttgaagttattaaccacttttgggcaaggggtcctgtattttcatgttgcaccggatccacaaattatgtacctgatcctgagtgtgggaggcaaaggctagggctgccacagaatcaagcccactttatggagggtctggtgtctgcacagtgagggggcaaagtggaggtgccagtcaactaacgcagacctctgcccccatctagctctcctccccaacatggcctcctcaatcttcagaccaggctggggaggggttgaagcaggacagtggagggaagtaaagttgggagtcaaagccaagggaaagccttgaagtgactggcaggtattgcagcaaaggcactgagtgggcaaagagggggaaaggaaaagagacaggatggggagtcgtggtgcattgcccaggcactgagcaagggtgggagagggtccaggaagaggaggggaccgctagttcagagtgcaagctggtcccggggtcctgtgaacccactgtccttgttaatgaagttcagaggtggccagggcagacaggaggagctaagacttcttagatgccccaaaccttatcagagggcacatggagaggggggaatgcagctccctctctgacctggctactaggggaatgtcagagcctggggggcagcacaaaccccacgagggtggtatttctgagaacccagcctgagaatccagagcagagtccctgctaaggagaggtcagttggtggcctgggccaaaggacagataggcagaatcaccccgacttctctgggcctctctgctctcctccattccttctcttattttactcttccatccactaatcttgctgagttcagctctggggatggtgaccaatcaaagtccaggctctgtcttaagggcccaccatttacctggggggaaaatcctaggaaatctgttgtcccgtgtgggctaacagtgcctaaggggcaggcttttagcccagcgtgtgttgagcctttagagtcaatccagaggggctgagggagtgaggaggtctgattagaaagagcaacgtgtgcaaagccaggagctgtagaacagggctgtgggtttgaggactaattatcctttggggcagctggagtgcatcatctgaggagaggggagtgaggctagaggtgatataggaggtgagcagaagtcactccaccaaatgtgcatggctatgaagtggggttcttggagggggcatatagaagggttttaggagaggtgagccgtagtcctgtagcattttagcttcagtatggaagatggatcagatggggcaagcagaggtgcttttggcagtggagattggcaggggacaaatcagagaacagtggttcctaaatgccagtttgggacttgacgcaggcatcccagcaggctggaggggctttctaggaactcagattcctaggcccaacctgggagctttggattcagtaagtcagggtagggccgctggaactgtgtttggcaagttttctcctctgtacggtcaggttggctctgccatactgtatgactggctatgcctgggagggaaggaaaagtggaaggaagggaccagggtgaccctagtgtctgggttgtgcactggatggtctcatttgctgctgggggagcagcaggagatgagtcctcaggatgtgttggctgtgagttgtctggcgcatctaggacccagcagacagtgggcagtgtggtcccagagttccagagagaggtctgagataaggacaggggtgtgggtggtcgcatgctggggggcagttgaagacatgagtgtggatgagatgcccagggacagggcacacatagaaaagagcagactactaaggtggagcttggagactctcagcgtgcagggggcaggtgagcagggcagagtcaagcgggaggaaaatcaggggctcatgtcctaccagctaggacacagcctgtgtacaaaagaaggcatggcccatcagtgccagctgctccagggaggatcgtgaaggcaaggcagtgaacgcatgagtcaggtaactctaggcgactgcgaccagagcagtttcagaaggtggtggagtctgaaaggctgcagtgggttgagtctggaatggaaagagtgaaatggaagtggagaaggtagactcttctttagaaaagcaaggctatatgggggaggggagagagggcttagcagttatgagaggaggcggcattcaaaggactactgagggggggttcgtttgcatgttggatggaggagtttgatatttataggctgaaggtagagactaaagcaaaggtaggagatataggagaaagaagatagatacaggtggtaaaggggagagaggactagatgcagaatgtaggtggagatgtctgccttcagggggaggcaggaggaaagggagccagacatgaagggagttcctaagttctctccttgccccataagtaggagatggtcttctgcaaacttagaagagccccttctgaaaatgggagaggtgactcaggctgcacaaaagtgatgctgggcacgaggcagggttccagtgaggtctgacaggactggggcagagagaaatggaagggcttgagttctggatgtcctgtgaagctgaagaacatgtgtactgggggacagcaagaaagggccaggtcagagagcaagatgcggagtttaggatataagcca

SEQ ID NO: 30724 - DNA, 825 bp, Bovine  19866880775613
  misc_feature (1)..(1): n is a, c, g, or t
ncccatggaatttcccagggaagaataccagagcagggtgtcattttatactccactgagcacccaccttcccagggaagccttccttgtccccacaccctgcccattctgttcccacttggtcgggtccgcttcccttgggctcttgtcagccccctagttgtcactgtatagaaccagcctctttgcctgcctgctccctgccaaagggagcttcctagatccaggagcacagttgggcatgctgatggtgtcccacaccttgccttccccaggcctgacacgtatcaacagctcagttacacactggttgaatgattgcatggccactgtagctcgtctgcttgaacacttctcttgccctgtgactaaaccaacgttaattcaccaccttcagtgcctcccagtccccactctggaaaacaatgctgtaaatcacttgctgggtgtgactgaatcatattttatcctttcatcctttttttggccacgtggcatgtgggatcttaggttcccgatcagggatcaaacccacaccccttgcactggaagcacagcatctcaaccactggactaccagagaaatcccaccctttccgtattttcaagcctttattttccttttccagtacttcctgtcataagactccagataaagtaaaccacgcagtgctggctgttgggtacggagaagagaaagggataccttactggatcgtgaagaattcttggggccctaactggggaatgaaggggtaagcagcttctaggtcccatgtactgagagggaggcgtgagtgcctaggtctggggggccctcggtgg

SEQ ID NO: 30725 - DNA, 2923 bp, Bovine  19866880795920
  misc_feature (1)..(1): n is a, c, g, or t
ntcaaggcgcgtggggctgagcgcagagctgcagtctccgcctttgcagcttggagtgtgcccgctgtgccgcagctgtccgtgcctgccgccgccttcccgccgccgccaccgctgccaccatgcccaacttcgctggcacctggaagatgcgcagcagcgagaatttcgacgagctgctcaaggcgctgggtaagctggcccgggcagcgcgccccgacgagagtagcggccgaaggcgcccaggggcccgcggggagtcggctttagggaccaacaccaggcaggagggagtcctgggtgccttagatcggggcgaattccaaggagcatctcatctagaagtggcgaggagagcccgggatccactcatccagcgaacgtttgctggatccttggcgctttccccgacggctcggtctttatctcgcgctagatcatcgcgaggagagattattactgaaatcctgggagggtcagggactttaaatttgggaactcattttgagaccaggccctaccacgtgctaccgaaggaaagccatttaccctctctgagcctcagtttctcatcttgaaaatcagggcgagagccgggggaggaatggttcatttgtaagtcccccttctgtagtcagagggtttgggaaatgtcgggccaattctgggacaatgggcgggtgacgagaccccgtgacccgaacccgggtcttccccgttcttcccggggcaggtgtgaacgccatgctgaggaaagtggccgtggcggctgcgtccaagccgcacgtggagatccgccaggacggggaccagttctacatcaagacgtccaccacggtgcgcacgaccgagatcaacttcaaggtcggagaaggctttgaggaggagaccgtggacggacgcaagtgcaggggtgaggtcccagagtctgggcagccttcccagatccctgctccctactcaggaaccgttgcagccagatgagaccctcgtctccttttgcagcctgtggcgctccttccttgcagggcgtgtgcaccggctgtttgctcagaggatctgtgcaactcgttgccctgggctcaggagaaagtcccaccccagcccctcccaacctcctccctaaactgcctcccggggtgctaaccgccgcgcttaaagcgcgggctttgggttacaccgcgttccctgcaggcgtttctgcggcattttgcagcgatcctcgcgcgagcgcaggcggctggggaggaggaggaggtggctgggccgcgttgcctggccgtgcggctgccacgtttcctgtcgcaggtggagccgcagctcttgcgtcccgccctcccaggtccctgggcccttgggaatgctctggatccagtttcagcagtcttgatggccccggtacctctcctgccctccctcagttaggttccttaaaggaaaagacgaaacctttccaaaagcaaggcagattctgcccggaaaatggactgagtgccctcttttagtcctcaggggcaagaattctgtttctctccgtttatcggtcccagggatgaatcggtggactgaagcaagaggttgtaaatcccttttttagatgggcaaagtcgcattcggttggtctctggaatagaatggaaggttggctacccatgtattttgaggacagatggaaaaacaatcgctgatgctaccacttacttaaaaagtgacaaaatgatctccctcctctcccccaaggtttgaaaaaagaaaaactcatagcattccagagagtgagaaattgtttttcacctttccggagccgtgcctgtctgatctagagtgagactctctgggcactgggtttgggaggacatagagacacagccccccagaagcatcctggcccacgaagcaatatttgacccccagagttgacacagcctgaaaatgatatctgggcttggagctggcaagatccaagccctcagccactgctctgtttgcaaaaacaaaagagcaggacatctcttcagcgtagagggaaggtctgggagtctaaggtaaaaggcctggcaataggcagaactcagtttgggtacatccaacagtgagtactgctggagacagtaattctgatcagaaatcaaaggttcacaggacagcctggggagcggggctttatccatccccaccctgcctagtgaacgtgtcccgtgtgttagttaaaaacccagtatgtgcacattcagtacagccgcctcgcccaactgtatagcattttgcttcatgcagaagccagggaaaactacaggggaatcccttctttgcctcctacctctgacagcatgaagacccttcggatcttaaaaaaaaaatttttttttttttcctagagacatgtaacctgggaagtggcagtgtttttattctcagagtcagagaaactcaggattatcagagcaggctgtgtactgcatctgctgagtgcaaacagaaagcgaggcattatccccaaatccgtgcaaggaacaggtcctgatttgctgactagatgtggtcacaaatatggtgtcttaaccgttctaaaattttgtatttctgttgtgaagctttttgccctcaacagccaaattgcttgaagggggagcccattttgacataaatgaatcattttatgctctcaattttattcctgaagatgtaaggcatgcctgaggctttgctgcttctgtgtgtgtgtgtgtgtgtgtgtgtatgtgtgtgtgtgtgtaatataaggtatatttatactcccataaaatctgtggtcagccctctgaatttgggcttgataaggcacagcagagaaggttctgtgcgctgctgacagggaccatgtgttgcttctctgcacagcaattattctcctgtgctcattgttgatctgctccccgctgcc

SEQ ID NO: 30726 - DNA, 2788 bp, Bovine  19866880829740
  misc_feature (1)..(1): n is a, c, g, or t
ntgacgttgcaaagggtcggacacgactgagtgagtaacacattcacaaaggaacatgtctgatccttttctgagggaaagttttattttcaaagagaatgggaagagaggttggaagaagaaaaagaagggaccagaagtcccaaaccaattcttactcctcaactcttgccaaggccacactggactcggacacaggcttttttgctctgggccaggacatttaaggggaagacaaaaactagctgctgaggctacagttaggttgtctaagagatgtggtcattttggcccatgagatacctgcagagagacagtgagctgtccctggctgctgccaacccagaagccatggccacccagaagctcttcaagtcagatgctatgcagatggacaaccatagcacagactgaagggctgagagaagccagcagggtccagtctggctccgagcgtgcaggtctagatgcgttttcagaggcatctttaatttgtggaccaggttggctgcccctagggcttccatggtggcctggcgggctacagtccgtgagaccacaaaaaagttggagaccactgagcgcctaacactttcactttgacacaacatagtagaaacaaggtatgtacaaaaataagcacatggtataggaacaggtacagacacaatgcactctgccactgtatgcatagtagtctagattatgggatgcctctgggctatgtgtctgtacagcaatgtataaaatgtaataccaagtgtggcttgtggtctggagctcagtaaggagaactagatggaaaccggacggccacgtggagagcgcagacctgactcttcaggaactgtggtgcgattccagctccagcttcgacgctcagtgactgactgtcattcaagggggcaagtcacttcccctctctgggcctcagtttctttgtttataaaattagacagttggcctttcgtgattcctgagtttcctcccagctctgagaatctgtgagtctataaagacggtgctgcacagaggtgcagatggacctagagtgtgtcatacagagtcaagcaagtcagaaagagaaaaacaaatttcatataatatcacttgtatgtggaatctggaaaaatggtacagatgaacttatttgaaaagcagaaatagagtcacagatatagagaacaaacttatggacaccaaaggggcaggagcagggggaggaattgggcaattgggatagacaggtatacactactacatataaaacagataactaacgagaacctgctggacagcacagggaactcgactcagtgctctgcggtgacctaaaagggaaggaactccaaaaaagaggggatatatgtatacatatcgacgaagcactttgctgtacagcagaaactaacacaacacggtaaagcagttatactccaataaaacgttttttttaaaccgaaaactgggggaggaggaggcaagggaggcaggcagcgaagacaggggaagggaagaaagggaggcacaaacagaccgaaccgtcctgccaataagactccagatcccagttttgaagcaccgctaagaacaaactgatgaaggctctgaattttcacactggtggagcaaggaggagagaccagcggtgtgaaaacggagtccttcctgttctcaactgcatttcctttgcaagtcaagataattaagcctcttgggaagttgggaaaacattaacacctgatattctagtttaaattcattataagagatgtaccaaagccttatttaaccaaagagttctctcttgtagcttgtcgtttacctctagaaggggatgggggaacaagcatggagctttgatttgagaatcaggtgttttcctccaggcacgggcatcaggtcctctgcccaccctctgcccctgccaccgccctgaggagagctgccagctcttcccgccacccctccccgccctttcagagcaccactgggcagagcctccttctctgacaccatcaagggaccggtctccactgcccaccacctctgtcacatagcccctctcctagagcaaagctgtttccccgccctcagcctcctgggatcctcatctccatcctgggggcttgtagggaggcaattattgtcccattttgccaagagggtctcccccataagttcttagggacttaaagaacttgtgtgaagtggcttctgagtttgaaacaaaagccactgtctctaagctgtcacaccacttaccagttgcatccagggaacctggaaggtcatgtcagtagattccagactgaacagtgtcctctcaatttaagtgggaggtcattggtgaccccagagaggcagccggctcctgtgggtgcagcatcctacttgccctctccctctgtccacagctaccggaccctggccacggagcacgaggcgctgatgcaaaaatacctgcacctgctgcagatcgtggagaccgagaagacggtggccaagcagctgcggcagcagatcgaggacggggaggtggagatcgagcgactgaaggcagaggtgaccgcaaccccgggagcagaggagtctggccagggatcccagcctccaacctcacacccgggctccccaggttcagggaggcacagggtaggcaggagggaccctctcccagccacagctatgccagccccaaacttaaaatcagtgatgctggcccagtggaaaggtcgggggtcagatctgggttcaaagcccacccctgcctcttaacagctgcaac

SEQ ID NO: 30727 - DNA, 2303 bp, Bovine  19866880856636
  misc_feature (1)..(1): n is a, c, g, or t
ntcagcttcagcatcagtccttccaatggatattcagggttgatttcctttaggattgactggtttgatctccttgctgcccgagagactctcaagagtcttctacagcaccacagttcgaaagcatcaattctttggcactcaaccttctttctgaagaataggctttttatcgctagctgacaaggctgtgaagatcaagtgaggtcactgattggcaagctcctggttaatcttctgacaaccacatggactaaggggcaggtgtggggccagagcatggctggtaagtcctcagagtgtgggctcaggctcagctccaagacgatcccttccttctgcctgccatggccatctggaggctgattaagtcttccaaaacttctagaactagtcttctagtcttgctaggttaagtcttctagaccttcactactcaaagtgtgatatggcccatcagaaatgcagaacctggggtctcacccagatatcccgagtcagaacctgcactttaacagcatcccagcaattctcatttacctgagagatgctgactctcagcccacagatacccctcgccagctgttcacacctccacatgatgatctgatcgcctctcacggcctcatctcaccaggaggtcacaatgtgtgttaattgctcagtcttgtctgactgtttgtgacccccatggactgtagcccaccaggctcctctgtccatgggattctctgggcaagaatactggagtgggttgccattcccttctccagggtagcctcctgacccagggatagaaccccggtctcccacgttgtaggcagattcattaccatctgagccatcaggggattcccccaaaatgcaggggcatcaattctgcagcactcagccttttttattgtccagctctcacatccatacatgactactggaaaaaatcatagctttgactgtacggacctttgtaggctacagtccatagggtcccatagagttggacaagactgagtgactaggcacacacgcacagggaactgtatcccacatgtcgctagacaagatcaaaaaacttaagggaaaaaaaagggaggaagaactgagctgtgtggcagctatctgaaaaacaagaattacaaaggtcttagtaaaaccttggcagttaacaaagaggaaaacacctgggttaattccaccgtgaatgactgctctgaccaaatgcattctggactaaagacactgcctcttgagagggagcagggtggggcagaaaccgatgcaccctgtctcaaaattggggtggcaagcggggttttcctctgatggatcaaggaagccagaccactggtggcgagtggacagggtccagcagagacacctggctttgagcctggtcaggcagccgaagctagactctagccagtgacttgggcgtgagccaaagtccccaccctgcgtggccttcattgacaagggtcaactgagcagaccctggacatctagcaagcaaaccgaggtccaaagcagagccatctccagaagagaccggccagggtcggagaaaggctgcctccgtgggctcacctgacccttgctccaggcagagatgggccatagcccaggacttgtgttggggtcccaggcttgcaactccctcactagagctttgtcccccaccccagacctgatgatccttgaacagaggctccaaggctgccagtgctactgtgcatgcagcatagtgcctgacctaattgcatctattttttgccctggtccctgctgagtggatgtcctggaatgcctctttctgagacaagtgccaggtttaaatacaggacggacacacacacacagcacatgcacacacacaacccaccatgctaaagaaaaaaaaaaaagtggttccacgtgcaaagctcaaaagtagcaaagaaagcagaaggtgataataatcaggtcaaatgcgggcattgactgggcattcctgcatctctcagctctctaagagcctgcctgtgcgtgtgtgtgttcgcatgtattcctcagccctttaaaatacagatcaaagaaccagcctttatttcactgtgcagatgttcccagagaatcgaaataaaaggtggggggtgggggagaaagaagaaaagcctgtgtcggcgctgaatatgtctcagttagatattttcagccgctcttcaagcataggctggggtaattttagcaacccgagagtggagagcgggtaactgttccattttgctttcagagtgctcaattcgctcaatgtagagcccattcat

SEQ ID NO: 30728 - DNA, 1841 bp, Bovine  19866880869328
  misc_feature (1)..(1): n is a, c, g, or t
ngttacagttatgttaaagtacttatctccttattctaacatctggatcacaagtgggtccacctttgtttttttccccacttgattatgttcacaatttcctgtcaatatgtctattgtgtttttttttggggtagtgctgaataggcagaatgaaaagggtgggaacctccacacctcaacattctgtgctatgtgctaaatcgcttcagttatgtctgaccctttgacatagcccaccaggctcctctgtcaaaatggggattctccaggcaagaatgctggagtgggttgccatgccctcctctaggggatcttcccaacacagggatcgaacccaggtttcctgcattgcaggtggattctttaccgactgagccactagggaacatcctaaaattataaaaatcacaaaaatcacaaacaaaaaatcaaaatccccaaataagaacatcatcccttgaatttacacagtgctttagacgcgggtttgatccctgggttgggatgatcccctggaggaggaaatggcaacctactccagtattcttgcctagagaattccacggacagcggagcctggcaggctacagtccatggagtcgcaaagcgctggacaggactgagtgactaacactttccaaccctgcattgcaggcagattctttaccatctgagccaccaagaaagcccccaacatctggcataactgtagttatatctcaagcagaaaattgacactgatatgatccacagaccatactcaggtttcactaattttacatacacttatttgtgtgtgtatttagtcttctgcaattttatcacacgtgtaatttctgtatccattgcccagtctagatatggaatggttccattagaaggatctcttgtgctgctcttttataaccagaaaatcttactgccatacttccccactccaacatgaccccaactctgacaactcccaatcagttcagaggcagtatttttgaacttgaggtggagttattaatatttccctttgctgagctccagcagcttctcactggggtagtaacccaaattgtctgtgcatgggtctgctccccaggcccagagaggtgtcttgtgtgaataagggtcactgcttccccgaaggctcatgggctggtctgagagcgatgggaggagcatccttcttgctcccgccctccctcagagtcagcaggggtccttctctggccccctcagcttgggagggcctggctccaggccaggtcagtctgagggccccccctctctctgcatgtgcaggaaggacctgtgtgcggccatgaaccagccctgcgagaccctgggcctgtcccacgtggcgggcatgtgccagccacaccgcagctgcaacatcaacgaggacacgggcctgcccttggccttcaccgtggcccacgagctcgggcacaggtaccctgccacccccactgccacactaagaacccagcctcacctcccaacctggaggcaccagccagccaggctgatggcccatgcaatcccagggaagggagccctgtcttgaggaacgagcccaacctagccacattctgtccttgccctgtccccaccccgcagccaggctgcttccctgttacacaggagaggactaagccttaagtgggattgagatgggccggaaagtcaccatgagtctttgtccctcccggttgccctcagcgcttgcatctttgactcttggtccctgccacctcccaccgcattcctaaatactctgcgaccctaggcaagctccctgccctctctgggcctctgtatgctccctgttggttgaggggagttgg

SEQ ID NO: 30729 - DNA, 1850 bp, Bovine  19866880926386
  misc_feature (1)..(1): n is a, c, g, or t
nttctgccctctgcagcccttgggaacctgaacttcagggtcattgggggtgtgttgagctggctctgcaccaaatgaagcgggggtatctatggaagttcatcacaatagttcatgtcctggttctgctgctgattcctgaagcccccttgggcaagcccctggctttctcaggcctcagtttccccaccatatactgaagactgtgaatcagctggtctgaggatttcgtcagcctggacttaacccaatgcaaatggaacccagttctatcaagcgtcagctgtaatgggagaagcactggcacaggcccagcggaaatgcctccagtcagcttgtgtggcttttctggtgtgcctcgtcactactgcctcctcccagctatctctgttcaagcctctttcatctggttctgtctgcagaggtgagtgcaggccacttccctcagtatccagcccagggtctgtctcagacccctgatttcccccaggcagcagaagcctagcgacaggcctcattcgtcttcgccaccacctccaagacaaaggcctaatgtgtgtgcagatgggcctgccctccatcatcccttacaaccaatggccgataatgggcctccaatgagtcccctgtggccaccagctgaccaaggggtggccgggcaatggcgcatgcaaatacagggaccggatgacaaagcaagcctcttgggggagggcatagagctggaggcatgattgtggccccatggcgaatcacataactcatttctgacacagatacgttatgcctctcaaagaccacttgcccctggacactgagctgccaaattaagtgacagggggtctgctgaggcagccactacagagcaggaacccccacccccagaggcctggccccaggaaccatcactttctgtgaggacagaaccatcccctgccaggccactgggctattgaagatcttggccaccacagagtgcctgtatttgtgtgattaagaaaatggggtctcaggaagagccacgatgtgctccaagcacatggctggttgggggcagagctgaggctagagcccaggtctcctaactgccctcccaaacccatcagaagggctatgatgcacagtggggcctcccgtcctctgaagggcaaggccagtgactccagcccatcctcccatagagccagcacagagcctaggccttccctggagcccagggcctggtcccccaccttggcaaaacccctgaaggccaggcccttcttaaaagcagatacagagcagatgtggagggtgggagatgggatggaggaggcgccagcagtcctgaagtcatagctggcccctcactgaagccaaaaagggctttgggtggagtaggctccaagagctcagctgtgctgctggcccgtctcagagtctctgtcagacttgccctctctttagacctcagtttgcctttcagcaaaatgaaagatgacgcaaaaactagtgactcaactcctaacggctcctatgtatggagcgcttgctgggagccaaggcctgtgccaagtgtggcgtagtcatcgcatcagctgaatcttcataatcaccccaagaagctctcgtctcttacagatgagaaaactgagacataaatagctgaaggcacttctaacagtagtggccaaatccaggttagaacccagcctgacaacgaagtcggtttcaggacatcaggctgcctgtggcactcctctggcttggggacaaagagagaggagggccaggaaacagggagggacagacttccagaggcccagctcccgccaggagggcaagaagcaggttctagagggcgaggccct

SEQ ID NO: 30730 - DNA, 1603 bp, Bovine  19866880981635
  misc_feature (1)..(1): n is a, c, g, or t
nctgtgttggcatggtggaaaatgtcctcaaattcttcttgtttatggatccttctaggactgtttttctggtgctgtttttggaactagagaatgggtcaagtttcttggcttgtttgacaaaagacaaaggggaagcagaggagaggtcttgagatatagctcccagcgtgcgggcttgttaagtcgcttcagttgtgtccgactctgcaatccagtggagtatagccctccaggctcctttgtccaagggattctccaggcaagaatactggagtgggttgccatgccgtccttcagggggatcttcccgacccaggatccaaccagtgcgtcttacgtccccttcgttggcaggcagattcttcaccattagcgccacctgggaagcccacagctcccagacccttgcagataagggaaggcttcagaaagtgtagaattgaaaagctaggaccgcgactagctacatcactagaggcaggggatccagctggtctctgggtagaaaaatagaggttcatagataaaacgtttattccttatcatgcagacaggctttcggcaatgatgaacctcctcatttttgctcacagagcaggcttgacatttatatagattaatttcagcttgacattttgaccaaaggaactattagcccctcctctccctgggggaaaacagcttgtggggcctgaccggtaggtgaccccatcaagctgttccagtcccttctctagctcaacatctggctggatatggatggcttctccatggctcccaggagttacagccaacgggaagcaaggtcgttctttcctgggctcatttttcatgctgcctggttttgctgcagatgcaatcaaagctaaatctcaatttgttgagcaggaggggcagctggtagcaggccagcacctgcagtgtgagataaacctccccacagcccgtgggagccaaaatcaagatctaaaagggaagaactcgattttgttgacaattgctttatgattcatttagtaaaattctttcccttcgtacagagctatgtgctttcactgtgttgttcaacggatcctctctaccgccctgcaagggggcagaatcgggctattctcgtttcactcaaagcccagagaggtcaattcagttgccccaagttgcacagcggctcggtgctttcagcccctgaaaactaagtgctctttttactctactactctacttctttcaggcaaatctagagggaaacttaaaaaaatccatgggactcaaactttgtttgttccacctggcccttctactgctgacagatctgaatgcacaccctctaggccctcttggggcccaccccttctccctgctggtgttcctccctctgtgttcttactgagcccatctcctcatacaaccaggcagcatgatgtggaccagagttcctccaaagggtaccacgggcctttgggacaattgttcattttaggggctgtcctctaggacattagctttcctggatcctggctactaaactccagtagttcctctccattctttaacctccctacctaccaaaacaccccagacatttccaaatttcctgggg

SEQ ID NO: 30731 - DNA, 1242 bp, Bovine  19866880999604
  misc_feature (1)..(1): n is a, c, g, or t
natgagggccatagttacagccacctcaagaggggacagggctgtcccccagtgcccataagaaggatgtggaggtgagttttctctgctgggagtagaggtgacttcgtgtctaaaatatctgagtttggcaaaaagagtagagttttcactgtttttggctattgcttttattgaaattgattcaggtttctttgttttaaaggagtggatagatgtgaagttgagatggaaccctgatgactacggtggaataaaacttatacgtgtcccttcagactctctctggactccagatatcgttttgtttgataagtaagttatagtcaaaataccattttatgttttcttaataaagaaatcatatcaccattaggcaccagtattttttttttattccctttgaacattgtttgcctacgtaaagtcccatgacttaatcttgtgttcttttgtttcatgagcctacaaatatgttctgtggattctctccatttttcttgtgaattattttctgatcataaaagtgtccttggattttaaaaatttgtaatccatttggaaagtccaggaaggtatgaagaagttgggggaaacataatcagtcccgtgagcccaccacatggagccagccacagctgctggcttacctgcacagtgagcttactctgcctggcagtgcgctcagtgccgtgcatgctttagccatctgagtctcaagataacctcacgaactagggatgactacatttatgtgccagatgagaaaatggaggccaagggtagttatgttttgtctaagatcacagctcacatgtggtggtgggggtggaggtgttcatagtaaagcagcctgacattcctgtttacctcctatcttcaagcctacatatttgctgactgccttccagattttttggtattattttttttaaatagttaaggtcatactttatgtttaaatgcgcatccttttaatttgcttagatgtttagatgtttgcttgatgtttcaataatttggaaaattatgttgtcataattttcccacagtgaggaatgttgggttgattattagctcgtattaatgagtattctacctaaatgtgtttcaattatggtttttgacttaggggagagggtatttctggatgccagtttcatttttttctaggaccaaccactccaggacactggggaatctgggctcatcctaatgtactttatcttatttgcaaaaagg

SEQ ID NO: 30732 - DNA, 1496 bp, Bovine  19866881020801
  misc_feature (1)..(1): n is a, c, g, or t
naaatgacacatatagatttaatccgttccttttaactgctgcggactattccattatgtgaatatactatattttgcttagtctctctcctattgatggacaattgagttgtttccagtttgacatgaataccaacatcctgtactgaatctccttggaggtatttcctgtgtacatgctgaactcctctctggcacatccttcaagatggaattgcaggcttataggaaattgcaggcttataggaaatacatgttccatttcatcaggtgcagccaaattgttctctattgggtttatatcagtttatactcttggggatttccctggtggcccagtggctaagattccacattcccaatgcaggaggcccaggtttgatccctgctcagggaactctagatcccacatgccacaactaaagatcctgctgcaactaagacccattatagccaaataagtacataaataaaaataaatatttttataaatttatcctctcactgtgccgtgctgtgcttagctgctcagttgtgtccacctctttgcgaccccatggactgtagctggccaggctccttctgtccacggggattctctaggcagggatactctcacttgcaatgtataaaagttaacctttcccatcaacacttggtgcagccattttttttttttttaccatttttgctgatccgagggagtctattcccattgcgggtgggtccagcatgtggataaacaacatccatcatgtgtgtctcaaaggggaaaaggttgggagtcactcggtctgtgagaatagtcgtgtttgaccacaaacatcataccgaggttcaaaagttgatgaattgcctaacagctcctcagagtaattcaccttagccagtgaaacacaaactgctcttaaaacaaagcagtcatcaaattaactgctgtgctgaaagaacttcccggtggacttcataaattcggtctgaagtctgtgcagtgggtccctgtggctgtgccttggcaatggaatcacactgagcctggaggtccaccctgcattccatgcggctctgcatgtgggcaggtgtgagatgaggggccttggcagttcctctgggatactcctcccgcatcccccactgcttgaccaagattggtgggcagacggttgatggcctgccagtcagcccaccagcggagaggccaggactggcccagcaaggctgcttcagaaagtgaggtttgccagggtgggagcttgtctgtactgagacccccctcccccaggcctttcagaccttccttgctcacctgttccctcctggtcacgtacctccacccctctagagtcacagtcttcagggtgtagataaaattcagcaggaagccaaggaatccaatctgggctctactctgcccatcacccagtgaccagggaactgctgtgttcaatggggagggtccctttacctggggacttctcagggttagtgtgaggagt

SEQ ID NO: 30733 - DNA, 2011 bp, Bovine  19866881078837
  misc_feature (1)..(1): n is a, c, g, or t
ntcttgttaagcagtgactttggcaggtgagagtggagtggcagtggtccaggaggatacccaagcagctggccaggaagtttacgggggctagaggggtgatatggattggatacaggaggcagggagcaggcaggagcaaggtgatgagtctatattggaacaaggtgaatttgaggaggaagcaggccatccagacaagatgtgtgggtctgaaccccagggatgtattgcagctactctttagaaatccccaccaccaccaggtttgtgcatgctaagtcactgcagtcgtgtctgactatggactgtaggctactaggctcctctgtccatgggattctccagacaagaatactggagtgggttgccatgccctcctcaagggcatcttcccaacccagggatcaaaccctgaattggttcgatgtgcaatcccacatctctcatgtctcctgcattggcaagcaggttctttaccactcgcgccacccaccaagtttaggaaaccaataaatgggcatcccactccttgatcttggcagtggaggtacagggcagcccaggccaaatgctgtgtgacctgactcaattctgtcccctctcttcccatgctgggtgctcagctgggcccaggacagaggatctctgaaaggtgggctctgcgatttcatcccttctgtcccatcccaaggtctgggcactgtggctctgttcccctggcatgctgtaccatctccccaccaggatgtctgtgctggaagcagaaaatgtcccctaggatggctgcctagagtttgacccccaaacactctgattttaaaaaaaatatctttttttaagtcttgccctttcaaacctcaattttctcctcttttccattaaacaaaattttaaaaagctatttaaagataaatttaatattctttgtcagatccagtcattaaaaatgggattggattttttatttccaatgctccctgctggagtgagctatgtaaagacagatcaggaggcccagacaagggggtttttttgggctttcactggtgttactgaattaagcaggatgttctctgggaaacagtgaaggtcaacatttgtaatttgggatttcactgaggagaatacctgggaaattaccacgaactgggcaactgattcagagaatgattagatgttctaaccacacacttcctctctcctcagattttataatcctcattcaacaacctcttactgagcatctcctcatatgtcaaagattgtgccttgaaaaaaaaaaaacaaaacacaaagattgtgccttgtgccaggctttggagacacaagcaggatcccatgtggatgatccctagacctcagggacccaagcgtactgggtgtaatccaatccctcgccacctaagccaatcagggcagagcatagccccagccacagtgattggttcagaagagagtacttgaccttaagtattataatcaaggtgaacaggacttttgttcagtggtcaaagtaagaggagctttcttctggatgtttcagaggatagacgtgagacccaatacaatgggagtcattttgtaatcttgaaggatgctggacagagaaggaaacagttacaaagaggagagcagagcccagtgaatataaaaagccagagccaggaccctgatcaaactatgcctgaagcccgaccaattgccagcctatacattccttctgtttaaaccaatctgtagagagagttctaagtgaagtgaccacataataggtgcctactatttacatgaactaatctaatttagtactcacagcaactctttaatgttagagactggcagccccattttacagatgaaaaagtgaagccaataactaagtgacttcctgaggtcaccccattagtgaggcagttggtgttcctatccaagaagctggactccaaaatctattttctgcaaaacaagattgactgctgtgttggcatggtggaaatgtcctcaaatt

SEQ ID NO: 30734 - DNA, 1019 bp, Bovine  19866881113188
  misc_feature (1)..(1): n is a, c, g, or t
ncactaacttctaaaaatttgttgcacaggattagctgaaccatccgttgttgccaaacacgaagatagtttgtttaaggatttatttcaagactacgaaagatgggttcgtcctgtggaacacctgaatgacagaataaaaataaagttcggcctcgcaatatctcagttagtggatgtggtaggtgtgcgcgtcattatgtattcgtttcacacaggtttatgcagagcgtcttgtgcacgcaagcgccgtgccaggccacagagataacgggtgaatgaacacggctgttgtcctcaaggagctcaccagggaaaaacaatgattacaccgcagacacaggaatactgtatgtttatgtaatctggtagagtttagaaatcattttatctcatttggtgattaaaataggcctattcttaataaattcgaagtgattaaatattttatatggaagtttctccttaaatgtgttttaaaaatatgaccaaaagatcaaaattttaaaagaaaaaatccaagagttagagttgtagatttttagaaccaaaaaggatctcaacagattattgcttcagtatcacacttacaacgtttctgagatcgtttcatgtgagatttaccaggaagtaaattctcttcataaacttgtttttgttgtcaagagattctttctattttaaactaaaaggttcacactaattttcaaactagtttcttcttgttctgatcatattaatcaatatttccctgttgtgttcccagaatagttgacaagtatgtgtgtgtgtgtgtgtgttggtgtgtataatgtaagtgtgcctttattttctgattatagaagcagtgcatagtttttggaaagagttttgaaagttcaaaaaaatacaaataagaaaacaaaaattgactgtaattctaccacccagaggtgaccactggtcatgttttgttgtatttcttgccagttttttctttatgagtatgttataaaattggatattattttagatataat

SEQ ID NO: 30735 - DNA, 812 bp, Bovine  19866881168366
  misc_feature (1)..(1): n is a, c, g, or t
nagatcttcctaaaagaaactccagagctaataaataatgaatgctttccttgacccacaatttggttgaaactggagtattccatgtttgtaaattaatttccccccgtgcagccgaccaactaatttgtcgacatgttaacataagcagtaggttccccgaagccattgcttgatctattagcgctgcaggaggctatgggctaggcgtccagggtctggaagaatggtttccctgatgttctactttaattaagggctccttctggccctctccaggccacagcatgttcagacttgaaatctgctgaagcgagccttcacggggatgaacacagcttggggaggctgtcgctacagaggcaggggcatcacagctcccagagcaggtctatgggcacctccctgcatctgtgcatgcctctggtgaggacagccacctttatttcaaagcagataagaaagtgaggtgcagaccagcatgggaagtgtcccggctcacacagtgtaagagacagaagtgggatcaaatcctgagctctcagcagtgggataagccatgtgccatgttgggggagtggtagcttctgcctggggtgctggcagggggtgagtgcccaaaggcgttaggaacgggtgctgtccgaactcctttttggttggaaatgagaaaaaggctctgggtgctgctctgcctcagccagatgtgaccatcctccactggcccctcacatacacctacgggacttttaagggcttatctggggacttttctggtagtccagtggtaagaatcctgccttccaatgaag

SEQ ID NO: 30736 - DNA, 1051 bp, Bovine  19866881223248
  misc_feature (1)..(1): n is a, c, g, or t
nttgccatggtgattgatcgtatttttctgtgggtttttatcctggtgtgcattttagggacggcaggattgtttctacaacccttgatgaccagggacgacgcgtaagaactaaactgtgtgttatttatgaggttatttgtgggcgttgagggagagggggctcactttttagttttcattgtaaagtacacagcataaaatttatcatctaaaccacgtttaagtccacagttcagtggtaaatatattcacattgttatgtaaccatcaccaccatcccacccaactctagaccagttaaacaatcaccccccattctcccctctccccagcaaccatcataatactttgtctttatgattttgactaagctaagtactcatgtaagtgcaatcacacaatatttgtctttttgtgactggcctgtttcatgttgcagaatgtccctaaaggttcatccgtgttgtagcatattgcagaatttccttactttttaaggctaaataatactcagttgcaagtatacacattttattgtccatttatctgttgatggacacttgggttgctcccaggttttaccggttgtggataatgctgctacgaacatgggtgtacaaatctctcttctgtaccttgctttcagttcttttagggatataccgagaagtggaattgttcgatcatttgttaattctatttttaattttttgaggaactgccattctgttttccaccagggctgtgccgttttacattcccatcaacaacgcacgagtttctctacatcctcatcgtacttatcgttttctgggtttttttttgacaatagcaaacctaccggttgtgaagcggtatctcattgtagttttgatttgcatttctctaattattagtaattttgagcattcttcatgtgtttagtggccattcttgtgtctgctttggaggaatgtctcttcaagatctttgcccatttttgaattgggttgttttttaagttttaggagttctctttatattctggatattaatcctttatcagata

SEQ ID NO: 30737 - DNA, 1650 bp, Bovine  19866881237017
  misc_feature (1)..(1): n is a, c, g, or t
nagggggtggggtgggcagaccaaagtcttaaacggtgcagaaattcatattctggttctatgggaatctaagaacaagaacggatttgtattcttggagaagcacatactaaagaagaaaacccagagaaaccaaacgactatgtacagtatcatagagcacgtgtccatgtgagcggctgaatctgggctgggtaccggcttcaggtggggagttttggttctattcggagagaagactcgtagaggctttcttcatccattacaaaagattggtccagtaaatactgggttacctgagaaaaggaaaagagaaggaggaatgcgaggtgatgcaatctccacaatatactaggtggtcactgagtgtctcccaggaatcaggcagcatcatggggagaggggcatcaggcttgcacatgaggcaaagatgcattaaaaacaatgtgtcttttttaaactgtttatgattttgcttctttattattattattttttggccacactgcaaggcatgggggatcttaattcgtcaaccaggattgaacccgtgtcccctgcattggaaggcggactcttaaccactggaccaccattgaggtccctgttgtgtcttaatactattttttagtattgccttaagtttttgtcttcatagtaatagaaaatcacatatggtcaaaattactcttgaccaccattcctatgtgttagaagacatattttaggctcatatcaaaaagtcgtctatatctatgggacttgcctagtggtccagtggctaagacttcacacccccagtgcaaggggccggggttccatcccggttggggaactagatccctacatgctgcaactaagagtccaagtgctgctgctaaagacccttcgtggtgcaacaaagacccagtgcagccaaatagatagatatttcaaaatataatcatctctatctatgggcttccctggtggttcagctggtaaagaatccgcctgcaatgtggaagacctgggaagatcccctggagaagggagaggctacccactccagtattctggcctggagaattccatggactgtatgggctctcaaagagttggacacaaatgagcaactttcacattcacatctatatctctatatctaaaatgtcaactgtagcatctgggctgtggatgtatgggtgttaacagttctttcatgcgtgtgtgctcagttgcttcagttgtgtctgactctttgtgaccctatggactgtagtccgccaggctcctctgtccatgggattctgtaggcaagaatactggagtgggttaccatttcctactccagagacagttctttcagtgtttccatatgttggaaaaatgttcttaaacatcgggattatgtagcatgagagaatcccccaggagccaaccgtggaagctgaggctgtgtaagaaaggaggctccccgttcttcccctcacaaggctcactccagggcaaaatctcagagtggaaaatcaggaagagtcaccacatggattaaactattctccttcctccacgtgtcccacttcacccagctcccgagtgctttgctggactcctgtgtgttaaatgtacgatgagagatcagagcccaatctcacagtcagaccccca

SEQ ID NO: 30738 - DNA, 1424 bp, Bovine  19866881241427
  misc_feature (1)..(1): n is a, c, g, or t
nttctctctaggcgagaatactggagggggtagccattcccttctccaggggatcttcctgacccagggattgaacccaggtctcttgcattgcaggaggattctttaccatcttgagtcaccagagaaaccaggatcttccataaatgaagccaaaagacaggccttcctgcccacctgcgtggggtgggttacacagccttgtctgaggtcggtggagggactgccgagaggaagagcacgatttcccagccagcgctgcagcccccagagtcgctcagccaggttcctgcactggagtcgctcataaaacacaaggcgtgacacccactggtctccctcagcctcacctgccgccctccccaacctgcatctcacacaacatctggaatctatttgcagttctgggttggtgagctgtacctgaggagtttttgcttttgaccgattttggtgtcgttggagatttggtgggggatgtctcagtgtcaccatcgtcactctggttttgatcattgtctgactcttccctcatggagacttctgagcctagaaggaaagaaggaagcaatttgatatttctcaaataatcactggctttttcaaaaagattttaatatttttggcctcaccatgtggcactcgaggtccttgtttcccaaccagggatcaaaaccaggtcctctgcattggaagcacagagtcttaatccccggacctctacccctagtcattttattttcagctaaagtccatgctttattcagatttctttagtttctacccaatgtcctctttgtattctaggattccacctcggaaacgaaatgacatttacttgccgtttcctggctaggattctgccctttgctcctgcaggatggcctctggggctctctggtaggctgtcactttggtaattgactttcagctatgtgcatcccgtttactgcacgtgccacagtaaatgtcacctggtatggaggtcctgggggcttcaccccttcccagccatgccctttgttggagattcccctgtcttcccccttctcaactcagaggagagaaattccaaccatcttaagttttttcccaaggcttgctccttgaaggctggggcttctgcccagcccagggttgagtatgtctgcgtgtgtgcgtgtgcatgcatatgtatgctaaccactgcaaggctggtgtcacgcaggatttgggctgacctaaccccagacagagccagacaaccctccaagggacaccgtcctggaatggtcgggtttctgagagcagggaaggcccagctgggccaccatcacctgtagccgtcgtctccacacccagcgtcgcaggtgtgctgtgcttcacgctgttccctgaacacatgacacccttcctcgccccttagtctcgcccactccattccg

SEQ ID NO: 30739 - DNA, 1109 bp, Bovine  19866881337119
  misc_feature (1)..(1): n is a, c, g, or t
ntcaaggaggaggggatatatgtatacctatacctatgactgattcactttatggtacagccacaaagtgaaactaacgttgaaactttgaactaacacaacattcaaaagcaactatactctgattaaaaaacaaaaaagattgggtctgcttagaggctgctgtggccagagagacctatggtacctgagttccaaacctggacagcacactggaaggttggatgtggctcaaagtattcatgtgggagacaggaggtgacagcagccctcgcactttaattatgtccatctgagctgcaaacacactgctttctctccaatctccattggcagaaacctgagcagagcctgtgaaggggccccctggtcatccccctggtctccagccagagttcaggaccattggaaggcactcaggggagttgcttaaggagacatcagctgcagtttgggttgggatgggggtgccagggagcaggtaggcatgtcctgccatagcaggcagagatgggcatgtctagctatggtgtgtgctgtccaccaggccagagaccaactcttccccataggtggaaaagatgcccacaagacctcacaagtgcatctgggctttgccttgtttcattccatcctctccataaggctttcggacaagggttaataaccctgtttcacagatggagaaactgaggctggagagtggaagcaacatttgcagagaatctcgtagggcgacgctatgatggggatcctgattgttcagctacagctcattgcagagaacttgctctctgggtctcccaatttccagctctctgggctgaggtctctgcagataaggatacgataaggaggattaaggagtattttggtgggtttgagatctgcatttagaaatgactagctagtgacatggacattgcttagtccaaaatcctagtaagtcttcatgggcacatttctgcggggcttcagaagagtgctcagcttgggcatttgttgacctgggagttgtgtgggtctgacctgcctttaggccctgggaagagggagtctttggggggtgtgtgtgtgtaagtgtgatgtgatgtacacatgagaggtgt

SEQ ID NO: 30740 - DNA, 1581 bp, Bovine  19866881612419
  misc_feature (1)..(1): n is a, c, g, or t
nttctgggctttgaaaaggaggtagcttgagaatgagttgtggtttgaggtctctccatttctgcttcccaggcacataggaaggagagccaaggcaagatggcaagagccacatccagacggtgttctgaaagcatccttaggtggcagtgtaactcttgggatctctgaggatccctgccaccttagttcatcctgcagaattaagcattaagaattttaagtgagaggtagaatttattaggtcaaaagaagagggagccattgagataaaagggcagaagtaaaaatgagtttaacaagtggctgacagagtagttcggtctggccagagtgaagcaggcagtaaacgaaggaaaagaggaaaggtattttaggccaaatttagaacactctcaatgatagaattttttctctataggtagtgggaaaagaggattaaattgatgttttaggatgatgaagcctcatgatcttccatcccacatgttcctcctacaatgtggcatggatgcttcccactgagaggtgctgtgtccccttgccctgagtctgggtgggcgtgtgacttcaatggaagtaatatcatatgactttcaaaggcaggtcataaaatatatattcctgtcttgttctcttgggcaggtgtttcttggaaccccagcaccatgctgtgagggagcagagaccaaacggagagatgttccaccaacagcccagatgaggttccagcgtgtcccgcagatttgtgagtgaggattcctccagatgattttagtcttctgtcactgagtctcccccagccatgaaaccttccccagcattcaggttttcccagctaaggcctccgacatcgtggagcagagacaagctgtcctaatgcctgtctgaattcatgacctgaagacaccataagattaaaaaacattattgagcttttaagccactaagtttttggttaaattgtcacacagcaatataatgtaattagagtttttatctgcccctacctaatatgaaggatatagcccgccaggctcttctgtccacggaattctccaggcaagaagactggagtgggtggacattcccttctccaggggatcttcccgacccaagaattgaacccaggtctcttgcaatgcaggcagattctttactgtctgagccaaccaggaaaccttaatatgaaggatgtaggttggataataagaccagaaactaaagccctgttgcagtcgagaggggctaaaagcctggacaggaaaagatacttgcaagagtagagtctttgctggacaaatggtattaattcccaaacctagaactggattttctcctcattggtggaaagaaccaaagactggcacctggtagatggtgcgttcattctaacagttcatcagagagacctttattaaagggtgtgctaggggctgggcagggaacttggttctgaagataatgaaataaatattattcagtttatgccaccaaagagtttataagccacattgaactgattgactggagataagctgcagcaaaccccaaatagtaaaatagcaatgcaaggcagca

SEQ ID NO: 30741 - DNA, 1191 bp, Bovine  19866880452884
  misc_feature (1)..(1): n is a, c, g, or t
ncccactccctcgcaagatttggtcagctcccagcaggtagcacgtggcaacctactgttggccttgcccgctccccttccttcttaagaatgggtttggttagatgaaatactaaagttttctcgttaaacttaactgaagcgtttaaccaacttacgcctgaataagatacttgataaagaagttcacagagctcgtcccggttttacgtgctataaataattgcctttccctgtctcttgccctcggcttgtgtgcgtgtgtgtgtgcatgcatgtgtgtatcttacagtcttcatcatgatctctctttagatttcttgctggtgtgtctgtatcaccaggatagggcccaacatcttattgacactgaatacaacttaaactgccatccttgtaattactgctgcttttgtttgaaaatattatctactataggcttttgtcagctttttgttaaagtgcttcatcttgtatttctagcattctgaactctgggcataaaagcataaagatctgggccatctaaagatttggcaatttttaaagtgcacagtgagtcctgggcttcagatgtaattgtaacacaatgagtgtaataaccttatgggtgttgttttcatacatgtttgcatgatagactcacatctgaaaagaaatcatctaatcaatgtgaattcccatcatttttcacctatcctgatgtgggattggcattttgtaaaaactttgtagctgaaagcttgtctcaggagattgtgaatatggtgtacatcacagtggagggggtatgtttattttgctttttgaattttatgtgttaaaggtccacttctctagtctttaaggggaaacctattcccagagttatctgtatcttgaaagtttgatgacaactgtttgacttttgtaaatggagctttttgttagattttgaaagcctgaagctaatgcatattgatacttctctttcatcatctctaagctaagacagagatgtttcttgaagtattttgctctgacaaattaatgaaggaaaatgacctatacgatactgtagaagcataaaccataccattcagtaggtgaaatgctgtagacatcttttttttttttcattgcaatggtgaatggaattgtttccttaatttctctttctgttttctcattattagtgtataggaatgcaag

SEQ ID NO: 30742 - DNA, 1561 bp, Bovine  19866880524269
  misc_feature (1)..(1): n is a, c, g, or t
naggtactggagtgggttgtcattgcctattccattaaggcaaatattatctattaattagatgaatgggcttcccaggtggcactagtaaacccacctgccaatgcaggaggtgtaagagacacaggttcagtccctgggtcggcaagatcccctgcaggaggaaatggcaacccacttcagtgttcttgcctctggaatctcatggacagaggaacctggtgggtcacagtccatgggatcaaaatgaattggacacgatttagcacagcacagcccaattagatgaatgacaaaatacaaagggcatttgtcacatttgacacatatacagaagtcactgactggcatagatcagataagtattattttcataattatttttagccagtggaaaattgcttcaaaagtttgaaactattgaggacgggtaggtataatacctagattgaaataggctgacatcatcaaaagaccatatgcttttgtgtttacacagtatttaaagcttcacagagccagctggctttatttcataatctaattacatataaaaatgttcagctaaatattgcaagcttgccaaaaattactttaaatatcttcatcctctgtgttattgaatttgcatgtttcataactcctatccttctaattactgctttgtttttcattgttcatcttttaataaaatatcatttacttcgcctaatatattttgttctgcctagtaaattagtatggctgcttgtgaattatggcttccctgatggctcagcaagtaaagaacctgcctgtaatgcaggagacacaggaaacagggggtttgatccctgggtcgggaagatcccctgaagaaggaaacggcaacccactccagtaatcttgcctgggaaatcccatgagcagaggagcctggtgggctacagtccatggggttgcaagagtcagacatgacttagaaactaaatcatcatgtgaattatagacggaaataatcttttgaaggcagatatatgtatacacacatatgtatgtatgtgtccatatatctatataacaccaagcatattatgcttcatattcatatgaatcaaggaaaaagaaaacattccacattccaatatgtgccattatcatgtaagcatacaatactcaacaaaaacaactattatgacaataaatgagatgtattatttaataatttaatgcatacaacagaatttttaatagtgcatattctcttcacagtacttatataatatagctgaattttggatgaaagggctgccattttttgattgatgtacctcttctctctaatactttctattataatttttagtaagatattgcaccacccttcttaaaatgtgtaaaaatcaatattttctgcccatatgttatgattttatgagtttttttaaaaattccctttggcccatggaagacatgcattggttaacagcaaaatgaatggcttctttggttttggtctcttaaatatttaagaacattgtttcatttttttttacaaaattatattttaaaagtagtctga

SEQ ID NO: 30743 - DNA, 1495 bp, Bovine  19866880581203
  misc_feature (1)..(1): n is a, c, g, or t
ntatttagttatttagtttggggtaacgtgaggtccttttattactgttccttgattaaaccagagttcagatgttttattatgtcaccattctttgaatgtttttactaaatactgatgagcgtaaatgtgcttgtacatgttacctcatcagtatgttcatttttaaccattagtctttatttgttttttaattctatatgcaataaattaaaggactcaagaaatctgatgttacaggttgtgctctctaatttaacatctaaatctttccaactttatgaaatttccatttaggtaaactaaggtgaatatgaagatatttcctctgattcaatttagtcaattaggaaaaaatatcctcaattttcaatagatacacataggaatatgtcattaggtaagctacctgaaataatgagatgatatttgcagacaggcatgcatttttcttgtcagaaagacccaattttagtaagagagccaagatttaatttataataaaataacatgcagatgcccacactaaggagagagaaagagacaatctcacagcaaggaaaactgtcggcgtatttgaatcctaattaagaaaggaagcatgtgagctggaaaaatagccaagccaggtgggagggtgagtggcacccagcccacacagcacatttccatgctaagaatatggcaaccatggtctgtcctgttctagttattgtctagcagctaaagggcttgacatcatggtgagatgcacaagaatgtaaagaaggcctgcttacctttttcaaaacacaattacacttttcagaatgcgaacatgacctggaagtcagtgatttctttaaaaaaaagagagagagagacagagatccactgggttgtaatctcagaagtgccaaacccaatggtaattccatggcaattccaaaactataatcacacgcggggcaggctttgccaatgagacagatgctatccttggaagtcctttctcctttttttgggtagcatctgagccttctacattaccaaatgatgacaaataaaagatgatagtatttgtaattaccatgaacatttaaactgagtcatgtactacaaaaaatatgcatgaaaacgcacacctgtactgaaagtctacacacataataaaaatatgtgcatatcagttttctcttattcctcaaaagcaagttcatctgatggattgtacagatgaagtagcatcatgacattgtctttatctcctgtccttagacaagatgctttttggaatcttactgggtgacatgtggtaagagagtttgagacctgttcatttaaatccaatccagggctgtgtattctgaaacacattgcaggtcataggtaatgtctgtagagtttgtgttctatatgtggataccttctataatgtcgattttgaattttcctctaccgacagatttagaagcatttacttttcattgtcctcttattaaaaagttaaatgaga

SEQ ID NO: 30744 - DNA, 1553 bp, Bovine  19866880642761
  misc_feature (1)..(1): n is a, c, g, or t
nccttgtgctatgagaatgtagtgagaaatgctggaagtgatctttaacctcatggaattcacaattagtgagacaaacactaaaacaatattcatatagatgtataatgtaagattatgatagttattatgcgaagaaaatggaagtggcttcaaaataatgataggcatataaaaaaaatcaaatggaaattaaatttctattgctgaaaaataatttgccaagcctattaagaatcctgaaagatacttaaaaataagaagcccataaaagataattccaaataattttgttaatattcataagatgagcaaatttatcccattttagggaatgaacataaatcaaaataacattaatggtgaaatgtaataaaaataaaacataagtaaagaaagcctgattaattatgcaaggattgtacacaattcaggattatccaaatcctctgatcccttattttgttcccttactccatctctgcatattttaatccccagcttaaaccgttatctcctttccaaagtatcattctgaactctgccctccttccagccagcaaaatttgttcttttctctcaatatccaaaatacttgactgtgtctttcttaaggcactcaaaacatttggtgttgcactgtgggtatcagggttttagctctacctgaaccatctctttgtaccacggaacacctggaatgcttttcacaggcaacagctgttgagtgaacaattattctgttatcccctggcagttgatatttctattataaaaaagaaaaacagatttgtagctatgtttattgctacaccagccaatgcatattctagtgaaccaaacaatataattcattgactcagaaataacatgcaaatttaagctacctacattaaccatatttgagtgagtcactaggggtaggtttggtatggctctaaaattttttttacaagatatacatttcaaaacaagcaagtcatcttaagttgtacaatagatgttacgtacaagatgctctactgaatttatttgctcttgtcttctaatgccatcattgaaaaaacgtttcaaaaagcaaaaaggaattgagatcctgaaacacctaccacaaaatagtacaacgaacagaatgacataattttcagtttcaaaaattaaagacagggtggtccgtggttaagactctgtgctctcaaacccagggggtccaggttccatctctggtaaaggaactagatgttgcatgccccaactaagagcctaagtgtggaaaacaaagattcttttgtttgcatgcagtgaactaagaaccagaggagtcaaagagatttttttttaaaaataagcacagctacaacagaatatttagcatacttttatactattttttgacagtcacacagtattataacaataattgcaatgaaatgatactttaatttcacttgatattgatataaggtcaggtttttttttggtctgctattagttcgatttaatataaattaaaaaaaatacacagaatttaccaggaatgaaagtacagagaa

SEQ ID NO: 30745 - DNA, 1343 bp, Bovine  19866880719416
  misc_feature (1)..(1): n is a, c, g, or t
ngttgcctttccttctccgtgcatgaaagtgaagtgaaagtgaagtcgctcagtcgtgtctgactctttgcgaccccatggactgcagcccaccaggctcctccatccatgggattttccaggcaagagtactggagtggggtgccattgccttttccagagtatatctctaatgtaactcatatgcagacacaaattagttcttattacataggctgaataaaaatgtctccttaatagcaggtgctaatcatccattcaatctacacctaataaaattttgtaatagttggcaatatattataatatccataacatatactgactctgtgatatttaaatatttccaaagaattgcaaatatgactatttaaaccctagaactaaaccattagttacaaatataatttagtactcatacagcatttcatgtctctagagaacatacagatattaagttaaatgcttaatggttagtcaccaaaattgtagatggaatcagaagttctttttctattttacaggcccccatgggggaataaagagagagcactgactcaccctcagtggggaatgctcactcccacacagttttttcttaaagccatgcacacttagctaagcaatgctttataaccaagttttcaaccttctctatacccacactgagaggcctgtaattgcacaaagccgcaaatgttcagagaaaatactttcctgtggaaaatgtttaatttcattccataaatcaggctttctctaagtgatccgtgcagcccttttatatgaaaatggctctgcacaaactctccagatagataaggctattgcttttgctcataattctagagaaataaattatttaaataaaataaatagacttgtgttttgagatttatagactcaatagccaaacaactcctcctttcatttgcgtaagagaaagagcataagggtcaataatggagagaaaaaggagatgatcagaaaggccaggagacggacgggaatgtgctgtgtggctcaggaaactcaaacaggggctctgtgtcaacctggaggggtgggatggggagggaggcgggagaggactcaggagggaggggatatatgtgtgcctatggctgattcatgctgaggcttgacagaaaacagcagaattctgtaaagcaattatccttcaatgaaataaataaatgaataaataaataaaaagacagacgcggggagtcagagtcagtagtagatgtgacaacagaagccacacaggcagataccagggacaggccacagtcaggaacagaggcatctctagaagacgaaaggacaaggaagcaggttcc

SEQ ID NO: 30746 - DNA, 1454 bp, Bovine  19866880802577
  misc_feature (1)..(1): n is a, c, g, or t
naaaaaccatagctttgattagacagacctttgttggcaaagtaatgcctctgctttttaatatgctgtctaggttggtcatagcttttcttccaaggagcaagcgtcttttaattttgtggctacagtcaccatctgcagtgattttggagcccaagaaaataaagtctgtcactgtttccattgtttccttatctatttgctgtgaagtgatgggcctggagtgccatgatcttaattttttgaatgttgagttttatgccagcttttttactctcttctttcaccttcatcaagaggctctttaactactctctgctttctgctgtacaacaaagggattcagttatattaatacaaatatatatatatacacacacatatatattctttatatatatatatgtgtatatatattcttttttatattcctttccactatggtttttatagaatattgaatatagttttctctgctatacagtagaccttcttgtttatccattctttgcataatactctgcgtttgttaacctgaactcctaacccaccccctcccgcatccccgcacccttggcaatccgtcccttctctgagtctgtgaatctgtttctgtgtcatagataagttcatttgtgtcgtattttattttacttttatatttttttagtttcagcattttattatacttgtttttaattaatttttattggagtataattgattttcaacgttgtgttgtgttgtactttggattccacatgcacgatacttttattttgaggaggaatagttactattcactctgaagaaaaattagaggttgatgtcatggtcctttaattctctgcaaataatttattccctaggaccttcttgctataaaacagggaaaggtttctgaaatacagagagtataaaattgatttgcacaaagaagtttgacctttgaaaacttggaatcatattaccatgccaaaacccgcttgatgcatattgcaggcatacaggaaagttcaacaaactcaaggctaccgttatttccaggggtccccgaaacggacagccatcctgtacatgtttatcaacaccccttttacctttccccagaaaggtgaatctagttccagaaacaaacaccctctgttttacatgactagaacaacatggaatttcaacacgaaagaacagaagttagttacttaactctgttttgaatgcatgcatacaaaatataagcacactcttgatgatttacattatgtgatgcttaaatatataaagcacctctacatgatttatctatagccaccgccatagccactctggtgttgatttcatcatcattttgcagttgctaagaaaagtgtccagaagttcaagtgtcttgtactggggtcttccagggaaaagacttagaagacagaacttagactccaaggcttcccttctca

SEQ ID NO: 30747 - DNA, 1655 bp, Bovine  19866880813342
  misc_feature (1)..(1): n is a, c, g, or t
ntccaggagatgcatgagacactggttcgatcccctgggtctggaggatcccctggagaaggaaatagcaacgcgttccaatgttctcacctggaaagttccatagacagtgcagcctggcaggctacagtccaaggaatcacaaagagttagacaggactgagttactgagcacatactcaaggtggaagccaccatctacttataatctaatctcagaagtagcatgctgtcctttctgatatttctacttaaaaaatatagagactacttaaaagtcagtctctaagtaccatccatacttcaggacagagattaaactccatctcttgaagggaaaagtatcaaataatttattgacatcttaaaacccatctccaagagtacctcatcttcaacccacttattttgactaccagaaacagtacaaaattgatgtacattgtgttttgttttcatagaagttgcaatttattaaaatatctgtaacatttaaattgagaatggtatagtagagtgtacacagtctttttaattaagaatatctgaaattgaatccctattcttacacttgttaaatgtaatcatgggcaaattacttactttgattcttacttctgcaaatccaggaaaataatgacacttgtgaaaattaagtaagcttataaatttaaggaaattaaaataataactaagaaaattttcaataagtattagttaacatgattacttttaaagatttttttcaatttgtaaaaatctcttcatactcatatcccttaaagtaattttatgctgacaatcagtataaataataaaggattcattacactattgagagtttacttaaacaataaatccatatctgcacattcataagtggcagtaaaaatgaattggtgattttagctgacaagagcaccgaaatgcacagctaggcaggaaatgtgccatatgccgtgttacacctggactctgtgtgactgcaccttaatcactctcctaacatcctcaaagcacctgaatattggaagacataagggattttgcctcctcagtggtgcttttccatcctaaacttggttgacatttattaatcttcagttgtaaatatgaagatgcaactatatagctcttctctaagaagtacttactctggtgcattttatatgctcttccttgattggcatcaacttgggtcaggaattctgttacctgagttttttcaaccccttccaagcaattatttaatatgtaaacttccagtatgaaggtaattaagatagaataaaactctttaattccttaattgttctccatgttacagcatcctgtgaagaccactttctaatcttgggattccaagatttaaactgtgaaaagaagtccttaggcagaattaatctgaaaaaatatcctttaaaatattttttcagaatgcctgaattaatgggacttagaaataaccattctgttatttgataaaaagttctgagcaggtttgaggcagggtcaagatctgcttgaatctcaatcttcacctcattagacagtggactgtgagtgaaggaaaaggtatacaaaccatgttttgttttgtggtcctgggattaacaaatgatgccctgcctcttgcttataaatcctgccatttc

SEQ ID NO: 30748 - DNA, 925 bp, Bovine  19866880819847
  misc_feature (1)..(1): n is a, c, g, or t
nccactttgctgttgtggaataagtcaagtaaacataaaaatgcttcctccggagaaccaattatgatattcagaggggaagaacaccaggtgatgcctgaagaaatcttactttcctgtgattatctcccaccattaacaatggtgatttcatgaagctctaaggagaaaattgactacttctaggacaatttgataacttctggagcattatctgaatctacttacatggcataaaatgctgtggttttcattgaattgcttcatcctttaatgtctgacttatgacttctttgcctcctcgttggcattctttactcgaatatttgcagtgatacttgtgcacgttttcagtgtgaaaacatcataacccttgagtacaatcccatcagtgacacagggttgatatgaagtgcctctttatagcaatgacataacatccacaggaaatgctgatcttgggaaatatctcgccagctgctctaacaaagactagaactactctcacagctttatttcactttctccatgtgtctgaaaactaataaaaatgtactagacaatatctatgaagtgaaacatcaaatatgatgaattttaaagggcggcatttttggggcttcccaggtgggcgcagtaataaagaatctgcctgccaattcaggaaaaaacaggatcttgacatgggttcaatccctgggtcgggaagataccctggagaaggaaatagcaatccactccagtgttcttgcctgagaaatcccatgggcaggctacagtccgtgggatctcaaagaatcagacatggcttagtgactaagcaacaacagcatttatatttaactttaaaatgattaaaatataaacctttattccttttgtaggcatgaagactataacaaaggtacctttacattcgataata

SEQ ID NO: 30749 - DNA, 783 bp, Bovine  19866880937257
  misc_feature (1)..(1): n is a, c, g, or t
ntgctgctgctgctgttgctaagtcgcgtcagttgtgtctgactctgtgggaccccatagacggaagcccaacaggctcccctatccctgggattctccaggcaagaacactggagtgggttgcccattttcccgtccaatgcatgaaagtgaaaagtgaaagtgaagtcgcccagttgtgtccaactcttaatgaccccatggactgcagcctaccaggctcctccgtccataggattttccaggcaagagtacttgtttctctaatgttaacataatctaatttggcatttatcctgaatttcaaacgtctttcagtctaatcagttcaacaatttgtgatcatacataacttcatgtctataaatttttatcattctcataaataacaacactattcttccaggaaactcaggtaagaaatcacagttacctttaacttacttctcttccagaattcccataacaaatcaatcatgggaaatgctttctaatttgttttttgggggaaaggttttcaaatgaataatgtgtcttaaaagaacttattgatttctaattcaatttaagaaaaactgttttaaacccaagacagtcaaaaaaacattgtgacagccatccaaaatccattacctggaatgaaacccaagctgttaaaaaacaggaagcagaatctaaaaattaaaaggttataaaggatttttttcagtaaaaatggattttttagtaaaaaaggattataaggattgttttagtaaaaggatgttaactacgaaaatgttt

SEQ ID NO: 30750 - DNA, 1384 bp, Bovine  19866880937666
  misc_feature (1)..(1): n is a, c, g, or t
ncatgtatttagaagctgttcataacatcctatttaaattcttacatgtttctttgtgaaatgagacagtgttagccagtcatgtccaattcttttgactccaaggactgtagcccgccaggctgccctgtccatggaattctccaggcaagaacactggaatggtttgccatttccttctttagatcatgttttatataagatgttaaaatagaggtatctaaataatataagacacgtggacagagtctgtaaatgcaaagttagaagatgaaatgttcatttatttttatctactttgttacaaaaagaataaatgacaagcagacacgtggtgcaagtgcggaggtgtcggaattgtgtgaatcagcttgttttaataaccagtgtttggaggcagttgcttgtcaatttatattcttgaagattcacaccatttaaatgttgctaagaatttcaccaggtgcacagaccatctcaaggagaatcaattaaaagttcattagggccctttcatttatcaacagccatggggtctcatgggagccagaactcggaacagtaactgtttaataaaaacacttgttcacctctattttaatgtgatcatttaaaaggactattcattaaatataccatttttcactattttgaggttttgggtttgacatttttatataaaattacatttgtgaagtaggaatatattaaatccacagaagatcagtattttcctatttttgtctaaacaagttttttatgctttatgagctatgtgtatttgtcttttaatttggtatttttattattttggcatttatcatgcttggtattctctgagcttcttggatctgtggtttgatacctgacattaattttgggaaattctcaggcattattttatcatatatttcttcttttcctttctctcttctcctcctgtattcccatgaccaatataataaaccttttgcagttaatctcctagtccttggatcttctattctagcttttacagtttttgttctctttacctttaggtttgaggattttttttcatacagtctccatatcagagattctttgctatgtccagtctactaaccagtaataagcccatgaaatgtgttcatttgtcttatatatatttataaatctctagcatatctttttggttctttcttaagatcctcacccatttgtatgctctctacttgcactaggagagccctcactctattaatcatagttgcttgaaatctctgctacatccctaccatatctgtttctgatgcttgctctgcctcttcacattgtgttttttgcttttcgtttgccttataattttttattgctcactggacatgatacactggtaaattcc

SEQ ID NO: 30751 - DNA, 1254 bp, Bovine  19866880976095
  misc_feature (1)..(1): n is a, c, g, or t
ntcctgacatgtgttctggttcttgccaagtgccttggaggcagttggtaaggcgttaactgtgtaagagtgtggcacaggggcacagccacggtccctagacactccagagcagacctgtgagcaattggttgctttcatggatccttagtattacaagttaagtacatttcagattgaattttagcatcccagttcataaagcactctgacattattgagacactaggcagttaatcgttggaactcacagtgtttctcattttggaatccctgtgaaaagtgaaagtgaaactttctcacacacacgctcagtcgtgtccgactctttgtgaccccatggactatacagtcataggaattctctgggctggaatactggagtgggtagccattcccttctccaagggatcttcccaacccagggattgaacccaggtctcccccattgcaggtggattctttaccagctgagccaccagagaagccctggaatccctgtgctgtataatgtattagttggcttattatagttttttaaagatttttctcaatggaatggtgttttcattttatactggatggacgcagaaagcactaagtctttgaaagatgtgaatttaaaataatggttaagtcttttaggagatgctttgttaagtaacttttaaaaggtagtaaaccttctgtatttacggttaaagtttataggtgtacttattactggattatattattcaagactgataaggtcactttgcctaaataaattgctcacacctactcacctacacttatcttagttttgctaaattgaattagaatgtgtcaaagtgttccctttccttgaatgcctttatcctttttatatactttcttcacttgccatctgacctcatttcatcatttagaattgacttttgtggtggttgaatagaagtctttctggtaatataaatccccatgtgataatagaacctgtcccagccttgctggtgtcatatattaatatccattaataatcatatattaatatctgtgccttcttgttcactgtcttgctacttgatcacttcaagttttctctgagctcttaaataatgtcttagattaaatctaataactcccagaaaactagttttccaaaacagataaaagatcattttctctgttgtttgtatgtttcaattttcactgttgttttacagtttttaattgtcctgagttgcgttttgggtacagagaccatactgg

SEQ ID NO: 30752 - DNA, 2456 bp, Bovine  19866881197866
  misc_feature (1)..(1): n is a, c, g, or t
ngagcgctggaaaacacaactcttccattcgtgtttgtgtcggaggaagcagtcaaggtttggggaccagggataagagtcagagcagcgctgggttgcatgggcagcggtgggtggaagccacagggataagacaaagcctggagcagatacccaacatcccaagagaacacacagaggagccaagcagctcaggctcagcctggaggccttgggaaagtcagctgacttcaaagtcaggtgctcgtcaataaaaaccatgtctttttttttcttgttgatagcaactttcttcataattgccaaagaaggcaatggcaacccactccagtactcttgcatggaaaatcccatggtcggaggagcctggcaggtttcagtccatggggttacacagagtcagacatgactgaagtgacttagcagcagcagcagtcttcataattgctaaatcttgaatgcaatgaaaatatccttcattaggtgaatggatagatgaacagtgtaaaaccatttgtcacacactctaaaggtttgctatgaggatcaaaatgcggaagcatcagggaaactgtcaaggactatgaaacgaagggcattattatcaacagtgtgattctgcgagaaggttcggccagggcactcctgcatctggggagcccctgcttcctccttgggcgatgtcttctggctgctctggaacagcacctgcctcttctgcacctcccgggtgaggctgcattgtgaacgtttggagatgatgcttcctgttctcaaactgacgctcgcaaggcctctggcaggctcgatcgcaccctgatgaatactctgtccaactagcaattctccccgtcagagaatttgcctgtgaaaaacagtttcctctggtaaaggggcagcttcccactgcggaaacacgccactcgctccaccaacacagacaacattggagaagggaacagaaagcgctttgctgcttccccagctcatgtaagggtcatttctcaacccgtttcgcctgcagtggaaggtttgatttgtatggctctagcagtgttgcctttttggaaattcagcatttctcaagggctgtgctgtcttcccccctacaccaagtttcattatgtttagtgcagaatgtgtaaatgatgtagttagaattgcaggcaaaataacctattctcaacccggggatttccaacccagggattgaacccaggtctccggcattgcaggcagattctttaccagctgagccacaagggaagccctaaataacccattaccacacctattgtcaactttctgcgtatttaatagaaatgcaggctgtaaaactatggtcatcaggactggcctgaataaaacagcttggtttctgactgtggatttgggcgactttatatatttttctctggggttctatttaaaatatggtaattcaccttggcacgaagagtaagaaaacaatttctcttagtgagaatgatttcttagtgttcctgttactgtgagttcactctgaagcaggtttacaggtaaggggagtgatggggcatacttcctcaggatggtgtgtttttattttagattttggtgccaaatacttgtcattaatattttaaattaacattaatgtgatagaatctaactttatgaggcatgactgcctggggagcatgccctcaacaatgtggatccttcagaaaactgtgataatgatcagagaaattctggagctgcgatttaaaaactggatgctcagtacattcgaaacgtcatgactgtccagtccctgccaagtctgagaggtgctgagaagatgggcattttggggagaagacatggcagttgtcactaaagctgagtcaccggtgtcctctgaggtttagatcaaaggctgggacccgaggctggcatctgatgctggtgtctctacatcaagggggagttgctagactccttgagggcactcatttgaagttaagaataataacttacttggaaagcactctctcctataaatatgaatggaaatttcaaaggtataaatgtgaatatgttcctaaagaacatattcagggtagcactgcttttcagcagtgacccagacccaaatatatgatttcgttttactgttgtttttcagttgctaagtcatgtccaattctgtgaccccatgggttgcagtaagccagggttccctgtcttttactatctcccagagtttgctcaaactcacgtccattgagtcggtaattgatgccatccaacaatctcatcctctgctgccctcttcttcacctgccctcaatctttcccaacatcagggtcttttccagtgagtctgctcttcacatcacgtggccaaaatactggagcttcagcttcaatccttccagtgaatattcagggttgacttccgttaggatggactggtttgatctccttacagt

SEQ ID NO: 30753 - DNA, 1328 bp, Bovine  19866881225677
  misc_feature (1)..(1): n is a, c, g, or t
naatctgagcagttaaaaaaaaggcaaaaaacacctcttcattccaagtgatagtatcactctctaaacctatctcagctctcccttcattctacttaaatctttctcatttgctacataatgtgtaggcaaccacttcaaacccttcgtgttatatcatccaacttcacctctctcagcatctaactcaatgtcttacatttaaattagaaagtgtttaatcaacacacctgtctgctgctggttgtgtgttcactcagtcatgcctgattctctgcagccctatggactgtagcccaccagactcttctgtccatgggattccccagtcaagggtactggagtgggttgccatttcctcctcccggggatcttctcgacccagagatcaaacctgcatctcctacattggcaggtggtttctttaccaccgagccaccagcgaagcccaagtatctgataaatggatgcaaaacagtgcaaatggttagctatgttaaagaatagaaaaaggagaatacatagtatgcacacattcagataagaggaaaggcaatttgaagaaatgaaatgattatgccgtgtgcgggggtgcttttccttctgtgtaaacagaaaatttgctttcagcatgactttgattattttatatatgaatataaaaatatacttctctactcccacattacactataaaactttatttcctagaaagagagattttgactacttaccaaggctgaatctacataaatgagtactaacgtcacatcagtaaaggggttaatgtgtgctcagttgtgttcatctctttagcccatcaggctcctctgtccatggactttttcaggtaagaatactagagcgggttgctattccttctctaggggatctttctgacccagggattgaacctgagcctcttgcatctcctgcaatggcaggcagattcttcaccactgtgacacctgtttgttgactttttcttagatcaggttggggaagttaaagatagaatttcatgtcattggagtaagtttttaaaaactttttctaaatctatgtcacgattaccctggaggagatgttagaagagagagttctttctgttttcaggttgccttattatttttagattgtctttcatattttcatttacatttccttgctacagcatctggttgaaaaattccccatgctacttgtgctgggatagaacgtttcaacttgtcctcatccagttgacaatctatggtccttaggcatcgactcctttactgccccctctgtgtaagccatggcatttagtgctctgtccctcttacctt

SEQ ID NO: 30754 - DNA, 1266 bp, Bovine  19866881258433
  misc_feature (1)..(1): n is a, c, g, or t
ntaagttttcagttttattgtactattctgctttttcaatttaaatggaatttaatattcttcttgaaaaatgaagggactaataaatacctctttaaccgatggatgaggtttggaggagacgttgatcactctttaaaatctggatttttgctattagaagatttaaaactgactcttgaaaaaataaagacctttcagcctttgagtagttaatccttttatcatttccttggcttgcagcctgcttctatcactccattagttacatttctttcgaaatataagattgtgcttttaaaaagagagagcatttttagtttaataagcttaatccttataatttttaacttcagaaaaatgattcacagccattctgtctttttagctggaaacagtacatctaagcaaagaacttaaacatcggtcttcatagttttactaacagaatgtcttttttccattttttagaaacttttgttttggaggcagcttttccagtgtctttggtttggcatgctacgtcgattctgcccttctgcacctcatctctcatcaggacactggcctgtatgaacctcaacaccagggattctcatttcctgttggccagtggaaaccctagaagaaggtcagagaaagggagtggcaagagatgaggactttcacttccactcaacgcttcaaagtcaccttcggctggaagcatctctaggaccatgtcccaagatgcatccttctgggttctggtgacttctctccaggagcacccagcactgctagctggaggtcactgccttgtcctgtgattccgccacactctgctcataatttgtaaatatcatctttattaaactttccctaaagaatactaatttaattgtaccaccactatctgttaggtctatgactgttccagcagtctttccaaagattccttcttgaaacatgagttttctgaagaatttttttaattcaataagcttatgcttgtttttagaggaatcacaatacttctaagttcttttgggtggtcgtaaatccttaggatgtaaaataaaagagcatttcagatattaaaatgtagtgacttgcagtcacacatgtttaatttggtttctactcaatgattcttgattaggatatattatttcaaatacacataatcctttactattgcatcctaaatgataaagccttctttgaaaggaaaatttccccatttttgctatttctaagttttcaaatttaagattcaaaatctta

SEQ ID NO: 30755 - DNA, 1620 bp, Bovine  19866881260916
  misc_feature (1)..(1): n is a, c, g, or t
ntggggctacagatacaggctttattgaaaataactgatgggacagtgttctttcttcatttctcagctatagaacttacctcattttgcctttttctttaggaaataattgtaattatttgaaataattatatttcaaataattattatatgaaatatatatccataatactttcatgagaaacaatctaagtaaaatattgaatcattatttttggtcccaaaatatttagacacttgaacataaatagtgtccatatagttactaaatttcaaactattgtgcttaagttaaatataaccaacttggcaccagaaaatctttgctttacaaaatagctgcaactggaacaattctttccattatatagacagttgcagctcaggaccagcaaacatacagtgtttaagaccgtagcatcctgatggatggcagcatattcgaaaatatctcagtacttgaccaactgcagctgcacaattatgcctctccaaataattcatgcgacagctctgcctttaaagcactgttcacaattaaattcaaactcacgaagatgtatctgctagtaattcttaaactttttgttgtcatgactcatttttttgtaattcctcaatccttgcagcccatattcatcattgtttagtagctcagtcctgtctgactcttttcgactccaaggactgtagtctgccaggctcctctgttcatggaatttcccaggcaagaatgtcaaagtgagttgccatttcctactccaggggatcttcccgatccagagattgaacctgcgtctcctgcattggcaggcggattctttaccactgagccacctgggaagtcctgatattcttcatattgttgctcagtcgctaagtcgtgtccgctctttgataccccatggactatagcatgccaggcttcccctgtctttctatatctccctgagtttgctcaaacgcatgtccattgagtcggtgataccattcaaccatctcatcctctgttgccccttctcctcctgccttcagtctttcccagcatcaggatcttttccaaggagtcagctctttgcatcaggtggccaaagtattggagcttcctcttcagcatcaatcttttcaatgaatattcagagtttatctttctttaagattgacaaggatatatttatttcatcatgggatatatttatttcacttattttattagttaacattttattagttcattcaactattagttaattaatatttattgatcacttactatacaccaaagataagatgctaggaattaaggatattttataaagacactttgtaggtcataccaagttctttacttcctggaacttaccaactgaccttatctttcaaaataaagtatattctaatgcatttaaatgggaatcgagggctgcagaattttgcaggtggtgtttgacatacacagacatttataaagggtttggaatcattgcctaatagattttcaactacataatatccaggaatgaaagcatttatgtggctttattttgcttactgaaacaatggctgaagttctgcagaaggcagtcatgaatatctgcatttatcatatgctgaatttga

SEQ ID NO: 30756 - DNA, 1050 bp, Bovine  19866881363352
  misc_feature (1)..(1): n is a, c, g, or t
nctggacacacttttcgagctagttttaagtcagcacaaatctatcaggtacagttcagtcctttagcagatgaaggtattaaatccaatcagatttccgtcaatgtcttccctgatgtgcaaacagcagctttcagacattatctccacagtcataagaacctaacaaaactgcccctgatggaagctttcagtcctaatgagcaactgagtaacatagcttaaaagaaagccaactaaggatagccctgctgacatgctagccatcaataactgtttgaaatgcttaatggatactagcatactgaaacctccttgtttctactaagagaaaaccataaactgttgtatttgttaggcatgaaaactaggcacaaaattggtctgttatattggttctctgagaagacatttggaccattctgagacttcacagagattatgtacctgaggggtactcctgtgttattaaactgataaaataacaagggcaagtcattttttttttaaggcaggttaccctcctcattttctatttcgattcagtctgtctcaactgtttggctggatgtctggtctaatgaaacttgcttttcattaagcggctggtgacagcttgagagtcattgtgctgtgatgcagcaaacgacccacttttaaatgggttaatgatcaaacattaatgggaaaactcattgaaaacaagccaacttctattagtagtattgaccacacgatggtcaattgcctctttcccaccttttaaaatagaatgcttcttttaacacacaattccaaaatgtatgcttcccaggttcttgtataccccatctctgtttgaaatactaactcctctgggttattaaaccaaccccctcgtgccctttaccctcactaggcgcaccttgctgggtcctgtccactgccatgctaaccacatcactcccttcacagaactttttctaatggattcctctccatctttgcacatctgttttcttcttccattcttcgtctcttggcaatacccaagggagaaggagcacattt

SEQ ID NO: 30757 - DNA, 1464 bp, Bovine  19866881450673
  misc_feature (1)..(1): n is a, c, g, or t
nctcatatattatcctgttttttctctatttgatcattcccatcagggactttgactcactgttccttcttcctggaacctctgttcaacagttatctggatgattaactttcattaacatcttccacgtatttattcaaatctgaggccagacatcatacttaatattgcagcctgcactgaaaacaagaacactgcttttttcctccaggagtcatatgatttatatatgaattgtcttggtctctgttcactggaatgaaaattccttgcaaaagggatattcattttattcatatatagatttcaagtgcttagaatagtgtttgcatgtataaaaagaagaataaatggatgctgggtaggctaaagcaacagatgcccttctacttttgttaaatgtctttgccaagaaagaccataatttgcaaattctatagccttgatgtcctgaaacttccatatcccagataaattcagttcaatatttattgttgagtataatattgttgagtataataactgcattgttccaattgcttctctggtaaggccccaaccagtctggctgaaatctgggtagattccccaaaatttgtgattcaagaaaaatatgcttaaaccatgtatacaagcttgatcaaaatggcaatataacaaggtttggctatagtctaagacttggtaatatggagacagtgacttcaactaaaaaggacttgcaatttatgtaaactatttatctctatccttgaaaagaggaaaatgaaataaagactagaaaaggaaagcctgttagatgctgcagacaacagctcatagacccatttttatttttactataaatccttacctaaattgaactgcaaatgattgataatcagttttgattcatctttccattagtaatggagcaggacccattcccgtcactgaactgacatgtttagtattgggtcttctggccagtctgctccagggcatccatagtggggtgtcttcataatctctccagttcaggatttgattaagggtaatgaaggatcgcacaacttcaggtaagtgttgttgctgttcagtagctaagtcgtgtccgacttttttgttggggggactatagcccaccaacctcctctctccatgggagttttccaggcaagaatactggagtgggttgccatttccttctccaggggatcctcctggatgagggactgaacttgcgtctccagcaatggcaagaagattcttttaccactgagccaccatggaagccctcaggtaagtcacctgttaacaaattccctaaactcatgtaatgaagtctttgtaagaaataagtgagtatgacaatttgttgattataaatgatcagtatagactaattttccagatatttttaattggaactgaaatattctgaaccacttaaggaatataccacaatatactgtttacctggaa

SEQ ID NO: 30758 - DNA, 1735 bp, Bovine  19866881555054
  misc_feature (1)..(1): n is a, c, g, or t
naaaaagagagagaataagattcctttatttcctttcagattttcagacgatgctggttggttttcaagaaggcatctagtaaaggacccagaaggctagaaaaatttcccgatgagaaggcagcatatttcaggaactttcataaggtaagtcacggtctctagaatctctggggaataactggacccttggcaacaactgtggagacatttcttttgatagataaaatctgcagaggccataatgcatggctaggataaaatgtccctgtgctgataaaatgcaaaagttatttttctcctttattttaatcatctactgtaaatgccagtgttccctctgcaaaatgaaaggctcgtttttattgctactttgcaaaatgagatgcctcataactcaaccagatcatttcccaaggtgctgagtaggcagtttccctctgttcaggttaattgtgcatttgttactttgattttaactgtgggcaatgttgaggagataaaacttttgaggctggtgtgagcagtgttaatgacactgttaatgtacaaagcacttgctgtttacagcttaacaagaaagtgatcgttgtgcatgctgatatgcagagatgtggcataaatcctatgagtcaaatatcaatttcctaaaaatatgtgagtatgagttgaaagttaaaaatatgtaagaaatcaccatagaatgatgctgaatgtactgctgaaagttatctctggtgataatgtcaaaacgagttaggtatttgatagtagggtggaggattcacgatcagaatgcagaactgtggagcagcgttgccttttgacagaatgcccgcataagctcaggaaagactttaattccttcatgcggcaacatggaataagttaccctgaataaggtaatgagtctgtggaatttattttatgtgatatacagttctaatttcttcttttattaaaaaatagagtgtgttccagggatgtggagggtgacagggctacataagcatagcaccaaggattttttgtgaaggacagggaagccctggcttgctacagtccttggggtcacaaaagttgggcacagcttagcaactgaacaacaaaggttttacggagagtgaagctgcccttttattataacggtgaatgtatgccattatacatttatccaaagccataaaatatacaacaccaagagtgaaccttgctctaaaatatgaactttcagtgattatgttgtattaaagtagattcattcatgagttataacaaatgtgccatctggtgcggatgttactaatgggagaggctgtctgtgtgtgtgtgcgcgctcagtcatatctgactcttgcgacctcgtggacggtggccctccaggctcctttgtccatggtcctctccagacaagaatgctggagtgggttgccatgcactcctccaggggatcttcctgacccaggggttgaacccgtatctcttgtgtctcccgcattgacagatggattttttacccctgcatcacctgggaagcccacgtgtacatgggcgcaggcagtaaaagggaaatctctgtaatttctgctcagcattgcagtgaacataaaactgctctaaaaagtaaaatctattaaaaataggttattcagcaatcatgtgctaaccaattatattacacaaatagctggcagtcatttgtattagacttgaacctgtatcataaggcttaaaa

SEQ ID NO: 30759 - DNA, 1047 bp, Bovine  19866881690996
  misc_feature (1)..(1): n is a, c, g, or t
naagaaaggaaagtgttaatgaaaaacaaaagatccagtatcgatgactatattttgaatgagtcttttctaaacaataaaaatatcatgtgactaataatgaaggagttaaagtaagaataaatatttcagtgcaaaataaatcagagatgagcagaccaaggaaaattgaacagttcccagtaaaataggtcagtagaataattgtcttgatcacaataaacatagtaatgccagctctatcggactgattatttggcaatgcttatcagaattcttctgttataatattagttatatttatatttaggcttaatgtagtatgaattaaattgtgcatagatctctttccaaaagttgatttaaattattggcaaatcattttattgtgatggtacagtcacaggttaaataaaatcctacagtgtaattttgaacatgagtatgaaaggcaaaatagaggtagaattaattttaatattttggctaagtttcctatgtctagcatgaataggaattggcaaacattaccctttacagaattccatctaaataaaaataaattctggctagatgtattatttgttacacttttattatctggcctttaactcattattctactgtgatgaaatacaaatttagcataatgactggtatagcatttcctataattttcattcaaatattaggagatcatgttagctctctaaattaatattttttcaagaatgttttgatgactcccacaatgtagaacatgcaaatgtaaactcatttgcaagggcattagcctcaatctacaaacctgcctgagagatgctctctaggctgtattattattgctaaattaatatcgctaggattgtgctgctgacaaagcagatgttttacatgcaaatatttgtcttctgttgtttttatgcttatctcctgccccaaatcaaggtttgatgaatatctatgtgagcatggtaattagttcatcagtagaaatagggagaaactgcaggtaatgctgccataaaatagctccaagccaactat

SEQ ID NO: 30760 - DNA, 1045 bp, Bovine  19866881828362
  misc_feature (1)..(1): n is a, c, g, or t
ntggtctgaaagtgttgtggggaacttttaccgggtgctgtatacagtgttcaaaaagaataatgtggaaaggtacttggcaaaagtgtaggaataaaaaactaaactcaatttccataaatggctagcatccatttatagtgtagtgtttttattcactgcagatgctgtaactcaatttcttccacaagattcaatacataaaggtggctggttagctcagttggctatcacatggtgctaacaacaatatgtaaaaacttgaaaaatggttgagaatatttgagaagtaataagctttaaaggcagttcggaggaagctgcaatacttatttttattaaatgtacatgttgaagcaaagaagaataatcttcgaagaatggcaatcttggtgctgcaatgcaatttagaggcaaataatttgaaacaaatgcactttttctatcttctaattaagataaagctcttaatcaggaaaatattaccaaatagacaaaattatttctatgcaaaggctactttaagtttcttatgtgtaatacattttgtgtaagaaacagtccttaattacaagtctggttatatgctttgtcagtatccaagacctttggccactttttgctacttcctaaacccattgtggggttgcggggttgggggcgggcagaaactggagaacaagttataaacaacagtacacagaaaagagtggataaaattctaattcatccattttgatatttcattaaagatagcaatagatatctaccaatacagacaattgacagtttaaatgaattttcagatattttgtgactttcagtttgaaacgaatggaagagaaaattcctttaaatcagtttagaaaagagtattatataataaaatatgcaaatatatttcacatttgtcatcattggtgttaagaattcaactcaaatgagtgttcctacctgtggtttgagtctgcacacaggaattcaagcatctgttgtttacagcaaagatatttttactcagagaatattaacaaagttcatactt

SEQ ID NO: 30761 - DNA, 1746 bp, Bovine  19866880362593
  misc_feature (1)..(1): n is a, c, g, or t
ncccaccaggctcccccatccctgggattctccaggcaagaacactggagtgggttgccatttccttctccaatgcacgaaagtgaaaagtgaaagtgaagtcgcacagtcgtgtctgactctcagcgaccccgtggactgcagcccaccaggctcctccatccatgggattttccaggcaagagtactggagtggggtgccaggtacctggaattatctatgtctgcagagtagccacatctatcttgttaaaagttaataatctttgggatgctgaaagaaaatgagggaaagctggtcccttcccttttaaggcaagagtgcttctttacagatatttttagctttttcatgtgctatgtgatattttaaataagtacccccagaaaggggctcaagagagagaaatgtaccctccaaaggcaagcaatcagtccagaatgattcctgtgcaacatgaaccctctgtctcaatactgttatttatagcagcacttggttgaaatccccaggcggcttctctttctgtgaaactggaagtgagaagtgcttcggggagaggccttccaggcacctcagagctgctggaagatccccaccaacaactccaacaacgggtgtcaaattccccatctgtgtgcacagtgtgggtacttcctcctgttctctgcccagtccggatgtgaatgagtgaatctggtacacacgtgtcagctcttcctcttgaaaaggaaggggagcctgtggggagtgatgatgatgtgtgtatgtgcgtgtgtgtgtgtgtgtgtgtgtgtgtgtgtgtgtgactgtgtgtgagctgatgaaatgaaattctagtcaatttttctgacttttttcatttgcatccaaatgatcctgctcttcctcatactgttatcttgaggatggagacctgttgcctctttaaatatgatgttttactatcattgttgttcctatgattttcactcacttactgaagcacatgctgcatttggattgcattcccaagggattccagcccatgattatgaagaacaagggcttcagaatcatatacagaagagttcccattctgagcctgcctattacccgtcattcagtgacacgtgctgagcacctactacatgccggctgtgcaagttctcctcccagcttttgtgttgtaacctgggtaacagctgacaccgaagtgaatgccacctgatgtccaagatggggtcgagggttgtgaagaaaaggaaactaaggtgaagggtggccagggaaggtgggctgaggacactttacaggaaggatggaccacaccaaactcctcggaaaggacgtgctgtacaaataggaagagcagggccagcaacagaaatgtcctcttggagagtaaaaaaaaaaaaaaaaaaaaaaaacatttatacagatgaaaaaacagtgtcagaagagcacacaattagataaccttggtgaaagcctttgagctttggattgcaaactaaatacagggatagtaatacataaactggaggactattgtaaagcctggaacaaaaatttctaaggggctcattacatgcctggttccaagtaggtgggctagtcattttcaattttccatcccttctctctccatcctgtgggctggctctacatcctaggcattctgacctctgtgaaccacactttccaggctccctcggaggcttagccacaggccaggaggagcgagggcatttcctttctgcttt

SEQ ID NO: 30762 - DNA, 858 bp, Bovine  19866880405003
  misc_feature (1)..(1): n is a, c, g, or t
nccttggctcccggaaacacatccattactactaaacagattaatccccttacctggaatgggagacagatagattaactatatggattttaccattaagaccaacaaaatgaggctttgtccaaaagaaggaagtttccccaacatggactctatgtggagtcattccagacgtcaaacactccatgtttgaatctggtagggtttgcagacaaatattggtggtgataacgattgtcccttcagcttcagtgacacaggagcagtgctgtgccaaacgccctcgacagatcctaaaacgtgtgcatcaacacgggaaccaacaagcacctaagacaatgttcaaataaacaaaacaaaacaccaaaaaaaaaaaaaaaagaggcagcacttctctgtgccttctctgctttaaaatgagaaaaaaccaatgtcccagcctctccgggctgtcaagactgtcatgcctttagatttggctttgaagatagactgatgatatattgaccatggtttactaattcaaaattagaaatgtatggtttgctaaaaacaagtgtacaaccagcatgtgaaaacacaggactgtgcaagaaaattccagacacgtggccatctcagactgagatctttttgtccacacacatcattttttaaagggggaaactgagataagtcaagtagctatgtattgactagcctgggaccaggaatcatgctctctactctactgaggacttctctcctttattcttgagtcaaaaaaaaaaaaaaaatccaagtaccaatgtcatgaatatatcaagtaatcagagccacagggagaagaaaacaatgtcacagccaggaagaattcaa

SEQ ID NO: 30763 - DNA, 1667 bp, Bovine  19866880406638
  misc_feature (1)..(1): n is a, c, g, or t
ncctgcattgattactatttggcttcatcagattaataactttgaaatcatttactcacagtcatagatttaggacagaatgagtcatcaaacatgaagggaaagctggtaatatttggtgaaagacaaaactaattatgttgatttttaaagacaaaattaagcagagggaagtcagaaagtctgatttcattaatattgagtaactattatctgcgtcacagttgcaggaaaaaaggcaagaaattggtctcatatttctcaactacaaaatgttagcgttgcacttgtcagggctgtgggcgtcccttgtggctcagctagtaaagaatccgcctgcaatgtgggagacctagattcagtctctgggttgggcagatcccctggagaagggaacactacccactccagtattctggcctggagaattccgtggactgtatagtctgtggcgttgcaaaggactgagtgactttcactttcactttgggagcgattgctccggagtaggaaatgaagttgctcagtgttgtgtatgtggagataagtctgaaataatgcatagaatatagatattttcccaatatgatgcaaagcaatcagactcagggagtttaaaggctgtaccaactgaataattgccaggacaaggttcaagcccaacttgcttcttggcatcaccttccagtatatcaagctccttcagtgcctggctgattcttacgttgcatggccatagtcttcctcttgttacttgctgtcaagagatgtcatgtaattagtgagaattcacaaacaaaaaagacactataagagaatagcataaagccattgatgctgatctggctctgataaagcttgccgcttcctacatttgtgctttgcatacgaaataaaaagaatgaagcctctgaaagtggggtgaagcacagtgtgttttcagagggattggaattttgccagggcgtggaagggtatatggcatgaaagagtataggacatgtttaactcagtggtgcctcggtgatttaaatggaccatgaccaagaatacctagacaaactgtaaatcaaaagagacattttctgattatgtaagtactacatggccactgtaaaaagtttgaaaaatatggaaatgttgcaagagatagcaaaatcactcttatcctgatgaagaaacaccactttgaagatatttttggtgtattttcaatgcatttgccatacatgattgatcctgtatttatataggatttccttcatttctctcattgcattttattgtaaacatattcccaatttattaagatttgttagttaatacatattgtagtgatgcagtgttatcacataatatatactctgtatttatttgttgcactcctgtggagatttaaggttgttccacatttgttgggaataagattatggtgaacttgttgattgttaaccctgcagttaaaatgccatgtaaatagggaggacttcttttttttaaattatgtactattttctcacattagttatttaagttaatacagtcagaagaaaagaaaatgccatttttataaagtctgttctttgggagttgttcattaaaaatcgccaacactgtgaaatagttcaccgaattaaaatgagagccaattggtcttgtaaagataa

SEQ ID NO: 30764 - DNA, 1966 bp, Bovine  19866880621987
  misc_feature (1)..(1): n is a, c, g, or t
ncaggcccaggaatgaagctatctcccatgtgcacgcccatgagttcaagccccattttcagccaggataggaaggcagacccaaccacaggcccaggagggtaaaaggaagggagagctgactttgggacccagagggaacccatcagtgtctaactcagggggacccaatcaggagtggtttaaaatcagagggaaccaatcagagtggtctaagtttagagggaaccaattagaatggcttcaagttcagagagaaaaagagtgggctcaaggtcagaatcatgaatgctaagaaagcctgtcacctgagcatgaccagtctcaatagcaaaccagagatctccaaatgtaggcaagtgtcagacagcagtcagtatcacttgttcagggctcaggggcgcaacctagaaacctcagcctcggaggatatggatatccagacaggtgacctaaccaaacatgattaacaaaaggctacaaaagaagagaaacaggaaatgcttatcctgagccaaggctgtgcttcctggagggaaatctccctgcttcctgtccaggaggcgattgttgaagattactcactctgtccctccatcccccaacagaagaaagtttgcccaagtgacaggagataaaagtgtgaggagtaatgctcaatagctttttgaaaagtctgcaaatctattagcaattacttttgagcagtattttaagaactatctattgtgtatctaccatgcaccaaatgttaaatcattatttccattctggactattcccccaaattaagtcctctgttcgtttttgtgatgatagcaagttgttggtactttctggacagaacatggaggaagttggagggaaacatatatatatatatatatatatgtcttgtgtaacaacaacaacaggttttcatttattctgcaaatattgctgattacttattatagtctattagtagataaaacttcatatgtgaactccaggagtttacaatgggaaaagaagcttggaattaaaataaactggtgaaattttgcaaagcacagaagaataaaatataattcttaaataaaagttaatgaatcttcaacttttttatgggctaaatatacacatggagattttacatagctggcacagggaatgtttttaaaaactcttttgctttatataacacttcacaactttaaaagttcttttacattatttatcagataaaataaataagttttgtaagagataagtagatctgggctttcatgtgcaagtatagccttctgtctacttggtttttttgtttgtttttttttaactgcaagttactaagctatttctcagattattccccagtttacatataatctttatgtagttgtgacagtgaaatcaggaagtttttgaacctaatttttctaattttaaaggtggtaaatgaaatacttaagttataggataaagcatggttgtttatcacatctttcttttacaacactcatgatactattatgttatctaaataaaggtatctaaaatagcacagatgaagaagaagattagaaatagtaagaaaggtagcagaaataaaaataaaagcacaagagtgtgaataacaggcaacatgacttaaaatgtaactatgctaattagaagaccagacccagaaactttcggtttatttccacctgaatttggactctttccaaataaatattcaatggtgtattaataatataaggctttaaattgtcagaggtagtcattcttcctagggcaaaataaaattcagagttgtagtgtctgtatcttattcgatctggggaagtacagaaataactgatgccaagagaaaatttcctattttgctttgagtgacagaatcagatatcaacattgtcatacaaacagtcaggtctgggattaattccttaaccaagatgaacagacacaaaagactttt

SEQ ID NO: 30765 - DNA, 1380 bp, Bovine  19866880637586
  misc_feature (1)..(1): n is a, c, g, or t
naatattaatagaaataatactcagataacttttacaattttgttcatatgattatttacattcttaatttgcttacatctgctttcttggggtatgaaacggatgtcttaaggcccatgaattctgggttagttaagtacaaaagcattctgcattctaaaaaacatttaaagtgaactttatcagggtgacaattatcctaattttatctctaagagtgacttgaaattgggatttacttttgaatacaggctgttaaactaatattcataaatatgtatttatatatagcatgaaatttccctatagaaaaatcacaaaatgcagaaaaaattcttgcctataatatcaccatgtagcattcacatgtcattttattgcattcataatcattttacaaaaatgaaactgtacaaaaggagccccttactttactaaatacctgttattttttctaataaaatacattttaaaattcattctatgttagttttcatttcatcagttttactgttcaactttgtgccccctggaacttgaaaagatgtagcttgcctttacaatttaagtgtaggcatcatttcatcaaggggataaaaaaggagatgttgtcctctactgtaaatcctcccgtgaccttccagattcctcaaggaaggaaaacatccctggtattccattctcagagtgatctttgagtgaggatagtgagtctatctttactccccaatgacatactttaaggagagccgctcctttaattatgcacagtggcaatgatatatttgaatagccacaaaagacaagtcaagtaacacttaatcgactttaattacgtattattcagaaagaattatttccctaacaagaattctagctcaaaattgcagctctgtgctgctagcctgggtgtttgacacatatttcagctcccaaacagtctggtggtcagatacacttttacataatattgcagaggactgtcttttaactgacaagtggaaatcgtgccaacatttctttcttttcctttttttttctttatttgttgcagcctcatgctctacagacagtatgcccatccttcaactatactgcttcaatagaattgtatttccctttatttctcacttttatgcctttgttttgaaaagcaatggtgtgtagataaaggcttaggagttagagagccagtgagcttagtttcagctgtacgtttgcttgctgtgtgaccttgggcatgttacttaacctgcctaatgctcgattttctaatttgtaaaatggacaggtcatattttttaaaatttgattgtgaaatctgaatgagaggcataaagatcagctgtcatcctgtgcgttggaatacaactttcctt

SEQ ID NO: 30766 - DNA, 3482 bp, Bovine  19866880642432
  misc_feature (1)..(1): n is a, c, g, or t
naaatcagtcctgaatattcacaggaaggactgatgctgaagctccaatactttggccacctgatggcaagaacggactaattagaaaagactgatgttgggaaagattccaagtgggaggaggggggatggtagaggatggggcggttggatggtattgccgactcaacaggcattgatttgagtaggctccgagagttggtgatgggcagggaaccctggcatgctgcagtgcatggggtcacaaagaatcagacatgtctgagtaactgaagtgaacttactaagtctgagggcttccctagtggcctagacatttaaaaatctgcctgcaatacaggagacccaggttcaattcctgggttgggaagatcccctggagaagggcatggcaacccgctccagtactctcgcctggggaatcatatggagagaggaacctggtgagatatcatccatgggatcacaaggagttgaacacgactgaatgactaacacacactcagtctaaagtacagattgaaacttctctggactgagaataagctgattgggctctaattctttctcagtcaacaagcagattgttttaagtaggatgtctgatttctcatgactggggcatgctcagaaagtggggagaatatctggtttaaaagattcctggtagtttaggaataaatcatatatgacatgaaagaaatacattttttggaaagttaagatagttaaataaacttaggctattttcattttaattttttctcagcaaacactctgggccaatcctggcaaaagcctttgcaccccagctggaaaacttcaccagctcataggaaatggtgtctcagaagcttttcacctcactgctgctgagccgcgagattggaggacttgctgaacgtatgcataatgcatttcaatatgcttttcatgtgggcgatctcagtcttcccacggtactctacttaagtatgattctttcaatgaaggagtcttcataagcaattgaaggtcaggtcaggtaaactggccaagaccacacaatgagaagaaattagcagaacttcaactacagcagattccttttcctccgggttcatgtctttgttctgctataagctgccttgtgttccatccccaccaggactctgctttaaacacacagatgatatgttcttagttcacattaggtgttggtgagccttttccctgagtgaccaagcgcagggtggcatgtcatacacagaattcagtggcccagcagttacatccccctgaagatatgtggtgccttttctgacctctcccattggtctaattttttcttattcttcaatttctttccttgccatcttttcccttttctctatacttttctctactcagtgctgtgtcttggggatttggtgagagaaaaatgagtgaggattaagtcattgcataagcgagggaagaaggctgaagcattttaggttttgttttccttttaaccaaccaaaatgagtgaaatatggttggtggtacctattttgttatttccaaaggccttgggattaaaaatataataaatgtactttcttaaaatgcaggttaaatgtatcttatgtcttatctctttatacaaatctccctattgtgagaaaaagagaccaaaagtatgctggcgtgcttaaaggaggcaaaagacctgtatgtactccaaaaaactataagacactgatgaaaaaaaaaaaaaaaaacctgaatatgcttaggctgaatgaatcaatattgttaaaatgaccatactacccaaggcaatctacagattgcctataaatttacccatggcatttttcacagaactgaaacaacagaaaaaaaaaagaaaatttgtatggaaacacaaaagaactcaaatagccaaaacagtctcgacaaagaagaatggggcttaaggaagcacattccctgagtgcatactatactacaaagctataccgatcagaaaagtgtgtaactcgtgcaaaaacagacacgtagatcagtggagcaatttagaaagctcagaaataaattcacacacatatggtcaattaatctataaaatggtggcaagaatatccaacagagaaaagagaatctcttcaataaatagtgctgggaatactagacagatacatgtcaaagaattaaattagagcattctctaacaccatatacaaaaataaactgaagtcaggatttaaatgtaaaactggatattataacactcctagagaaaagcatagtcagaacactctttgacatatatcacagccatatttttggattcatctcctagaataatggaaataaaaacaaaaataagtgaaacttaattaaacgttaaaaaggtcttcacagcaaaggaaaccatatacgaaatgagacaacttacacggtgggagaaaacactttcaaacagcatgatcaacaagggatagatttccaaatatacaatcatcttatatagctcaatagcaaaaacaaacaacccaatcaaaaaatgagaagaagacctaaatagacatttcaccaaaggaggcatccatattgccaacaaacacatgaaaaaatgctcactatcactaatttttagaaaaatgcaaatcaaagcttccgtgaggtgtcacttcacagtggtcagaatggccatcattaaaaaatctacaaataagaatactggtgaagacccagcaatcccagtactggtaatttatctggaaaagatgaaaactctaattcaaaaagaaacatgcccccacaatgttcatagcagtacaatttattgtagacaagacacacaaacaacctgtgtccatcaccagatgaatggataaagaaaatatgctatacatatatatgatatgtttatgtgcacacacacaatggaatattagccataaaaaagaatgaaataatgccatttgcagcaacatagacagtcctatagacagtaatacaaaagaacttattacaaagcagaaataggctcacagacagagaaaacaaacttacagaatcaaacgggaaagggaaggggagagatccattaggaatttgctgttaacaggcatgtgtgtgtgtgtgtgtgtgtgtgtgtgttgtttagtcgtgtcggactctctgcaaccccatagactgtagcccaccaggcccttctgtccacgggattctccaggcaagaacactggagtgggttgtcattttcttctccaaaagaaactatagaaagaaagtgaagtcgctcagccatgtccgactctttgcgaccccgtggactgtagcctaacaggctcctccatccatggaattttccaggcaagagtactggagtgggttgccatttccttctctttattaatagatagatactagtatatttaaaatagatagcaagaacctagtgtataacacaggtacctatattcagtatcatttataataacctataagga

SEQ ID NO: 30767 - DNA, 1211 bp, Bovine  19866880644465
  misc_feature (1)..(1): n is a, c, g, or t
nacagtggtgaccagtctctgccctgtggtctaaaataaaaataattgaaacatggtgttactgaaatttctagcttcctctcacagtcactgaaagggaaaggacagtgaaccgggtgggtttcaaatttcagacttcctgtcccttagacagaaaccaactagagaacctaaaatcggaagaagaaaaacaaaaagacactagagttatcaagtagagaagaatgtggtagttgaaagtccataaatacattctgaggtggcgctgcattcatactctgttctgtctctaggattctccagcttctcacagctgttgaagggtctcaaaccactgagactgttgagttaatacactaaaagtcactatcagaataaaacatgaagtgctctttggaatgcacccgtcatggctggaaatatgcttagccctcacaagttacaaaaactgccccatctcaaaccattgcactacagcatgaatcatcttgggtaatcttgtccaatcttcgcttgggtagtttctaactcaactggcagaacaaagaaagtcagtgaatctcaacaatggcacacacagaaccacatgaaagcttgaaagccatgtgcagtggtgttattgcaagtaagagaccaaaactgattcactaaaacaagctcttgggttccaaatgtaatagctacatgtgaagttacagaaccacattagggtgaggtgaatgactctgagattgtctttgctgtgaacactgctagtcagagcacacaagtagtctaagtggttttggagaaggggctttcttacaaatggactaataccattcattctttttggatacaaatcgaagcagcttaaaataaaaaatgagccttctagttcaagaaatcaaatgatcaaatagcttattcctatgtatggatttgaaggtatttaaagttaaaacaaactgtttttcatgctctctcaattaatcattttcttaatatgtaaaaaataataactgcagcacagtaattggttgagacagaaagaaaaacaaaagactgaacaggtttgacaagacaatcttgcatcgcaggtaattaatttagtagggtggtttagatactttgtgtacctatggaaagtgatgcaaaaattaatatggaccgaacatagctgaccctgtgctgactttcatgtggattctaagaggtaatgcaagccttca

SEQ ID NO: 30768 - DNA, 2555 bp, Bovine  19866880662874
  misc_feature (1)..(1): n is a, c, g, or t
ntctcctttgattctgatgtcaagtctctcttctctgtgatgcctgcctccctcttataaaggcccttgtgattactctgagttgaacaaaataatccaggatgctaccatcacaagtttcttaacttacttcatatctacaaagttcattttgctaagtaagtggcatattcacaggttccaaggattaggatgtgaatatctttagagggccattagtcagtctaccatactaatcaactgatatgtgatggaacatttacaagttattccttccttccatttaaaattgttgagtacctctcataatataaggaatctgttaagttttagagacacaaaaatgaataagatttttcaccattcataagaataagaaaattatttagctcttaatatatatgtgctaaatactctagatattgaattcttcctttactcttactggtaggaagcctatgatttaagctctattcctccttccattttacagctgagaaacctggatcactgagcagttcagttatgtcccagtttaaactggtggtgaaaggtaaaaccagcatctaacttgggtaccatgtctctgagtctgtcactcacctgatttgctccaagatggtcctccttacagttcaatatctacttcttgtcagtataaatcatttagagatcagctaactttaagaagagttcctggcatgtagtgagtagtctgtaaatcacaatgatcgcaatgatgatgatgacaagttatgatacttatgacttgaaaaataagttggctacatttattagggaaaggtttgactgaggagaagctgagctctaatgttcacttactcatgagccttgctagagtactgaacccaaatacagaaattttaaatgaaggggaattccagaagacaagccctgatgaagaagaataggcatttcttggttgcatttttatctgaagtctctactatttgctcctggaatgaaacagtgtatttgtcctatggcttttctaattatcaactaattagggaaatgatggataactgctgcctcttcccagtcctacaacaaggtaggtgggccagtgccctgagcaaagaggtgtgacaaatacccagcaaggcacctgccattagcagtgtaatctcagccccctaaacagtaaacccagccaatcttttaaactgtcccatgattcgatttactctgaattatgccttctctcagatggccaaatccaggaaattctacatcatctcatgcttaagcgaaatgtattgaagtacacaaattaacatcccagtttattagcagcaacaaaaggaaatgtccacaaatccaaacccagtcatgataattgaatttctattaagcaatcctgggaggtatagttttactaacaggagcgggaaggaaagtcattttagttgctaccgtgacgaaacgggcctctgcagagattaatcccaacattttgcttactttagtgattgagatcattttctcagtcactcacaccaccaccactgacactctcattcttctggaatttaatcctgaattttatttcagggatattattatactgcctttctttatgccacattagttttttatttgtgagtctattaaatggaataatatttaagcctttaaaataagttattgaatcaagcctaaatgtaagcacccacagaacagatgatgctgagaagccccttgtcttataagatctccagatcaattgcaagctggatacgcccatgagtagtcatcttgactgtcatgcatggctggtatcagaagaccttggggcttgtaacatctagtttgaaagatttggaaacacaactttaaaagattttcaagcaaatttagcattcattcatccaaagcttgttgagcgagcggttattatcctagtggggaatgtgctataggagtaggtatatttatatttagaagtgaggggtgaggatgggagaaattcagaagagcttcacataagagctgggttttaatatgtaaatttaaagagagacagatgggtgagtggaggagaggaagggaaaagaaatttcaggcagatataacatcaggaaaaagagtgaagaatcttgagagctgtgagtaccagccaagaggttttgggtcttcctttggtaggtaatggaatgttatacttaagaaacaccctagatcttaagctccctaactattcttctaagattgatgtggtggtggtggtgctttagtcactaagtcgtgttcaactcttgtgatcctgtggactgcagcctgtcaggcccttctgtccatgggattctccaggcaagaacactggagtgggttccattgccttctccagagattgacatgtacacactgctatatttaaaatgggtaactaacaaggacctactgtatagcacagggaactctgcttagtattatgtgacagtctagatgggaggggagtttatacatacacatatatgtatgtctaaatttctctgctttatgcctaagctatcacaatgctgtaaatcagc

SEQ ID NO: 30769 - DNA, 1254 bp, Bovine  19866880671069
  misc_feature (1)..(1): n is a, c, g, or t
ngggaaaagcatatggcattgacactgatttctgaaagacttgaaagaattttatagatttattttataggtttatcttgagtacgatttgatgagtttgaaaatacagtccctttgttcaccacctcaaatgcctctggaattagtatggtcacataagttcaaataacatttacctcctttataaaaacagctccctcggaaaagcaaatttgaaacagcctctgtgtttggtgtctttcaaaagatgcccccaaaagtgaactgaggcctcagtttgtccaaattatttttccaccaaaatgtgacataatcatcgacgcatgaaagagtgtgtttttgcccatgattcccacacacactatgccccagggagggagatgaaaaggatgagggtgagaaatctcggatcgggtagttccctctctccgaaaagcttcaaatcaagaaaatgacatgtagcttcttttacagtgggatcaaaagaaacctacagacagctgtgtttttgtgcacatggatttttttaagcaagtttgtagttcgaatttttggtctcaaagaccagatgttggtgataatagaaacttccacgtgtacttgggaggaagaaagagaaaggagatgctttaccaattgaaagcatgtttttcttttctttctttttttaatcataaagtgtaactgtaaaatatcacacaacaaatagtcatttacaaactttaggatccaccaaagtcttgatttccaaaaacccatagagtcacagaaaaaaatgataagaagatgctaagcataattgaatcaggtgagcacaatggtcagtgaacttggctttggacttgtgcctaaaatatgacatgcttaaatcttatgtgttttgttttgctattaatttttctttttgctaagaaagagggaaaaagaatggtaaagataaatagagttcttcccatgtttagggaatagcatgaaggaagctgcatgctgcgtgctaagctgcttcagccatgtccaaccctgggcaacctatggactgtagcccaccaggctcctctgcccataggattcttcaggcaagaatactgaagtgggttgccgtgtccttctccagggaatctttctgaaccagggatcaaacctatgtctcttgaaggaaacttggaaaagccaaaaaaaagaaagaaagaaagacaaagaaaaacatgtatttaaagcaatagaattgcaaaggagaaaataaaatggaagcag

SEQ ID NO: 30770 - DNA, 1201 bp, Bovine  19866880681203
  misc_feature (1)..(1): n is a, c, g, or t
ngaggctaacccggaagaggaagagattccaacccagcatcctgacaacgccgtccctcctttggaggatgaataagtgaaggagtggagagtacaagaaagttcagggaaacgctctcctcatcagaaagcagagaagggaggaagaagtgagcatcccaaagcagatgctgggtgtgctgggtgttacacactttacatgaggagttttcctcacgcaaacatccccagtttccaattttctttgggtactcatcactttcatatcagtctctgaaaatgctaccttctacaagcctactttctcagtggtaaagcatctgcctgccagtgcagtagatacacgaaatgtgggttcgatttctgggtcaggaaaatcccccggaggagggaatggaaacccaccacagtattcttgcctgggaaaccccacgggcagaggagcctggtgggctacagtccatggggtcgcaaagaagctgcaaagagttccctaaactttattgcaaagagcaactgagcacacaccacatacactagccttcttttagtctctgttgcaaagtcagttgcccattatttgaaaaaaaaaaaaaaacaaccctagagctatggacaatagaaggtttatagcatgctctatcctcttctctgagtattctctcccatgtgagtttctcagactatcatatcttcgaatgtactcattcaaggtagtcagcggtgacatttggcaattcaggtcccacagcataatccaaaggatggggtgggtgatgtggggtgaaatcttgatactgctaggccttcccagggagacaagaatggatcctctccctgacttccccctccatctgtgccttgagtggtctgagatgtgctttcctattcccttctgctactatttgcctagcagtaaatattgactttctcacagtcagaacccagggacagattcttccaggtaaaatgtcatagggtatagtttaccattaacagacataatgttcaggcaagttagagtaataatctttcaaaatttctatagctaatagactgtggtctactgatttaagactgttccttcagcactacatttttttttccccctcttttgagagccagatcacagttttctggacttttgtatagaatatccaattagtgactttccaacagtttaatccagttgccttaaagg

SEQ ID NO: 30771 - DNA, 1749 bp, Bovine  19866880720843
  misc_feature (1)..(1): n is a, c, g, or t
naaatcccctggaaattgtcatagtaaacctgcatgatttctctggataagaaattataatacctgaatgctactcctattctgtcaaaactatctctgtaatcttaagggagtggttgaattctaagattcagttgttgtattctaatattcttcatctctaaattggggaagttggacttataatcacgaaaatctcttccaaatatagtatttgttgattttattcttaataaatatcacagaatatctatattacttgagaaattatgctaaatgtcttatatgtattttctcttttaatccccaagtaaatcttatttaatcccaaaattcttactgaatctttgaggtaactagttatactagagtatagataagaacattgagcaatacatgttcaattacatgccccaaataacgtaactaaataactgttgagccaaggtttgacctcaaatttggattcagaatctttatttttagttacagtgctatcctaagtcaagatttctaaacaagactgttgttaataataaaatatttccttgtatgtgaaaaaggagttgcttgttaatgcttgtcattgtagttattggtattgggagaaacctcaaaaataaagtctagttaaaaagaaagcctttcaagttgaaactaacatgatgtaacttttgttcttaagggctttcggagaaaaacattttatttcttttacctcttaaacgagcctagttatttttctctctttttaggtttcaatttttcataatatggagtctcagttatgtttatgatacttcactcttcaggcaggccataattctctctttgagcacaaaaaatttttttctgaaagctggtgttctcattttacctgcctggaatgaatttatgcgtacatttgaccagaaagaaacactctagatgataaatctgacgccccctgttccagtgacctactcgttgctttcagtggtttctaacacaaataataggccttcatgcaccaaaaaaatatttcttttctaagaaccgtggtctcagtactctttctgagtcatatagaaatgactatgcccatgtgtcttagagacagtccaccttacacgcttagcttccaacgtagttagcctctcattgatgtcctctaccttcgctactttaaaaatctgtcttatgatatactacttagaatttagtatcactggatgccattttattatctccttcatgttcctaacttcctcatagtcttttctataacaattatttttctgatctgaattatgttccagcctctcccaatttaatgttatcagaaaatttcattaacatgctgtctgtactttcttacagatcattagtaccaaacctgaagaggtccactaggtatttcccccagaaggctctacagcctattagtcattatcttttacttatgatcttttagctcatttttaattcaagcaactgtgttattccccaggccaatttcaacagaatttacaaggaaagctacaggaacctggtgctctcaaggtcttaatatgtattttaaagaatctctgtatatatcttatactgcacttatacattgcctagctgccgctgctgctgctaagtcgcttcagtcgtgtccgactctgtgcgaccccatagacggcagcccatgaggctcccccgtccctgggattctccaggcaagaatgctggagtgggttgccatttccctctccaatgcatgaa

SEQ ID NO: 30772 - DNA, 1378 bp, Bovine  19866880723624
  misc_feature (1)..(1): n is a, c, g, or t
nttttgaatgagccgagttaaaagatgaaattctgcactggtttctagttataaaagaaacttctgttgcacagcatctctgttagttagaaagcacggaaatcctactctctgttaccttctgactgctgatcctaaagagccatatgggtctcgattctcctgttagtaacttaatgctctgtgtaattaagggggcatatgcttcctgcacaaaatcagtgttagatctcctttatgtggcagaaaccaacacgaaccaggttgtaataccaccttttatgctgctgccaataaactttaaaattgctttaataaaattcagagaaaataacgatacatcttgtagttttcccgtggattattcaagcttattctgggacttcctgatcaggagaacatagcactttgtcactccccagacccttctccctacaaacagacttttatggttacaatatgaccagatatcagacgaagctaaaattctcttcagaacctttttattctttgtgaaacttatgtactcggagcaacattccaacccactgatttttaaacatctcacagggaatcaatttttcttttctattagcccaggctctgtaaagcataaactacaggtatatggtcaaacaaatgtgagtcatctgtataattttatacatgaaggggacaaaatgtcatatcacctttttgtttcatgttctgaagaattgactgtctttgatcttaactcagaatagctgtagaattaagtcctttatcttgatgccttattctgcttcaagctgctggaagaatgatctaattcctttcctttgttctgcctagtacactttagagctatcagaaaatactgatttttactaaagcagtaattgtcagagaccccagctaggagtcatgtgatggggttctgcacaaatcagaacccactgtaagcagtgggattttgaaatttgaaaactggaatgaaaagcaaagtgatgtatgaatatgtgagtcaatttttatttgttctgtaggagaaggcgatggcaccccactccaatactcttgccttgaaaatcccatggagggaggagcctggtgggctgtagtccatgggatcacgaagaatcagaaaggactgagcaacttccctttcacttttcactttcctccattggagaaggaaatggcaacccactccagtgttcttgcctggagaatcccagggacgggggagcctggtgggctgccatctatggggtcacacagagttggacacgactcaagtgacttagcagcagcgacaggagtgtgcggtcatcactgcagttattctgtgctggggttgtgcttagtggtctcagtcatgtctgactctgtgacc

SEQ ID NO: 30773 - DNA, 1967 bp, Bovine  19866880729433
  misc_feature (1)..(1): n is a, c, g, or t
nctcatcacagagcactgggttgagctccccatgtcacacaacaaattcactaccttgttctttttgtttttgaaataatgtgtctcttttttaatataaagttatttattttaattggaggctaattactttacaatcttaaaacacttaaaacacttttggagccagggctattctcttttttttaaaaaatgcaactgaatccctgccaactttcttaagtatccaataacttttgttgtttctcataatacttagaaaagttgatgttaaccagcttgagaagtgaagtattagttgctcagttgtgtccagctctttgtgacctcatggactactagcccaccaggctcctctgtccactggaattctccaggcaagaatataagagtgggtagccattcccttcttcaagggatcttcttgactgtgggattgaacctgggtctcctgcattacaggcagattctttactgtctaagttaccaagggtagctagcctgtggcaatatccaattcacctgtaaatttagttaaaaatataaaaactgcaaataagaagttttaaattattatctaatgcaattgtacccttttttctttctttttaaattattcaaacctgcaatagtttgtgcctgtgtaattcaaagaacttgctatctgactctctttttaagagtcagggcatatttcaaaaacactttttaacttccagcttgatatttttagaatactttgcctatgaggaagttatatgtaaattataaggaatgaatctaaataattaattttcatttatttttatgtactctctcatctagatgaaagctgaatatgtataaacaaagtaatgttattattgtatctccgtcttttcaccaaactgatgaggtgacttctaaaaccatccagtgtttgaattgtgttcattttgtatcaagtattgttctaagtgactttacatattttaaattacttaacctcataagaatacaatgagataggatggttattattcacagcctaccacagaggatacaggtcacagagagtttgagttgattccccaagctcacagatgcatggagctcagattcacacccaggctcactagcagttgaagtccatagtcatcttattagacaagccttgaacagagaggcatgcaatgataatgtcatagaaataaaggcaagggaaaatatttaaaaaatcagccataacattccatgcatttctcaggttgagctctaaaacatttttctttgaggctcttcagaagaaacacactaacaaaccaagcaagccaaaaccagtcagctgcaaagatctcacagagaccatttcttttttaaattgaaaagaatagcagcttttcaaaacaccttccaaatattgaatttgagaattaattcttcaaattataaatgcattcatgctttgacccagccatcctgctctaggggatttatctaactggtagacatacatgcatacagaaatgattcatgaaagctaaccacagaagtattggacttaatagaaaggggctgaaaatagctcaaacgtctgtttctagggactagttagagacagtgcatcctatgtgtgatgccagaagggcaaaaaatatgtctttaaataagatgaaatgttcatatcataatatatagcataatacactgtaaatagatcaagaaactaaatataactttggctttccaggtggtgctagtggtgaagaacacacctgccagtgcaggagatgtcagagacaagggtttgatccctgagttggaaagatccccttgaggagagcatggtaaccaactccagtatttcttgcctggagaatcacatggacagaggagcctggcgggctacagtctacagtgtcacaaaaaatcagacatgacacgagtgaagtgacttagcctgcatgcaagtatgcctacttatatgt

SEQ ID NO: 30774 - DNA, 956 bp, Bovine  19866880772478
  misc_feature (1)..(1): n is a, c, g, or t
ntaagtgccaagtactgcgttttcttatagattctggtagagcagactgcaaatgccatatggtgaccgtggcagggaggtgaagggtgtacacttctggaaatgatccatcccaaagtctccattgcatacaaggaaaggcacagttcaggtaatgagtcacaggccaccatcacccttccctgagacctttaggtcgagttcagatcaagtctggttctgattagtctgtggggacaggtgagatcagagccagagtgtgtctgccttcagggtcattgacatacctctctgatggaatgaatggttcttccctgggaaaggcaacaggagaacaagttccctggtggttgactctgggctgtagagacagacaacaggttttaatctcggtagagggagacttgctgcgacgcgcctggcttttgacatgaatgctgcaactgcttgtgctcagaccttaaattggagtgagggaaaggcgagggtctgtcattggctgatgatggattttcatcagcttgtaacaaaatggaataactcagacagcctgttgaaataaatttaatacaattttgaaaaaaaagaaaaagaaagtagattcatttttggcagctaaattcaatcttgtgagaaagtcaagctaacacaatttgaagtgccacaaggaccttaattctcccccaggatttcgtggcttgcccttttctctctctctcccatgactgtttctctcttccttcaaggattctggtttcctattcctcgtggctttagtcccttcctgaactgtttccatttcctctggacatgaatctaagctacacacccttagtgttggttctaactgtctcacctaaggttgttcctggggacttcattctgctgtctggatagaaggtgagttcatcccaaatgggctccattttgtactcaggtctttctgtgtccttaaa

SEQ ID NO: 30775 - DNA, 877 bp, Bovine  19866880794521
  misc_feature (1)..(1): n is a, c, g, or t
ncagtttttcttcccattgtgcccccgtttttataagtgaatctgtcagcctcccaggattaactgaagctcactgctgaaaatgaatcatacactttagggcactgatatattcacacttaaatttatatcagaaaagaaaagaaaatcattgccttttctggagtttgggtgacagtcccaggtaccattctaatttctttacagtaatggatgtatgatattctacaaatcgtggtcccactgtcgaaccaccgcggctcctcgctttggggcaaagaaccacacctttttgtcacaggacaacaggcttgagcaagttttctgttcctctttatgcatacgctcctccctggtgatctcatccagaattgaactaaccctccttccacacacccaggactccctcccttggctccccaccctgacgtcccctgaattccagggcgcagagtccactgccgctttccccaaatgtctaactggcacaatcagactcagcgtgtccaaaacagaactgaatccacccacagcctgtccacccgacctcagtccagagccccagcatgtaaaatgcaggccccaaatcttggaggaatccttgactcttttttctttggcacagtctccgctgagtctattaataactttaaagaactccaccttcccaagcaaacgtgcacacacaggatctgaccgtgtctcagcatcgacttcgctccctcttggaccagatcacagagtactcttgcctccgctgaactgtgttactgacagatcttcctgcctccagacagtcctccaaatgcaaagtaaatcaggtcattgcacaacgtactcagaagctgccagggtctccatcacattagaaagcaat

SEQ ID NO: 30776 - DNA, 1240 bp, Bovine  19866880805648
  misc_feature (1)..(1): n is a, c, g, or t
nttcagcaagtggccgtcactaccgtcagtctgtcgcactaagttgacgaggaaagggccaatatttttaatgttgcatgcggtgctgactttctcactgttacacaattcattgtttaaaatatgtgtgtgtgtatgtatatacatatctatctatctacagatatacagatatcgatagatggatagataggtacataggcacctggtttttttttccccaccagttttacaggtaaccattttgaaagctacgaaacattccactgcagcagcttttgtaacttgtgccagaacaaaaaaatcacaggcacactgtgttaactaggcagtgtgaaagcatattgcaaacattattatcagagaagaacatctttataagtccataatcattttgaataaatggcagcagtaacaatgataaccgatggatgataaaccaagaatagatggctacgcggctgtctctgaagagtcaccttgtaaatcagaggcccgagcaaagggaaggatgcgctggcttgacttgcaggcaggggctccaactccgatcatgggacaaagacagtgacactgcagcaaagggaggggaggtgggggtcgagcgtgctacagactatcctaaggaactttcatttcacgtgtgtggcttatctagctcagttcaggagcattcttgtacaaagcagattgctttaactcacagaaatgctcagtcacagacagctttcttggtgggtgaaattccgctgccttgtggtggggatgaaatgagtctgatggacaccttgatggccgcccctgctcctgaaatccagcctggcgctcagaatcccgggatctccttgcaaacctggcatctgagcagcagaaacacatccctctcagttggaacctcataccttctgatctgccctggcagtcctgatagaaatcagcttttggaaaccctttgaattcttggctttgagctgaccgacctctgcggtgaatctccgctcctcttccacccttcccgaggggtgcggtccccctgccagctgggcctctgaacctcgggcttctgttcccccggagctgtctttgaaggcagagggcgccctgcagcggctgatggcagccgggaggtgtgtggaggggaggacagggggccagctgagagccgtgttgctctgtgggactgcaagtttctcctttgcctctttatccagatagatcctcacttttattttaaatgcat

SEQ ID NO: 30777 - DNA, 1781 bp, Bovine  19866880805835
  misc_feature (1)..(1): n is a, c, g, or t
natatctcttgtgtatcctgcactgacagatggattctttaccactgagacacctgggtagctaaatggaataaggagagatgaacaggatgaatgcctgaggctccgaatcaaagctgtttagagctcgtattggaaaccctgccctaaactgtgcttcttcccacggggcggaagagctaatgaacaacctgcagcagcaatttgcagcctctctaaaggctgtggagagcaagagggtgcaggagggaagacagaggtggcccctttgttccagagaaccgttttccagccatggttctgctgctaagtgccttcacttttgagtgtcaaattgttcatctgtaaagaagggacgataccgcctccttggctgtactatccagaagattaaagcgaggaatatatgttaagtgcttagcacggtgtctgggaggggacgtggcttttaaggtgttcagtaaaccttccttctctattgcctgtaaaactgtttgggaaggcattttctagaattgggaaggaggcttattgcactaagtctttaagagattattcacagccttgtatgttcatactctgtacttcctctgattaatgatctgccattgagttcaccagtgaccagtctagaagtaaaacagtctttcttttcttgcagtctatgctgtaattgaaactctggctgtcagagacagtctcagaaacttaagagcaaaccctcagttattcggattgctttcaggtttgctactatcttaaatatgccaacagctatgtattttcatccccatagttatcttctggtgcctcgtatttggttgttttcctctatctgggcatagaagcagggatgttataatttgtctacaagtatctgctgtctccaaacagtagagagagccccttacacttataaagtgataaaacattatcattgttttgtgttcggtgcttacaaattcagaattgtacatgttattaaaagctttcaacacttccttttccttctttgaaaaataatcagcatgttgcctctagcattctttcaaggaaagtcaaagactatgctttccaacttctgaaaatctaatgcctaaagcaacagcagtgcaaacggcttgtaccttttgtgagtagcctaacaactcatttgttgattttgttttcaaacatgtttcagacgcagtttgccatattaaaacgattgcttgcttggtggtggaaatattctattgcatcagagaaaagacattacagacacccctcgaaagcccttcgcatatacccccaagagcaatgacacactacgcttagaggagagcaaaaatgctgataactaatccaaatccttgacgtgaaattcacacaatgcccacatgttgtgtatttctgtttagaaaagtgaaaagctgaatctgtccatgtgagctcctgatcttaaatactgttattcctctaaatatagctcaggacatttgtcagcgaactgtgaagctcttgttaaaaataaaatggaaattcaaatcttgaaataaataagacgcgatttgtaatgcattgcctgtttttcgtttggggttggcccatctgaggccctcggaatgggtgaccccatttaaataattattcagagactatcaagcgttataattctgatgtctctttttggtgttggtgtagaaaacaacaaaggcgaatcgattttttaaaatgtatttttatattttgtcaatatgtataaaaatggaggagaggaagtgaaatgattcattttaaat

SEQ ID NO: 30778 - DNA, 1121 bp, Bovine  19866880845931
  misc_feature (1)..(1): n is a, c, g, or t
nacatatatgaacacataatttcttgagcaaacacagccgcattagaaggagaaaacacaactacttgtgaaaactctgcaaaaatcctgcaacacaaacagcatcttcactggctcattaattctggcctaaatttgctactgtcaggcaaatcaggcacactgtccggcagacacccacctgctattaggctgaatgtgcctggcgtcttgacattctattgattccaatccaaagcttatgtaaaaaaagtcagctcagagtccaaaaggaattttagccgcaaatactttgggacaaatccaaacaactaaaaacagaaaggaagacaagatgcaaatctgagtgacaaaattgagacaacccaaaccagcccggtagaagctcaaggacaaatcaacaaaggacccagcttccccttttgacaactaccgattttaggacattccaacagccaccgcattgaatgggacttcccaggtggctctggtaaagaattcaaccgagaatgcaggagatgcaagagacttgggttcgatccctgagttgggaagatcccctggagtaagaaatggcagcccgcttcagtattcttgcctggagagtttcacggacagaggagcctggtgggcttacagtccataggcttgcagacagtcagacatgactgagcaaccgaacacccacgctggacgaatctgcactatcactacccacaatgcatttcgttactgcgccacaggtgctgctttcaaagaggattgccatttctgcccccggagccctgtgagtcttcactagaaacttgctgtaccgtccataggctcctgatcacgacaaaggttctgaagctgttccgaagaaccagaaaccactcacagtgcttaagaatactgcatacgttaatcttcagaacagccccatgagctaagagttttattgccattttacagataaggaaagctgaggttctgagaggtaattttctccaagtgactgaaaaaatgagagactaaagaagatagggcatcaggattcatttcgaaagtttctggcacctccccggcctccctccactcctgaaataacctcaacctaaagggaatgggtgtgtgtccaa

SEQ ID NO: 30779 - DNA, 748 bp, Bovine  19866880860979
  misc_feature (1)..(1): n is a, c, g, or t
ncacacagtgagactacacccggcctgaccaaatcccaaagagctagagactttaccattaaaattttcaaaatgctgaatacatgttgaaactctttaataagcctttaagcattccccccctctcaccccgtcccatcaaactcacaaaggcagagagagagaatgttgtgcccttttttcagtaattatgttcagacaggacctctcctggccagcaggaaaaacgagaatgggaaacaaatggcttccaaatttctaacgtggtgcacaaagcatggagaggggaagaaagcgtccgcccccatccccatcctttccccttttagccctgccagacatttcctttgttctatttcctatctctctgagattaaagtgctgatcgcctcctttttgaaaatgatgtcactttttattcttgccttggcagagagcaagttcattacaaatctgctgtgtgactgatggctttgaagagataaggcagaggggaaaacacatttgggaaaggtatgaaactcaagagacaggttgacaattaaactggcagtgggggcgatgacggaggataaggagaaacagaggctgggcgtaaataacttttccctagtctcttttacagccatcaagaagctatttttatttccttgatagttttctcctgaagcaatgccacgggctaaaattcatttcgtgtttttgcgaccgtattcatccactttgagacgtatttccggcaggtcat

SEQ ID NO: 30780 - DNA, 1542 bp, Bovine  19866880915612
  misc_feature (1)..(1): n is a, c, g, or t
ntccccttgattgtgcagggtttgcactatgctaagaatgacaacaattatagaactgacttgcatctgccaagtgaacagatggtcttgtagtttggacgaacaatggtgaagaaagaaaaggcaagggggtgggggtgcgggagctggtgggctgggataaagatcttacaattcaaaagagcactaataaaatgaaagataaagacaaaggcatgttgccacgcattactgaaatgtgttttaaaaaggaaaaggtcttgctgattttactcttctcacgttcctctttcgaatctaattccaatgcacttgaggccgatgagcaatcaaattataatgttgacactcttatttatagaaatagttattgtaaagtgtcatcaatacgagtttgataagggataactctttgtctttaggagactatatatttccattttcatttttagcttgtgaaacaaacagaacatgagtaagaactaggacttcaccttcacaaacttcgaatattagagcagtgaggtaattgttttatctttataaagtcattttaccttttctgcctaaagtggaataaagctgtcttcttgggaggatcttcattaaataggatgtgtgtgtgtgtgtgtgcgcgcgcgtacgtttgtgtgttaggtaatgcatacaaatagtcctacttgcttgctttgaggtgtctggatcacatttgatgttgtatctttgaatttaaaactatttaaacctatcaacctgcaaggatcctcttgcttaaacagttttcttatagagaaaactgaattaccatttgagttgcattgaggtgacagtctatatatatatacatatatacatgtatatatagtcttgaaaaattattcagatatttattttctttcttttaaatagtatttatggtacttagtcaccaaactaaattataataactcccatattctaaatgttttcttagatactgtgctaaaaatttttttgtacattatctcatttaaaatgtacagcaccgctctgaggtgggtatagagttttactgtttctcttttgaaagatgaagcaatggaggttttcaaagcttgagggacttacctaacatcacacagttaataaatagggagtggagactgaaagctaaatttatatagctccaaaagctctacttaaccatctgagttggttaggataagttagacactgaatgtcagtggttggacatagtagatttttcactcatgtaacagtgatggatcagcgttccgttctgcaggaccactttctccaaatcatctcacacagatccaggcatcttggttgaagctcactcaccacctaggtaggaccttatatagtcttatttccaggggaaggaagaaggtgtggggtgcccccaagccaggcgtggatttgacaaaggcacatctgcttgtgttcctatagagacacttaagttgcatggagacttccaacctcaagagaggctggaaaataacctagattagatgtttgaacaaagggaaggaggaa

SEQ ID NO: 30781 - DNA, 1281 bp, Bovine  19866880921454
  misc_feature (1)..(1): n is a, c, g, or t
nttgaaatgcagatttacggacagtcacaatcctacatgtaccacgtgctgactgccagaaagaaacatattcttttcaatgccctaggggagtctgggacagaaattcttcagaagtgaacaggcaggcagcccatagagatgcaagttgcctgtgatggttattctaccagtgttcagtattgaaggacataaataaaatgtgatggaaatagaaagtaaagactccatttccatggggacatagaaaatattgtgataatattctaacaagagttacataactttttgccaaaacccatttttaaagtggaagattagagttgaattttgtttaaaaccatggaggctatgtgtgtgccctatcatttttgacatgtatgacagattaaaaactaaacacctcttatattaaatatgaaaccatagctttaggatcataaaccaagcatgatattgaaaataagaaacaccattttggtctgacaacataaccctggaataagggtgttaccgtctatggggtcacacagagtcggacacgactgaagtgacctagcagtagcagcagcagagctgaattatgcaccccccataattcatatgctgaagtcttaaatttcagaatgtgactgcttttgcaggcaaaacccttaaagaggtaattaaagtaaaatgtagtcatttggatgagacctaacctaatacgcaaacatgcctcattttataagtaagaggtgggtgggacacaaacatgaataggaaaagacccagtgaaaacatggacagaggaccacccacaaaacaaggagaaaaacttcactcagtaccttagtcttaagttctgtcatatttgtcatggcagccttagcaaactaatacaatgggattctcacataattcttttcaaagccctatttttccatttcaggttcatatgtcctaatagctgtgtgtgtgttctcatttgcttcttgtgacaagtctatgatttatatattgttattttgaatttatgatgcaaatgagaaaaatgaggttaagagaatttaagtaatttttcatggtcacccagctcatatgtcactaagccaaagactgagactagaacatgcctctgaaacatttcctttaatcactgttctatgtctgtgtggagctatctttgacaaaatattgcctgtgcactgttcaaatggtaacataactgtcaaagttttggttgaaaacaaaataagatcacttctattggttgaagaatgcctactgttatatttagaa

SEQ ID NO: 30782 - DNA, 1461 bp, Bovine  19866880945259
  misc_feature (1)..(1): n is a, c, g, or t
ntttgcctctgaccttctgacatgtcattttgagagtcttgaatagttcacagcttttaattaggtataaaatgcattgataggcttaccaggtggcattagtggtaaagaacccacctgccaatgcaggagaggaggcataagagaggcgggtttgattcctgggcctggaagagcccctaggggaggaaatggcaacccaagcccacaccagtattcttggaatatctcatggacagaggagcctggcaggctacagtccatagtgtcacaaagaatcaggcatgactgaagtgaatgaatgaaatgcatgcaaaatgcattgatggggagaattgtagttagtgctcttccactgctagttgtagataatagcacttatttaaccataatacccatatatcttctgctatatgagaagaaaatttccctgccttaccaaatatgcttggttgaatttcatggagtttgatttattattttttataatcaggatttttgtcctataaacaataaagctccctcaaaacttgagttttgcaattcttgcgttaacagagaagtaggcagacactctaacccatataaaaagcacatctgaggatatatgatgaaccaaagaattagcaggttatagatttagcttatgatttttgtaaactgaacttagtttataataataaatttagaaccaaaaaaaatataatcttgtttataatattttgtgttcactctttatgttatcatagatcttgagttgattaatttgttacagtttatctgctgctttacatataattttttaaaatatcatacttaaatcttagacatttggttcaactaatgggtcatttaaaaaaaaaaggataagaaattaaatactttaataggtatgtctttattttttaaacagaaaagtacaatatgttcatgtatctgttttccaaagtaaattgtcacaaacagaaattttcaacagtcccacaatatccacagtcagagatagtcaatatcagaaattcgtctggttccctttgagtattttctcttgttgtttagtcaataagtcctgtctgactctttgtgaccccatggactgtagcatgcagcgattcctgtccttcactgtctcccagaatttgctcaaacttatgtccatagactctatgatgccatccaatcatctcatcctctgttgtccccttctcctcctgccctcaatctttcccagcttttccaatgagtcagctctttgtattgggtgtctaaagttattagagcttcagactcagcatcagcccttccagtgaatattcagagttgatttccttaaggattcgagtattttctaaagaggttcaatttttgtttttgtttttttacaattttgaggtttcctttaattgaaatatagtgacataaaatattatggtagcttccagtgtgaacatttacaaggat

SEQ ID NO: 30783 - DNA, 1274 bp, Bovine  19866880982785
  misc_feature (1)..(1): n is a, c, g, or t
ntttcaataagctatacatactgaatgaaaatacagaattaaggaaagaaatcaataaatctttgtcttaaattaattcttaccctcttatgttttaaagtaaaccatatggctttttcaacttttccagattccctttgactctgcgaaaaatatcagaatactttattctcagttaattatactgtccactctgagtcctcaccttagggaccttaagactttacacacctttaataataatctgaatcatgaatcatttttatcttcaggtcagtaaagactcatttaggtaatgtgttgagggaaaaacaaaatcccaaaccaaaactccacatcactctctcttcagaattaaacggtcttgagtattacttcctttgctacttcagctgaaagaatgtgagtccaaaagcagttttacaagacttgaatggaattataaagtattcttaaagccaattttatcctcctgaattttaataataaaatgagccttgttcctaaaaaataggatcagaattgtggtctagaaatgatgtgcaattactagcctaggtaatatttgagtcagtggaatattaacttactgaacgattgcttgcttattacaaatttgggtggacatttggcagtgctgactgtggcacagtcattctctctgttcattatcttttaggtgtgttgcctcctaaagggtcatgagagcaatgtgctataacttgggtttgcctgcagctgcaggtctacctaatttgtactttggcactcaaaagattataataaatgaagtgctgctttcaaagtttcagacacaccaatttttccccctgtttggcaaaggtggatttaatttgactttcacgagtgcaaaatccgtcttcttagaagttggtcaaactattaattttatagctgggacaactgagtacagtaaaccttttcacaaagccagacagcttaacctaattacagggttgtttggacaggtggtttaaagtagaatgaatactatcaagaacgtttcaagaaatgaggctgatgaatacctagtgtgtgcacgtaggtgaaaatgtgttttggaagggtgtgacgacaggtctgtgtccaaaacgaatacctcaggattcatctgtgtgctcgtttgacaatttattgtttttatatagatattttaaggagatggataacataaaatccacgtgaatatcaaaaaatatcaaaacccgacactgttcaaataacatgcgatgtaactggcttgtcttcgaatt

SEQ ID NO: 30784 - DNA, 1512 bp, Bovine  19866880999414
  misc_feature (1)..(1): n is a, c, g, or t
ntttgccttggctctagtatttagcacttggcatctaattaattagttatcaggggcggagtcccacagagaagcaattcccttttctcctgattatggattgcattttgatggtaaaattgtgggttgtgtccctctctagtgacagcttttgtgtgattaatgtctctagtataatttttcctttgtccccttcacacaaaagatgccacaaaatcagcatcaccaatcaaaacggagctttcagtcactctccccaaatcaccttccatctttccttgttatggttgatcttcagcttggtgcatttgaaaattaagaacaaaaggaaagaccaaaaggtgctatacttattacttccacttcaacttaagttatggctgcgtaattctgagctccactagattttaaacagatgagatcacctgcagagcatagtttcattaaatgtacttgttttaaaaaaatgtcactcaacagaacactgttgtctctaactgactgaaacgtgccggcgtttaactgtggttctgtgcatcgttgtttgtcaacgccctcaagcaaatccacctgattaacaaacatttgctcaaaacacaagaaatcaaaaacccgaaacatttgctcaaatgcatgagtaagatacagttttttcatagttaagataaatataacctcattgtgcacttagctgataaatttgttagtttatttgcattgttaagatgacatcactgactcagtggacatgagttgggcaaactctgggaaatggtaaaggatagcgaagcctggcatgctgcagtctatagagtcgcagagtcggacataacttagtgactgaacagcaacaaaaagatctgttcaagtcaccttaaaaacagtaactgacagacaggtatgtttaggaagccccttgtttcaccatcacagcttctgctctctttggccctagtttcatttccctggaaactaacttcctctgcatttgcatgttgctctctgttccctcccatctttgctgccctcgtggccctccgtggtgcccactgccatctctgggtcattctctgccttacctctatctggctgctgtctctaagcttcttaaaaccagttgctgagggagaagattcttactgattcacctcactttggagaacaaagttgccaagatgagatattagttaataagatggtggatataactgcccttgagttgtgctcattcttggtctaaattacatttaggtccaagaagcacatcctgcttatgcagaataaaatatggcttccttcaccagttctttagagctgtgtggataagagaggtcccaagtcacttcagtcgtgttcgactctttgtgactctatgaactgtataccctgccagcttccctctgtccatggggattctccaggcaagaatgctggagtggggttgctatgccctgctccaggggaccttcccaatctagggatcaaacccacggttctcacatctcctgcatt

SEQ ID NO: 30785 - DNA, 1345 bp, Bovine  19866881010913
  misc_feature (1)..(1): n is a, c, g, or t
nttcatagccccagtacatggaatacattttagagaattcaaaatgcaaaaatcaatgcttaattttttttaagtcctatctcaggaaattatgaccaaaggcattggataatgttcagagattcactacttaaaatatgcttattaattgatattacaataggttggaatttttaatgcagcaaaaatcacctcattcatgtcagctttgctaattataccaatctataaatgaaaatgcatagctatcactagaaccattgctcagaagctatcagaaagcatagtctgcaggtttgccccagaccttgcaccttcttaaacatagggcttataccctcagagatatctactaggtctccaaaaacaagagtggagtttttcagtcttcttcctttttgagtctctcagatgtggcaccccgattactattgaacatgattgagatacttacaaaagcaattacttaacctcagcaaatagtaactactccacaggaaccagacatctgtgattgacactggggatgcagagctgaataggaggctctcctagctgtgacccttcagagtttgaaactggaaaagacaacgttaagatgctttagttgacaagaatcctatgcaaggatcaaataaagcccatcaatggacgtccaacttcaaagtatcagtttgcttctgttccacatctaatcttcttaaaaacagatatctcctaaattcattagccatctaatgcttgtgaaaattacacattattttgtagaacttttctgttgattccagaacaaaatatggttttaaaatatattgtccttgtgctttgcacttcactgtgagtttacatgacaaacctttaagttaccaacagaagctgcaaagaactcatttcccagtaatttaataaatctcaaaacctttagggttcagcaagggtaatagttaaggagagagatggctgactgtgcctgacacggataaatctttctcttgggttttcccactttcaactactgctgccaatttacttcctaaaacccactgagtccctcagctgtaaactctgaccttttaccttaatgtctccatgtaaaccaaaagtccctccttttgattgtctactggtaaaactgaattagtctggaaattctcaaatcttcactgagtattaatagagaactggagtgggttgccatttccttctccataatagagaacaaataggaactaatgtataatataaaggaaaattttaatatttcctttgaaatattaaatgacagaaatattaatatttccctgataaggcagaagtatttggtctatagcaggtagcttcctta

SEQ ID NO: 30786 - DNA, 884 bp, Bovine  19866881047138
  misc_feature (1)..(1): n is a, c, g, or t
natcctgcagctgcacagatcagaacatgttagctgggccttgttatgtgatgtgttgactttcaattgattttaagcacactttaaatggtaatgaggatgccaggctgggagacagcatatggttttaacgatttgattctcagaaagcagacaaacattttaaaatgatagagttccactagtgtgaaactcaaggtgaaatcggagggtttgaatgacagaaactacttcttccatctttatgattattagctctgccttcatcatattgtattgtgcggggaagaaaaacaggaagaggaaaaccagaatttactatccaagtttggatcaaattaaatatgacataaggctctgctccaaagatacagcacttggtgcttttgaactcagatcagcctttccagcaaagtagaaaatgaaaagtcaattaaaatataataaaaaaaatgtaatttaaggagttggaaaatgagagaaaatgtggcagggtgtgaaagcaaaatgaagagaaatattaggcatttaggcatgaacaacaggtgtgtatatgacccactacaccgtctcctattaagtgagagagagatgtgggtcaatgaaatgagtcatttggagacatttgatctctttatgggaaaagacttggaggtaccattggaagttgttttcttaatctcttctgttagattttgccgactgtctttcccagctggatggcaaaagcctattggacagcattctgttgtgctcttatgtgccccaacttctatccatccctcggtcagtggccgtcttggttgctcctatgtcctgattattgtaaacagtgcttcaatgtgggtatctttttgaattactctttctcaaggtgctctgtg

SEQ ID NO: 30787 - DNA, 954 bp, Bovine  19866881051751
  misc_feature (1)..(1): n is a, c, g, or t
ntctggatttctccttggtctcctccctacgtttctctgaattttcagattggctctcttcctatgagtcacatcctttctttaactgtttccatatttattcccctctcggcagcttatgtatgactctttgttaagcttttcaaaatattgcatgttcctgcgtcataatactttgccagtatctagcacctattattcttagaactcattggtgttcaaatgctgtcttcctaactcctatgtttaaaaatgattattcattttacaggtataaacttgcatcacagttttttacaaatatagttactagcttacactctgattttacagtgcttaatttaactcatgtttgtatggccattgaatgatatcttccaaattgtaatcacttctactgcgtcattgccttcttctacaatatcctacatgatatgtaatttcatatgcctctaaccaattttttgtcatccactggtagttctctctgatacattgactgagccaatatcttgttgtcccccatcccttatttctagccagtgaccaaactcttgtaattttgcctcagcaggggcactctagttctgcaaactgtggccgtgggtcagttcctgccagcttccttgttttgcaaataaagctttattgaagcacacatgttcatttgttgacatgctgtctatggcagggtcgaacagcaaaggcacaaactggatcttatgatttatttaaaaaccttcaatgactccctattcccttcagtataaaactcaactttttaaacacaagttgcaagccctgttattaaattctttctcttctgtttttcctctccttgacaatagatatcccaagcaaagtaagcagcttcatatttctgccacatttcataccctatcagaaagcatgcttgactccaaaagactgagttaggtgcttacttattctatg

SEQ ID NO: 30788 - DNA, 1892 bp, Bovine  19866881081638
  misc_feature (1)..(1): n is a, c, g, or t
ngttgaggtatggcagaaaacaacccaatattttaaagcaattaacctccaaaaaaaaaaaaaaaaaaggacttgatagtaagcagccaagagaggagatgtcatttgggttgctaaagggaacatgaggggattctgggagtacaagggatatcataatgcttgatctgaatgctcatgatacgggtaccttcacttaatggaaaatcatttagatgaatacccatgagataagtatattttttaattaaaaaaaaaggcttagcatgtgttaattcacactctcaagagagttaaacatctctcagagaagtcctaatttttatagtattcaatagactaggaatatttcaggtatgaattgtgacttttcatctcagcttccaccagataaactttgtatctacttgttttttcaatacttcaaggttctgagtatattttattagaataaggataactgtatcagcttcctaggcctgctgtaacaaagtaccacaagcatgatgacttaaaacaacaacagtgtattatctcactcacatctggaaacagctggggggtgagaagactgaaatcaagttgccaacagggccatggtccttctgaagctctaaagaaagatttttccttgtgtcctccagctactggacacctcttatgttccttgccttgcagctgtaaacatgtcaacctccacttccagttggtatgtgacattctccccttatgtgtttctgtatgtttccatatttcccttttcttaggtgaccacaggccatactggattaagaggccactctaatttaccatgtcttcattgtaacttgattgtatctgcaaaaattctatttccaaataaagtttcatgcacaggtactgggagtcagaacttcaacatattggggggcggggggagcatgatttgatccataagagtgtccaaggctaaaataagccctcaaaaaccctagattacagaatgcaaactgcaaagagtcccaggggctttctattcaaatgatcttggtgtcactcattatgcctagccaagtggccataatgagtaataaagctgtcttagaatgcattgtgctgaggtacaaaatcagctgtcccattctactggatacctgccccccacacacacaaaaaatgctaggctttgctcaggttcctggatcctgttggtacaatgacgcacttgccaagatatgagtgcaccctttcgcatttcctcccaccactcttgcctctctgctaggctgatcatcttagtcctcctgtccaggaacataatttgacttggtcttctagatcctaagcctcacccttgtttgttgctgtttaggcacttaactcgtgcccagctcctttgtgaccccttgtactatggcctgtcaggcgcttctgtccatgagattggagtgggttgccatttccttctccaggggatcttcccgacccaggggttgaacgcacaccacctgtggcaggcgaattctttatcactgagccacctgggaagctcattaaagcttttagaaatccacgtttttgtttttattttccataacaagatgagccaaatgctttcccagctgagttgagatctcgttgagctacacgcttgctatttctgtgtaaatcaacaaagcgttcaccttcacctctcacccctttatcgtgatttagtatttcagcacagtacagaggattatagattttatttcttcttgaaccacataattcattttcatatatgagatcacaaatgattggaaaacagattctaattggcagctagccatttatggtaaacccagtagcaagtgttaagctctgacaccttcccttgaaaaggctttgaaataaaattaaaattcatcatt

SEQ ID NO: 30789 - DNA, 1777 bp, Bovine  19866881092263
  misc_feature (1)..(1): n is a, c, g, or t
ntcactgagtcctcatctctgcgtgcatgcgcgttgtgttttatgaatttggggactgtaattaagactctccaattatgtgtccttcctagttctgtatattgctgtttagttgctaagtcatgtcctactcttttgtgaccccatggactgtatctgccaggctcctctgtccatgggattctccaggcaagaatactggagtgggtttccatttccttctccaggggattttcccatccaggaatcaaacctgagtctcctgcattgcaggcagtttccttacggctgggccaccaggaaagcccctgtatattcttagctgtctaaattaagagctccggtgcttaatctagaccgtggctgtcgctgtttggatgttcttttgccaccccatgcccatcatctgtcatgagaccactgtggatggggcagcataaaatgatttctgagttgggtcaatctggatggacttgtcaatggggttgtttatgcaggcaggctctgtccactttggtgagtggccctcagttccaggactgcatgagaacaccagctctgtttggctctctggtggattctgtattatttctgtctatgacagtgggaggtctagctggatccagtggaagcaaaacatttgctctctgcagttggcgactgagaagagatcaggccgcatgaaagacgctgaaacatacctgtgtcagtcctgctgaaaatggctgcctggtccctctggaccacctgcatctctaaagcatccacctgcaaccctgggtcccttattccccctccactccaagtgctgcattcacttggattttctgttagacttcaatgtcgatatgttttaaggggagctgctcattttcaacacaatttcattctgtgtaattcctatttctttattaaacaaaatgtactgtctagaaccaggagtttgactcatctttgattactccctttctctcattttcagctgttccatcaccagttttatgcatcttttaaaaatgctgtccgtcttggcctgactttggctccattgcagttgaacccaggtgtgtctttcctcccctgacctgcacaccatagctactcttggtcattctcctgcagatgatactacttttcattactcacgaggtcaaggctaaacttttaagcttgacactcaaggtctttctttctgtggctttcctttattttcccaaagaaaagttcatcttctcttctgaactaaatttaggatgagctctcacttttatctttataatagtctcattgcggtgtgaaatcctacctaatgctttgtgtccattgtctatgaactcatttaggggaaggctgtccccaataaatgtttgaggaactcagttgaactcaggtatccgactccaacttccctccaaaactcacaggacaaatctcctgtctccctctacatatactgctctccatcattttcagtattaagcagattaatattagcaaagtttgcagaagtaactcttgcttattagaagtgtaaaattgtcgaatagaagcttcctttgttccctctctggaacactctgtcaaagcagtgctctcttgctttgaaaacaggaaggtagaacattccagcagcatcacaaacgctctgttgacatttgtaaaatctgtagtctttccaagcctctaggcaagagcaaatagaaatagtcggaggcatcagacttgatgatgtgaatggattcttataactgaggctgatagccaaaatgagtggtgt

SEQ ID NO: 30790 - DNA, 868 bp, Bovine  19866881096143
  misc_feature (1)..(1): n is a, c, g, or t
natttcctcttgttatgtcttctcctgagacagtgattactcttatcagtgaaaccaggtatttacaaaggaaaaaaataagtctataagtagtttctgctattttccttatagctctgaggcaagggagtacaaaaaagttgacttttggttgtagtggacgaggagaaaaacacaaagtttaacagagataaacagctcaaataagatcttgccactgcattattcaggaatgtttacaataagaagttcaacattagccaacaaagcatttgtaaacacaaaaaagagcgaatgattcctagtttggaaatatctgtgtttgttgttgagactattgctccttccaatcttgagatgtaataaaatatactatacattttaaaactgtacttttaactaaactgttagagatggattgagataaacattggcaagtaattgctccaaactaagtcaaaaagcctatttttgtctccctgagtggaatctgagccctgataaaatttatccgtaaactctgaacccattctgtttagaattgagggaaaaatttgtcaaagtctatataacctgattgacatgaacaaagaagtgtggagaaaacatatgtaaagaatctttttgcttaatatgtaacttcaggatgaacaagggaaagtatgtattgatgtgcttttaagttttacttaagttgttaaagcttatattaaaatagaaatgagaagtgtttccttcctatttctatgccacataataggctttatttgaacatggccacacattggtgagcctaaggctatctgaaggacagggcatgcagaaatacaccgctcaggactttcaccctccagaattcagttatatt

SEQ ID NO: 30791 - DNA, 1332 bp, Bovine  19866881145646
  misc_feature (1)..(1): n is a, c, g, or t
nacaaaagtttgtgtacatgatgaatatgcatacatgtacacctatctattgaaatctgttaataataagtcctacttttcaaattattgcaaaatacttctaatgaaaaatcataactcaaaatcagtttcattcctggggttaaaatattcagtttactagagagttgtttatgacgttttcttaaaatatgaattaaatcatgcccttctgtccaggaacactgtgcctatatagccaatatgaattagagacagtgcttcccaaggactgacccacctttgacttagcatgctcatttccaagtctactaacagagtttcttagatcttttgactttaataatttcttatcagacacttgtattggttgcataccagagcataagtttcctgagagtattttattaatatagtatctggttgcttgatacatatggcctcttcaactattactcctgggttagatactatataacatattcattgaaatctatacatttgtagtaagattgaaagaaaaaaaactacattgcccatatatagctcgtactgtcctcacactcatagaatgatgattgtggaaaagaactcagaagaaaaatgcaaactcatttatgctttatttttttaaatgagttttgttttttgaaatagtgcatcatcagtctaacggatattgccaaaaagaggaatttattggcttacataattgtactattcaagctgtgaaattgctttagctacctccgcatgcaaaaccttaaatcaatggatctcagtgggggagttaccaccctccagggtgcattttgtaaatttatgggggttatttttagttatcacaacacttgggggacgtggctaaactagagttggtgagtcgggccaggaaggttagatatcccgcaatgatcaggaatgtgctgcaaatatatatagtttgtattcagcagagatgttaaatagccttcatgtagccaaaacctgtttatacctaaactgtagattaaaaccccaatttatatataaattcagtttttttgacaaaccaaataaccaagaaataaaaatgttatataaattaaaggaagattgttctgttttaaacattaccaagaattgtacatcattttgaatatgtatgtggccacacttctcatggaatttaaatctggatctcaatttgcagattttgcatgcaaattttttaacaggggatgtggaagactctttttcacagccagctgaaaatattaaaagtagtggagacatgagataaaaagtagtggagatattacatttgattaataaagtttgtctaaagttaat

SEQ ID NO: 30792 - DNA, 969 bp, Bovine  19866881147510
  misc_feature (1)..(1): n is a, c, g, or t
naatattaaagataataattcctatttagaagaactttttaagattaaatgaattgcatttaatgtgaatattttgttaactgtaaagcaatacacacatgatgtattgaatagttatcttcagcatattttgaatgggcttaaaataataaatagaatactattcaactttgagatatctgctttataaatgtattcaaatttattatttttactcctagtatatagtgtttagactaagaccatgctggaatcagcattttgcaagacagagctagtctgtttttctcatcaactatattctgcagggtctgggtgataatcattttatggattcaggataacagattcatattatccatttttaactggtagctcacttcagcagggtaatcattacagaatctgttaatgatcccctatgacagcatttatagacacacaaccacatgtcatgaatctgtgatgtgtaaacatctgagattctttttaatgtgagaagagatttgtctaaaagaaccaagggaagtacaaaaccacaatgtgtcatacaaacggtatagattaacattaagaaacataattaccttgaaatttctatccaccatatatatgtagataatatgcttctctaacatgagtacagttatttctgaaaacagatgctttctactgccatgtgggatacgtctgtgtatggctgagccttacttctttgtggcagccaagataaataaagcaaaaccatcttctgaaaaagcacgggcagaatatctgcagaccattaatcttcatctgtcctcattttgcaggcagtgtataatgccactttctacattcacttagggatctcctttccaacttttttgctcattctctctctcactcagcttaactttaattctgctttgaatcattttatttgacagacacagcatccttccacccattggttcaaagttgtcaata

SEQ ID NO: 30793 - DNA, 2849 bp, Bovine  19866881200945
  misc_feature (1)..(1): n is a, c, g, or t
ngaggaagctacttttactttgttttcaaatgctattaagaaagaagcatgtttgcattcgttcagcatttcaggacatgggcacaagtaacccagccttgaagctgcttcgtcatcaggtttgtatctggctaaggaacgaaaagtaacagaccttctcttggtctctaattgtcactcacagcagacgccagtgtgctaacggcaccaaaggattcccaaggaagagcttcttccacggtcccagattttccagacttgttttgtttgctcatttgacatataatcttgtggtttctggcccctttcaccacctaaagcagaaaaacatattcgattcttaggtctcgctcagcttctaactgtttcaacaaattaaaggacttgactgtggaatttttttttttttttaagtgaacactttgtgttactcaaaccctacgatgagttcagcagacaaacgcaaactgtctctttagatgtgctcacagttgacagttcaaaagaatgaaatcaaaaccctgaagacttgaaataaaaaaccattcttggaataaaagctcggatttcaaagaggatattaaaatgataataattttaaacatccccttttagcataaatttctctcgatgaaatactccccacaaaactgtaaggctgggttgtctgaatcatccttttagggaaatctctagaactctcacagggtaaatgatgaggaatgttctgggggattgattccattatagtttttcttattggtggagatgggattaaattaaaatagtctgctgctgctgctgctgctaagtcacttcagtcgtgtccgactctatgcgaccccataggcggcagcccaccaggcttccccgtccctgggaatctccaggcaagaacactggagtgggttgccatttccttttccaatgcatgaaagtgaaaagtgaaagtgaagtcgctcagtcctgtccgactctagcgaccccatggactgcagctcctccgtccgtgggattctccaggcaaaagcactggagtggggtgccattgccttctccgttaaaatagtctagactgaaccaaatgagactgtttgattctgaattttattttttaatactatctttaagcttaaactgttgcattatttctagtgcccacatattttcctttcttcatgtgctgttacatgaagtgacatgggcttattattaacaaaaaataattaaaaaatacttccagttctctaaacattccaataacagaatgaaggacttcacttgaattatctcttgcagtagctcacccatccatcaaggtaggggctgctgtattattaatagtattatacagataaagagacttgcatttcccgaagttcaataacttgttcaatgtcgtgtcactggttcagggtttctccactgcagcactatccacagtttgaactgaaattagctctttgttgtgggaagctgcactctgccttcttggagactgagcaacatccatggtctcatccaccgtctcctcccactaaatgccagttgcagccctaaccatgactagtaaaaagtctccagtattgccaaacgtcccctggggagaggggcagaattgccatactgagaatcactgtactagttacgtggcagagctgggggatgttttagatggattcccttcctcttaactctttgggggcctccctgatagctcagttggtcaagaatccgcctgcaatgcaggagaccctggttcaatccctaggttaggatgatcccctgggagaaggggaaaggctacccactccagtattctggcctggagaattccattgactgtaccgtccatagggttgcaaagagttggacacgctgagcaactttcagtttcactctcattcttcttcctgtgttgccactccctgttcatataggacatagcaacagtgatcagcttctcttctctcttctctctcctgtctttcttctgaacatagagatttagcccttggcaagtgaaggttagcgtctgctcgttcatcctgaggatggactgagtgcattgacagacgccttcctgttctcgccgtgggtgtggtcagtgtgaaatggtggcgggtctgtgcctcgtgcggcaatatcatgggcgtagcagcacgcatgaagagccacacactaaatgtttaagtgttcatctctcttgcttgctgagtgtgtgtctgctgagtcagacttctatcactgtgtctctgaatcactaagtggccttcagcaagtcactgaatcatttgtgcttcctctttttttttttttttctttttaagaaaatgagaaccatccttccatcacaatgccttttacctttcacttgggagagtggtgtgttcactcctaaaccttttggaaggaattctaagacctctggttcattgaaaagtaaataaagtttttgaaaaggaaaagtatattcattcactgagataactgactttcaagatgaaatagtccactggtcagccattagaataaaatactttaagaagaaagccaagaagtagccacgcacacctttcccgagtcatcgctggtttcagtttcctcaggagtagacacttcctcagactttcttgtagctgaggatttgggtataaatacaaaaccattttggaaaaaggtagtaaaagcacacattggtggtgtcctgatatccctgtctgtgttcatttcacaggagcggagggtgtgtcttgccctctttcagtgtcggtgcatttgaagtgcatatagtcctgtgtaaatttattctccaggttaaaaagtctgcagtgagaaagtgcttgggg

SEQ ID NO: 30794 - DNA, 1202 bp, Bovine  19866881205433
  misc_feature (1)..(1): n is a, c, g, or t
ntgtgtgtgtgtgtgtgtgtgtgtgtgtgtgagtgtgtgtgtgcatgtgtgtctcaagtggaacgcttgtccttgtttgtccccttaattgcatctcatcagcaacgtgagctgttgttcattagcctcttcttattgtcattgcctgaaagtagagcatccagctggcaatttctagcacttgctgtttataaccaaagttacattgctcttgatgagagacaaagagaaataaaaaaagatgacatgtgggaaacgagtaactgaaaaagaaaggatattcattttggtaagagacaatagcccagttcttaatgagtagtcaaagtaaaaaggtctttagttgcaagtgtgtaaggagacatttgtttccctgtgctgcacatccatgcgattttagtgtattttgttcctcatccttaatctcaagttaagaggccctgacataactctattttatctaaccatcatccaaacgcagaatttgtccgatttgcactgccatcctcacccttaaacacagacgtgaacttatgtcagtaagtatcagcccttagtcggtggtttattggagatggtctgcagctgtaggacttgctctgtatattccccagggctatgtctgccttggccttgcatgaaattcagttctacaaatgttgacatgcattgttgctccgtgcttgaggtactggtttaattactcaaggtccaaaataccgaccttcatactaataactcatgaaatgaagggaaggaaaagcaaagttggcacacattaggaattccaaaagtacacgtagacaatggttggatttgtaaatgagcaaatgggagactgttcccattctcctccggcacagggcaaggataaaattcataatggacagcagtgggtacagttgcaaactagttctggaagaactgagagcccgatggacagaggtgcagaggatgaaagagacagagcacagcagggttaccgtgggtcccttgtgattagaccagctgcctccttactattccagaagagtgtagactacctctaataataatcttttaagtgataactcacgtaggtgtctgtgaaataataagcagaacttctctgttcaaagttttactaacttttacaggtagtacaagggacttccttggcagtctagtagttaagacttagccttccagtgtagaagatgtgg

SEQ ID NO: 30795 - DNA, 938 bp, Bovine  19866881223810
  misc_feature (1)..(1): n is a, c, g, or t
nctgtggctgtacgactgacctcagggaagtctagtagaagaaccgtccatccatagagaatggtttagaaaacttgtgttgtacgtagagtcttaatttgctcaaagtctccagtgctaaaatatccacttaaataattccagaatcattttgtttttaatttggattcatctgggatgtattttatagaataccaagctttccccatattgcctgaacagctatatcaagtgagtgttgatgaaattaatcatctgagaaattatgtcatcttcagtctgtcactgaggtggaacattttgttttgatgagcaaatccataaccatttggatcaaaaagaattgaaatgtattcaccagttacactcccattgattagagacagggataataagtgggtaaatagttattgatcttagaattccaattaggcatttaggctgtcagtccttggagaaaatctagaaatgtgctcaattttccaggaatttccaaacttgtttcttacacctagattgataaagcatgtgatgcttgcaaaatcattcagattttaatgggtttggtcttgtgaattcagatatgtttacctctagtagataaaatgaaatcttctttattgaatcctagctgcactaaaatattcagaaaaatatgtttaatcagtcatgtaccacttacagacagtacattagagctatggcccacgtaattgaaaggacagtggtgatgtcatgtagcagccttggggcatgcacattcctattagtatcctattattgtcatcatttgaatgtctgttatacttagcactgaagttacaagttgaaactctattctctatagaacataatttctccttctttttccattttatagaagcttatagctgagcctgagctttcaggccatttaaattattcctttatttctctag

SEQ ID NO: 30796 - DNA, 1253 bp, Bovine  19866881263588
  misc_feature (1)..(1): n is a, c, g, or t
ncataaaagggcaaaacaagtcctctttcacaagagtgtgaggttctactagagtaatacacgaaaagcgtttagcacagtgcttggaaaatagtaagtgcttaacaaagcttagctctcattagtggcaataaatgagtccacacagagcatcacatcttattttgcattccattgcaagctctttacgaagcagacctaatatttatgttcctgctggtgtccttggaaacaaatgtctacaaactgttcctgatagggaaaatgcaatggaatttgctcttgcaccactgctttcttcttgggaaacttgagatgcaagtcagccacatcatgtgatgccctctgagcacagcccgagttatttatcctcatagacagaatctgcgatctgtacgacctctactgtggacgccctacaatactgttttaagtgcctatccttgacatcgtgttactaactgagcaatcctctaatgagtttctgggtgtttttggtagtaaaccacactgctgctgctgctgctgctaagtcacttcagtcatgtcccactctgtgccaccccatagatggcagcccaccaggctcccccgtccctgggattctctaggcaagaacactggagtgagttgccatttccttctccatcaatccaaatcagaactccctcacacctgggtcttagctgactggaatatgtgctgcttgggtttatttttggaagtcttctttaaaacttccatttcactttcagttgtcatcgtgccatctttattagtttaatctagaaggtaggaactttgggttacaaataagggaatgccaagctattgagttaaataaacaataaagacatgtaactgtcttgcagggcatgaagctagaggtcagtgtccccaggattggctcaaagcacagtactgtcataataaccgagtcagcttccattcctcttccttgttattagcagcttgtgttgttctcaatttcagacactggagctatatcaaaggtacctaaaatacattaatacaagttaaccaatgctcttcattataactgaataatacattgtcaaaatgaaaagaaaaggctaagtaagattagtatattttctagcataaaaaagcaagtgggtctttgagaaagcaatgtagccttttgaaacctctacttgctcttctgaaaagtgagtatgagtgttcccaagtcatcattaagagtgtcacttggcacctgtaacatgcaggca

SEQ ID NO: 30797 - DNA, 2496 bp, Bovine  19866881272589
  misc_feature (1)..(1): n is a, c, g, or t
ngtcaaacccatgtctcctacattggcaggcgagttctttaccatagcaccacctggggatcccacacgcattatagccaaccctaaagctaacatcattggctcttaaaatcatgcactcttctagaaaaaaaaaaaaaaccttagcagaaagcgttctgtgataaaataaaagtatatccattttaaatttcagccttgaaatcagatgaagaaaagccctgagatccaaatccttaggatgtcagcagggccaaagacacactgtaatcaccttacaccacccaaacccaggaccactgagagccgtaagcaggtattttcttaggagatagttcttacaaacacgtgaagccacaaacactttaaaatctaaactcttgattcattgcagactgcaataagtgcaatggtatatattaagacattgggacagttttcaaggaaatgataaaaaattaaaggaaaacacaagcagaaagaatgcctttaaaccatgcgcttcactcttaagctctttcattaagagggtaaattaaagcacatctatgcaatgctaaatacacacacacacacacacaacctctaaatgcaaattcatttagctgcttccaatactgtggtcaggctgaggtaagaaagtccagctatgaattctaatgcctaaaatggaaagagttcagttattgcacgttcgatttttgtaggtatccacttagctattcagaatatcctcacatagattacaacctggagttggaatttgaaacctacaaaaccaagggctttcactttcaatattcaacacaaacttggctttggaatgagagaaaatcttcgaaggagccaaggtataatctggaacaaagagggtaacttgactcttgtgggtgatgactggtaataccagaaactagagaatgaggaaggaggtgatacacagtcttaaatagtgtgaaagtttgtcactttctcttcttgattttttcctaaggttgaaagatgatatgtccgtttggagaaagcctgtttaaaaagtatagattaaatggacataccaacatcccatcaatgccactaagactctctgtcacatttcattagcatgatccccaaactgaactggccaaaacttttcaaagaaaacatcttggtaatggcagcacttgtgatgatttttatcgctaacgcaaaatccttccaaagagacaggaaaaaaaaaaaagatgctttaaaaaaccttattttaggattggtatcctgccattgtctcactggtgttcagcaagataaatgtatcttttagtagctctgataagaccaaaataaactgctacaaccaaagggctcagagactaaacaaacttcatcggaaattctcaaaacacactcctggttgtgactttctgcagaattttatgagaactctaaaagtgcgctcactgttgtcctggatcctcctggttccttgtctccagcattcagctctaagggctgagctcagggcatccagggtggtgcttgctgcaggaaatgattccttcttcctgctaaccttgcctgctccagcccacagtcctggcacagaggtctgggttccacgctccctgttgaccctggtgccatttcttggtcagttcaagaaatagacgagcccagttgtgcccttctcaccttcccaggctcataaaaggaaacctgtgctaacaagggtctccttaacaatagatgctcagctggaaaggaagtgggataatggcggagctgcttgggtagacacagctcctcttttctttctagagggaattcaagaacattgcccagaggcaaaacgataacctcttctagtggctgaagtgccttctttctccctttgcagagccctcagtggtttgtcaccatgtcccaaaggtgcctcatgaatacagcccttcttctcagtgaagcgtcgtggttgctaggaaattcacgtcagaatgttaggacttttcatgatggggtttgctcatcaactggtgtcatggctggaatttctaagatcaaaattgaactgcaaatccgtaagacagtaggataagaggagacgggaagggatggaaagaaggagaagcagagagaagtgtctagcacagcaggcacggtgctagacacacgggaccatgtccattaacctcagaaatgattcgaggcttctccatgttacagacaaagaaaatgggtttcaaaagtcaagtaactaagaggtgagaggtaaagagaagaggaggaagtagccaaggtggagcctgcgatgggatatcttcattaattggtggggagtgggtgttggatggcaggatcaggacactggatccctgaggaagttcatggaaacaaagacaaaagaaatgacagggaaaccaagtgtgaagctcaattatcatcttgtgtgccatttgctccagagtcgctccaagcttcctgaacatgaggatactttttttttctgttcttttt

SEQ ID NO: 30798 - DNA, 911 bp, Bovine  19866881301645
  misc_feature (1)..(1): n is a, c, g, or t
naatatgcctttcaaaatttctatacatttagaacaaacctctaaataatcagatttagctgacctggggtaaggcattaacatttttaaaaagttattttactatgcagtcagtgctgatattcactaagaaagttggtgacaaggatattgaaagaaaagtccttcttaaaggcttactcaaaagaatcagataatcaatcacactttactatgccctgcttatgtattcaaacagggaacacaatttctaaacttaatgtattttctaacagaaatcaggcaaaatgaggcatccaaaaatgtctgatgattaagaataatacacttttcacagaggctgataacgaaatggcccgagatttctaaactctcctagccaaattcattttatcgcactttgttatgacattgacatttagccaaagtattccatctaaacagtgaagccgaccttaattgttttttggattctcagagtttgttgatcctattacaatatttatcttatttgcacttcagcccgaatgtgaaatggttgcatattaattcatatggtatcttgctacctattaacaatatggaaggttttatttaatgctggcttgtttggtgtctggagacgcccaggtgagaaggcatacgattctaacgtcttttcataagccacggttgaattagcatcgcacatcagtgtatcattttttcacagtttatcctttttcaatcagtttcctgtttcaccttgttagttctgacagaggcgaagtagaaatgccaaaagctgttgaataaatgctcgcattgagtcatataaatttcagctgcactccacaaaatccaattggtttttgtgggtaatgttgctactcatttcgtaggccttagttagaactgatgttgcttctcat

SEQ ID NO: 30799 - DNA, 770 bp, Bovine  19866881345921
  misc_feature (1)..(1): n is a, c, g, or t
nctggtaatggattgttatgaactgaactgtgtcctttaaaactcaaatgtcaaagttctaattcctaggacctcagaatgggacataaggtctttaaagaggcattgagttaaaatgaggtcattacagtgggccctaatccaatatgactggtctccttgtaacaagagattataggacatggacacacccagaaggaaggccatgatgtaaggaagcctcagaaccctgccttgattttggatttctaacctccagaattatgaaaaaataaatttctgttgtttaagtcacccagtatgtggtactttataacatcagtccaagcaaactaatacagagatatgctcagtttgatgattcataatacagtggaaaagaaagatatgccaaaactaatcgtaagacaaggtgattaaaaacagctcacttacatccaactctcagagcaagactgcaaagcagacttgtttgtaaaccgaaggaaggtttttcttctagacatccgctttaaacctaatctcagcttctagaactccccagaaggatttctgattcttggagctgaaaactttcttttcccaggtgccatggtcatgtccccagcagatccaagaatccacccatcagattattttcccttaagggtattaaaacacgatgcatatagttccctgtgctatgcggaaggtccttgttagttatctagtttaaatatagtagtgtgcatatgtaaatcccaccctcctaatttatactcccacttccc

SEQ ID NO: 30800 - DNA, 1279 bp, Bovine  19866881384849
  misc_feature (1)..(1): n is a, c, g, or t
ntcctcaaggaaaatgacagcaggaaaagagaaaggcattgttttaaatctcattttagagcatttttcatatttttccccatcatgtttaggagtattctgtcgcactctgagatacctagatataagagggaaaaggtgatgcaggtagaatataaaatattaccaaggctagttgagaaaacacatggaactgtaaaacatcaatgaagaaaaactagataatcaccttcccctcgcactctaaatttacgacgccttgggtgatgcttcagtggtctggcgcctgctaatttctttctgtggaaaccggcaggcatttgccatgggagacccgctgtcagccaatcagggtgagccgtccgggccgctttgatgtaacgtaagttggagagtagcaggtggccttccctgctgtttggagtgcagcttggggagtcctgtcagatgcagcagctcctctttatctgcatggaatctgtgtaaatcacaaaagaacagatggaaaaatagtcacacacccccgttcacctcttagaagcagctcgtaaaccaccgtccaccacccgctcattttaaaaacaaccatgggtgggttagttcccccaactgctacagcgtacttgttttgtttacgaaaacatccaaatacatgaattagacaaagaaagcaagaacagcaaacaatttaaatgatcacagctggtatatacgtatcatttatcccgatatcctggattgaggttaagtagacactgaaaaatcagaaattatttctcatctgcccaccctaattactatctgtggtggtcttggtgatgtcagataactgcgctttagtgtgtctgtttgattcttgctgattttgaaattcaattatgtaattatttccgtttattttccctgaaaactctaaatacttttctaggaatcagctctatgtagtttcatgttagaaaccagaaaacaaaaactgaaaaaaagaaatgattttaaaagaattttacttgaattctatgcaagtggaggaagtagtttcaatttatacaaacatagtacttgaatttgtggtgttcagctaatgcacaatgtgtggttcaattgtgtatataaatagaaaaagaatttaaaaagcaaaacaaaaaaaacttagtcctaaaagagaaaatggcaggaacaaagttatcaaggtatgagaatgaaaaggagcatggcatgaactgtgtctcactttagtgtgatttgtgagacaaggtgctgaaagagatggagagatggg

SEQ ID NO: 30801 - DNA, 966 bp, Bovine  19866881434768
  misc_feature (1)..(1): n is a, c, g, or t
nctctcttgactgaaaagacttcaggacagaaagctcctgttagaaatcaattatgttaaactgtgaaatgttgaaagcacttcatcacaatgccccaagccttctcgttctgcctaaatgcaacctggtactggtctcacctcgagtcttttgtaaagtgtgcccagaggaactgtattatgcaacagtcaagactggaggtattcttcgcattctttacaaatcaagctccagcctccttaataagcaatctgacaaggtatagtatatgctcgctgggtaatcagtccagctcacacagaagccataaaagagcaagcagggctgctggggtaagtggctccttctgaaaagccccattgttcccccaattaaggctgaggagtccctggtggaagaggttctgaggatgtctgagggcagggtgtggggaggaaggagacttggcaatgtaaaccagagctgtccctggctcccgagaggtccccctcacaatgcaaaagatgctagtgtttgaataaagcaaaacaagcacacttaaccattgctcctgctgagccacgctgcttcagtgtgctgctaggagattgtaaactcacccacttcaccttttggactacatccaagcaagctatcacaaaacataaacagctggattcttttatctgatagatataattagaaatgaagtgggcttttaaaaacaggatttcaaatcacaaccagcaggttttatgattttccctatgtgctcaaagaaaagacacatttaagattggatgtcttcttcctccattaatggaatttaatgtttacttctttctttgtctcacggcaaagtgacagatacatacatgtaaagagtttaattgaacataaccaagtgtgtacatcttatctagataaactaagaaatatgcaacttgccaggagctacatctcgaggaggtaaagaggatagattt

SEQ ID NO: 30802 - DNA, 1563 bp, Bovine  19866881441966
  misc_feature (1)..(1): n is a, c, g, or t
ntgcttaaagtaaaaaagtttaataacagtttttgatagaaagagggtgaccttaaacttaacactatgctaatcttggcagaaaccaataaaaatattttaagtgggcaagagcctgcatttaatgtaagtctgtaaaagggtagtcaatgaggacattggccaatgaacattgataacaatgaacattagtgctgtatgtgtatggtattaacaaacccaaaccaagaatgtgtatttttgtgtgaatgtgaatctgggtgtttgagcatctggggatgagttattcagaatgaacagaggaaacagagaaaactatactctgtggattctggtcctgtctacaggagtgaatatattgttcagccaacataaacactcccaggccaactggtaaacatatctgtttcatgggaaaaatgctttcatttagcttttgaaaattacatttctgatttaaaaagcagtaagaacttgagaatttggaaactcagaaacataaaaggaagcatgtttaagctgaccttataaacactaattttttttacaatgttttattatatgaacgtctacacttatccatagaggatatattccaagacacacagtagatacctgaaaacaaagatggtatcgaattccgtacatcatatactttttcctatatatacatacctgtgagaaaggttggggcttccctggtgactcagaggaaagaatctgtccgcaatgcaggagacctggcttccgtccctgtgtcgggaagatgccctggagaagggaatggcaatccactgcaatattcttgcctggagaatcccatggagagaggagcctggtgggctacagtccatggggtcgcagagtcggatgtgactgagcacacacacacgcacattcttaccatagatcttagcaaccacagcatattatttttccttattaaattgagaactttaaccttttcacttaaaggaagcactttatgatgtctccttggtgtattccaattgctagcctcactagtcttgaactttggggccattgttaactaaaagaaggtgactagaacgcaaggactgtgatactgcaagaggagacctagtaaccaagagggctcctgagtgaccggcaggtagtattctctggacagagagatggttcacgtcacaggccagacagaggaggacagtgagagaagttatcagctccttacaatgacgtgcgagtcggaactttggctttatttctgaatttccttttaatactttgggaccaaaattgactgggaaattgaaaccatgcaaactacagagggggagggaactactgcatatttatgtactttcatattattttgcaggcttctttcacttattctctcatgagtattttttgataatagaaaaaaaaattaatggtatttttaaatgcttatgtaatgactccctttacataaatatcagaattaaccagtgttatatttctagagctaaggtgactttttttttttttttccaaaaaacaaaattccccactccttgagtgtggactgcacagagt

SEQ ID NO: 30803 - DNA, 854 bp, Bovine  19866881458557
  misc_feature (1)..(1): n is a, c, g, or t
nacttaatgatgacaaaaacaatattttattaattgggtcacagaattttattaatttttactttgtgctaagcacctcagtggggtttccaggtggctcagtggtaaagaatctatctgcctgcaatgcaggagacttgggttcgatccctgggtaaggaagatcctctgcagaagaaaatggcaacccactccagaattcttgcctggaaaatcccatggacagaggaacctagcaggctacatggggtcacaaaagagttggacatagcttagggacaaaacaacaataagcaccgtagtaatgcaaatatcgctcaaagttcagtcctcaaagagctaaggtcttatacatgatactgaagttctagcagctcactgaatacctctgttctcttcaatgtgcggatatcccgcttgaacacatttgcaagctctcggactactggcaatatttcagggctttgtggagatttttctgtttgtcatgagctgtgttgtatcagacaacagggtacatgggctggaataattacattatttctattattttgtagtgaaaacctccttttgaatctgtcttttcatttttatttctatcaaccccattccatttccatcatcttctttacatcttctctgcattctactgatagaaagttgacccagagacaggcaagtttagccttacatgaaacttctcatttaatagaggtcagagaaaagccagacatttttctcttcatttttcatgagtggactgcaggactttctggggaatatttcttgaaatgccaaaccagatgttgtaaaatgtcttctacccagtgctaaaaccttttctcctaaaacct

SEQ ID NO: 30804 - DNA, 1243 bp, Bovine  19866881477948
  misc_feature (1)..(1): n is a, c, g, or t
ntgggaatttatgggtgaagtgcatatgtctctgactctatacttttctttaaaagaatgtgcggacataaaaaattaagagagacaactctagatcatatcaattaaaaagaaattttttttcgagacatatgtgtacatgcatacgtgcatgcacacacatacacacacagcttttttcctaaaatatatatattctctcataaaatgccacagaattattcactgcatttttaaagtgttctcagtatgtgtgatttataggaagacagatttatttaaaaatgatcagaggctcaaaagttctgttaactttgagaaacccttgtaattacataccagagaagcccatctgtattatcttcagaggcagaattcctgtggattttaatccttagccagcttctctgttcaggaactgcaaataattgcaagtccatttccaagtgtttccttgtaactaagacccattctatattaacgacagtgatgtttacaatagtaacttgttattgagcacccattaagtgccgggttcaatgccaagtgtctcagtataatgtgtggtcctttacgtacaccataatgtcattcaggaattgctttctcagactgaggcaagaatagcatgaaatttccttctttttaacagaagttgattgctggtataataaaacatgcaagcatttatggtagtatctccaagggagagatactggaaccatactggaacctccaggcggtatgacagttttctccagtactcgtattttcttaacatttattgagcatctactgtctcttagacatggtgctgggttctagatgatgaaagcaggcaagatagacattgctcctgcccagaaatcgcttacagtctaactggggtagaacacatcatgtgacgtgagtgtgaattggtggtcaaattggacattttaagccgtgaggctgggtcaaagtaactgtatcctgttcttcagtggacatgaacagatggagttattttctgtgaactctaccacttttggagaatatgttgttgccttttttattaagtatgtaagatatgtattcaaattagtgcatcttaattgattccccctgatgagtaaatacctgtaaagtttgtcgggagtattgtcacacactagatcctgggttcactgtgactgagaaccagaaaaagggacctgttattctgagttacttatgcaggcatggtgatagctgcagtcatggt

SEQ ID NO: 30805 - DNA, 987 bp, Bovine  19866881489055
  misc_feature (1)..(1): n is a, c, g, or t
ngaggtggagtcctgcttggttccctgttctttctacagtaaacaaaatgagaataaatcctacagtagttagtgctccgtttttaagggactcattaaaaataaacagtttagaggagaggcaattactgttaacaaacatagacataaaaaccacaaataaagggccattaacacggaaaaataattactcagtctctcatccagatgctttgtcagtttcacttgctgacactgactcactgttttgtgagaggccgctgctggctgcaatgcatccgttcaacagttcctcctttgcctctcacaagaaaagaaaaaatgatcagcaatgtcagagaattgcactgaagtctatataaaatatggcattgacttctctcttcgtctttcctttctgtgagttttttaggttttacgttactttatgatggtgaaaaaaatataccatcatgatagttgttttactaatgatagaaggtaaaggtgaaataagctttcttcctttttaggaatatgaggtttgatagaagaggaatttgaatatggagaaaagcacagagcacagtgtgcaagagatctttcattgctccagggaatacctttgcaatttcttcaccggacatgttttgcaatcaagcctcataagctacatgtgagtgcatgtgtgtgtgtgtgtgtgtgtttggaaaaaacaagggggaaaaagcagtatattaatgctaacataattctaactatctagaaaaagcaaacaacataaagttgagtttttggctcattttatcagttcagtaaattgaatccattcagacctcacagaatgcagtgttagctagtcgtttataccaacacgcccagggttcaatctgccaatccctgcattaaaattgtctttatcattgccacgttacaaagtggaacgttctgaaagaatccatttcttgcataagtttgtgagtgatgctatcttaaaatttctcaaga

SEQ ID NO: 30806 - DNA, 1360 bp, Bovine  19866881508939
  misc_feature (1)..(1): n is a, c, g, or t
ncatcaggcttttttctaaggagtcaattctttgcattttataagtacttgataaataattgatatatcattagtgaaaaggtaaatctgtattcataaagtcttttcttatgtttttcatgtctatgttggtaaattgggaggtagtcctaggacaaggactaaaatgacatagaggcctccatccttagaaaaatatgttccctaactgcagtgtgaatggaaatgctagattatttattcaccagagaggtacaccaggcatagaaatgcagtgtcgtggtgaagcatgcaccctctggagtcagcctgcctggattcaaatcctgacttcattgctgacaggctaagcaaccctgtatagattgtatcctggtattttcatctacttaattcaattttggaaggtttttgtgagaattaaataaagcatgtaaaaacatggagatatacctagcccacagttctcaataaaattattgttataaattagagtttgttctatagggctcttctatagggctctaatcataggtataaacattgaaatattttggttgttaaacacttggaaactagcagtggaaatgtgaactgtcctgatgatgacgattgttagaaaacaatcttttcctcccggaaagctgtgttgaagtccttaaaaaagtgttaagagcaaagttggacttatttggcaaacgcttgcttggatatgctttcatcgaggaggtttccctgctggctcagagggtaaagaatctgcctgcgattcaggaaacctgggttcaatccctggcttgggaagatcccttggagaagggaatagcaacccactccagtattcttgtctggagaatcccatggacagaggagcttggcggggtccatagagtcacaaagagtgattgagcgactaagcatgagcactgtcttggcagttgcttgtatataaactatgttctgataatatgtttttcaataataaaagataaaatgttggcttttccagtttaccagttgcatgccaataaaacgtgagatatattcccagtaacttacagtttttgtggtgtgaactattcaaagaagaaaacttcgggtaaatcacaaaactataatttatatctagtcttacatctttgaccagatgtactgacttaatgcaggagttttaaataagaaactgtttaaatggaaaaagaaacccttggtagtcacaaagatttcgaacaaggaattttctatgacatcttttctttttatgaatacagtgagacaatatttttattattgtttttacctagtgtttatgagtatggggctttggcagttttcctgacaatcgttctgtttctgattg

SEQ ID NO: 30807 - DNA, 918 bp, Bovine  19866881552541
  misc_feature (1)..(1): n is a, c, g, or t
ntttttaaatagaggccaaataatacacatctcataggatcactgtcatgaatagattaagtgaggcttgccacacatccaagtggggcttccctggtggttcacatggtaaagaatccccctgcaatacaggagacctgggtttaatccttgggtcagaaagattccctggagaaaggaatggctacttgctccagtattcttggctggagaatcccatggacagaggagccaggtgggcatggggtcacaaagaatcgaacccgactgactgatggagcgcgacacatgtcaagtactagtaagcattagctctttcctttttgcactccaacctgcaacaacatgaatgctgtggtttatacatggctatttttgtcctgcataggcaagtcagttctataatattgtgtcattgtttccctaaaggatctctctgtgcagtcataggacttcttgcccaatttctccttagcagtatttatttctggggtccagaagaggaaacgagattttagaaatagttatcactctgtctcaattaggacactcactgtcgaagaactcttaaaatcattttgctttctgggaaagaaagaaatctttccagcagtcttatcacctgaaaaacagtggggatcatgaattattagaaaagagttacccaaagagagtgctcttaaaaacaactgcccgcagaggactctggcttatcaacaggcaaaaagaagagaatctttgtactaaatttgatcttgtcactataagcacgaaaatagcaatgctcataatatattctgtggggatgatgctgtgagtgttgccgccatgtaaaaatctcagctaaaagcttctaagaatgaacgttatgaactcttcaagaactccagggaccgtctattaggaagcaggtaaaca

SEQ ID NO: 30808 - DNA, 749 bp, Bovine  19866881677259
  misc_feature (1)..(1): n is a, c, g, or t
naaaagtaagtaatggaactttattttcagcaaagaacaatttgatttttctttacttgctgttaacgttgtgttagcatttactgatacaatgaagacacgtctattgaactagctcctgattcgtgtgtggatattattctgttatacagcgactggacatattatatgggggcgaaggagctcacacattagctcaggggagaagaatgtctcagctccttctgttgggtgtgccagctctttcagctgtctgcgaaagacgatgcaaggagggactgtttagaaatgacagcatggggtggattctggcatcaggtgtcaaagatgctattttaggttgcgcttctgggttgctaatttagtgagtgattttccctcggtgtcctcatgtggctaaggaagaagtggtttgtgacagtattttcttaaccagtatttgttttacattgtaaccttggctattctcaagttcataccatcttaagatttaggacgtctgagccacctctaaagccatagtggagtgatgtgagccatcagagaaatctggcttattgtgtcttcctcatttatttttattagtctgggttaaaacagtcattctcaacccataggagaatgcacctctagggcaaggtcccaggagtctgcattttcaaagagcttcccaggaaagcatgaaaaatgccactgattaaggacttctggttgtgccattacccagctcgaaaatagttcattcacaa

SEQ ID NO: 30809 - DNA, 1114 bp, Bovine  19866880470037
  misc_feature (1)..(1): n is a, c, g, or t
nttcatgcatcatcttatttaatccacccaaagccacgctctgagtaaagaacgatgattttccctacttgacacgtgaggttaaataactcatccaaggtcacacaatgagcaagtgcgtggagccaggatcgtgcccagcctgtaaggcttcaaaacccatggcttaacccctctgcctccggtttctctttgtcgtggccttgccgccctcttagctctccaaggagaaggagctgttgcaggcaggcctgatgtgccacaaacctcccagcacatcctgcccctttgtcctcagacatctgtttatcatctccctgatctggagctggccgggccctgcctcctgccttgccgtgattcagatgttggggaggatggaagccagagcccagcttctgagcatctgaactggcagagcacaggacagcctggtgcacacttgcgtttgtgttgtcagcccacagcatggcattcgtcagagacagggacttgtggataccacccgagcctccccaggcttcttgctgtggccagccagccagcacagcaccgctgcccacagctctggggaaggtgatagacagagtaccctgcttcctgagcccctgcccaccgccttctactccactctctgatacactgcctcccccacacccaattctgccagaagcctgcaccgggatggaattcctcttcccactttgagcaagaacaggagcagccctggacatttctgaaagcaatgctcttttcaaagcatgttctctaaaatcttagccttgagagatgtcctgccaaaaaaaaaaaaaaaaaagaagaagaagaaatttcagaagatgctgtggactgtgtcctgctcttgctgttcccagggcatactggagtgatgcaggcactgagaaggtctgcagaatttcccaaattaccctttattctaggtgcgcttgctctgaatgggagaacaccttccatgacttggaagggaaaccaggtgcaggcagaagacgcctccctccggtaggtcacatgctcacccaccagcgggagacccctcctctctggacatgtgcaacctggaacccctccccctacttcttgctctgggcatctc

SEQ ID NO: 30810 - DNA, 2751 bp, Bovine  19866880675146
  misc_feature (1)..(1): n is a, c, g, or t
ngtgcctttgaacttgaccgcctgcgtgtgccaagttgggagctctgcaggtgaccgggagtcttgggactcaccttcagtgcaaacttcttagctcaggcggcccaggaaagaatcctctggcccaggcctttttatcttctctgtcagaaagcagatggttctaaacacctggccctggggcaccgatggaatccaagtccagtccctttaatgggccttgttgagcaggccctgatccagcggtgataaggaggcctccccaccggggacaacacccagaaccggccaagagctccaatcttctgtcctcgcggcatctgctggagttcagtggcttccatctatcaggcagatgtaatctcctcaaatacctgccaagtccttctcttcctggagttccctaggataactgcttccccaggaggtgaaggggcctttccttccctgggaagagatgccatatgcatgcaggtttgcacaaagccactcacttctagtaacagaggttgctggttgctttccacaacatccattctccccgttctccttgataacagcttgtactcaaagcagccaaggctccagctaaaggactatttttggctttccctggggctgaagtggactatgtaattaggttctagccagtgaggtataagcacaagttgtatggtaactttaggaagtctcgtaaaagggatagtgtggattctactccttcttgttctgcttctagctacctggaatggagatgcaatggttggagctctggcaccttttctgagtatcaaggtaaaactacacactaggagcctcattctggaatcatgggtcagcaatattgaagatttagttcttcattttttggaagctataccaattccagactgtctgcctatgggcttctttatagaaaatctaataaattaccattttgcttaaagcactatggggctttctttcacatattgctaaatctaatcctaataagtatagtttgacttcaaagtctaacaacaccacattgctttatccattcactaattccctgaggtatttttagtcactcagcaaacattctctgtactaggcaatgtgttgggtgatggaagcctagagatgaatgaaatcctactttatgctttctgagagcccccagtacagaagcgattctcttctcctcagtagaggagagtcagtggctctctcccctttgccttgggcaccatgccctgcagagctccctgcccctcctccctgctccatgatggaccacttggtggctggtggtacagcctaggagtgagagcaaggaccatggagtcagctgttcctgggatgagatcagaggctgccctatgctagctgtgcggccctgatacattcctggaaatggctcacctgtttcctcatcaccctcacacaagactagagaattcgttgaaatagcatatgtatggcatgtaacacagttctctatacaggtgactcccactgtccaaaagtagagcattccttcagcctacaaaacctttcataagtcgaaatggcatgaaatgaagaaacagttactttaggacaccccttgctaatggatgcacaaaatagacagagatgaagcacagatgctcgcagacacagttcaaagctgtggcggcttgatgctgagacactgggcgcagtttttgagaaggagcttggcggtgccctctcactgcccaggatgccctgccgcctctgtaatggctcagctcgctgcaatacaatcactgaacactgtttgcgctttttgccttttctcgtaaaagtgaaaatcctctttggatttcttttgtgaaaataggtactagtgtaagtcttttgcagattgaagtggcataaagtggactttcgagaagtgggggatacctgtaatgcatataatgttttaatcactcttcgcttacttcagcttgccactttgactgtttttgaagcaaccactttgtgtcactactatattctccccaatgtccactcctctcactctttcgccagaggtccatctcccatccttccctggtgtctaggctctcagaaccctgagcccacctgccccggaggagcttcctaaggctcacaggaggttgaggtcagggtctcccttgtccagtctgtgcttgcttactcccaggtgccccgcttcatggatattgctttttatgggctgaggtcctcaggagccaagtccaggcccttgtttgtttctttctctccagtagtaactggtacttagaaaatgcttgctgactagatggatggacagacagacaaatggatggatggatggatagatggatgaatggatggatgtataaatggatgagtggataaatgcactaaagagctatccacagtcaaatgaatgtacaaagtaacatgagaggaagagggaattctaactcatttaggtaaggaagacgggacggggcggacattggcgctgaatgtcaatgggtgagtgggggtctccagggtgagtgggaatctttaggtgggcatttacctgtacaagggcttccttggggtctccgatggtaaagaatctgcttgcaatgcaggagacccaagtttgatccctgggttgggaagattcccctggaggaaggcatggcaacccattccagcatgcttgcctggagaatccccatggacagaggagcctagtgggctacagtccatggggtcacaaagagtcagacacaaaga

SEQ ID NO: 30811 - DNA, 2132 bp, Bovine  19866880964537
  misc_feature (1)..(1): n is a, c, g, or t
ncaggtaaatcttgagtagcacaaagagtctctttgacttgcattctcataacatcttcttgtcatttaaggtgatgtcacacaagccattaacttcaagctcatcctcagtttccttatctgtaaaatgggctcattgaggattggctaaaataatatgtagaaagtgctaatcacagtgcatggtctcactgctcaaagactgagccctagggctggttagaaaccctacgcattgggctgaattttctctgacctgcatccttgttcccctaccttctgctcccccaggccccgcccttaagccctcaaggcctggagcccgcttgaaatttccattctgaacctgggccagaccttaacctgctggtgaagtgctggctgagggttggctttcaaggaatccacagctgtttttcctgcctttattgctgcccagtatctggcccacaggcctgctcacccatggccattaccatacaggctgagagcagaggcccaggtcacccaagggaagccccatttgcctagcaacacaggccctgtgaccccccagacccagaaacttcgccctgtacacttgtcctcagggcagtggcaccaaagctatgccctgcaccatgtccttccagcacagcccggaagaggagaagatagggccattgtaccagttcctccctgcagcgtctgcagtgcatctggacaaagggaaaggatggtcagttaggcacctgctgtgcttctgactaggggcctggcacatgcagcggcccccaagtatctgctgaataagagtagatggctttgactataatcttgttaaagactcttggtaagattaagagatagattagcaatcccattttgaagacggggaaatgaaagctcagggagccttgagtatggtaggaactccctttccaatgagtgtttgggttcctactggtgcccatcgttcacagggccagtttctgcatcacttcctcctggcctgttcacaccaccagagactatagacattgatgctatggtcctaattcctcctggtcactagcctgttagcgtcattaggtttaacagagggaaggttgtatttatggcttggcatgaaggaagaacatgcagatctctgttgccaggctacaaatgactccttttcccccctagaagagagtaataatgattaaaaaatactcagttgcttggcaagcttctgggtagctacactgtgaatatttcaggaactttcacagaccctgctgcctctccaggctcccttggtttcggttcttaacttcatccatcttctgaaaaaagagaaggcgatgacctgtaatcaatgggggaaaaaaaaaaagcatccttcttttccagggagacgcacactctcgattatctgattcctctccttgaatggagtgagcagagttcccaaaagaaccagagacagcagtattctaaggggcaggtctatgaaggagtagagggaaggaagggtaaagtcaaggtgagaaagcagagggtcatcaatggctgagaacagccattggtcgggaagggagaggggccaggcagcaggaaggaagacactgcaaacggcagacttttgccacctccaccatgggcccaggcatagttgtctcgtacagaagcctggggtctgactacacacccctggagactgtcggctggctcacttaacatttgcaaacacagatctaagagccgtgacctcatgctggaagagtaccagtccttatggggagggcagccctctacatcccgagtttctgaattttgggggtgattctattatttttggtaaaaataacgtgttcaatgtgatttaatttgtatacctctctttaagactttttcctgcaaatgtatttataaaaaaatcgtcagactacgtattaccttttgttactgctattttggtttgtatgatgtggaaagaccctagcattcactgaaaatccaccaagagatgtaaacttctttctgtggtgtgtcagtctacaaaaccctgggaattggggtagttgttgttttcctctttaacaggttgctgctgctgctgctaagtcgcttcagtcgtgtctgactctgtgcgaccccatagacggcag

SEQ ID NO: 30812 - DNA, 2328 bp, Bovine  19866881025327
  misc_feature (1)..(1): n is a, c, g, or t
natagtaaaacttaaggggaagagaaccagttcccttgtcactgactttaaacacctaattcatatatgcagactaggaccaccccacatcctttatgatttaactggagcctaagtgtaattaaagggtttccctggtgactcagatggtaaagaatctgcctgccattgtaggagacccgggttcaatccctgggtcaggaagatcccttagagaagagaatggcaacccactccagtattcttgcctagagaattccatggacagaggagtctggtgggctaccgtgcatagggtcgcaaagacagacacgactgagcaactaacagttccactttctaagtataattaaaggtgctgttctgggcttagaggagaaatacacggtccctgcttcccaaggagtatgcacgtgcaggagaaagatgggggctcaaagaaggaggaaagtggggtctgggcaggcagggccgagctcagaaccaaatagctcccagttgtaaactggaaccttgccaccagcacgttgaaatccccatggtcccagcctcgtgtgccaaaccaggcactagcattcttgtgaaacagatcactagcactggccactctccacacatacctctcaaggcacagtcggtctcacagagggccagccttggccttcacacctgggctgcacagccctgcccctcccatctcccgttgggaggtgctggcactgacaccggcgggcagcggctctagaactggaactcccaggtggatccaggatctgcagccggaagacaaaacgttccttggtgttccctagcaacccaagccactcgcagcctacagttccatggctgacacccttccatccatttgcaccgaggcgtttggtgtttggtgctccagaacgcttcctaatgtcccttcaatgatccacgaagccatttgcttataaaatctccctccctcctcctcccgcccctaccccgcccttccactggcttttagtccagtgaaccctctgcggcagatgcagtgaacaggagccctgggtagcttgttgaacaaagccctcattccagagtggcagcagcgtgggggtgacccccctggcggtgatgctgcccactgtgggctgtgctgggggttggggggctggtgggaggagatggatgagattcagagacaggagcaaaacaagctcagctccagacagagggggagggagacggggcaaggagggggaagaaggggttgaagggattagaagaggaggaattggggtgcaggaggagggagaaacaaaggggaggagggagagacaaaggggaggagggaagggagggggaagaaggagggagggaggggaagagaaggagcaaggagaggagaggccacttcgtttatttattatgatgccagttgcagtgtcggtctcgtgtgtggggagcagactgtattttatgttttaatcctccaagctgtgtgtgtgggctggggataattacattgaaaaatgtgtataatatgcagaaggttctttttgtggggaacgggaatgctccggtggaatatcttcctcatggcaaccaatgccttttccatgagccgctcgggaggtgccagtaattgggagcacagtggaagcccagggctgcccccacccggagacagccaagccctcctctattttaggggcggctttggcatggaggaccagggctgggactccttcaccccgcctgcccatgggacccgcacacgacaggcaagatacaaatgggagcctcattgcttttttggtgcagccttggggccgctgatgaagaatgcaagagggagctgacaggcaggctgctaggagacggtgtccacagcctgtgcacggcacacatacacacaattgtgtgcacaagtcttcacccatccacacacaatacacctatatgcatacacacactcacaaacattatatgtacatatgcatacccatattcacccctattcctacacacacaaacacatgggcgtacacacactcactcatccacacctccagacaggcgcacacacacagtcatacacaatacatgcacacgtgcgcacacaatgcccacgggctcacatgcatgatcacacacactcaaatgcccacaaactcatgttaatgggcgtatacattttcacaaattcaaagtcttacccatggccatacatgggtccatgtacatcttccattctcttacttactcacatacacacaccctcatatggatttgcacacacacaagtacgcacaccactgctgaccactgtgaagtggaaatccaaactat

SEQ ID NO: 30813 - DNA, 698 bp, Bovine  19866881420482
  misc_feature (1)..(1): n is a, c, g, or t
nccccaacattcggaatatttttttttttggtgcacgtgctttagtgacagcaccgctcacttaatttgagctgcctggcgggtttgcaaactttccttcggcttatgccaactgctgatttgatgcctgtttacccagaaattgcagatccggtggaaaaaacaccccaacctatagaggtgccagtaagttgtgctttgcacagcgggccagcatcccacagaagaaaatccactcgcgcaacagtgtggtccccagaaagtcccgcgatgatgaatagggcttctggctcccttgggacttggctggttattttgtaggaaattgaatttcttggtacattaggggatgtgctaatgaacactaatgctgggccaggagggctgggggtgggctccgccccgggtcggtttccacttctgcctctggtaaccttggctcccccttccccactccccctctcctgctggactggcccagtgccaccctcacgtgctctctcccggccctgtccaggccctcttgagaatctgtgttgagttcaaactgcccaccggcctttggtcactcccaagcctgccatgggcagaagcccttaggacaacttagggcctatggaattcggcccaattttctcagccttttaaggctgcttctctgggatcagccaccttgcctaggctccttttctactggt

SEQ ID NO: 30814 - DNA, 877 bp, Bovine  19866880264687
  misc_feature (1)..(1): n is a, c, g, or t
naacaaaggtccgtctagacaaggctatggtttttccagtagtcatgtatggatgtgagagttggactataaagaaagctgagtgccaaagaattgatgcttttgaactgtggtgttggagaaaactcttgagagtcccttggactgcaaggagatccaaccagtccatcctaaaggagatcagtcctgggtgttcattggaaggattgatgttgaagctgaaactccaatactttggccacctgatgagaagagctgactcatttgaaaagaccctgatgctgggaaagattgagggtgggaggagaaggggatgacagaggatgagatggttggatggcatcattgactcagtggacatgggtttgggtggactccgggagttggtaatggacagggaggcctggtgtgctgtggttcatggggtcgcaaagagtcagacacgactgagtgactgaacttaactgaaaataacaaaaccaaccacttaatagtataaagaaactgacttttatttattttactaaaggaattttttgcaactttaaaatctattcttgtttttcaggatgcaaaattttaagatgatttattgttattacatgaagcaagctgaggtctacttctgaaatgaaaatgtgggtctaacagaggagaatagaattgttaattccttttaatgacttttcttaataaagtagccatcaagtggaaaaatggactggcatctctgttaaaggaaaagaaaccaggaagccttcatttaaatcttcattagctactgattaggccagaaaagggaaatcgccagatttcctcaaccatggattataaaccaggaataattaagggaaagactataacctccttacagggt

SEQ ID NO: 30815 - DNA, 1245 bp, Bovine  19866880362548
  misc_feature (1)..(1): n is a, c, g, or t
naatgaaaggagggcaagcagtcccaagctcccccactctccttccaaatgtcctttccgattgtgccttatggctggaagaatccagctcacttctgtgtttccacgttaccaagcacccacactgcagcagacatgattcatcacttggtttgtttaatcaatatttattcaggacccacgaggcgctgaatatagaatagcacttcctagacaagagagactgacaagaaaaacaaaagccccatgtttaagcagtgtgtgccctaatatggatgaaaactaaagtcgattaagaatgctcatggtgaagaaataacaagagacaagggcttgctctggtcctcgataccccttaaaggagataattttttaccaaggcagtattccatgtacactgctggcccaagccattatcatcctttttcatttgtatccccagatatagtctttgactggtcttgctgcatccttctttgccttgctttgatttattcaaaggaagctttcggaaatacaatcagataatgccatggacatggaacagtggactggttcaaaattgagaaaggagtatgtcaaggctgtatattgtcaccctgcttatttaacttatatgcagagtacatcatgtgaaatgctggcctgaatgactcacaagctggaatcaagatttccaggtgaaagatcaacaaccttagatatgcaaatgatgccactctaatggcaaaaagtgaagaggaactaaaaagtctcttgatgaaggaagaaagcaaaaaagttggcttaaaactcaactttcagaaaacaaagatcatggcattgttcccattacttgatggcaaatagatggggaagaagtggaaacagtgacagattttattttcttgggtgtcggaatcactgtggatggtgactgaagccttgaaattaaaagacgcctcctcttccctagtggctcagatggtaaagaatctacctgcaatacagaagacccagcttcgatccctggatcaggaagatcccctggagaaggaaatgacaacctactccaatattcttgcctggagaattccatgaacagagaagcctggcgggatatagtccatgggatcacaaagagtcagacacaactgagtgactaacactttcacttttctctttggaagaaaagatatgacaaagcaggacaggatattaaaaagccaaagacgtcactttgctgacaaaagtctgtagtcaaag

SEQ ID NO: 30816 - DNA, 821 bp, Bovine  19866880366097
  misc_feature (1)..(1): n is a, c, g, or t
ntgcaagaaaaagatgtatttgaacgttattataagcaacacttggcaaggagacttcttacaaataaaagtgtttctgatgactctgaaaaaaatatgatttctaagttaaaggtaaggtgtatttaggatggaatggagtgcccttaactaatgtttatcacataattgagcaccaacaaacaagtaattgggaaataattgatttaaaatatttgtttctgtaaatgaacaaagctagattttgagggacctgtggtttttttgttttgttttttaaagagaaagttgtattgcgatttgttcaagttctgggacgttcacagtgtactgaaatttctcttggtgaggcagatacatttatggcgatctgggggaggatcagtacaaggaaagcagtaagtggaatatgacatacacttctgtttcacacagtgtgatccacaggccacctgtacacatatcacctgatatgggtgtttcttgttaaaaacacagagttctgggccctaccttcagttggctttatgaaaatctcagagtctggaaatttgcgttttaaaataaaattcttaggttattaatcccactaaagttggtgcctacaggcatagaacaactattattagaaagattcagaaaggatgacagtaacatggaagaggttgtatgtttcctcataacagaatccatcatttgtttgtgtatgtttgtgtttttcttctagactgaatgtggatgtcaattcacatcaaaactggaaggaatgtttagggatatgagcatctcaaacacaactaggagagttcaggcaacatcta

SEQ ID NO: 30817 - DNA, 1809 bp, Bovine  19866880404271
  misc_feature (1)..(1): n is a, c, g, or t
nccaaggttacacagcctggaaaccactgcttcctaatgataaaaagatacatttttcaaattgattgactaggaaccacataatggcttttgacttcaaaaaatggaagttaataaataaaccttccctgttagcactcagaaaggtcctaaaagagtcttatctgtgcatatgggtatgccaataaattttattactggcagtttcacagggaagttttatagctatgtaggtagacctactttaaatcaaaatggaacactttacattggaaaataaaatcctcttttgaataaatgacagattttaaaataatgtaaacaacatgaatgtaaatgattttaaatattagttctccagattcgaattttcttcttcaaaaaagttactgagctctgatagcactttcatttttgtgaaggttactcagctatagttaattcccattttctccttctgaagagtatgacaaagggacttttaagagctaatcaaataaacaacgagtgttcaaaaataacttaattatcatatttcattgaatagtacattttgtcaagttttttgtttgcttgttgccaagtcagatgttcaggcctgtgttctgtttatagaatgtgtgatctgaaagcccaaacagcactggtcattttgacagccttaatgagtcatttagactggcaattactaaaataattacatgaagacaagctcactgtggtcatcacaaacggtttcacctttttcaatagactctcctctatctcctgttgttaaactaccatttgggtgtttaacataaagaactgactcgcttccctacttttatatgtcaggagagggagttatgctgaaattgaataaggaaaagtgactattctcacatttagcagcacaattaaaggaacttctgatgatctgggtccattaattctgctattctcagaggcagacattcccaccaaaatccaattgcaaaatattaatgttttcaaaggcaagtgttttgctctattgccactaacttggtcacattcattaaattttattatttctacatcatttaatgtaggtcagcatgtcaagtccagcaaacacaagcatttcttttctttccagcccactgacgctgctgtgaatgacaagaggcgaacaaatctcatttcagtggggaggaaaaaaaaaaaaaccctctcctttgtaaacatgaacattaaaatcaagaccacaaaagacaaagtaacagatgtcatgcggcaatccaactactctatgcttatcttgccagaaatgtatttccacagaaggagaagaatcaaatgatgcccctttcaagagatgaagggaccactgtttgcaaagtttaacacactccgtgccagtcccgttcttgggaaagaactacactgacggtgtccagagttggtgtcattctcagtatacagctctggtgagaggtcataagtgaaaaattgttcatcagagcaaactcttctctcttaaccgcagctcttctctcgttcagaaactctttttcaaaacctcctcctatggctagtactctgaggtttcctttctctctttgctctctcgcatggatgctaactgcatgtttaatgagatctgcttgcctgcctggtggacccagtctgaagaatggagttatcgtggtgaatacagacccagagtcagactgcctgcatgtgactcctggattcctcacttaccagtcatttaccagatctggggcaagtttctgatctccaagcatctctttcctcatctatacaatacgaacaccaatcctt

SEQ ID NO: 30818 - DNA, 1291 bp, Bovine  19866880407054
  misc_feature (1)..(1): n is a, c, g, or t
ncttcattctgtactccaaggcccaatttgcctgttactccaggtatttcttgacttcctatttttgcattccagtcccttataatgaaaaggacatctttttctggtgttagttctaaaagatcttataggtcttcatagaaccattcaacttcagcttcttcaggattactggttggggcatatgtttttcatatgtttagggctaatgccatgatctataaggttggatttatttaacaaaataatctagttagtttttcaagaggtttgcatcaagtaacatattgagaattattactacttccctgtttgtttgtttgttttttcctgtaaatttaagaaatcaataaccagagatgtattgtcttctgatttaggattagaggcatcacactggattgttccaagagggcaccttataaacaactgggtgtactgagttttgtgaatgtatgtagagcttatattgcttgagggcaaaacaaatacaatctggcagagcccaactgaatagggttatgcttttgaaaggaacttcttggcagacagctgttcatattcattttctaaaggaagggatttaagcctactcacaaaaataaacatggtattaatatccagagtctgtgtttttttttttttcttttaagtaatgaagaattcacttattaaagtaagagagattcatcacagccaataatgtaaaaagagataattataccagcattaatgataatagttaactttatcagaaaattctcgaaaggatttttgctcatcaagtgatgagagttcccatttcaaatgaggcaattttcaaagatatatacttgtttttccaggaatcattgcaagttcttgtgatgttcattataaatttcaacccctaatgtaccacgagctcattattttctactgatcctccaccgatttgcaggctgcctgtactcaaacttggagtcattgagaattccaccaggtaaggcagagttaacgctcattcagtggtccaatagagtattaagatcatttttgcttgtgacaatgcagagggctgaactggtagattccatggtgaactgaaaaatcttgctcaagattttgaagcttctcttatcaaaaggtggaatggtatttgaaaatattccttcatcctgggtggctttgggacttgctgtgaccaatagaatgtggcagaagtgacactgtgagcattctgagggctaatgctcaagagacccctgcagttgcctgcttgttttctcagaatacagccctggaacccctg

SEQ ID NO: 30819 - DNA, 1527 bp, Bovine  19866880443319
  misc_feature (1)..(1): n is a, c, g, or t
nggggtgaggggaggggatgggaggttccaaagagtcatccgcgactgagcactcactcactctggaggctaaccagagccaggaaatgtttgactttactctctccccttttagtataaaagaagcctgaattctgactcaggtgaaacagttctttgggacatcagtctaccagcttctccatttgtgctttccaaaatatgttgctattccatgcctcaacaactcatctctaaatttactggcctgtctcccgaagtccaagtaggatgaggttggactcggtaacggtagtggaggtcgttaagtctctagcgtttaagcataaacacactttgcttataaccacagttagagaagacaggctacttaaggcaaggccagtgtggaggaaaagagaatgagccaggcagtcaggcaaagaaaaggaaattcattaaagggaaacaaaaggatgagtggcccttgagaagaaccagcagcccgcccttctgatggatccctcttataccccatagatgggaaactgggtcccctaaagggggatggttagtttatctttagcctgcaactggagtctggcagtaagggaatctttagagagccggagggtagggtggtcacgtagtcttgggaaagtaaatgctataggtgaaaacaggatgttgcttgagcaatgtggtcagtttcatgggtcactgtgacttttgtttgcaaggtcagcataatgagccattttaacaatgagtccccacgcagaccctatcacttaatatatgcctgactatgaggccaaaataaaaattttagagcgtattgagacttttccccatgttttcactttaaacattttaatgaaagtgaacaaaaagacctttttgttaatagtgacacatcaatgcaggcagcaggaagcaggaagagctatcatttctcaagtctcattttgagtgtgtcttcccatcatgggcactggatgtgaatcccagattctctcccatcacaaatggtctttcctcatgcactctgcacgcagtaccagggcagttgacttatcagcctgactccaagggtagctcttaattgaaagagataagctggcatttcttcactgttttctaagaatttagaaaatccatggttaattgtgtggagggtattttctagtctttctggttcgcctgcatcatccagataaagccaatatgagcttgaatttcctaagttataaaggagtcaaataagaattaccatcaagctgtttttcagtagagttttctatgagcctaaaggaagtctgttgtttgcattcaggttgcttttaatcctcaacatcagaagaaataagttcaccttccatttgctattttataataccccaagtatctgaatgcaggtaccaaaaaagtgtgctaaagacataaagaaacaattcacaaagaagaaatacagatgatcaatgaatgtagaaaaaaaattagccctaccaaagtcataaaaatacaaatacagtatttttttttttt

SEQ ID NO: 30820 - DNA, 871 bp, Bovine  19866880446419
  misc_feature (1)..(1): n is a, c, g, or t
naaaaaaaaaaaaattttttaatgctgcttttaattatattacttaggccccagggtactgagtgttttctaatcatttgccttttgtacaagggttttgccaatcgtttggagattttattttcttagttatacttcagttaatagaattgttgaatcccttggaaattaaagtaatctaaagggtttattatttaacttgataattaaattccccgtgttctctcctaatgtggtgctccatacaaagaaaagacccaccattaaaaatgtaagtagagttggataagaactattctcagagtaacaacatctactctcattatctcccagcaaagtatccactttgtagataatatgctgaaaacttaaactcttattaaagagagcaagtgagaactaagctactggctttaactcttcagtgactttttgtggaagtttgagagctctgaaaacatgtatttcttggtgggaatggcaagaacaggtaactatgtaatgcatccatgtttccacgaagttataaaaattcccagctggggtcatcagcatatggtcaaagtccgaccttttgcaagactcaaggaaatattcaccaaactccttcagaagtatagtggagggcttccctggtggctcgctggtaaagaatcacttgccaatgcatgagacacaggttcagtccctgatctgggaagaccccacatgccgtggagcaactaagcctgtgcgccacaaccactgagcccgtgctctagagcccaggcgccacaactactgaaccctgtgctcctagagcctgtgctccacgatgagagaggccaccgcaatgagaagcccaccacagctagggagtagcctccgctcg

SEQ ID NO: 30821 - DNA, 2671 bp, Bovine  19866880448406
  misc_feature (1)..(1): n is a, c, g, or t
naatcgttccccagaatgaccctcacagccccactcccttcggagagaatgaatccacagggacttccctagtggtccagtggttaagacttcacctttcaaagcaggggttgctagttcaatccctggtcagagagctaagatcccacttgcctcacagccaaaaaatcagaacataaacaacagaagcaatgctgtaacaaattcaataaataattttaaaatggtctacatccaaaaaaaatttgtaaatttttttaaaaaaaattaaaaaggagaattctctgtaacttcacatttcttgatctctctaacctcctccatagctatcaactttgaacctcccttttccattatcccatcaatatctttctcttttgttctgtgttatggccctttttctcagaccccatatcttcctctaacttaacttattcccttgatggaacacaaagtccagtagcttccagaaagtgacatggtgatacatattttgagaacttgcttgtatgaaaatatccactattttctaaatgctgtgactcagactgtaaagaatctgcttgcaatgcaggagacccaggttcaatccctgggtcaggacaattcccctggagaagggaatggcaacccactccagtgtttttgcctggagaattccatggacagagaagcctggcaagccacagtccatggggtcagagagagtctaacaccactgagcaactggcaacaacaacaagcatacgtagcttttctctttcagggcctagaatctctgaatgttgaggtctttgacatccgtaccatgagcattctcgtctagcacacagcaacagttatcactctccctggtaattggataaccaggtagaacctaactgcatcagaacctaactgagcccaggttacacaacaccaggtctgaggaacgggcaggcagttccatgcacaaaagtgaagctggactggatcctaagtacttggacagagtccacattagaatcagaagtgctttgtaaactatgtgtgtctatagagacttaaaatctcctctaggacttaacaagcctgcttcttgcttcacatttaatgctaatggtaaactgaaaaagatttctagtgacagataattagtgacaatggtaattaccggcctttatacggtctttcacccaaacagatagtaaagagcttaaaaaatgaatgctctaaggcataatttcctccccttcttaaatacaagttcctctagggtcaacgatagtttgtatttaacacattgtcttatgctacccacacgaaataacaatttctgggcaattcagctagcttgttaatttgcttagcaattagctttgaatggatttctaccctgaatacattacaaatgtatgaatgcatgtatacctttatttattttcttattcatttatttaacttttataaaaaacctctgtgattaccatcaatcacgtggatggacttccaggtgacacgaggtttgggtcaacttagcaggcctctcaatgtggcctacacagcccagcttccctgaaagaagccagcctctttggatccactgggacagagccaagtttgagatttataggtgtttctgaatccctaggaccaaatatcaggctgcattttcttggtgtctttccccccttttgtgtataagttttaaagactctacacatcatattaaaaagacatcaatatttaatctaaattaattgtaaattaaactatcaaaggaacactgagactcttcccgacatctttcttcccttcgcccgcctcctgttttaggaaaggtgttgctgtctttgtattattcactatctggttcacagagatgctctgtgttgtgtgatgagagaaaaatgagagcaattgctttctagatctaaaaagattaagatattactttgcataagtaatgggagaatatgaatttctattcttcaccctcaggccaagcgtcagaaggaaatgggtctttgccttggtgaatgtgtttggttctgcttctcagcagagaaggtataagagtgggtaggtgtgggatcggggtttgaagaaagactcacttttcctcttttctgccttcccttctctgggcagactttcatagcctaagtcaaagctcagctctctcttcattagagcagaaatggatgagggagaaagcagaagagatattgtgatggagggcccaggataggcagtttaggttggaatcccacagcctgtggcaccaagaatttcattcatgcctgaggcctcaacgtcttcatacgtaaactatggttaacaattcccttagcactatattgtatataatataaattggatccctgttaaccatcattattgtcattgacacttggtgcctggggatatggaatttacctggttatttcttcagggaggggtaagaagcaccctaaaaagataagatgggatattagaggggaagacagttggaggatccaggatgggaaacaagagagaccagggttgggaagaaactcactctgaaagcttcagatgcctccttatggggttatccccttacccaggaaagtgaggtatgaattcttagccataatgaggtttaaacaaacggagcgtctaatttgcagacacgggaaggacctagata

SEQ ID NO: 30822 - DNA, 2653 bp, Bovine  19866880468477
  misc_feature (1)..(1): n is a, c, g, or t
ntgtttctttgctgctttcctgactagaatatatattccctaaagatagggatttgtgtctcttttgttcactagctatggtccagggctttgaatgggacagggcacatggtaagaagtaaataaatattcatcgaatgaatgaatgaggtaataacaatagaaattacaaaatatttagagctaaatgatgaggaaaatattatgtaataaaataaggggaagacatttgggtacaactacaaaacattcttgaaatacttagagggagatttgaataaatgtcataataacgattcaatacagggcttcctttattggttcaatggtaaagaatccacctgccagtgcaggagacatagatttgatccctggcccaggaagatcccacatgccacagagcaactaagcccctggccacaactattcagcatgtgctctggagcccaggaggtgcaactactgagcccacatgcctagaacctacgcaacgagttgacagaagccactacaatgagaagcttgggcagtgcagctagagagtagcccccactcgccacaactagagaaaagtccctgcagcaacggagacccagcacagccaaaaataaataagtaaatatataaaaattttaaaaaaaagaagattcaatacagccaagatagatgtcaattcttctcaattgatccataaattccaaaaagagattttcatgaaactaaaaatcagggctaggcagagagaaatcctttgtggctatacaggtattcagtgcaaagctagaatcagaccacagatagatttcattcactacaattccaagcttgcccatcctccttctctgctcatctacaaagccctccccctacttgtctaatactagagagcagatagaatattcaaccaaaaaatctttcattttaaaacctgatgttactcaacaaacatgtatttaaaacttactaactttaaaacacgtcagagtatttatcattataaattcatttaatctgaggatagctatccttatgtctccttcacagataaagatacaggcttagaaaagaggaataacttggtcttgccgctgacagttcatagagccagatccttccaggatatcttgtgagaggcttaaacttgaatgtgaagtgaaagtcgctcagtcatgtccaactctttgtggctccatgtagcccaccaggctcctctgtccatggaattctctaagcaaaaatactggagtgggttgccatttccttctccaagggatcttcctgacacagggatcaaacccatgccttttatgtttcctgcattggcaggtgggttctctaccacctgagccaccacggaagccttggccctcagtaaatgttcatgacaacaagttgatcttggaaagctgtattacttttttggtccttagtttctcgtggaaagaactctatctccttgaagccacactcctaggaaaccaagagaatttatccattccctcaaacttgttttgctgtctccacacagtatatttgaaaggttgaattagttgcccattaaaaaagtgtaatgatctctcatgatatctggattccaacttcttttgaaaattctaaagaaccggaaacaccagaactagaaaaacacatgcctttcttcatgacaactgatgattggagctcagtagttgttgaactcaccatatcagtcaatcatttcacctgcctttattttatgagtaagatttaataatgagatagcgacagagtggcagtaacttaggacccagacctccaccctgtgcattatatcagtcatattttttgcacatgtgccaattgcaaggaagccttggcattcttactttcattggaaacttacacaggtccgtgatcatctatcagatggcaaatgtccctttccataactggctccatgcaagtctcttcatgcacaacagtcaagattatctcacatctggctgaacagggaagcggctcatcccttctatgtgaattgacccagagcattcttaaatgtccctttcacaggcttatcagtatttcatggaagctgtgcccgtcaaaaacttttcatctcctcctttgtttccacatgactgctccaccaccgtgtgacactcaaatgtcaaaaagatggcgggatggcagtctgtcagatccacttctgactcggggctcctggcaacaccagatgcttccagtcacctgggaaatcactgtgacgatagctacatatcaagttcaaggtcaaagtgaactctgcaaacgctgcaaacgccgaatttctgagcagctgtttaaataatttataacagcagagtgtacgcctgcttgaaaagtgagacataagacttcatgtaagtgacacttttctattatgtcttagagggcaaggccattgggtatctccacacggaaggacacacggccgggtggtgataatgcagtcaaaatccccgagttctaatctgaccttgcctatcctctgtcactgactaaaaccaaaggttctgacagataaaggagtcacatgtcaaccctacacaccatattccatcgaggcatgattttatgtccagacgaaagacacgctgtgacatcatctattgaagaagatggaaagcagaca

SEQ ID NO: 30823 - DNA, 1859 bp, Bovine  19866880599118
  misc_feature (1)..(1): n is a, c, g, or t
ncaaagctgatgtttccttcttctaaatatttgaaacaggcagggaaataaaagaaataaataatttacccaaatcaacaaaactcactaatcagttctaagttattaaataaaaatatgctcaaactattaatatttacctttttaactggtccatagaaggtggcattgagatctgcagaacccatgtgatgctggagtgtgagctgtcgaccactgtgtttggctaagtaaaaccttcagcaaatcaaaccaggtttttgagaattacacaacttatttatttgaaattataaacttccaatctttaacaaacatttatgtaagggagacttcaaaagcaaaaaaaaaatctcaggaatcaagttcagttccaattttttatagaaaagaaactataaattaaggggtgggggaaaagagacagaaaaagacagacctaagaaacttagctagacagtaagtgataaaagtagtacactaaatactttctacttgtatatttatttgtcctggctgctgctcagccaccgcagttcttaagacaacctttctccataattaaccccaaaacaattcacccccacctagtggaaaacatcaatacaaaatatactcctaactatgcactaatgctgaagaagggtattagtattcctctgaaaagagattatgcaattcatccttacatattgaaagcataaagggtaataagattaaaaatggagtatattcctcttcaatcagggacactaactgctccgattcatctcaattctggacaatttgtacttagaaatacaaagttcgatctacatttaccttctgaatatctcaaaagcatgtcttggtgctggtgggatgttgcactttggtgtggctgactgagtgggccagtatcctgttgtgagcacccggactgtgagatcaacaccacctaaagatacctgcagcaaaaagaagaaattgtccccgcgccaagttagctaggatgtgctatctgttgccaagccactgtgagagttatcagagttatcaaagtagttatctccaggtccaacagccagcaaataaaacacatcttcttaaaagttagactcatccaatgttttcctaattttaactatggtaaattttattgcttaagatgtttgcttagtcttactggtgtcactgaaatgtacaaagtttgaggcctttaagattttttccagataaaatgccaaggggtcatatcagtatcattttagagaaaactccagaataatacctttcatctcagtttttaagtacccctgccatcttaacacagaaacaaaatatttctaacatcccaatcacatttcaactaaactgaccaaaactttcaggttttcacatgtagctcacattctatcaatctctgcataggacgctaggcccagttctacacagtcggtgctctgtaactatttgcatgtttgactacctctataaaatacatgctagcattactgtcacaatgaggttattttttccctttaaacagatctcttaacaagataattttttaagaaaacagtaacaaagcatatcaacagacattattaaggggaaaagctccaatactctgggccaccctgatgtgaacagctgactcattggaaaagatccctgatgctgggaaagattaagggcaaaaggaaaaggggcaacagaggatgagatggtggataacatcactaactcaacggacatgagtttaagcaaattccagaagatagtggaggacagaggagcctggaatgctacactccatgaggtcgcaaatagtcagctgaacaacaatcactgttcagctttatcattaagattcacag

SEQ ID NO: 30824 - DNA, 1370 bp, Bovine  19866880627066
  misc_feature (1)..(1): n is a, c, g, or t
ngtgtaagaatgaaagaaagtcacaggtcatgacgaaggccacaaaggtcataggaatgacaataaaatactgttctttccactccttttctgctaactctgcactcagaaatttgttagggggaaaaaattcacagtgaagatgtttctttgtgctagttttcacaccttgatgaaaaaatcttttccttaaatttggaaacatttttctcattgaaatggaagcagtaaatgtggcttgagctattgccctgtggggattctggttgacggcctcagaagtcagttctcttttgtgtcagtctgtcaattttagccacttacttctgaccttgaatcagacaaaactccataaagcatcaacaggaaaaaacctagcaggctggaagtcatgtgggatagggtcagacctcactacccctacagagtctcgaagaatgatgagaggctttgcttgcttttaacatcacacatcactgttttagcagtctggagtcaaggtactcacaatctgctgtattagtcttgaacacttctcagagaaattgttcaataaaaacacctgtaccaaaagcaatggaatcttttcaagctatacttggtgcaaatacatgcttttaagatgtatgctctctaagaacggcctcattcatctgtttattcattcagctaacgggcagggatgtctctcttaacatcacacaggcacaggcacagcgctaaacactggacatgcagtgtggaacaggacacgttcctgcctccaaaaagcccagagtcggtcagggaaacagcaaggaaacaggcgattacctgcttaacaggaactgtgctggtgaatgtgccttgttccttgtcgtcagttacagcccatttatgataccaagtatactctttgtgcagagaaggcaatggcaccccactccagtactcttgcctggaaaatcccatggacggaggagcctggtaggctgcagtccatggggtcacgaagagtcggacacgactgagcgacttcactttcacttttcactgtcatgcattggagaaggaaatggcagcccactccagtgttcttgcctggagaatcccagggacgggggagcctggtgggctgccgtctacggggtcgtgcagagtcggacacgactgaagtgactgagcagcagcagcatactcttcgtgatggtcaaacaccagtgaaagcgctttgcgagtataaagcaccataccgatgtgagctgtgatcagtattctcagatcacctcacattagctgtgggggaaaaaaaccagcatcggaatattttacccaaatttttatataatgagtatgtttttaatggtcaaaaatataaaacaagcaaaaaa

SEQ ID NO: 30825 - DNA, 1383 bp, Bovine  19866880627811
  misc_feature (1)..(1): n is a, c, g, or t
ntagatgtgctttaggggtggtctggctcagattctacacacctctccctcccctccaatgatgggtttcattctacagcctctctttctcccagagtgcatgactttagggaatttcccactttggtaacttggaaatattaattaggcctcctgagggctgagatcatttgtcattttggtggccagagtttcctgatttaagggagattgggcaaagaagagatgttaaaatcttacaaaagcaaatcttgttgctattgtaaatgcatttcttagcttcaaaagacaaaaatcatatgaagataacaagaggcatcaatttaaactacatctttaatagtttactttaagaaagtataatggatagcattagatttcttaataattattctaatgtattctgcataatacatttgatatacagtatgaaccacataaatcaggatttaactgaaatagaaacataggggttatgagatcatagttctcttttcaattcatttggaaaattcatcataaccataaccagttcaagtcttcagaccaagtggtccaaagaccacatggcaatcgagatggacttcttaggatagaaattccaaattcaggataaaaatggcctctatcaccctaaaaagctaaagtacaacagctgtaggagaattttatggaaaggtagccatcaatctagacctcttggtttccttggtgattagcccaggagatcttggatgtttcactctcagttacatagcatcaccttcctggcccatttctaagcaaggtcaagctgtctgggtcaaggtcatctctcttggatcctttctttgcccctttgcatcagtgaagactcttcaagtctgactcccacccagttcattgcaagatgtagatagaattctagatgtaaagaattgctgagaatctacagaatactgggggaacttaggatctggattcaatgcacactgttttattctgcatattccaaagtcttcatttgttctgaaggcttcatcctctgcagtcacagacaggttttctccatgtggaagggacatgggcagttctgcaccccagggatgcactggtccgagtcccagaggagagctcagcaacaataggaaaacccagataaggtctctgagcagtttgtgtcataggtccctcctgaaccagttatcaaggtcagagggatagaagtggtaccgcagataatcctgtggtcccgtccattgcccttcacagtctatagccaagaaagggggtgggagacgggtgatgtgtagacaaatggtagtggctaatatgtactatgtccttaagcatgttctaggcattagtatatttgttttcagtatatgactttgttagtttcat

SEQ ID NO: 30826 - DNA, 3009 bp, Bovine  19866880644736
  misc_feature (1)..(1): n is a, c, g, or t
ntttgctattgatctacatctacatatctttaacccactgcatggcagcctttaatttatgcccctaattttatttttttaaagttacctatcacattaatactcacatgacttttatttcaccttattaaagctttctcagccttgtcactactgacatgtttgatccagtaattctttgctgtggggggacggtcctgggcactgcagggtgttttgaagaatccctggcctctaccaactaaatgtagcagcaaatctctctctcagttctaataacccaaaatgtctccagacattgctaaattacacctgttaagaaccactaatcaactagtattatcctataacttttaaatagcattagatgtttgagtttcattctaaacattaatagtaattattaaggttttatttttacctcaattttgaacttttctctgccagtggatgcagtatccaaaactgcattctctcagtatcctaaaccctttagtaggcattgttgagttatgaaaaccataaccaaatagctgcatgagtatgacagtccaggtcatactggaaagtgaaagtcaactccagcatggtccaggcacctgccctgtagttcagtttattgtactggcttatatgatctgatcctagctgtcctcctctgtgtgtgtgtgtgtgtgtgtgtgtgtgtgtgtgtgtgtacacgtgtgacacgtgctcagtcatgtctgactctgcaactccatgaactataacccaccaggctcctctttccatggaattttctaggcaggaatactggagtgggttgccattcccttctccaggggatcttcccaacccagggaacgaacccacgaatcctgcaggtggattctttaccactgtgtcacccaggaagccctcctcctgtgtatgctccccccaaatgcctgcatcaggtaggacccacaggagcctcacgacaaaagcaagcagttgcctaactatgaatgatgccatagctatgcacgtcaagggccacctgggccccaggaagcagtgagttgaacaatactgcctctgtcacctgactgccaaggaagtaaaaacaacctgtatattcaaagcacagacatctgtggcattggggccagccctacatcaggttctgaagtatgcccaggtcatttgggtcacatgcttcatctttcagcaccctccgtcatcacaagtccaacctgtctcctaccccaggggagcttctggggcagcgcccaccatgagtttcctgtactaaaacatcctcttgtttaaatgtactttcctggaccctacttgtagctgatctcccaaactggcctgtagttatcaagatccaaatactaaactgatggctctgagctaggtccacccccacggagcatgtatctctttagtcagcaaggtgttctgttttgtttctttggtgtaactgccaacatttataaacccggaaattttatctcaaaattccagatttccagcttctcttaaggaacttgcctgtgacaccactggcattgaaacagctgcagctgagcctacgacctgtttagacagatcagatcatgtgttcctggtccattcctgagcctgctcccctcaattcttggtgttacctgccctcaccccccaaaggtgtctgagtatgtcatcttctcatttcaatccaagattcacatgccgaatctgtaattatttctggaaaacaggatcagcaagacaaatggaagatgtactaaaattgaaaacaataacttttgaatgctattcatgaacttttcctagacatcattttttccaaacagacaagcatcatgcacctcttatcaaggactatttttaggtgctgtagtcaaatgccagtcccagtttgaagcgctttacaagagttcatctgagtctcacagcagccatttgaaggaggtaccattattgtcctcttaggggagataaggaaactgaggcatagattggttaagaaacgtgttccaatgtcaggatctgtatggcaaagaacttgggtggtctgactgtagactccaagccaagtgtgccttgacttttaactgcctctcaaattgacagttctcacaataactcagaagcaatgagtattaactatcccacctttaaagatgagggaattggcattcatagaaattaaggaagtcttctaaaaatagttgtcaaagtgcttcagagaagagactgtctactctctccaccagtttccatggtcagccttaaacagtggtgctgggcctccactaccatgaaccacccaggccttcctgctccccgcccctccccaccacagaccctaacaagggagtgagtaggggtctgctctgctctgctgcagcccccaagcccagtgcagaatcagcacaggcacaggaaagtgtcaaaaccaccgaagccaagatttgccaaggcaggaggccacacccccagagggtgggacccaccagggtccacgctaagtccactgaacttgccctgcagagcggatcctgttctgttgaggtgaagagaaagctgcagaagtggggtgggctctgggggttggaaactgggacagttggagaaaaactgaaacaaaagttccagagtaatccaccactggttggacagaaagaacaaaacttaaaggattcaggaagtattaacatctcttctccagttggaccaaatctttatcccagtctgtgttctcattgaataccacacatactgacttaaatgaactcctattgcacaacacatggaattgtttcctttcaaaacacacagtggaactgagaagagtcgtagatttcccagcaaacaagtactcagccaaagccctggagtcattctagatccttctgttcctttcacttcccaagttctatccatgttggtccaagcagctcttctccaaaacttatcccaaatgcatcttgtctctatctcaactgctaaaacccttggccaaaccccaatcac

SEQ ID NO: 30827 - DNA, 1346 bp, Bovine  19866880666082
  misc_feature (1)..(1): n is a, c, g, or t
naataagtcccagacttttatcagttcctgcaaagggaacacatctgtttgtttgccttagcttctttgtttgtattcctgtttcctcagtcttagttttgtctgacattgtcatatgggcattagacccaggtaatcaggttaaaatgcagaaaataatagcatgtggtaaagagtacagcactgtatttctcaatttttgtttatgttttctttttcatcaaagagaaggcccacaaagccatacaattggtgcttgtaaatcaaagaacattaccctcgttactattgccaagttattactgcattaggcagactggttaagacagtcaaggggatcaaaatctattttagtcatttgtattatctgtttactacttacttcccaagtagctcagctagtaaagaatccaactgcaatgcaggagaccccggttcaattcctgggtctggaattcaccctggagaagggatagtttactatttatcaataagtaaaagggattgtttactatttatcagtagctcagagacctggtagtatctttgtagatctgatattatcaatagtaaacataaaaacatgtttcatagcaagcagatttctgatagaaggaaaagacagtgctcaagaagaaggctaagcattaaaataattctgttcatgacattctttcttaagaaaagaagtaaacaaccaaagccttgtcttgaaaagcaaagctttattgaagggattcacttgtattttaagacaatatattttaatttttcagtataaattacacatagttaatgaatatggtgtttatctgagtatgtatatagctgaactttttgtttatttatattaaattcagatcctttgacaccttcagaatcaatacaagaattacatgcatcaggtaaatgatttttattttctattacactatctcagcatcaataaccactttgtgtttcgataatattgatgagtatagacacttcatatttccagtttctagatgctaatagtcatatcatctaatcaaatatataaaaatattaaatatcatctaatcaaagtagtcaaaaagttgagtgagcttttcttttatcacaaataattaaacgcttccttagtttgaattttcttataccctattctccagagtttgaactctttttagtttcccaaagcatcagaaagttccttagagtgtaaccatacgtgaaattcccaattatatgtaataacatgcttattcaatgaaactatctttatatgatatttctatcaataagccacagcctggttctaacccttctctcaaaattgagtatcattagaatcatatcagttt

SEQ ID NO: 30828 - DNA, 1235 bp, Bovine  19866880720226
  misc_feature (1)..(1): n is a, c, g, or t
ngaggggaacccctcggtccacaggtctgcgcgcccccttcacccccggtgtctggtgcgtcgaaggggaaaaggcgatcggaggtcctctcctgggctaaaacctgggagcctcacctgaacgctatcacagaaacaaatgcacttctcacccacctccctccaccgggcaaaaacccacaaaccgcttgatgggacttcagaaagggctgagggaaccagactggagaaaatgtgggtcattaagacgtgggtcagtggtttctggtatttttctaagatgttcgtggggttctccagccaagattgctttactggttacttccttattgaaatgccttctaagagagcggggtgatttccgcgggaaatccctggggcagcctccagcaatgctcatctgattcccaaatcatatccatagcttcccagaggttcagaagttccagtaggtgtcaccctccagggtggaagtctcaggaagagaaaaaaaataaatctactctggtgggaaagggagacgagtggcaacagccttaaagcaagacttgggttcagcagccacactcttggcttgcctctctggaccggaatcccactttgtggcttccatttttctttttgccaggaaatatcattaggaattaaacggcttcttttaagagtgtcaaagaaagtgttactcttgccagtcacccatgaggaaggagccaagggctacccagagccggttcccacagccaggacttttctttagagccataggtctgaaagttaaacagaacggaagctaattgcctggcagaggactaggcatcggatgcccaagagggtgtcggtgattggagtgtgaaatgagtaggtggccatatcttctctctctctctctctctctctctctctctctctctctctctctctctcaccactcactggctgcagtctgccattacccagagggaattcaaggcttagcagaataagtgggtgccctgattctgatatcagcatggacattttcaaggcaggaaggataaaccatcaaaaagaactctttttttttcccctgaaaagaaggttcaattggagtaagaagtagagatagtaatatcttccagcattcctagagaataatttttactttgaaatgattattcaggatggtggctttgtcattctctgccatgtgcctttaagataactttgttttgctattgattcattttaccaaatct

SEQ ID NO: 30829 - DNA, 4274 bp, Bovine  19866880747289
  misc_feature (1)..(1): n is a, c, g, or t
nccttcccctgtggttgtcatgaggattgaaagagactgtacatgtcaagtacctgccatttaggatgtggtcactatatttctatataattgcattttcaccacttgccaagtagaccatgaagaagatgactcaggaacatccttagcagatactgacaaccttgttttgaagtcataattctactgtgatccctcactggtatacacccagcccactctcctgactttccttaaatgttcatttgcagtgggaagggagacttccccctccttattttcatataataaagtgaaagtgttagtcactcagtcgtgtctgactctttgtgaccctatgaactgtaatccaccaggctcctctgtctatggaattctcaagacaaaaatactgggaggggttgccatttccttctccaggggatcttcccactcagggatcaaacctgggtctcccacattgcagacagactctttaccaactgagttaccagggaagccatttttatataataaacatagtgtaaaagtagtgaaacatacacgtttctctcaatggcacttatatgaaggcagaaaggttggaaaagagaaaaaagaatgaggaaagtgaagcacagtaatgggtgagagacgtctccactaggaggaggctggagaagatgcttgcatttgggaattcgggatgaatttcctgagtgggtgacagccgagaacccaagggatgagaagaagccatgagaactccaggacagagaaacggcaaatgtaaggactctctcatctagtcccctaatttcacagatggggaaactgagactccaaaaagggaagtgactaagcagagtcccagagacagggctggaattctggtcttcagtctcaataggatctgatatttcctataccaaatcccaaattggccaagttgttcaaaatgcatgaaggaacttcaacttagacagtcatgaggaggaaagggtctctcatgatgatatttcctataccaaatcccaaattggccaagttgttcaaaatgcatgaaggaacttcaacttagacagtcatgaggaggaaagggtctctcaagacggtggtgaaggaaagcaatcacagggctcctggaccacatttatcacaacctgtgaagatatcaagggctttaactccatggaatcccatccttagaacattcatccatgaacaagaaaaatctttttttctgagaatcaatgactgaaagaaaaaaaggttcatcattttctgattccagcagtcagattttctgatataaccatttattttcaaataactaaaagtttcagtacgatggcaacataaaaaaaaagaacaaaacaaaaacaataaggaattatcattacatgtcctactcgagttagagtgattttgctttcaaattctctggcgagtagggtgacaccggccttaccctgggacccaactttggtgttctaaccaagacgagaactttcatagactccaatcacaactctgtagtgtatgttatagagtgttttccttaatctcactctacaattaaggtgttagctacagaagcaaacagaatgcaaataagcaagggatttctctaaagtcacttagcaatgactcaatctcattttcatccctaggtggtcttatctttatctttgcctcaagagactctttcaaagagttataataggtctgcactatactagaccctcacacaattgcctttacctgacaatacactgcaaaaatagtctaaacatgtagctatgtgtgtgtgtgcatttctcaaatttcagtgtgcttacaaatcaccagaggatcttgttaaatttcatattctgatccaataggtctagtatggggcgcatttctaacatccaggcgatgccaatgctgttggccctggagcacattctaaggaatgaaggatccatcacagcatcatgatgtcctttgtgaacaattacagaaaagaactgtcttgttttcggaatctcagtccagttaaagctgaccatgtctaagtgccactaagaatgagatgaatttatactttatagatcaagttacccaactgcatgagaaactggaacaggatgtaggctttagcatcagacccctaatgtatttcacaatatgatactatgtgaagaaacttcttttggaattagaaatcttgttctgatgttgatctatttgataataaagtgcttatttgaagattaaaaaaaaaaaacctgaccatgtctagagtgaattattttcttttatctcaacgctctcttaatctcacgtctaatcatgttttcctctttgacttggtcgctaggatgtgcctttagcaagactatggttatatgtttcatatactgatcctacttcactgacctactcctgactacatccccctttcctaacctggctttttgttgttgttgcttatattgattttttcctctttactatattttgggttgttgcggtcttacaccaatctttgtaagacacttagaatcactccttcgaacaagatagcatgtgacaaaagactctcagcacaacctagtcaaatggaaatacgcatcgtcaaggacacacgatacactggaaaatttcaggcccttgcaggactgggtggaatgactgagaatggagaagcagcccgccctgggagagaagaggacttgagaagaagtaaccccaccctctttcacaacttgtttatggctttgccagatagatggcatggggatgactgagttcatattttaaggatttaataactgagctctggttgccttgggagggtcgattattaatacaggtaactggaagagcctctgctgtggcttttagtctcagaggaaaactcatgggaacacctgtggctgctctgcgatgccagagggaaggacagagctcttctttaggctgagctgcccatcagaaggcaaagtcagcgccttgagtcttccaacttagagatgctattggaagcagctacaaaactggttgttatccaggatgcaaaagaggctccatgtcacttaactcagagcaacctattaaccctagtgtctcaatggcctcttgtgtaatctgtaactataatgacttcctcataggatagctctgagaattaaataaaacacataatgctgtgtcaggcattttgtaggttctcaacaaatggtttattatgtaacgtttatgactgctctttttttacgttaggccttagagaagaaggttgtaaagaaaaagacaggtgagaatgtttattcattctttcattttttgacccatgcagaagttctctagagcccactgttgctccttgtgcaatgccctcgagaagtcaaaaacatgagttgatacagtcaataataacattcaaccttgatcttgtcagctaagtttgagttgacttcttcaccaggcaagggactttcctcatttgagactataaacgtgggactggaatttttgctaaagcctgtgatttctgctaaaatgtaaacacgcttgttgtgaagaatcccgtggaaaaaaacgaaaacaaagcaagggtgcagggaatgccaaacaaataggcttgtgctttgcatattgctttcattctagacactgacagtaaaacaagtgtttcattttccttcactatcatttcctgcatcttttcactgactctcactcccagcatgggattttgcagaaactctagtatctcccactcagtttcttaaaacccttcctactctcaactacctaaataccacaaagtttagaggggaggacattcttccttctaagaattcctcctgcccctgtaaacacagttacatattcactgcttctcaatcagagatcttcagtaggtcaaaggttctgcttcttattcaaagctctctaaaatatcaaaaggagtatcactggggaacagaggaagttaggaagcctcaaatccaagtttggatatggaatttgggagattactgaattaatgttgtccattctttaccacttggcctttctggctgggtggggagggaaaaaaacatactgattaagtacaatctcttctggcaggatgtttcctctttaaaagaagttaataaatttggatacaattcaagcacaaggtgcaaagaaatttctgtgtaacaacagaataaaggtcctaaagaatacatgtgaacaaagtgacatgttcccatcgaggaaccacgtaaaaggctttaagcaagaactgaccaaat

SEQ ID NO: 30830 - DNA, 1949 bp, Bovine  19866880896894
  misc_feature (1)..(1): n is a, c, g, or t
nccttgatttttgttctataggactccaaattggaaaaaaaaatcagaaagtatttcaagcaagaaagacatatagatgaaagcattcatctaatcatggtagtcctgacttctcatcataaatgaacccgtgacttaattaacacgtagagtatctcacagccactatcacacaggcctgaagagaatcaggctttgtataatgtaccttaagaaatctggcaacgctgtggtttgccctttttgtttcttcaagtgcgtctttgtttttccaaatcatgtggtcagcgaagctcatgacaagattgtccaattcattttgaaaagattcaggaaatctttgaggccgagaaagctaaagaaagaatggatcattgctttacaatgagatctgtgaaatactaagcctggaaaacataacctgtaagacttaacttcattctatttattatcaaacaaaaagtctttttggaaatttgaaagcaataatgaaattagaagccatttcaatttcaaggtcatgatttccacttttcagtgaatttttcttctattttggccaataaagctttcactttttcattataaattataacatatatgaattgcaaactattcagacaacatagaaatgtaacattttttataacctcttaataccccttcttgccttctcaggaaataactactatgaatagtttaatgactattattctagattttctttgattcacagttttctaatttaaaaatcaattattttgatttttaaaactattaataacaatcctccaataaacaactataagaaatcaatgaatgaataactgaatgagtacagatattagtttgaaatgtcctctaagttgtgagtaccagctagcttttttataaaagttatttcagttttataagagacataactgacatacaaaattataacatatttaaaccatacactctggtgttttcatgcacataataaattgtgaaagaatccccaccccttatctagttaattaagccatccatcagctcacatacatatttttggggcgagaacatttaagttctactctcctagcaaatttcaattatacaatacagtgctatcaactataatcaccatgttttccattagacgctcaaacgttattcatcttatagatggaagtctataccggctggtcttaactctggtattagcatatgcccatgacagttgtcagtgagacttcactgtcaaaacgcttttgccataagataaaaaatggtttggctgtgacattacacaactacactgagtagttgtgtacacagttacacaattacactcactacactgagtaaaactctacaggcccctaaagagtgcccttgggtacagaaatctacccctcctattttaactcggaaaatttcaggcagctgagttttcccatttctgtcactgctttgtgaatttatacaatttctttgcacaagataggtaagattcattcacctttagaagatggctttaaaattagacttgcaatttcactatagacagaaacagacaattgagagtttgactaacctttattttcttaatctaagcactcaaccttccatggtgcaagaataaaaaccatggaggctaaaattagagaaactgcagagcacaaatactgattaactacagaatgctgcagttggcttcgactggcttttttttagccatttttaccaggaaatgactgtcactttaagaatctcatggttactctctgtatatattcaaagtttactattgaaataaaattaaattgacaacaaataaacctaatggatttaactgtatacatcatttttcattctgctccatatcccttgagaaataagggtaaatgattcacctgttaaaacaacaatcaggttttagaaatcaaagcacaattgtcgttttc

SEQ ID NO: 30831 - DNA, 1546 bp, Bovine  19866880928199
  misc_feature (1)..(1): n is a, c, g, or t
ntagttatgtttatgttgagtccatatctctgactgagctagattcacaaggaattaggcacgagtccaacatatggatggcagatacgctcgtaatcgacacccatgtcttcagggcttcagtttgttggtttagatttgtcaattggtcacatcgcttgactgaaagcatgggaacttacctaaattatacttatattttggctgccgatcctcatcataatgatcgtgaaatcagtagaccatgctttgcagaatgagagctgaacattaaacactttcagtcttttttccactctcacattccaccctgatacgcaagccagagctcatggttgtgtttgctaaggcgctctcagagatgagaggacgaaaccctccacttcagaatggaagatctggcagcagaagaatgtggatcaagcctctgtgtttgacagaaaatagtaggcattgaacagctggagccaaatggaagccaggagagagtagacgccaggagtagcaaaaatgggtttaaagaagaaaaccaggcaggagcatgggacactgaagtggggttggcttgaggatttgtatcgcagccaggaaaaaaaattaaaccacactctcttgagctttgaagttgccaaccctcaaattcacagttgtcttcttttttgttaaccatgagactctgctctagttcttggaaacccagagcgtgtattagttggggagtgtggtatttctccacatccattcaggaaactaccacatcgtgtggtcagggtgacagcctttgctcattcaaaatcccacacaccggaacagaggtcctgagggtatggagggttgcacaggcacaaaacctaatcagcaacatgtcagatgattggtctccactgtggcccaaccggtaggactatttcctgtcttagattattacttaagtgctcttaacagttcaaaagggaaggtttagaaaatggcagccactcagaattacattgttgctaatgggtagcagagctttacatacatttacatgagaacttggaaagacctagaattcccccagtttctgctgcaacttggtgctcttccgtgaaaccagctgaatccactgacctagggaaagaatgatggttaagatgaaatatacattgctcacttcacaggcccctgattcagtcctgcaaggaatagcagcttactccacaccagtccccggctctgtgcttctcccctccagctgctcagacccagagataaacagtttagtccccatgatcgctatgacacacagaagagaatagaggagactgagtgttttgttaaaaatcatggttatcaaaaagtcttcctcatacactgtttttcttggaaaatgtctgaatccagcacttggaaagcaagttgtcacctctgtaaaatattcctcaaaccttactttgtgtagaagattcagtcgaacatgagatgcggcatagctctcacctaggggccaccccaccatgaccgtgagtgcattattccaacagagtagctaaggaggaggggcccg

SEQ ID NO: 30832 - DNA, 1615 bp, Bovine  19866880928459
  misc_feature (1)..(1): n is a, c, g, or t
ncttaaagatcaacatttagaaaacgaagatcatggcatctggtcccatcacttcatggcaaatagatggggaaacagtggaaacagtgtcagactttatttttgggggctccaaaatcactgcaaatggtggtgattgcagccatgaaattaaaagatgcttactccttggaaggaaagttacaaccaaccctagacagcatattgaaaagcagagacagtactttgccaacaaaggtctgtctagtcaaggctatgattttcccggtggtcatgtatggatgtgagagttggactgtgaagaaagctgagtgccgaagaattgatgcttttgaattgtggtgttggagaagactcttgagagtcccttggactgcaaggagatccaaccagtccattgtaagcatcactgacttgatggacatgcatgagtttgagtgaactccgggagttggtgatggacagggaggcctggcgtgctgtgattcatggggtcgcaagagtcggacacaactgagcgactgaactgaactgattctgctaacctgaaatggtttaatgttcttactgatagtgtacaaaatacttattgcctgactatatgcatcatactgaatacatgatctacaactgtggtacgttaactgctctcctccctagacttggacaaaaatagcattcatgagataccaggtgataatcaaggctataaggcaggcaaagataaaaccctgtaatgcttattcaaaatatgtacttaaaaactgcaaacaaaaacagcattatttggaatgaacatacaattattttctagaactgggaactaaatacttagaaagctgagatcatgcaaactagtctcctagggatgcagacgtaattgtaagatcactgcctgtcacctaagtctttcctgctacccaatgtacattctggcgggtggagcatcatcagtgctttgctgacaagatttttgccaagagaatacaccagcatctttgggggtggtggtgataccggtctatgtttacagtgctacatgggtgattttagtatattctttagcaagaaatacatccctctcccacccccttttaaaattcactgacataagaaccttacaatcacaaccacagtttattttgtgaggctgtgtgttccctaattgcaatgagttttcaatctttaaataatataactatataacaattcaaaataaacactgtcctggattcaaaaatgatagcagagaattacaattaaacaagtgaacaaagagtacatcatttttgcagttgaaaaactatgtatccatcctccttaaaattcttcaagtaagtcaccaatatctattcacatcaacaggattaaatgaatggttaggatcattgtttgagattaagacattaaaaaacaaagaagaaaaacagcatgaatgacctctcctgaaaagaaagcaacgtcaaaatgtatcactatgagctttatgaactaaaataaagctaatgcactaaaacatttaaaacacgttgggtgatccaattttgtttttcagtacagcatcatttttctgaccattcaactcaactgcaattgactgaaatgcaactgaatg

SEQ ID NO: 30833 - DNA, 1707 bp, Bovine  19866881059530
  misc_feature (1)..(1): n is a, c, g, or t
ntgctcagctctttgaaaagtaagcttttttgtatataagaaatatgggtagagtgaaatttactttttcgaaaataattctgtgaaaatgaaaatattgtaaagttttccccgaggacttctggcccctcctgtgtaaatgagtacaatttaagatgcttctttaagcattttcaaataaattcttaagaaataatgctgtaggcttcagagttaagtatactacatgggagttttagggaagccatgtaaatgcttaagaattatggagcacctgctaaattacagttctgagactaagatctctcgagggtaaaaaagtaattaagccactggctctgtacctgagaagatagcgcagcaagacggcatttggcctgtgctaaataagtgaatacaatctaaagagaaataaggtaattaccacgagagaaacacaaagaaactgccttgaggtttcaacaggggcaataaagaaggcgggaacccatcctagaagagctagattatagactatataaagcagaggtccctaaccttttgggcatcagagaccagtttcgtagaaaacagttgttccaccgactagggcgatacgggcaatagggagcggctgtaaatacaaatgaagctttgctctctcacccactgttcccctcctgctgtgcagcctggttcccaacaggccatggactggtactggtccatgacctgggagttgagaacccctgatatatggcatcgtattgggagatgaggacagataagcaaactaccgaccagtcgtgtctaaacattgaccttgccatcaaaggtgcttaacagtggctgttgtggcacatgcagtcagtaaacatttacttaatattttctacatgccaagctctgcccctgcccctacacaacatgaaatttggtcactttcggcattctgaccagatcgcacactgtgaagttaaagcccttggcattgaatagttctattcttctatgcacttaaaaggttgaatgattatgttttggggaaaatatacattaccagatcctcaatataattgtgtcttagagtcaacctaataattattaatatatttcaagcaattaaaatctaattaataagagttgtcttctacaaaattagtatctcttatctgacatagtgatgttaacataacccaccaaagagaagcatttttgctgtggtcatctacagtagaagtaacttggcagtataagtggataggacagtcccatctctacccttagccattctgcattcatccttctcctagtcttgggctcatgaaatgtgagttctttgaacattgctcatcccttctaagggagaagaaaagaagaaaaattaatgaagagaagagggttctgcttttttggagtgcatgttgctgaaaggaaaatgtaaagttgaacttgttgatgatatccaagaccagtaatcatattttcctagaaatatttaaagcccaagatttaaacctatgaaataataaaaccaggttttattcctggtcccttgttttcctgtgcttctttaagtcctcaagaaggaattagtggtgaattgggtggtgtctatttcaaaaagttttgttgaaaaattaagctatgttgaagaatgatttgtatttagaaaattaaatgtcgactggttatcaaatagcttttcattttatagcaacttatcat

SEQ ID NO: 30834 - DNA, 2086 bp, Bovine  19866881135553
  misc_feature (1)..(1): n is a, c, g, or t
ngagcctggtgggctgctgtctatggggttgcatagagttggacacgactgaagtgacttagcagcagcagcagcagtattactaagtagggcttctgtggtggctcagcggtaaagaattcacttgcccagtgcaggagatgtagatttaatctctgggtcgagaagattccctggagaaggaaatggcagcccactccaatattcttgcctgagaaatcccacggacagaggaggctagccgggctacagtccatgggactgcaaagagtcaaactcgacttagttactaaacaacaacaacagttactactaagtaaattctagaggattgtagaagcctcagttagggaggacagctacttcttcaaacagctgcacattgttaaaactcccttggaaaaagcagagagcgcaggctcaagctgagaccacagagaagtaaacgaattgtagctgaacagctttgccctggtgttctgcagaagacactgtgcttctctgaagctttactgcctggacttggcaaaccctactttcattttaccgctccaactttctgcctctttttaattgtagtttgtatcaatagatctgtgtgcttgcgtgtgtctatggctctgttttgcagtcaaagaaacttccccacactgtgttgtctttaaacattcagcgtcattatatccatatatgcacagttgatttacatgtctgaatccatgtagctgtatagccagatatggatagtatgtcagttagctagtagccagcgttttaaatggagcctggtgtgtctggaaaatgaaatctacttccttatttagccatttaagactggatctgttatttcagaaccttgtgatgataaagccaatgacaataaaatttttgagatagaaatcttagccgatattctcatcaccgactcaatggacatgagtttgagcaaactccaggggatggtgaaggacagggaagcctggtgggctacagtccatggggtcacaaaaaatcagacatgactgagcaactgaacaacaaaattctcatttcatctcttacattatagcaataaatgtcgatttatcactattttacgaagaataccaaaaatgcaatagcaaagggatgtgtcagtcccaaacagattaaaagaagtaacatgctgaagacctcataaggaagtggaaaattgagactaggggctgattggctgtgtagacctgcacttcataccttccaaagcacagccatttctggcagagaagggcttactgagccccagtacttgccctgacttggattattttgtgcttagactttgtgcttatgctttgtggtttaacgaatccagagtttaaactattcttagttcctagaggttattttctgatgctcttctttaaataccacatgggaataattttagtcagtgaaactagacataccattttctgttagctttgtccttgccatttttgtttctcacgtgatcaatttcccagccaatgctcccttttatgtgcttgattgtggccataatttaacattgttttacttttccagtggttatctgtctccacattgaaaggtgcagacttacatcaacccattgaaattcagctagtgatttctatgtaggtgtttcttcaaaataatgactagaaagctccggtggcagaagggtaaaagtcagggcagaataaagtctatcagttttttctcttttatattgttttatttcctataaataagtatataccatgtgagcaaggtaaatcatgtatatctgtataaaatgaaacagtgaaaatacttgagggatcttactcaaacctcttgctcacatttccacatttctctcatgcccctacacataatcatcattgttaataacatctacatatatgtggttttcctttttttgcaaaagtaataagatgtttagtatgtggtacaccaagagatctttgcagtcacaaaggtaagcatgattatgacccagaacatgaggacacagagtcagtttttggtctaatttctcattgcaatttggccagggggcctgtgatagtcactgatataa

SEQ ID NO: 30835 - DNA, 1236 bp, Bovine  19866881163170
  misc_feature (1)..(1): n is a, c, g, or t
naaaagccctggggacagctggggaccagtgttccaaggcagcgatgtgcctggaatgtttatggaactaatgcttaggccagtgtgattggggcagggcagagggatagagcaagggagtcatagcagatgaaatcagagaggagccacttcaatagcctctagcatgccgggcacacaaatgcttactgaaattcattgaaatacaaatagaagtagtagatcaaaacaactgactagtaaacatgtcataaaatttaaatacatataataattctgtatgaatgaaaaagaaataatactttctccagtaactcccacatacagccttggatcaatcaacctgatcatcctatttacaaagataagcaaaaaagcatcatgtatgtagaaaacataagtaagcaaatgtgcaaggaaaattaccaccatgaaaaattatctaatcattttgaacctattgcaaaagagcatttacgcttaagcatgagttgaatttccaaatggatacggagtgcatacctttcattcccaatgaaaaaacctcttcaggaaataggtcatgaaagctgttatctattgcatgttcttctcattcaagattaatgtttgacctgtatcttcttacattcccaaaatagccctcagcagcatttgcctgagcaaacactctaaaaccaaataacagcaaaaatgatcataagaaaacctaccaagaagtaattatatcatccttgacattatcttaagggattaaggtataattatcgacatctcatttaaataatctcatggcaattcatatgatttcctatattatttaagttttgacacctaatcaaaaggtgttgaaattaataatttaccccaaaggtacaaaactatgatatagcctacagaaaagacaaggaataactcttatgtgcccattttgatatgctcatgacagttggcgatcctatgaaacatccgataccagaaatagcaacagagaaaaaacttgagtggctgctcggatggtgagttcatgagagaaacaagaaattctgttccttgccggaaattttcagagtatcttctgtagacccaaagcaatattccagaactgtggattgatatgaaatgaaagatacaaagaaaagctctgttctgaaaaacaaaacccaggatgaataagtcatgggagatcctttacctcccttgatagcctaactccccaggtgctgaaagatggca

SEQ ID NO: 30836 - DNA, 1047 bp, Bovine  19866881174918
  misc_feature (1)..(1): n is a, c, g, or t
ntcactggcataaattcacaggccaactgaaaaatgagaatataaacatgtcccaagtgaacatctgacgaaggccactggaggaagcagtgcacactgatgggatgggctagtggttcatgccggaggagaaaggacttaaccataccagaagcaggtacaaatatacagtaactgggaaaatgaaataatgcctgagaaaacaataaaaagagctaagaaaacattacagaagaaacagcacattcaacaaaccaacaggaggcatcttccttaaatttacagaggaatttcatatatttctaatgttgatttcaaaagaccatactttcgttttctcctgcacttctttctttgctttttctccccatataaatattcatttgcacatgtatgcattatttatatattgaaataatacattaagcccattaatgcaaaaaagaaggagttctaggtcactaaagggaaagttcagtatgactggggtgggcaccattcagctaaagaggggaactcctcacttattgcagacaggaaatgagacaagccacacagcacaaggggatacaaccaacgcccacgtggcaatttcataccttaatgtaggactggacagagtggtccagctgttcctcatggcacttggccacgatgtcggtcagaaccctggaagagcaaagctgttgagtggcctttctggagaaggcaggaaaataccacttggtttgtcactgaagtgcttggtgagctgggcacttaatcattactgaatgaatgaatgaaccaatttcaaactcagtaccgggtgttcagtatctataacatccattagccatttccaaccttgaaatttctaaacacgaagataaaagtaatgtcttatggctgctattacagtttgtgtctgctgacaatgtctttttggaaaaggaattgattttagtatcttattagaacttaagatctttaacctctaagtatcacattctgtttttaaagagcttgtcttccaacttagaggtgttatatatgtgcttttggaaa

SEQ ID NO: 30837 - DNA, 689 bp, Bovine  19866881205249
  misc_feature (1)..(1): n is a, c, g, or t
ntgaaaatatggggcatctgaatcctctatccatccctgccctcctcccttccttttcagtaaagggtgacgtctctagtctggtttgtaaacaggtttttaaaggatttgttgcatttgatgcggcattagtcgccacatcttctacttgcattatgttgctgaaaattatattaagtgtctgatatttattaccacattcccctctcattgttttacagtcaagaaaggatagtctgagctgttattattcaattatatctgtggaaatccttctgaattaggagttggactgcacaatttcttgaagtcaaaatataatctctagccctacacagacattaacatcaaaatcattttccattcctatgagccagacatactgtaacatattacaggcagtgtagttctcactggctccttgaagctggaaccttgaattaaagggaaactaatggcatccggtcccatcacttcatgggaaatagatggggaaacagtggaaacagggtcagactatttttgggggctccaaaatgactgcagatggtgactgcagtcatgaaattaaaagacgcttactccttggaagaaaagttatgaccaacctagatagcatgttgaaaagcagagacattactttgccaacaaaggtccgtctagtcaaggctatggtttttcctgggtca

SEQ ID NO: 30838 - DNA, 1000 bp, Bovine  19866881339321
  misc_feature (1)..(1): n is a, c, g, or t
ngaagctgtgatcttgaaaagaagcagaatttacctgggagaagcaggaaggaccttctaagacaaggaccagcacatgcaaaggccctgtggtatgcagggccatggtggaatgaagggtttgttcatgtagctgctggtgccatgtgctaagacaggaaattctgcaggaagagcaggtttagctggatgtggccaggaagttttcatatatgagtttcagaagacgtcatatgatacagaatgttattagcaacccaggaaagaagaaagtcctgacagtatcagacaaataataataacgctaatacttattgaatatttactgtgtgccaggcactgttctaaatattggatctattaactaacttaaacatcacaacaactttatgaggtaggtactatgcttatttccattttatagatgagaacatcgagaaacagatggaaaaacataaaagcacagaagttttggtcatatgatacctgaatatgtaaaggcaaaataacttttaattatttgatgttttcattttctgttacaatagtaataattttacagaaaatttgaggttctccaaactggggactatgtactgaaacctgagcatttcaaaaacgtttgctacagaaagttgttcactgttagctgaatatatgtggcaaattttccacacaatgcacttgatttctgttcccctagtggaaaaatgttagctatttgtcaataatttgggttacaggtaaactagaattaataagctatagcaatattttcttactagaagcttaagaaacaatcccaaagaaataaaacaaaacaatgacaaaaaatcctgccagcctttgcaaaagggatcataagcgttatgaactctcatctgtgtgttagacaggtacacagccaacttaagtacttgcattcatgaagtgacacatctatgaattagtaaggatgacgccagctgactgggaaccataaacaattgttaaacatttt

SEQ ID NO: 30839 - DNA, 1316 bp, Bovine  19866881355195
  misc_feature (1)..(1): n is a, c, g, or t
ngaatctttattctaatttgagtattttaacagaattaattctgtatctgaatgtcttcatcagcaacaaaactattcatcctggctagtgacccagaaaaagaaatgaaaatagcatttacttcaggaccaatacagaagcctctcgtagggcatgagatgcaaattaacattgtcttcacattctgacacatagacaaatagctaagggtgaggatccacagggtctttagacagacctcgaaaaaaaaaagaaagaaaccaatctccatgtcgccaaaacaaactagaaacaacacagctgttaattaatttcagtgttatcaagataactgattacatttcttaaaggaaataaaagatctaaatgacacacagatttgttagatcttaagttcatcaggaccctttggcctttgtgtaactggaatgggaccaacttccacactatttgtgtttaaaacaaacaagaaaattgcagagagcccgtacagctggatccatggccacagctgccagcctgtggttgtgtgacagatttacttcagcctttcatcaaagggagttccactagacaacctctcaaatgtttgagtttcagaaagcaagaccagctcttcttatggaaaaggaaatgattaagtaaggaataagccatcttatgctgaccctttaaccttttctctgtcttcaagtgcacagtttcgtgagaatggaaaaacaccagctaactcaaagttaagaactgtacagctgggtaaactcagattaagctgaatttggaaatggttcccttggtaacaaaaatggacagcgatctcggaagaaatcagccaggagtaactctttaaatgtcctagtccatttcagtgaaataaagcaggttaaacttgttggcaaataggatgattaattataattttctgtgttagttttttatagttagaaaaatcaggatattctatttcctgcttagttgctcagttgtgtccgactctttgagaccccatggactgcagcctgccaagctcctctgtccatggggattctctaggcaaggatactggagtgggttgccatgccctcctccagggtatcttcccaacccagggactgaatccaggtctcctacatttcaggtggtttctttattgtctgagctaccaggaagtcctgcagttagaaagtcaggatgttctattttattaattcataaattcattaggaaaatcaaggaactgaagagatttataggatctatgatggaaggtatactttcaaatgaatttaaatcttctcagtctattttttttaag

SEQ ID NO: 30840 - DNA, 1846 bp, Bovine  19866881361443
  misc_feature (1)..(1): n is a, c, g, or t
nttagctagattttaactgaaaagcagacatttatttttagaagaaaccatccctaaagcttttgtttaatatatctttaagaagcaaatcaaccattaatcttttttattttttgtgtattttttaatgctgacattttgttcttttttctgtttgataacatgtttgtctgtctttttttgaaggggcttttggttagcatttatttctaatgtatgtgaagaaaaaaatgtcgaacatagtctaaaatgactgagaacttgtacccgttttgttaagtcatattctaagttacaacagcatgaggacaactcgagataaataactgtacagtgtgctttccaattaaaattgttctaaatcctcatgttataaatcggttgcttatgggaaattgagcactttcgttaaagttgttctgaaagtctttctcgctacttctgttgcatgtttcacgtgaatctttaatgtgtttttactatcaagtggtttaacttcttttgacagaggcgcaataagaaatgcttgccagatgttaatgatattaggtctcgaaggacgatcagtctatgaagaagattttgaggctccttttttggaaatgtctgcagagttttttcaggtaatcagttataagatacaaatatcttatgtatttatttgtataagatataaatacatacttttaagatgttcttaagattaccaaatatagttactaatttaaacactttgacctttatgtcctgaggcccattggggaaaagaatgcaaattttatacccttcagcacaccaaccctacatgctcacattccagtgaaggagcttattggaaataaatcgaagaggttggacttagacatatgattttttttaatttatttttaaattgaaggataattgctttataggatttcattgttttatgattttttgaaattatatgcattttcctaatggtccagtggttgggactttgccttccagtgcagggatgtgggttcagtcactggtcaggcagctgatatcccacgtgcctctctgccaaaaaacaaaatgtaaaacagaaacagtgttgtaacgaatttaattaaatctttaaaaatggtctccatcaaaaagaaaaatctttaacaaattttatgtttatatgtttctaaaacatagaaactaaggaataaccttaagttttataatatttatatgttactgtaatttgccataaattcacaggcagtacatcaccaatgaagtctcattattcaggcttttggtaatttactagtaaatatagataagataataggtatgatcccgtagtgcatctatatgtcttaaaagctattgatgaggaaattataagatacaaatttgcagctgtatctacaaccccaaaccaactgaatggccaaaagtaaggataaactagtactgatttgtaatgaaataacaatgactgagtactgtgacagacaagacagtctttatagagtcatggtaattgggcattcttcctgaaagcctcaaccatctgagcagtttatagtaggagctttgtagtactgctaaagtagactcagttaaaactttactattcaatttcagtaataaactttttaaaaataagcagaaagttacaattactctacagtaggtcatttttaagagccgttcagatcagttgctcagtcgtgtccgactctgcgacctcatgaaccgtagcacactaggcttccctgtccgtcaccaactcccggagttaccccaactcatgtgcatcgagtcggtgatgccatccagccatctcatcctctgtcgtccccttctcctgctgctgccgcca

SEQ ID NO: 30841 - DNA, 1917 bp, Bovine  19866881390838
  misc_feature (1)..(1): n is a, c, g, or t
ngagcctggcaggctacagtgcatgggatcgcaagagtccgatgcgatttagtgctatctttcctatctttctaggagggtgggaagctggtgtcaggcggtaatgcaagcaaagaagagcgatgcggagaggcagatgaagcttggctcacccgccactcacctcttgctgtgcggcctgcttcctaagtagctgagaactggtactggtgcacggcctgggggttgaggatccctgctttatatgcaatgaagggaaattgccacttaaaaaaaaaataggactcctatttaggaagtatttattaaatggtactcactgttttgccagttaaggttagaggttatcctttcttgcacccgtggaccaaagtgcatgcattggcttgtgttctagttccagttaaaccatattaaactgggagacccgaggcaatccacccattttccttagccttatattctcaatctaaaaaatcaggagggacttccgtggtggtctagtggttaagaatctgcctttccgcacaggggattcaggttcgatacctggccggggaaatgagactcacatgcctcgaggcaattaagccgggatgccacaactgctgagcatgcgctctagcttccatgtgccgcagctaagacccgatgcggccaattaagtaaattaagaaaaaaaagtcaggggatccaactagacttctaagctcccatctagctgttgagcttgatgacctcatgacgttaatagtaactttaattttcccatagtgtctctcgcctcctcccataaataacctcttccaacaggcgcttgcctctgaatgtgttggaagcctctgtaatggtttgggagccatgagtcaagatgtcctagttcttacccttcaagtatgactttgctaaacaggtaatttcttgtctagttttacccacagtaagtttcccacatatggtaactactcatctttttaattgaaaccagtgaacctaaatatatttatgttaaaatgtgggttatcaagagggttgcctagaattgattacactaaaaaatatgtggaccaagcaaacaagctgggactgaagagtaccagctgaaaatgcagcatacacagtgtctgagctaaaaaaaaaaaaatcaaccctgcgctagcgcacacgtaggttcttttcctcactaatccccacagcgaccaagggtagagccagcccatttggggaaggagctgctgctgctgctgctgctaagtcgtttcagtcgtgtctgactctctgcgaccccacagacggcaggccaccaggctcccccgtccctgcgattctccaggcaagaacactggagtgggttgccatttccttctcccaaatgcatgaaagtgaaaagtgaaagggaagtcgctcagtcgtgtgtccgactcctagcgaccccatggactgcagcccagcaggctcctccatccatgggattttccaggcaagagtactggagtggggtgccattgccttctcccgggggaaggagcaaagaaacttaattctgagcataaaagagcaacgattccaaaacaggtcttccccatcctcagaccagttttcttccctgtgttgcaactcagccttttaaattgtgtatttgagcagtattattgtttatacttagattgtgtgtgattcaagatctgttctcatttttctcctgcgttatgctacagaatagataccacagacacatttagaaaccttttcagaatgattcatattgggagaaaaatccagccacatgatatttgtatcaggtagccatagaaactgcaacttcaatcagtctctcataaaagttcttttgtgaagttgaatagacacaaattcctgcttcgtggtttaaaaacccatcgggttattaatgtgtac

SEQ ID NO: 30842 - DNA, 1517 bp, Bovine  19866881428389
  misc_feature (1)..(1): n is a, c, g, or t
ntcataatctcttctagtgaaactgttttcagtcttgtcaactctggaactgttacagagtaaacgaggtactgaagctggtcatttgttctgcaacaataggaaactaacacacagggaggtttggaatatcccctgtgctgggtcagccacctaagtgggtcatctgtaattgtgaggggataatttaagtaagttggcacaaagtttgtatagtgacggcagtcagtagccttcatactttctttggagggacttagcaatctcagagaagaatattcaaaagctaaggaaaacctacgaattcagtttggcttattgggtacggggaataattctaagatcgtagcattgttaaaattgttggttgtcaatctatgctattttaagaagcgggcaattgaatcacaagttcccaggaaacaagtgttccatgttagagatcagtagacatgaagttctagttgaagtgaggagctgttgaaatgtacacagggagaggtgggaggaaaaagaggacctttaatacaagagatatttgaggtcttataatgatgaagctgaaagtctgtccatctcaatatgtgggtgaagggattcctgataagatgggagatgaaaatttaggcctctgtaaggagtgtgtcaaattggtcattattatgaaaattacagttatcagaggtgatatcaaggaaccaagttgagagataatataagctgtttgctaaagctaccaaggatttgtatgtccttggataccagaaagataggatgagaacatggagatcacagaatttgagagtctgccttttcttttgtagattttggtactttttagatccaaaaaaatatttcttctttactgtattctagattgagcactgagaaaagtttgaaaacagctgtattctagaggagcacagataggttgtttaaagtcttcttggtactttctctgctttcaaaatgatatcttagaggaaaataggatgtggcttttgggctgttaagcttcacactttttaattttttttttttctttaacttactccttttgcaagaagggcctgtacaagacgggctccccatatgtgctctagtttttgcatttgtgactgatagtataataccttggtgtctttttatggttagttcagaagccgagtactgggcatttatgtaaaataaaaccagggcaacatcataagtactgtaaaggttaagcatattgggcttgatagtttggatttccttccttgccatccatttaagttcccctttcagcaaattaacaaggaaatattgggcttgatagtttggatttccttccttgctatccatttaagttcccctttcagcaaattaacagaaccataaacacttttgattacttatgccctgtgaactgtttttttgtgtgtgcagtgatgatgtagcaatccatgacattgagtttagggagggaggctgctgctgttgctacgtcactgcattcgtgtccgactctctgcaac

SEQ ID NO: 30843 - DNA, 1272 bp, Bovine  19866881692574
  misc_feature (1)..(1): n is a, c, g, or t
ntaatgggaacagaggaatttcatgatagcataacccagatactgaacacttagcaagcaatttaatttaatttttttaattgctcagaggctgcatagagacactgctacagccactgtgcacacatcaacattaatattcagtgacaacataaagtaatgacttccacttcttgtttaggtcctttgacaactcccattgacccaactttgggtattttgtgtgtcttagtgaacatctttttatttttctcttttcaaattatggaagtatgataacacatttatgggagacttggaaaatacagaacaagtttatttccactatgttccaatatatttccactatatattataattattttttaaagtagataaattaagaattttaaattggagtttcaatatcaaactctcaaaaattaatagaatgaacatgcagagaagtagaaggatgtagtagacccgaaaagcactgtgaaccaattcaacgtaattaagatctatacaattttcacacaacagtaggaaactacttcttattcaagttcccataggctgtaaactaggagaccctggaacagattcagggacataaaacaaggtgcaaaaattccacagcccaaagctattgaaaccatacagagtctgttctcttatcactatggaattatattagaaatcaatatcaaaagatatttgacaataacccacatattttcaagtgcagtgcaacgtttactaagagagatcttggacttagctattgaaagcccttagtgagcatcttctcagagctctttgtgggggggaaactgacccaaccacatctcagtattcccacatgttggaaatcaactgtgtcttaaatttcaccaccttgagtatcctattctataatagtacttagctggtttggtgagtatttcaaagaacttgaatctttggagtgtgaagatgtgttcatgggtaacaggaaacccactgtctttctcttgtccctaaagaaagcagaataaaggagagagaaataaaaatttagtgaggctttacacaaagcatttactatttctacaaacatgtactatttttccaagtaccaaataatgcctaaagagttaaacattcaacttacatataccatactattttttttgtttagttgctcaagaaaacaatttggaatgcaagaaaatatattgtaactggcctttttgattaaaccagtgggatagtgctgataaaactaaaacttaaaactttttgaggaaa

SEQ ID NO: 30844 - DNA, 1240 bp, Bovine  19866881845470
  misc_feature (1)..(1): n is a, c, g, or t
ntgctgtcctcagagggagggccgactccttccacaccctcccacacacttccccgggtgctgaagaaggaggtccataaaaccgcctgtgacctgcactgacagagagggtctaaggtcaaagacagtcgaccgagagcaggaatgaaagacagatgtgcgtcccatgacagtatcataccttcaaaacaccacaggaacagaatagaccctcaggaaagaatagaagtgctcagagcagatctaaagtagctgagtggggcaggatgcaaacaaatctcagtgttttcttgaaaacaaacaaatgaaagaatctgcttgactaatctgatgctgtaaataatggggaagggtagatgcaaagccgcgtaaaatgcttgtattaggtccaaattaaaagtggattgagctgcaacttgctttcaaatggagatgtcaaggaactaataaaaaattacaaaaattgattttctaaattgccttctgtatgtgaattaaatatggctgacaacgtcaacaatattacatattttaaaaaatctgagcaaaatataataagctcttgtttctcaaaaaggggtatttataaatgaaataaatattctattcacaatttctctcaaaagccaaattatctttttctccttggagtgaaagagaactactttcagtgcagagaagcttatgctggggaagattaagatgccttaagtggttttctatctcaccctctgtaatcttcaagataatggcatataaaacagcaaaaaagaaaggaccagaagtagaaaaccaatgggacattttaataaccgtgaaatgcaatgttaagtcattaaaatgataatcaagaagtaatcgtattcttcttctcactcctcaaatcttcctttattttcctgaaatcagtatccctggtgactgatacagtttctttgttcattcaagctcaccacagtctatctacatgacttcataaataaaaggaaactggaaatatgtcctaatgccatctgatgtgcttaatgagttgtggcaaatggattgcttttcacactgctcacctagaaaagctttgaaatagatacttcaatgaaaccactaaagccaatggaggatggaatattgaagggagttatccaagcaaaatatgccactgtacctgttctgttgctggcatctttgacagaattttgaagaaacaggagaagagccacacaacatcaaattcaggttagtg

SEQ ID NO: 30845 - DNA, 972 bp, Bovine  19866882121702
  misc_feature (1)..(1): n is a, c, g, or t
nttgagagtatcttcttagcaccaaggtccctttggccgcaagtggcaaggggtgaaccctttccttaaagatcctgttgtttttggaagcagctgaccctgagaaagaggttgacaagcatgatggtggctggtgggtctgaagattccttggaaatctgcttgcaaaagatggcctgggttcagaactgaccatggtgaatccggtgtcaacatttgtctctgcctccagcttctcgaagctgttttcccggccgaggaccttcattctggccccgggttcgaggtgaagagaagacagttgcggttgggattccgtggctgggctgctgggctgagctgagccaccagcgcttttccaccaagtgttactggaaccgtctgacactggccgcccaccaggctcaggcagctccacggagctcaccttgaacctcctgccccgaatccttcgactcctcaactctagggtcctgattgcagagacaggggtcagcctggagccatggggaagagtgtcagctcccaaggtgccattcagaaaaggaggctcaccattcctcacaccaagtcctggattcaactggacctacgggacaaggagaagagttaatgttttccattaagtaagtgccaagaacagcttccctggtggctcagaggttaaagcgtctgcctgcaatgaaggagacctgggttcgatccctgggttgggaagatcccctggagaaggaaatggcaactcaatccagttttcttgcctggagaatcccatggatggaggagcctggtggactacagtccatggggtcgcaaagagtcggacacgactgagtgacttcacttcactttcaaagaacagattacatcatactcaggcttctgccatgctgtgctcatgcagactttcaataaagtcagttgaactgaatagaagtaagaggtacagtccttcaacaggatagctgccac

SEQ ID NO: 30846 - DNA, 981 bp, Bovine  19866880579568
  misc_feature (1)..(1): n is a, c, g, or t
ntgggctgaaggacagacccatgggcccccagacagaaagcagaaaagtggacacaggagacagggccggcgaggcatgggaagtgagcagggccaggtgcgggtccccagacgctacttatttactggtcacaggttttatatcgcggctttcagcgggaatccaggaccgctcacagaggaactcgaggaaactccgcccagcccgctgctccgtctgtgctcccgaggactccacggggcccgcagtcctgcacccctgctcctacccgccctcaggacggcccgttcttcagggcgtgggcgccagtcacccatcgcagcccccaggatggacgggtggtcctcagagtccctgactggggcgctggccggaaggtcacgccctgcagagcagtcaccacagccccccagggcccacacgctgccccctggatgaggccctacctctcggtgggtgctggcgggcagaacaggaatggtctcatccaccgtggccaacagcgtcctcagggccaggccaacttcctaacagacaggagaccacaccagcgttaggatgcacaccaggcagctccacgccagccgtgacggtgtctccttccagcgacaggactttcatttccttttcaatactttgggggaaatttctgtatttcttttccacagtcctgagcctgatctcgttatgaggcagattcagatctctggacacccactgctgtcctgtccggggaacaggggctcaggcagggaaagcgggccgcgtgtgcagagagactctcttccctccccggtgctttccgcagcctcaggggccagccgggaacgctgtggctgctgctacacgtgggagcaaatgccaggtggcaccagctctgggggcctcgctgaccccggggcttcgtccactgtgcacacggggcacaacagccctcccctggccactcagggtttaaagggatcaagtgtaatcacagg

SEQ ID NO: 30847 - DNA, 729 bp, Bovine  19866880614470
  misc_feature (1)..(1): n is a, c, g, or t
nttacatcaagatgtataatgcgacagacgtggaagcagcatgaaaccgacacgtgtagagaaacacgttgggctgtattgaacagtgagccacagtttgcacgctctttaggaaaaacaaccttccctcttctttatttcccccagcaagaacggctgctggattgaacctatctgggtggatttcccttcttcacacaacagctcaatttatcagatttggtggtggagagcagggggagaggcccttgacacatctacatacctgtttcccacatatctgaccaacccttgagaggaggaggccgttcaaccactgtgtagggtttcctgtctgtcaagaaacttgtagaacttctcctccgggccctgggcttggcgatcacagagttttccttaacgacgctcacccatctctgaagcgcacgggcgaggcgagtgtggagggcctcctgaaccagctggtcttggagcacctgcagctggctcctctgctgtggggtgagtactgcccgtcacctctgggtgtgcgcgctccttcgttcagaactcgcgggctggcgtttggtgctgctgtgtgccgaggtcttcagggaactgggcagggaggtctgtgtctctcccgagcttggtctgcggatgtccggtcagcacagccttatggccgggctgctgccctctgagctcaggcgtggtgacaatgcggatccccttgctgcagaacccgca

SEQ ID NO: 30848 - DNA, 1489 bp, Bovine  19866880631718
  misc_feature (1)..(1): n is a, c, g, or t
ncacccaatgaagcatcattatttgttatgaatgaggattgaacaagtgtccagagcagtgttgtttgtggtaaactgattaggctttgatggctgcctgcaaaatacaaatggactaattaagctgttttgatttaagaatttcataaaacaggtgattatccagtcttgttttatccaccagcccgtttccattaggaggtcagctgagtttgaattgttcttttgaatgaggaatattgttgatggaaatgtccttgagagtgaaaattatttaattcacaattctgtacaatctcccagtgaaagtctcccccacatgttaggttcgtcactcgcgctcctgcccagcgggcttggccgcggtgtgcagcgaccacagcacctcctgtgctccccgagggggtttgatcatgtgcccgtgccttctgggagcatttggtgtccgtgaccagggctgcctgcgagcacagcgcatggcctgtgtgccctcacttgcgctgtctctctcgccgagaaagacgtccgtcctctctccatgccccgagacaccaccgtttctttcttaaatgactcaaatgccattcctctgtgaagccttgcctccttccaggcagctctgttctgtgaccgagtgccaagtgcagcactggaggcgtaaggatgagtctcttgtaatccttgcttgcagggagctgagacatcgaaggaggctgacagttcccatacaaggtagtgcgtgcacacacacgcacacacacacacgcgcacgcacgcacatgcagagcttcggtcagtgccaggtacaggcaaccaaaacaataaatgaagagtgcgtaaacccacatcttattagcctgacgagaaagccctttcctacgtgtgcacgagcatgccttctgagacatgtatctccctggttctgctacttggtccatgtgatccatgcctccttcctcttcctacaatcctttaaagctttgaagatggcgtctcagcttccctggaattccctccctcctttgtgtccgctcttgctgttatcacatgggttcagctgctcacgattctgtcctttctctgcatgggctcccattggtctgtgtccgttgcatctgtgtattgaaagaacaaagaactttttcattttatacttgcctcctttaatgcacttggactgtccatttacttaccccgtgaccttagcaaagacatactcttctctggattttcatctgcagatttaagcagttggaaaggatgcctccgcattgccttctagctcttccctctgctcacacttaccccatggccacaccctgtccccagctcagtggactgctgatggcagttctcccatggaacgcgggagatagcagatgggtggtctattgccaagagccaggtttaccattaacaaaacttaggttgaataagaagaaaaaggtctttcctaagctactgcttttctctgaatgacgcctacatt

SEQ ID NO: 30849 - DNA, 1383 bp, Bovine  19866880644857
  misc_feature (1)..(1): n is a, c, g, or t
ncgggagtcccaggtgttacaaatcagtccgcaaggcacttggaagtgagccccttagccagcttcccccgggtggctcaggcggtgaagcacctgcctgcacaacgagggagagacgtgggtttgatccctgggtcaggaagataccctggagaaggagatggcagcccactccagtactcttgcctggaaaatcccatggatggaggagtctggtaggctacagtccatggggtcgcaaagagccggacatgactcagcgacttcacatcagccagcttcccatgtgccaggctgtgagctaatcccaggtcacgaggcacatcagagaggtccacaactgcctacagtccagtcctgcaggcggtaaaaaaaaagctaaactgaaaacatctcatgcctaacagcagtggtcctcaaagtgtgctccccaccgccagcagcagcagcagctgagaatctgttagaaactccctccaggtgctgaccaggacctgctgagtcagaacctaaggggggctcggcactgcgtcccaataagccgccaggtgattcggaagcagccgcggtgtgggatccagtgctgaaggccctgctggggtcaaacgtagttcctgatttattaggaactaataagagagcgtgcagcaatgggaaaaaaaaaaacttggcgcatcgatagttcaggactttggcagccgctggtgatgttctaagtcatgccctgcccgcctcagtgcggaaaaccatcggacacagtctgtgtgcgagcgtctcctacagacggccgggggtcctcttccctcctcgacctccccgcacgtctcacaagctgaccggccgtctcctctgacagaagatacactccaggacatcgtcctgctccgttagagccccagctttccgaacctggcactgaactgttcctcgccaggggcctgttggatggagacagggaatgaagtgtgacgggggctcagagcaacaggggtctccctggtggacgagggccttcaccatctcatggacttcgaggcacgctcttctggcccctctccatgacatctgtttagaattccacaagcagaggcctctccacttctgctccgtttcttactaagttttgaaattgttgagcagattaaaggattctttttgacacttttatggttaaactttgtagagtttaaactgcctcccttaactgttcctgggaaagattagaaataatttggaactggattggatttgccattctgtaagctcttcttatctaccaggctaatagcagacactttcctccctacaacagcccaggaggaaggcttattatctgcgttttacagatgaaaagtgagggtcagataggcgaaagctcatatt

SEQ ID NO: 30850 - DNA, 904 bp, Bovine  19866880816336
  misc_feature (1)..(1): n is a, c, g, or t
ncatcttagggagagtttccatcctggatccagcaggacggaaatgcagccgcgcgtgggaaagggcgagtggaaaggtgaggcggtcaccccgaagattccccactgcagtcagctcagtggacagcttccccgccctcaccctatgtttttagagccatttttccaaggttttctcttttcccaaatagcagttgctaccatggtgtatgtgatcatcttcaccaggtcctcttacctccaagccacaggaagtcattcaccgagcgcagcagctccaccgacatgtggtaatgaaccagggagtcctgcagcatcccggcctgcaggcacaagtcccccacgtgcttccgcatgcggccctggcaccgcttcttgtaatgtctgaaaggtgaggtgaacggaaatgtatcactgccaacgcccggattcggcccccaaagcacgctggctaggcactattcaactctctcactaaaaaaagcgctaagaaggcaactttaggctctacggttgaaagccagccaccatcattgtcagtaatataagccaagttattttctaagtgcaagagagttcatgtatttcctgtggataatattagagggggcttttccttttcaaattttccaatcacaacattagcacaagaaagtttgtttcggccttttaaaaaaatcaattatcttccacgttcttaacttcaaacctttattattttatagagagagctgtgctgcatattacaagccaactgtttggcttttgcaaacaagacctttatcttcacgagttcagagcaagctttaatgctgctttgagtggtgggacccagaacacttgctaacagctctttaaatattggcaagggatgtgctactaaataatgcaacagcttctaact

SEQ ID NO: 30851 - DNA, 1349 bp, Bovine  19866880964388
  misc_feature (1)..(1): n is a, c, g, or t
ncgctcacaccccacggtggcgcagaggttggccgaggcccctgggcgctgcccgcaggcctttcctgctgcgggggtcagggtggccaaccctacctgtgcttgcggctgggaacgaggaccagccagccatgctgtggtcctggaagcccctgtcccggcctgggggtgtcactgtgcacaggcctggtggctgggcctgttggtgtgcagggtcccctgtgaaggcccagggctgcccttggagcagctccctggctcccacgccctcacacgtccagggccctagctctggggtcgcctcagacccaggctgtgtgctcagccgtccccagccctttctttccttctgaatcctatcgccgctcttcggtgctcctgtgacgcttgacagattctctgtgaataaagggaaaaaattgcagcataaatcatccggagagtagcattttctaatttggatgggaggcaaaacaactccggatgggttttttcctccttcgttttcagcagggtttctctgtcgggccctcgtcgtctgccttggagctgtaagtcacagtcctgtttccagggggaggcaggtttgatttcctcatcctcgtgttcgcgtttcccctcctcccccacttcctgggacttgtcatccttaatgactccgtgacaagaggcgacggtcggagcctcagtcttatcagcgtgggtggacaagcgacagagatcacagcgccttccgtgggtggcctggcccgagtccgttggaggcggttctggtttcgccgccaacgggaccatccgagttcactgccccaccgggacgagcaggctcgggccccgaggctcaggctgggctctgtgcagcctcgtggaagctggggctcaggcgcgtttagtctgtgcagagaggagggtgtgcttgttcccttccggctgtgccgggctgaaggcggggtccgggggccccgccccctgagccgcgggtgtgagccagaccgtcggagggggggccgacctttccggggctccaggtgggaacagtgtttgggagctgcagttgtgactgtcagcccagccattcccccccggtgcccctcactctcctggtctgtgaagtggggtgtgttggaggcaaagctgtccggtgtgactggcggccagtacctggcagttatgactgaaatcctcgccttcaggtcagaaggccgagcccttcaagtcgcagtagcctcccgtcaccccttgcttgaaattgtagacgtggagttggagtcgcctcctggctcttgccctcacccccacggggtgtgcatggtgaggggcaagaccgcgggctcgcttgccgcgagggg

SEQ ID NO: 30852 - DNA, 757 bp, Bovine  19866880986183
  misc_feature (1)..(1): n is a, c, g, or t
nttgtatttttaagacaaagtctacttggtcatgactttttattccttttatacccagcaggatttgctttggtaatgttttatctgggtttattttattctttttttctgcactgtgctaaaatccttgccaccactgaaacttcgcggcccaaaacacaactaactgtttagtacttttttttatgttgatctttattttaactcatagtggtaattctgcttttctcctttcaattgtttttttcttttctgttcttaccgaagctcttttcctgacaaggatgaatcaaagcaggacctgaccaagcctggaattccacaccaactccctgtctgcaagtccatctttcctggctctcctttgctcaacctttacctaaattcagtactgattcccttaaatgggacaagtctataaaaggccctggtatccaattaacaaactgctaaatgctcaatacactagttgaattttcaaaaccaactttcttcaaaaaaaaatcatttggaaatgttacatatttaaggaatttatgaggatacacttagcaaattcttcaccagctactcaattcttctacgtcctagacttcctaaatcccttctctgcatcgcaccacgctgaccatgcagggcagctgcgtgggccacaacacaggtatgccgttcaccgcagcaggcacctatctgcgcactcctcccagggcgggcttccaaggggtttggtgcaggactaaactctacactcagcctc

SEQ ID NO: 30853 - DNA, 816 bp, Bovine  19866881161956
  misc_feature (1)..(1): n is a, c, g, or t
ntctgatgagaaaataaaaaataaagggttaattaaaccaaagaaaaaggaggagaaagtgatttttttttgctctatttttttgagcaaaaataaaattcttaacccaatacttgacagtccaataagtccaatcttctgacagaaataaaggggcagcgaccacaagagacaaaaagaatccagaagctttattcaatttgtttaaataatcactggtggctgctccacataagggtctgtggataaaaaggaaattaagctaccatctcctaggagatttcattttccaagagaataaaaccttatcaaatttcaagaaagtcgatgggtgggcaggcaggactagagaattggtacattttattacttaacaaatatttttccagcaattactaggtaccaagcaaaatgccagggtctgtccccaaggagtgcacagtccgtctgtataacagatatttaagcaaataattacaaatcaatatttttatttaaaagtaaagctttttgagacaagctttgtggttttccacacctcacccccatgcctttcactaggagggaggaggggaggatgcaggtaatagaggaagtttgcttgtcacccagaaggggctccagacacaagctcacagactctgtgacacctcggagctcgggagtgcttcctgctggaaaacccgtggtagctcggaaggcaggcatcgctgttcccattttgcaaacgagaaaactgagcccaaatgaagtgaagtgaagccgctcagtcgtgtccaactctgcgacccaatgggactgtagcctaccaggctc

SEQ ID NO: 30854 - DNA, 1260 bp, Bovine  19866881407852
  misc_feature (1)..(1): n is a, c, g, or t
nccagcccaacacgtgtgttcaccgctttctcggagagcctgcagctgggaaggtctatctcttctccatcctcaacctggaagcaacttccttgcgtgttagccgtcttcagacaagtcatcccacctagaggtggtggaggcggttccacagaggcgtactggccaagccctgtgggcggcgagcagaggaggaaggctgcccaactcggcacagaccccaccagtccccaggagctccgatggtaggaggtacacatttatatcctctgccataagtcatcaagaagaggcagggcccctgggggaggccttggggataagttcaactcagggcaggggtggctttgcaaggccacatggtgggtaggactgagccaaacctccatttccaacttgatcagtaatgtaggtgctattttcatcctgaccgatttctacccttgaatgtgcttaaacccagaccccaccccagagaccctcaggaggccactgtccatattttccaccacatccacaatttctggtctgtctgcaaactggctgatttgggcatatggaccacaggcccgccgtgaagtctccaggtgtgatcatcacttttgacattccttccctgacctgccctaagctcagcagcccttggtgccctcagacagcaacctcgcagtcctcagcaggtactgctgctaactcatccacgggcccgcagaacgcatccccctttggagcaagggctgtgcttcactcctgctcgtgtcccgttgccaggcccagcacagcggcggaaggatgcccccgtgactgcacgtggagtaacctgaacgctaccccaagtcgtgtacccagcaagccagtcaactctgggtgtccaaaatatgcctggcattgggtttcaaaggatgaaaaagattaaaaaaaacctttccaaaagaagatattttgaacaccagcagctgacactgcagaaaacacatgggactttggggccccgcaccctgaagtagaaatctgttatcatagtgtcattaatttgactactcccattgacaaaaatctgagttaagcttgatcaagaagatgacattaatgtagtcgttcgtggcacttcacagtaagatcttcaatccagcacaggctgcgatcacaacgggaccatccatcaccgatataatcctttcataattgcttctaagctctgggtcattacatttaagactaaagaccaaggaggaagaaggcggtaagcgtcggattagg

SEQ ID NO: 30855 - DNA, 2250 bp, Bovine  19866881559235
  misc_feature (1)..(1): n is a, c, g, or t
natttgtggggggtgtgtgtgtgtgtgtgtagttctccctgtaatatcttaaaaacagtcattgttatggaagaacatagaaaggtcatagaagattacctataaatctgacagttaaaaactgctgtaattcacttagattgttaataggggcctataaattttagattcatagcaggaagcacttagtagcttgacataaaagctattcttgttatttttatggagactttcttttttattgaagtatagttgacttacaatgttagaccagtttcaggtgtacaacatagtgatttgatatttttatagattataccccacataaagttgcaaaatattggctatcttccctgtgctatacattgtagcttatttctttatatctagtagtgtgtaccttttaatcccttccccctttcatggcccacacctcacacctctaacctctggaagtaaccattagtctgttaactgtatccatgagtctgttttgttttcctttttttagattacacacgtgcatgaaaaagacaatgtgctctttgatactagtcttggcaatattttttgatctttcacatcaggcaagggaaacaaaagcaaaataagcaaatacgacctgagcaaacttaaaaccttttgtgcaggaaggaaaccatcaagaacatgaaaaaggcagcttactaaatagaagaagatatttgcaaatgatattctttttattaacttactgcactatctggttcaaagtttgcccagcaggagattaatactttacccaaatacacctgagaacaagcaaaccatgtttataagcagaaaatgatgtcccctgtcctctctgttcatgctgctttattaattcttttctccaagaggttggatgacttatttctagggtcagacttgaacatcatggcatctaaatgttttcaatacagacctcacagtatcgccagttccctaaagtagcatgatcttaaaggtatttctggcgctaggcaacctgatcgatctgggctctggagaggctctcttcatactttatttccagcactgaagctaaattgaacagatggggtgtgatcttgactggcaaaaacctaactgatgaagaaagctaaaggctgagacactgagcaactattgtcatgtttaagcttagctgggtccttttgagtttgttttacagcttagcaggttacattgttagcactgttttttgcaataaatccatggaaaacctaacagttacttgttttgtttcttattgtgtatatataaatgaatactaacaagtttttttcagctccttaacataagcttcaacatgcacagaatgctgtaaatctgataaagtgtgaggtgaatgatattttataaagctattttctatggtgtcagttgtgttttgcttcatagtatatcagcaaaaaataaaataaaattcctcatatttacaggaaaaaatggtatgtctgataaggggttagtatctggaatatataaagaacacacaaaattcattatcaataaaacaagcaatctgattaaaaaatgagctgctgctgctgctgctaagtcgcttcagtcatgtccaactctgtgtgaccccatagacggcagcccaccagcctcctctgtccctgggattctccaggcaaaaacactggagtgggttgccatttccttctccaatgcatacaagtgaaaagggaaagtgaaatcgttcagtcttgtccgactctttgtgaccccatggattggagccttccaggctcctccatccatgggagtttccaggcaagagtactggagtggggtgccattgccttctccaaaaaaatgagcagaggacctaaataggtatttttcctaagacatagatggtcacaaggcatatgaagagacactcagcatcactaagcatcagggaaatgcaaatcaaaccataattagacgtatctcccacttttcagaatccctggcattcaaaagacgtaagtgacaagtgtcagagaggacgtggagaaaagggaacccaagtacaatgttagtgggaatgtaagttggtcagtcagagtggaaaacaataaggaaatgccacaaaaataaatgaaatggaactgccatgtgatccagcaattctactttgtccggcacacactcttatcagatcagatcagatcagtcgctcagttgtgtccgaccctttgcgaccccatgaatcgcagcacgccaggccta

SEQ ID NO: 30856 - DNA, 848 bp, Bovine  19866881734025
  misc_feature (1)..(1): n is a, c, g, or t
ngaattcttacagctattcccaagagaatttgtattaacaaccgatttattggggagaaaaggttgcaggggatgatgctagggtgaacctttccttttgataattcctaaaactaatgttctgacttgaagccatcatctttgtgatttctgtggtgtggcctaactctttaatgaagaaataatgacttttccccgatcttccagggttgtgcggtgcttgaggactgctgtgaagagggctcagacattcaggctgtaatttgaatttcttgtttttaaaagaacaagcatgtgtcattatttggcctgggactactgctctctctttatcatcttgtagaaaaggcattctatttccaaattggcagtactctggtttgtttttttctgaatcttatcctaaaataacatgccaattgagctatttctgaggctttcttcagagaattgatgttcatttattcgtgtttctaagtaggaatggaataatacatgtaaacaaggtatgaaagatgtgttagaccagagcaaaaacgtgagtgcagcgcttatgagcactgttttgagagcactgctgttgatcagtcatcagtattgatttttgcccgaggttgggggcaggggcttggcagggcctggtctctgccgctgtgtccagtgctccttgaggcgattggtttcggacagagaaagaaggctgagtgctgaagaactgatgctttcgaactgtggtgctagaagaagtctcttgagaggcccttggactgcaaggagatccaaccagtccatcctaaaggatatcagtcctggggtgttcattggaaggactgacgctgaagctgaaa

SEQ ID NO: 30857 - DNA, 1858 bp, Bovine  19866880179280
  misc_feature (1)..(1): n is a, c, g, or t
ntttggaaggcatgatgctaaagctgaaactccagtagtttggccacctcatgcgaagagttgactcattggaaaagactctgatgctggaggggtagggggcaggaggagaaggggacgacagaggatgagatggctggatggcatcactgactcgatggacatgagtctgagtgaactccgggagctggtgatagacagggaggcctggcgtgctgcgattcatggggtcgcaaagagtcagacgcgactgagcgactgaactgaacatgacaaacatatttgtaacgatgaaagaacaaaaatgtctgtatttgaaaactcactattatctctttacattataaactctaattctaaagttcttatcctataaattatcattcataaattccaccttagagttaacacgttgagatttgggtctgtggaccaagctaagggataggacagggaattctggataaccctttcttgctcccacccctatcccagccttagcccactcttaaagacatcagtctgcagcctcctttgtaccaaagtttcttctgaactgagctttctgtcccggctttgggatccacggatactcctgcgagttgattttcttctgattagactggatcttgaatcttgggaggacgtgtacaagtcctcaattttacttagggattcaccaggggtattttctaattcaagttcatttccttttgtctaaaataaacaagaaatatgcataagttggttaggcggagttaaccaatgaaatctaattgctcaacagcagatatcaaggaaaatggtaatttaagtccctttgggaaaggatgaagtggaactgccatttttttggtgtgattatatttgaaaattgaaaccattaaataaggatccccataaactatgctgaaacaatctggcatccattccaagtatcttatctagtcacctcctgtgtgtgagtgattttggctcaatcagatttgctttggaccagtgacatcacacaaataacggtgcaagtcatactgtgagacacaatgttttcagtagacatgtcaaaaaaaagtgataggtaaagttagttttaattatatattttatctaaactttaatgtatctaagatattagattaacatgtaatcagtgtaaaaactttttgagatagcttgcatttttctttggactaagtctttggactctggtatgcattttcgacttacaaacacttcgattcagattacccaccactaatgtgctcaacagccacgtgtggctagcagctgctagagtggatactgctgcggcagctggttagccactcagtcgggtcctactctttttgcaatcccatagaacgtaacctgccaggctcctctggctgtgcaattttcccagcaagaatactggagtgggttgccatttccttctccaggggatcttcctgacctagggattgaactcatgtctcttgcttggcaagcagattctttaccactgggcctctaagaagcccttgctagagtggatagctcacttttaagcctttttaactttacctttctctatccttcttcatttctctcctttcaagagggaaaaaaaaatctaaaacctggtgtgatcctcactccctctgcttcctacccaaaaattttttccctcttctcaagataatcaatagtaacatttatttatagcaccaaatacagaaaaatcagctcatgcctgagatacttgaggaaactgctagactatacctgcattgtgacaagtttgaagtaaatgcctctcttccccatgagctcattgtgattgccttcctccacaatgactccatcatcaagaccagcg

SEQ ID NO: 30858 - DNA, 880 bp, Bovine  19866880361644
  misc_feature (1)..(1): n is a, c, g, or t
ntaggagtctgaacccattgctgtgtcttggctttgcctggtccgtatttacgtgtgagacggacagtaacctgacctagttacctagtagcgtagtaagttctcacaatggtccggctgtggagacttgctcctcctcggcacgcatcgtcatagatgtccggatcacggagtttccacctggggaggtagttcatgttgcattccttgccagtccttcccgttcagctccctcttccagtcttggggaaacctagagaactatttggacgtttggtctctgtctctgctaccttctgaagagatgctgtattcagtagttacagtgctggctctggagcgtaggacgcctggctctgaaactccacctttgtcactttttagttaagacgattgggggattattttcataccttaatctcctcatctttggaacagttagatagcggtagaacctacttcatagaatgattgtgagaattaaatggattcctcacttaagactcacagaagagggattagtcataaaaaaagtgctcaataattgttaatatttgtaataattatcaacaagaagctcatgcttccatgctcctcacaaatgaacctacataacttgcaatgatatggctccttatctcctttcatcttttcagaactctgtgatactaactcagtttttatagttgttgaaaggcagactgcaagtcactcagtacctgttatgaatgtgaagccgtccttctcaggtgcgtttccttagtaactatggactgctagccatgcccttcagggaaggcaagggcctcaaactatggcccgtgggccgtatctggcctattgcctctttttatgccatctgtgagcttagaatgatttt

SEQ ID NO: 30859 - DNA, 1924 bp, Bovine  19866880364120
  misc_feature (1)..(1): n is a, c, g, or t
ntgcatgcacatctgcgtgcatatttttgggggaaaggattcacagcaatcatcagagacttaaggtcctgaaaaatctatgtcactaaatcctggagtgcacaaaaggcctcttcaaggtttccatgacttgagtgcacatcaggctgtaagtctctgtgcggtttagtcgaaatcaatgtacacttgaccaaaggtggtttgggagctcacagttatgagccagtttctcctcaatcaagttcaaggatgtgaaagtgtgtgacaccctagtccactcactttctcactctgctaagaaacttgttttggtttttttttggtgatgccatgcagtttaggagattttttttagtttcctgaccaaggattaaatctgggccctcagcacagagagtgtggagtcctaaccactagatggccagggaattcctagaacttaatttaggtttcctttcttgatcagccaaatgtcttgcttcctatttgactgagaagacaagttctacaagtcctcatgtccaagtataccaacctttgagcactaacattcaaatactctgtcttttcacccgttattgttggtgaactattcatgcctgtacttgaaataagtatttccccttaagcataagtttccttcctttctcaaggacagcactcaaacgaatctctctgtctctcccaaagcatcactttctcttctatcttggataatttctatcagcatacaaacaagctgttaatctcccatcctaaacacacacacagcttctcttgtccccatttttccatttccatgtttccaaaaagcccaacctgtgacgatgcccaaaattaaatttctggtatttactgccaaaactgatttccctctatcttcctcatctcaattgttagtaactgcatccagcttatgcagtttctcagactaaaaactttagaatcatcttggattcctgtctcttgtacccataatcaatatgtcagggaactgcgtaactgattcccgcttaatattaaaataccagattaggttccaataccttttcctgaaactgcctgggatatttctgacttcatagagctctctcttttcccatctatctctaccagcactttcactgtatgttctaatgattgtgaatatcatcctctcaaattcattatagatatgaactatagctcagacccctccatctctcacagcactaaaaacactaatgcatacttagtgaagactccacaaacttcactgttagtcaatgatttttcatcaagctttcaaaaaaatcagttccacaaacaacacttactttcattagtcatgtttgaaaaagttatgtttccgaaatttccagcacctgcaaagctatccgtcatgtctccaaacaccagcattatgagggggaatccagttccatggatgatggcagccaaagtccccagcacgatatacaacctatcgagccaatctgaatagcgaaactaaaaaaggagaaaatacagacaataggaacaattagcacgatgtcatggatggttaactctactttccaaatgtatccaaaatctaaatagttagctctcagactaccattgcaaccaccttggcctaataacgtaagagaagcaggcatttgcttctttttttttttttttgagttttgactttcttctttatattggacttagtctatccactttataaaaaattaaactatagctgatttacaatatattagcttcaggtgtacaacagttactcaataatttaatggattatactctaaagttattataaaataatggctatgttccttatgctgtacaatacatccttgtagcttatttattttacccagtcggtttatacctcttaatctatacccctatcttgctcctcctatcttccctttcccca

SEQ ID NO: 30860 - DNA, 1059 bp, Bovine  19866880404262
  misc_feature (1)..(1): n is a, c, g, or t
ngttctggtacggtttcccagtataaggctggataagagtgttaaacatgctagcagtcactccgaactgcagttcaaaggctcagtagacctgccccctgagatatctgtttaatccttcaatcctgacacctggcagatgtgatgcactgagtagattaagtactttgctctttgcactacagtgaagaaagacaggtgtaatctttgcctgcagacttttccagacaagtagtagatctttcttcccctacaagtatgaataaatggaggcttctctggtggctcagatggtaaagagtctgcctgcaatgaggcagacctgagttcaatcccagggttgggaaaatcccctggaaaaggaaatggcaacacactccaggatccttgcctggggatggactctgtttgaggcctgagcaaaacaaagatataaaaacaggatttagaaggtgattgttctgtggtgttttgatactcaataccagttttttacagaataaatattaacccatctctgctgggcagcatcttgctgtgtagggcctactcccaaggcttcttaagagagctggtcagctggagtttcggattctttggtctcccaggtcaaccttttgtattttggtaaatgctagttatataaatacattctcccctatattgaaggggtttagaatacacttgtcatgttaatctctcctgcttttaatttgaaaataagaaaataaagtttctgtatcactggggtaacttctattaatataaccccttatgattatatagaggaagtgacacatagattcaagggattagatctaatagacagtgcctgaagaactatggatggaggttcctagcattgtacaggaggcggtgacaaaaaccatccccaagaaaaagaaatgcaacaaggcaaaatggtcgtctgaggaggccttaaagaagagaagctacaggcaaaggagaaagggaaagatacattcatctgaatgcagagttccaaagaacaccaaggagagataagaaagccttattaagtaacatgcaaagaaacag

SEQ ID NO: 30861 - DNA, 882 bp, Bovine  19866880412449
  misc_feature (1)..(1): n is a, c, g, or t
nctattttttaaaataaagttttactggaacatagccatactcatttactttactgtctgtggctgctttcattgtacagaggcaaagctgagtagctgcaatagacatcttgtggttcacaaagcgtaaaacaattctctgtattttttgccaactcctctttttgactatactcttaagaagagagccttaaaagtaatctaaggtaagcacttttggtggtggaagtaatcagttcttaaccatatttatatcctgaaattataatccttctaagaacagaaaactttggatttatttttagtttaatagtctgatagtcttaaaacttaggttgataaattaccttttctttttaggcatgtccctttcgtactccacaaagtcaaaaactaacttagatataatgtcatcaacaacttgatagtgattactctgtgcaaagtttctgtgttgctcactcagaagatgctaaaacaaaaaagtatataataattatattttaaaagcaatagatacttttttgttcaggttttctaatattttcttgcacttaaaattaagtttctaataactactccaaagaaatatcctttatcagaacttaaaataagtagaataaaagttatctctcagaaaccactaaaactactttggttttcagtcttccattttccaatgagaagaatcaagtactaatgaatttgtggttttaagggaactgaaaatgagggagttacatcagaaaatgaaataaagctgaagaaaaacagaaacactgagcatttagagtatgctatgagcatttagagtatgctaatatttttggaaagacttctctttactacattattttatccttatataattaccaccaagta

SEQ ID NO: 30862 - DNA, 3155 bp, Bovine  19866880423823
  misc_feature (1)..(1): n is a, c, g, or t
ntggagggagagagacattaaaggagcttggaacaggctctgggagtctgggccagactcttaaattgtcaaggtgactcacagcatatatgtcagcttgaactttattgactttgactttcaggacccattttttaaaaggtgaggtagtcatggaaaagaaccaggctgtggtacctctaccaatttgaaaaaaaaaaaaaactcacaactctatatgtaaggcttcttgccactggtgtgtgaaatattttacgtgacacacaaaaccctaaagaaaagaagttgttttgagcacatacatgtacccagcagcgtgtttcgattgggattgaaatagtatctccgtgttgttgtgaaagcccacttttacatgtgtctcatagttacctttctaaaaaagtccatgttttgatcgaattttttgctgcttcttcttctttcttggaaaataatcaaatgttactactaacatgtagtatttgaccaaaggtattactcctgaaccattaggtctaaagttctgggttttctcatgtttattttctcccctctggcttcatttagtgagttccagattctccagggtagcaagttcagtagaggtcaatggattctcatgtcactagtttgtttactttttgtctccacttgacctagattaaaaagtcaagccttttttggcaggagaaattatttgaaaaggtattgcaatgtttctaggatggttaaaatgaataggaaaattctttctgtaattatagagagactaagtccaaaatggttcatttgtttaaccacagtttccttggcttcaacggcaacttgaaaacatgtctgctgtggctatgtttcttatcactgcatgaacaagtcaatgcaaatgaccgacatttaattatgtgttggtagtatagacttgtctaatgtttggggcatgatgtagcataatatatcaaattataaaacaatatagatatacatatcatgtgtgtgcttactcagtcatgtccgactctttgagacctcatggaccatagcccactgtgcccctctgtccatggggattctctaggcaagaatactggagtgggttgctatgacttcctccaggggatcttcccaactcagagattgaacccaggtctctcccattgcaggtggattctttaccagctgagctaccagggaagcctatattatagctaaagacaattctggttgtgatttgtagcagagaataaaaaatagtaaaatgttgaacatgtttattttactcttttgttcccaaaactgttgttgtcctttgactcagaattgtgaacaaatgaaaagtgtcccttgacataagatgcaaaactcatgaagaccattaaaaaattgtttcatgttttcatttataaaatattggagacacgatatacttaaaacaacaattagccttaggaatggatatcatagcagaagcatctttcgtgtgtgtggtctagtcaaaattcctattttaatctgaggaatgtaaatacaattatgaggggcttcccaggtggcatgagtggtgaagaaccagtgccagagacttaagagatgtagttcagctgttgggttgggaagattccctggaggagggcacggcagcccactccactattcttgcctggagaatctcatggactgtggagcctggtggggtacagtccacatggttgcaaagaatcggacaggactgaagcaagttagcatgcacgtaaatacaattattcgtcttttaacacaggtcagggttatctcagtcttagctgtattgacattttgtgctggagaattccttgttctgcattgtagaatgtttagtagcatccttagcattcagccagtagatgttggtgaagtgaagtgttagttgctcagtcgtgtccgactctttgtgatcccatggactgcagcccatcagtttcctctgtccatgggattctccaggcaagaaaactggagtgggttgccatttccttctccaggggaattttcctaacccagggattaaacccaggtttcctgcattgtaggcagatcctttactgtctgagacaccagggaagctgctagacattggtagcacctccaaatctcccccttccccaaccaatgacaaccaaaaatatctccagacatagtcaagtgtcctgggtgtgggggaaggggcaaattaccttagtggagaatctgtacactaacgactcctgggtttcatggtgacgttccatattataatttattttttatttttttttcatattataatttaaacacaaaatttacctatggaaaatatttgaaagatctataatctttgctaagaagattaaaaaagggaactatatcatatatctggcacacagtggctagaaaaaaatgtctttgtgtgaactttccagtgctatgatttagtgagacatttagaggaggagagacttcaaggcttttctgttttcaagcccatagaatccaatggcatgttttgaaaattacagctaaagttactgaagtataagttgtgtaattctcatattgtcttcatttcaaaaaggaaaatagcgtttagatttagagagaaagaagttgtcagcagctttgggaaatctcttggtaagtctaactataccaaagaccatggaaacaaaatcaggccttttctcagtgatgttgctgtggagaatcatattttcatcctttgtccacatgattttctcagttatagtatgcaagtatagggttgagagtaccactatggttaatatttttctgtcaacaactgttcctatatactcttctgtttttccttttatgtttttgttaaacttatttatatttctctagagttaaataaaaatggattcacaatacatttggctttaggatttacgacaattggccttaccatttgacttttatgcatacatacaagtgtgtatggatgagttcttggaggaaccccaagttggcctacctttatatgtccatttataagtctctccttcaacatgtcttccacctacagcatgtatgttgtccttaggaaaagatgttttcaacattttttagtttaaatttagtcagatccagattttgcatcaaaatgcattgtaggaatcgga

SEQ ID NO: 30863 - DNA, 1004 bp, Bovine  19866880436564
  misc_feature (1)..(1): n is a, c, g, or t
nctttttagggagagcaagcatgcttacatttaagtacatattcttttactgacagttatatattattgtagcaaaatcagaagaccctgatttaaaaagaccactgactgtagtttataaaaaaatgtaatgtgcccataatcagtggagttttctaatttttgacagttcaatcttcagtctatatatgttatttgaaaatataatagtacatttcgtattttagccttgtagttagaagtacctctgttagtaatagctatagactaacataaatctgtcatctaaagcccttagtttaaataaagaaaccactgcagattggttgctaaaaaactaattatttcaattgttttgggagaaaatgttacatatctcatggcaccctaatttactgatgattagtttatgctatctaatagaatgacacaaaaggaaactaatcaagttgtacaacttgatcaagtaacaagaacataactaaatataaaacttttatgttgatgttctatggggataaatatccacgtggattgctagtaagtaaaactagctgtgacatgcggtatagctaaaatgattctgtcagtagcatttcactaccgtccaatgaattatcaggagagcaatgtgacgcagctctgtgttacctatttgaattatagtttagatgaaactctatttttaatattaagttctttggtgaaattctgatccaattaaagatctttctcatatgtgttttcacatttaggtctcagttgcatctgtcaagagacatgaagattgttttatgattccctgactaagagttttatcatgtaggttcattagcccctgtctaggctggttagttcatttgattaaagctggggctcatgacagaaaggtcaggggttcagtcgtgtctaagttaatttacctttacctctgtttacatacaaaattctgagcaacttcttatagatctgtcgttcacctcaattcaccatcaggaaaacaa

SEQ ID NO: 30864 - DNA, 2647 bp, Bovine  19866880442736
  misc_feature (1)..(1): n is a, c, g, or t
natttccttctccaacataggaacacagagcaaagaccttctaagcctgctctgggtgtgggagcttctgaaggggatgacacttgtccctggaatgaaaaggatgactgagagtttagcagacagaggtgttgggggtgtgggtacagcagggcggggagggcactccaagacaaggacacggcacagctaacccacagacacatgacaccgcaccacagcaagctagaacattttaaaaatactaagccaagtacttacagagtccctccccaaaaggaaagcctttatttagaattcaaagtgaaaagtgagtggtaatcttggaacactgaaacatatccattatgaggaaataatgccattgcaggagttttcatgactggccaggaatactgagaaagaggtgcagaaccatgggcatttgttggactgacttccagtgttgctgagagaggacccccttccttctggtctacactccatctagtgtaatcgggtgtatcaagcggtcatgacatgaacaacgtctcactttactcagctctgtctatccacagggcagcgttctgatattgatttggcttctcagatatgtttccgtattaaaaaaaacaaattgccaatggaagcttttaagtacctcctctcgagatctctttctcaatgaaaatggatgatttgtcgttttggtctttaggcaacaatgtcttggaagttgagtatgaatgaaccaggccagcatgaacagatagactctcgttgagtgagctgacaaaaacttctgcatcttttgatgccaccaggaagcaggtctccggggaagccagccttgacacacttcctcactgcaacaccaagtttccagtgaccgtgggatgaatggatgcttggcaggatgtacattccaatgtattttccctgagaggaagtgcattttctggaacattatccgagaggataattggaaaaaaaaccaaactctttatggataggaaagataacacccaactcacgatgctttttgtgagctcttgttgtttagtcaccaagttgtatccaactcttttgtgaccccatggactgtagcccaccaggcttccgctgtctatgagatttcgcaggcaagaatactggagtgggtagccatttccttctctaagggatcttcccaacccagggatcgaacccatgtctcctacattgcaggcagattgttactgtttgagccaccaggaaagcccaaagaatacttgaatgggtagcctatcccttctccagaggaacacccttatacaaacagggttaatttaaatgactaaaacaaaatttttaatataatccatggaaataattttcgaaaggttactcaataacactttgctataatattaataataatctaggactcctcattgcccaagattgttctggacaatcctttcaaggatgtttgcatagtggaaagcctttgaagacagagagatgtctccctctagagcaaagagcaagcatgtttacttcctatgataaaagattcaggtttttcaagttcagaatttctctagtaacacaacacactgtgtgcgcaggtgtcacctggcccttttcctctgtcaccctctagggatcgaggctcaagatacaagtataagaaaatgttgatgttctggctacttctattgccacgagtaacaaagttctttgtctctgacccagggtctcttgtcttctgccagcatagatgaaactgcaacagcctaacttgttgatttgtaaggaggataaaatctcagaccctcacagttgctgaaacttggatttccattttcccctgaaaattaggaggtttgttaacaaggcgcctccgatcccacattcccgttttcccataggatacaaattagctgcaaacgaataagacacacattgtccatcttattatagctggcctgtctctcatttatgccactggttggtatctttggacatttatgtttgccattccattccagggtacaagtgtttgagctgtatccaaattatcagctcattccaacatctaaagctaaatgatccttaaaaaatctctgcactgctttaatactcattgataagcacttgcagattaagcatcaaacaaaaaacattttaaaaaaataaaaggagacaaatctagctaacagaaaacagaataattttatttaaaagatgtatgtaccaatggctgattcatgttgatgtatggcagaaatcaacacaatattgtaaagcaattatccttcagttaaaaataaagtgtttaaaaaaacatgcatggttcctgctgaagaggaaagatacataagaatattgttgcagcaaacattcttaaatattgtagcaaaagtttctgcaagaaaggagaaaagagagaactagaaagccactggatattttaataaataaaagtgataaagcaaagagcttcttattggaaaatggtgaacaccacagaaaatagggaccatagagctctcgagttaaaaaaaaaaattacagacccagtgagtttaaaatatatttttattgttgtgcaggaatctttccttatactgttttcccttggggtaatgttagctgttgaaaacaaaacatgaaaacaggg

SEQ ID NO: 30865 - DNA, 1870 bp, Bovine  19866880504869
  misc_feature (1)..(1): n is a, c, g, or t
ntgaattaaggttaaaagggctatatttattctgaatgccttgtttccttgttcagaataagatgctatattttaaaaaatcctgttaactgatctcattatatcatgactaaagccagccaagaaggaaactaataatacaaagccattgcaaataatgtgattcttaactgcattttaaacaagctcactttgaacccctctaatttccctgcagatgatattctatatttaccaacgcatacatcagtctgatccaggctcagccttcaccttagagtgtcttatgcagcaaattcttttaagaaaaaaacctacattgtatcctcctaaaaaacgaacaatgatgttgctcccctccaaacttggaatctttattataatagtgcaaaaattttaacattacaattggattaagacagaaagacttaacaatagtagaaaaatgtctacttacgtggtcatttccttctccagcttcttgccatactctgttccgtctatagtactagttcacctcaaaacaaacataccctgttatgtctctttattttccattaaaaatatgcatataaatagaacttcctccacagtccagtattaataatctgccttccaatgcaggggacgtgggttcaatccctggtcaaggaagtaagatcccatatgctgtgcatgacaactaagccctcacgctctggagcaggcatgccacaactggagaagaccatgtgccccaacaggaaaagcccacgcaccccccaaaaaatcccacatgctgcaactaagacctgacacagacaaatgaggaaatttcaaaaagataagcatataaaaatgaatcaaacttgtctcacttaccaacttacacaaaaataggtcgaactaatttaattgtaattatctataagcatcagggcatctgtgcaaatcctttactactggctgtatgcaaccacacacacactaagttcagtgaagcttatttgcaagaagaaagctgcattgattaaggagtctgtcaggagagatactagtgtccttggattaaaatgttttatgaaataccactccaagatgacatggagaaaaatattttctgtgggctttgtcctgataaatatcagtgcagacttgaccctaaaccacttagtatttcaaactgaacaccccatttcttcagtttttattttaaaaacgtaagatacaaagaagaatgtaataaacaccagtgagctcattatgcagtattagcaaatgttaacattttagggcaaggtacattaaaactctaacacctcccctccacacacacacacacacgcgcgcgcgcgtgcatgcgctagccactgttcatattctggtgtgaattttttttcagattttattttctatatgcaagtatacacagacatgctcatttcaaaagacagaatcacagttcacattcagtggccaattttccatgtcagtacatgtgtatatggggcctccccggtggctcagttagtaaagaagatgtctgcaatatgggagacctgcgtttgatccctgagttgggaagatcccctggagaagggaatggctacccactccagtattctggtctggagaatttcatggaaagaggagactggcaggctatagaccgtggggggtcacaaagagtcagacacgactgagtgactttcacatgtgtgtatatgtgtatctttgttttttcaaagtctcatctatttcagttgcttccagtcttactgttacatgcaatgccgcattaaacatacctgtccacatatattatatatggtgaatatttttgtaggatacattatcataatcaagaggccggatcaatgcggggagcacg

SEQ ID NO: 30866 - DNA, 2253 bp, Bovine  19866880542818
  misc_feature (1)..(1): n is a, c, g, or t
nattatttttacagatgatcaaaataaaaatacaaggagcaggatgaacaagacacaattttgtcttcaccttttaggatgaaacaatctgatttgtttaatgacagcactgggctctaaactcacagtggtgaaaagcaattgaataaattactggattctgtttgcaggactatagtcaaaaaatgtacacagaaaaaaattctcttcagttatctgagggaatggagagaaaagataagaggaaaacctcttttgaaaagacagtatgggtgtgcatcttctctatctgatcagaagaaaagtctgtggtgtgtaagggaaattccgaccaaaaaatattatgaaacaatgcatatctgaatcttaaaagagctcattacaaggaaaaaattatattaactatatgaggtgatggatcctggctaaacttattgtggtaatcatttttcaatatatacatacatgaaatcattatactgtattcctaaaactaacactatgttctgtatcaattacatctcaactgaaaaaatcgattatgaaaaaatgtttttcataatctcaacccatgcaaataaagctatgctttgtccctttctctgtatttttacttcttaatctagacactggccagctccttcccaattgactacaactttgtctaataatgattccttcccattattggattcattcttgctcccataactgtcttctccatttgaccgtatataattctatcagtttcataatacactggtctatctttaatatataggaaactactctgtttttcatcctttcctacaatccacctattctttcatccacctgaatacctgttgttcattctgtctccctgatacacattcaacagagtggcatttatgtatgagtttttttacaggctgttttctgctatttaaacacgttcgaaatgacatttttataaaaaccgcaaaatatggatcaaggaattgttattttgcctatctaataaaaacatataactactcttctcaaagtccacataagctctaatgtccagcaattaaccaagctgcttgataaaatactgaatttcctattactattcaagcgacaattagatgcctattggaggaatactgtaggatgggcacagctcttggactaaagtaggaagctagattcaaggtcccttataagtaaaattctgttcttacttgtgaggcatatactgaaatacaaaactgtcctctccatttgttagtaggttcatgaaagtgttatatgtgttatacatatgcacgtatacacacagcctgttgacccttgaacaacatgagtctgcactgtgagggtctacttatacagattgttttcaatagtaaatgccacagtgttacacgatctgcagttggctgaacccaaggataaggaactgcaaaaacagaggaattatggacactgagggccaactgtaaattataggcagattttcagctacaccaacggtgggcaaccttaacctcctcattcttcaagggtcaactgtacttgttttctgcctagacttcatcaggtataactaagaaatgaggaaaatgtttccgcatgaggacaaaggcatcagttttcaaaaactggcaaaaagagaatattattttcttaaaaaaatgaatgcagtgacatttaaaaacctaacataacattttcaggataagctgaacacatacctttggggaatgggttgttttgggcttggagtcgaattttaacaacatcaaagggtgtcactatgaagatacataaaatttcaattaacaagtgatatctgtaatttgtatagatgtttgtccaaagaaaatacacatgatacctatataatggttaaaactatttatcataaagtggttttaagtattaacattctaattttttgcatttgaattttgtttaaagaggaacaatgagaaaaagttgttacttctttcacaggtactaaactctcattttggagaaggcaatggcaccccactccagtactcctccctggaaaatcccatggatggagaagcctggtaggctacagtccatggggtcactaagagtcggacacgactgagcgacttcactttcacttttcactttcctgcattggagaaggaaatggcaacccactccggtgttcttgcctggagaatcccagggacggaggagcctagtgggctgccgtctatggggtcgcagagtgaacacgactaagcg

SEQ ID NO: 30867 - DNA, 2548 bp, Bovine  19866880576812
  misc_feature (1)..(1): n is a, c, g, or t
ntaaaaaataggtggcacactagatagatttggcccctcatctagaccatctccttggactcaaaaaatagaactttttgttattcttaaggagttttaagaaattcttctacttctgttaagtcttctttatacttttactagatatttctgctctgcttgctgataaaagttgtgtcagtacctttaataaatattaagtgaatacagtgctgttcaatatacagtaactgtacattgacaaactaagcctcattaagtttataccaataaatctaaaatttttaaaaatgctttcatgtggatataccctagaattggtaataatgcagtaggttgtttactccttatatctgtttctagaccaatcataaatgcataaagactactaaacatcgtatttctgcaacattcagaatgactgctcatgattgatttaatagaatatttggggaggaagcatatcttcaactattaaaacgtatataggctatggtaagaatgtggaatttcctaaaaacattctgcagcaaaattctacactagtacttatacatcaactggttattccataatcagttatcttattacctgcacaatttttatctctacaggcaagtcacctaaacatctctggactttcaaaggagagagtggtgttggactagtgtttttatattttatatcctccatttgttcaagaggagtcttaagtgaaagtatcaaaataagtagaaaaggaacccttctggttttgaaggggcagttggacttctgtatttttctttgttatctatgacatgtataacaaaacataattagtgagctgttgtaaccacatggctcagtggtaaagaatctacctgccaatgcaggagacatgggttcaagccctggattgggaagattccctggaggaggaaatggcaacccactccagtattcttgcctaggaaatcccataaacagaggagcctggcaggctacagtccatggggtcacaaagaggaggatattgagcacacatacacaatacaaaatagcatctcaagaatattaagaggctctatgaagaagagagtttcaggtcaaatatgtgtatgaaacttaaggactactaatttaataaatcaaaacatggaagaaaatttttaagataataaaaaaattaggagcagacccaaatcccttcaccatcatctttccttggtttatatggtcaaagcagttttaaataccaagttcaagatactgcttgcctgtggtagaaagtggaagaatgtggataaggagtggcacactagagttttcagctatatctgtaaagtttcattacttcaaaaacatctaaagcaaatttggctaaaggttaagagttctatatttttgtaatgttttcttaattaaatttcataaataggtttaaaagatactcaaagagttttgatagcaattattttaatttttttcttttttttttcctttgaagaataaaatacagtgttggatccctttctcctattattgcaaatattgtgaaaaggtctggaactaaagagctgaaattgctgcataattctcagaaagactccagggaaaatgtacatatgatggagcagggtttcctatataaagaacctgttcgggaacctgaacaaaagtttgtgtcttcttcagaacataccctccgccgttctagtgaactgagagaacttgatgataaaacatctcataaatgttccatgttaaatccagctgaaaataacataaaacaaaattttacacctctgcctccatgtaaaagtaaacaagaatacattcttgatgtttctgaacacaaattaattttaaatgaaagtgacttagaagtaaaggtagatcactgtccatgtaggccacagacatctatacaagtttctaatttcaatacagatgatagcgcatctcaatggaaacaaaagttagatactgtgctttttccagcaaagcatctgaaagaaaagaacctttattcggtatttcatcgtgattgtgacctgttagcaataaacagttcacaggagcacctgacaatttgggcagaaattccatccgaaagccctcctgaggaacccaacacgtgtgacatcaagagtacggatagtttgccttctggtaaaatctgtcggaaagtgaaaataccattaggaagaaataaaaaggaaaacctggaaccaaatgtagagttagataaaaaaagaactgaatttcttactacacaagaaaacagagtttgtagctcaccagtaaaatctctactggatttatttcagactagtgaagagaaatcagaatttttgggtttcacaagctatactgaaaagaataatatatgtgatgttttagatattttggaagaggaaaattcaaatctgttaacaatgtttttctcttccccttcaacttctacatttactggcttttaggtttaaaataaatgcctttcagaagcaatggtagatcatattcttgacatttttataaatatgtataaaaattcttagtttgg

SEQ ID NO: 30868 - DNA, 1569 bp, Bovine  19866880596680
  misc_feature (1)..(1): n is a, c, g, or t
nctgggagggattgggggcaggaggagatggggacgacagaggatgagatggctggatggcatcaccgactcaatgcatatgagtttgggtgaactctgggagttggtgatggacagggaggcctggcgagctgcgattcatggggtcgcaaagactcggacatgactgagtgactgaactgaacctaactgaatctgagggaaaataaaaagttatacaagtaaaagaaaaggtataattatggtgtacatttactaagtcctaacaatgcatgatttgttgttaatttaactagttatcaacaaaatgtataatggaaggaaaggggaaagagatgaattctcaaattccataaaaggcagtcaattgataatactgaaaataggaaaattaaaaatagtgatacaaactcattatttaaaaatatgtacataaataaagaaagaatcagttaagagtagaaagtgattcctccagggaaggatataagaggagtaggggcaatggatcccttcactgcattgtaaaaaccaatttgtctgtttaactcataaaactatatgcatgcataattttgataaaaacaaataaacaagaatggaaatttttgtaatagcattgacatggtactatatgaatagatgatgaatatacattttcagtccctatcctgtttatttaattgtttttatcctgtttctttcttactcctgcctaatgtatgggttgctgtattgaatagttgttgccatagtttagccattctcaaatatacagttgacccttgagcaacactggtttgaactacaagggtctatttatgtgcatgttgttttcagtaaatacagatttttttttttttttaataaatatatgctacaacactacataatcccccagtggttgaatctgtggatgtggaacttggattttcaactgcatggagggtggtacccctaccccccatgttgttcaaaggtcaactgtagtttgtaaatagaacaatcttttggggaaatgtaaccaaaactaaaaaattctcatcattgtttgaaatgtatttaaaatcttgaaagtacttatttatcaaatcaaatgttattaataatggcttacttgacttgtacatggcatagtagccaaaggaaaatgataaagccatttcaggcccttgttataataattatgtttaaatcctaaggaatataaatatctctgcaaataattagatcaaaagattcaattgctttctccatttggagattgaaaatgtttatgctacttttaaaattaggtaataaagagaaaatagagaaagtgatattgcctactttaaaatttttaaatgtagtctcaagataaatgtaaattaatggaatcctgctttctttttgctctcaatttatttttagtggtgggcacgttaagcttgatgaagatgttgaccttggttatgtggaagacgggacaccctgtggtcccaaaatgatgtgtttagaacacaggtgtcttcctgtggcttccttcaactttagtacttgcttaagcaataaagaaggcactgtttg

SEQ ID NO: 30869 - DNA, 2392 bp, Bovine  19866880608317
  misc_feature (1)..(1): n is a, c, g, or t
ntctctggaaagaaaagaaggggagatgggctaggtcttacagtgggaaaatcccaatgccccaggagtcctctggtatctgcaccctctatcccacagatgactggggcagggtggagtcggctagtctcctggatgtctgagccctgctgtcccatgtgactcctgagggctcccagatagagaggctgccactccatcatggggaattggaatctgttccagtcatccatgattactgtctttgattcctcaggagtgcagcagacaaagagctaactaagctgccctgggtgagaaccccgcaatttaacatggaatataagtctttatcaaccaaacaggtcttctgagccagaagccaggcaggcctccagcctgcgttttctgctctcgggcttttacttgggcttgttgtccagtcctttgactcactggacccctttcactgctgtgatcccttaagaattgcatcgcagactgtctgttattgctgccggacacaacagcaccatcacccggtccttatctccagccctgctctggccccctgccagtctggtgcatcctcgctctcacaggtcatcagcaccagtctccagctcacctgactctgtattttccattgtttttcccagataccatagtcattattggcaagactgggaactacagtcttttataatgtataccacctgaccatctgtagccatgtctcctccctttagaagcttatatttacacagacaaaatatcacacaaaataaggaccttacactggttgtggaaatggagtgataagaacaataacatttctagaatttctagggaaaaggttggagtccaaaatatgatttctaagtattcctccccaggggtattgtgctttatagtgatactcctttcttctccttattttattctttatgttagttcaatgacctcattatatattccagaaaaatacatggaaaaaaaacattcaaaatgcacttggacaagaattaaaagggaacatacgcaaataattatttttcaaaaaccaattgatcaaattgctaagttatggttgatttctcttcccttaaaaatgcctgcttttaatttcaagatatataggaatatcaaatcattgtcatatgcctgaaactgatagagtgttttgtcacaattatatctgaatacataaataaaatttgggaaaaagcttctctaaaattaaaactgtataaaggaaaaaatgctcactttttaaaacaaatgttattagtgtgatgatcattaatctggagaataaagttcctgaaagaattttatatcaaaatttcagctgtattcactgatcttcattgttttttttctccccccaggtgttgctggtaccaatattataataggcataattgctggcaccattttagtgctggccctcatattaggaattactgcatggggctataagtaagtgaaatggctcagtatattactgtcaaactgtactttaaaatatttatctaaatgattctaaaaatttttgtatcattggataaataaacctgcagtgaaaatcagtctggttcagtattcaatccatgatgatccttggcatgattagaggtaacagtaatttatcattttttagattttgagattaactcccatctattctaaaaatattgaatattattttaaaaccattacatgaaacaaaatcaatctaaatcgtgtctcatacaaaggctgtgttggttggctgtttagtgatgcagattctcttgacttaaacccattcctccacatctaggcaggatagtgtatgagacagcatagcgtttagtaacaagggtgatatcaacaagatcaagagcatgatcagctccttagtgcttcctgctatgagcagggatcctgccaagagccaaacctctccccaaccaatgtgaagaagacattgttatttgttaaataagtgagtgttttgtgggaaggaaaaactcttcagagatgtaatgtgttaaaattaaaattcaactataagttacaacttttagaaacctaattcttaagcttcaaagttcagcttacaattctttgtttctatgtgcaagatttaaaaagttacacattatataacttttgaatattggatccccttagcatttagctggagaaggcaatggcaacccactccagtactcttgcctggaaaagcccatgggcagaggagcctggtaggctgcagtccatggggtcgctaagagtcggacacgactgagcgacttcacttttacttttcactttcatacattggagaaggaaatggcaacccactccagtactcttgcctggagaatcccagggacgggggtgcctggtgggctgccatctatgg

SEQ ID NO: 30870 - DNA, 757 bp, Bovine  19866880611600
  misc_feature (1)..(1): n is a, c, g, or t
ntcagattaatgctttcattcatggtccactctcaaacgacctttagtaatttaagaaaattattgttacattttccatacatttttataatatagaaaggaaatacaggattccataattgatcagaattttcggatttgttctaatgtgtaccaaatcttgtgcatcttaacacgctgctgaatgcagactgaaacacgacatctgaggacagtgacttctcctcctttcttggagctcttggtataaacttgatctgctaatgtgacttcaggtttctacacagttcatttcccgctagttatagagatagtctgttagtgtttgcatgaggtgtgtcttgatcttcagcagtgttcattgttcacgcaccctcccctaaacagaatgctgagctacatgctactatttccatgtgtatttcgttgccttgatgtacgatacttgttgcatgtatattaaacattttgtaccatgaaaaaaaaaaagagatacaatctctataaattattccctggtggctcagatggtaaagtatccgcctgcaatgcagaagaccgggtttgattcctgggtcaggaacatcccctggagaagtgaatggcaacccactccagtattcttgcctggagaatcccatgcatagaggagcgtggcaggctacagtccatggggtcacaaagagtcagacacagctgagcaactagcactttcaccttcttaaatgatttgtaatttcctgagaattctagtaaa

SEQ ID NO: 30871 - DNA, 3280 bp, Bovine  19866880645903
  misc_feature (1)..(1): n is a, c, g, or t
ntggacattatgtagggagggttggatggaatgagttttgtccatggttcttgttacaataaagcagtcagagaagagagaattctgtactctggatgcattgtgctttagaaatgaaaaaggaaggttctccataataggcatttccaccggagagcaatcacaatgcccagttggttctcatgcttttgatagttcttaactgtatctaactcttctgatgagttcctgtctcaagctcacaggttagtattaactcggcctgcaaggaggcagattcctcttgttgagagagttattttgatctgtacactttatcattaaaacattttctgaaagcctatcttgcagcattttccaaatcatgttccatggaatcctggtatccagtgagatgtaaaaaggttttgcacagataaaagcaatctgtagtcaaagtattcagtgatattctgcaagctttacctcttatcataaagatttagaattcaattaacatataaaaggctcagagaaaacctacatgaaagaaatctgcctaactttgataaacccagtattttccaaactttgcaaatataatcttggttttattcatctagtatcaatgggtattacatgatccacatttttaaaaaggctgctgtatacagacgacataatttactcagatatttgattccacacatcacttaataaataaagaaggaattcacttccatttaggacaaaaaccataccattttcagaagcatgaaaactctttttaattggggaaacttttttgcatacttaattcataatttcaggtgctctttgaataaactagagaactgaagttggaagacagtggcccagcttaaatcccattgtgtgaacacagctgtcattaagtaaatcatcaactttctttaaggtaagacacccagataatagatgcaagaaagtcaggagcagaggagtcacatacaattgggttgcataatactctgtgctcagagcaagactgtgaggggctgacccatgaagcctaggggcaagtcaagccaatgaacatatcaatcaggctgtcaggagccaggaaaattcaatggctagaaagcaagttaacacattagatcaaatttccagaatcctggcggagaacaaatactagaacattagacacagggaggggaaaagacagacagaagcaagggttcaggaactagacaagcaaactgaagaggaggcacgaagtactaacaaaaattggaagactggatttacatgtatacaccattgatactatggataaaataaatgggcttccctggtggcttagatcatggcatctggtcccatcacttcatggcaaatagatggggaaacagtggaaacagtgacaaattttatttggggggactccaaaatcactgcagatggtgactgcagccatgaaattaaaagacatttgctctttggaagaaaagttatcactaacctagacagcttattaaaaagcagagacattactttgccaacaaaggtccatcctcaaagctatggtttttccagtggtcatgtatggatataagagttggactataaagaaagctgagcaccaaagaataaatgcttttgaactgtggtgttggagaagactcttgagagtcccttggacagcaaggagatacaaccagtccatcctaaaggaaatcagtcctgaatattctttggaaggactgatgctgaagctgaaactccaatactttggccacctgatgtgaagaactgactcatttgaaaagaccctgatgctgggaaagatagaagtcgggagagaaggggacaacagaggatgagatggttggatggcatcactgtctcgatggggatgagtttgagtgagctccaggatttggagatggacggggaagcctggtgtgctgcagcccacagggtagcaaagagtcagacacaactaagtgactgaactgaactgaggacgacacagaagcattttaagcactgcgtgtcttttcattttcactgtgcagaaagcaccttattcaaaggatgaacctatgaacccagatttacactagacttcactgattctgaacgcttaagcagttatcatttagagaaagaacaaaatcaaaccatcttgataattgaaagcttcaaagttttctgatataaataacacactaaaaaacacactcttctttttacaaaaactattttgagtagttttaattaattcagttccgtaatgaaaacaattggctgtcattcttcaaccactcttcgttgtggagatcagatatcctgttgtcacttgagtaattctttccccccatttctttctgcttctctggatccaattttgatgtggatcatatctcttttttaaaaatatttttttctgactctggtcccaccctaattcctctcctaaagcttgtggctcagattgtaacagacaacgaagcttaatagaggtcacagaaaatcccagttctcactttgcaatgcaccttgcatttaaagtacagaatcacacaaacttcctaattaaaatttatcatgtgaatacatattcttcaaaggcaaaggggtgaaatggctttgaaacaggcctctggcagtggttttgtagaggtctttagttaactagtaacacatggccatggatatgaataccagacgattttagagaaacagcagatgtggctttactcctccttctgcagaaaggatcttggaaatcacagtgcctggatggggaggcctagggttttccctgaagtacacggctgatggctactgggcagtgtccagaagggctctccttttgatgcccgaaaggtctcttctcacaggccgtgatcttgtctgcagatactccttcaaggacatgttagcttttgtgataggttatctccgtcatacaaattaatacagagtttctaattaatgtcttcctcattaccagttttcctagcccagtgagctcatctctggctacatattacaatgacttggggatttataaaaactgccaatacctgggtcccaaaccgcaaactagcagtttcccagtttggtccctggagcaacagcacccacaggatcctcattcagacctactgaatcagaacttctggtggggtgggactcagaaaactgttttaacaagctctctgggtattctgctgtgtgttcaagtctgagaaccactagtgtctttttcccaggacattagtttcttctcctgatcttaatatagtccgga

SEQ ID NO: 30872 - DNA, 3921 bp, Bovine  19866880698975
  misc_feature (1)..(1): n is a, c, g, or t
natctaagcttttcctaggctgtttttgtttttcttgtttgccttgtgtgtttgtgtgtgtgtgtgtgtgtgtgtgtgtgtgtgtgtgtgtgttttaatttttggagtagccgcagggaagtaaatttaacagattttaaattcactctgttgggcgtttggactggtgaaccatccacaagattagtggaggagaggttattatgcttcagatgaccttgatttcctggacacatctgattgggctagaaatcgaaactttagcatttgattgtatgtgtgtgctcattcatgtcctactctttgcaactctttgtagccttccaggctcctctgtccatggaattttccaagcaagaatactggagtgggttgccatttcctcctccaggggaatcttcctgacccggggattgaacctgtgtctcctgcattggcagggggattctttaccactgcatcacgtgggaagccaagcatttgattggccagatacaaagaccaacagtcaatggggtgacctggaaagagaattctatctaaaagtatttctttaaattggatactgactaaacaaaccaatgagatcttctctcacagaggtctaacactcacagtgaaaagtagcttagaaagacagtagcatcaaagataaatggtaatcataaaattacggtatctgatgagggaacaacggaagttgacaagtcattgtatgcagggaaaatatatcagagttaaaggcatataaaacatgttttataaattactagttttctttaaaatgccaactttggaaacacgttatattaaatcataaaaaaggagaaagaatttatgttttgaaacaatccttcattatactggggctaaacagatgagtagataatagaaaaaaatctttcactaattttctggttctgaaaaataggagtcaatccaaaaccagcagatgatcatgatccatctgcacaaaaacctaacaaatgaagtgaagagctcaatatggttgaatcattatcaaatatttccatgacacttcaagaaaagcataaacatcaggggggctctcctccatttagactattatcattcaaatcttgaggctctcaaccagcattatctgtaattttccaaataacagtggaaattaatttttgtgttgcaatttttttcaggaattatttgccataaatcaataattatttcaacttagaactaaaatagttttctttttcctttaatatgcctggaaatatttcttagtccagaatagaggccttaatatttaaaggctcctataatttatataaatctattgttaaattattaaaacaaataaataaatttaatagatttttgcttttaaataagtattgttatacacctgtttataaaataataaataccttattgcagaaatcctaagtattcaggagtacatgacaaagagtaaaagtatccccttcctacacactgtccaggctgcaattgccacctaaaaggtaaatacttttaccttttttgtgtgccacagattttgtgtaccacatcaggaatcatctatgcatatttaaggaattgtacatatacataaataaacatatgttctttcagtgtacatatagtttacccacactgttctgccacttgattttttttttcttaaggtaaccttgacatcaacctcattctttcaatgatggcagaatattccatcacaggcgtgaatgataattcatttaaacaaacctgtacaactggatggttaggttactgcaacaaacatcttttcatatattttttggtgcacttctgtcagtgtgtatgtagactagactaccagatgtggcctggaaggtcaaagaatatgtgcatttaaaattttagtggatattttaaaggagaaatataactgtattccattatacatatctgttttaaaaattgatttgcattttaaaataataaaatgcagtttattaaaaattatatatttcaatagagactaacacttaagccaacttactcaaatcttaccaataataagggttctccatatcttcaatgactttcttgaggaaacagatgctttatggaagtaggtcttatagaaataataaccaaagacagatgttgtaagaaaagaaaaaagccagcacatcccaagagacttcagttctttattcaactgccagtcatggttttattccttactatctcttttgttccagtaatccattgtccttgaaactttcctcatagtacttgatttaataacacactcataatagtacagatgtttatttttagataattagatagttgtagctaaaaaattatctacctctataaaaatgaactacatattagttcacatgtcatattggtttttatttcctgggggaaaaaaagcttattgcaaatttaattctagggaagtcaaaaataatcatttatttgaaaaattcaaagacaaactacatttttattaagcagacagaaagatctcaaaagaaaagtagaatttactataaataggataagatgataatgcatgaaagttactcagcctgggttataaaactatgaaaactcagtaaggaaaaccaattctagtacagccacaaggccatggtcatttgctctcaatccagatcctcataggaaattatacctttatcagctccaagatggactacagtcaccttttccaaaaagtcttctcagattccctcctcctcataaaatgaaactttcttgtgcttcatccagcctggcatttcacatgatgtcctctgcatataagttaaataagcaaggtgacaatatgcagccctgaggtatgaagctgcatgaagcacaaactggaatcaagagtgccaggagaaacatcaataatctcagatacgcagatgatgttacccttatggcagaaagggagaaagaactaaagagcctgtttatgaaagtgaaagaggaaagtgaaaatgctggcttaaaactcaatattcaaaaaacaaagataatgatatctgtcccatcacttcatggcaaatagatgaggaaacaatgaaacagtgacagactttattttcttgggctccaaaatcaccgcagatggtgagtgcagtcatgaaattaaaagaagcttgctccttggaagaaaagctatgaccaacctagacagcatattaaaaagtagagacattacttttctgacaaagctccatctagtcaaagctatgatttttccagtggtcatgtatgaatgtgagagttggactataaagaaagctgagcaccaaagaattgatgcctttgaactgtagtgttggagaagactcttgagagtcccttggactgcaaggagatcaaaccagccactgtttccccatctatttgccatgaagtgatgggactggatgccatgatcttagttttctgaacgttgagttttaagccaacttttttattctcctctctcactttcatcaagaggctctttagttctttgtcactttctgccacacgggtggtgtcatctgcgtatctgaggttattgatatttctcccagcaatcttgattccagcttgtgcttcctctagcccagcatttctcatgatgtactctgcatataagttaaataagtggggtgacaatatacggccttgacgtactccatttcctatttggaaccagtctgctgtgctatgcccagttttaactgttgcttcctgacctgcatacagatttctcaagaggcaggtcttggtggtctggtatgcccagaccatccccaggcagaagatagcagaaagattgagatggttcgaatcatcatctgaagaatgaaagtatcagccatatcctgggccttctgcttggtaataaatgtactatttcatgatgactgatga

SEQ ID NO: 30873 - DNA, 741 bp, Bovine  19866880724305
  misc_feature (1)..(1): n is a, c, g, or t
nctgaatggaaaaacagatatttaaagcaaaattcaattcccctggacttcttaaccgtggtgttgcatgtttagagaagaataattagtgcagtgaagaaagtatttttcttccaccatgggctgaagtttgtgaacagagaaagaaatcatgcctgactttgagaaatgggacaccatttaatctcaggtccgcattgaatcactgctggtctctgcctctcctttttttggaggtgggggggctgaatcaccattagctttgtggtttcacaataagaagcttctttgctgtgggcaacatgcatgacctaatgtcttgcaaaatccaggggaagtacatgcagtttccttctctggttcaagggctaagtagagtgaaagagaaaatactaagatggtggccgctgataagggctttattagatctgtctgaaaaagagggccaaggaagcaaaaggaatgagatttttattctggtttttggaagtgcaggtgattataaatattgccatggtaaattctgtagttacgtgtactttttgatatttttttttaaccaacctggacatgtagtgtggagaattattttgtaaaacaataaaaatttcacaatagattagaaataatcatggactggatatatgcaaacttatacagttgtcataaaatcattcctccacaaaggaataggtgtaaaaaagattgagttaaaaatgagggatatccacttgggatttt

SEQ ID NO: 30874 - DNA, 812 bp, Bovine  19866880730859
  misc_feature (1)..(1): n is a, c, g, or t
nccctgggttgggaagatcccctggaggagggcatggcaacccactccaggattcttgtctggagaatccccatggacagaggagcctggtgggctgcagtccatggggttgcagagttggacatgactgagcgaccaagtacagtacagaacacaggtctgcatggataatgacaaggcggaggttagtgacagatagtatttgccacttacattattcaacagggtttttttggccacatggcttggtttccaaccaggagttgaacctgtgcccccttcagtggaatcatggagtcctaaccctgattaggacttttcctagccaggatattcccttcaacagctttttaagtgtgtctattcatagagccatcaaagtatctataatccttaaagcctgtgttaagtttctaccaaggagaatcctgatatggatcaccaggttttttgtgggttttttttggtatccaagtgggtataaaccatttacataagaatactccacgtataaagctttcactctgatgtaaaagcccttctaaaaaaggggagacaacagttgtagtctgatgaaaaggttttagtatcttacaatgaaaaatacatcatgtgccttaaacaactggcacacctgaatttacataaaagaggcttaacaagaaaataaggcttgactgacagtggctcaaggaagttctaaatggtgtttaacagactggatcttatgataatatcatctcaaagcatttattatcaaaacaaaaacttcagttatacataaagtaataaacctttacaagagctgttaa

SEQ ID NO: 30875 - DNA, 1843 bp, Bovine  19866880904433
  misc_feature (1)..(1): n is a, c, g, or t
ntttttagttttgccaattcactgtctgggtgacatggctacatttatctcattgctgcttcccctatcaatgccaaagcatcatggaatagatcaaagactagaagtacttctccctgaataactatgccatacctccccctgaggaaagtgaaaaggaggaggaaagaccgattaggcacttcattgtcattcccctgaagagtagagctccatgatggtagaagtcttgtgtcttttttttaactgaagtgtagctgatttactacgttgtgccgctgtctactgtacagcaaagtaattcagttatacacatatatacattcttttcatgtattcttttccattatggtttatgagaggatattgaatattgttttacaccatgctgttggtgcctagcacaaagcacagtgcaagatcttcggtactcaatttctgcctgttgaatggacttggagaaaaccccattcacagcattatttgactttttggttttgttttttgccgtttttaatttttggctgtaccgcgtagcctgtgggatcccagtttcctgaccagggattaaactcgtgtcccctgaagtggaagggcagagtcataaccactgaactgccagggaagtccctatttttcattttaaagtatatccaaacaaaaatgtattttaccagaacaaaggtctttcttgagttttcttttcttaaaatttgtattgagcactgtgtggccaggcatccgctaaatgctggcaatgggaagaggaaggagcacaaagtccctcaagttgtctgcatgtgtttccaggggtgacaattattagtataactttagtatacacaacagatattttgtttgtgttttttaaaaacaaaactcagcttttacgtataaaatgatcactatcctcttcaaagtaaatacccaagaaaactataaaacaatttcaatggtgccaagaaataaggttgttagaactttggcggggatttgtcctcagattctactgacatatgctttgaacgtcctccagtgttagcaagtattgccttatgttcataaatttaagtattaggaataggtcacttgatattagacaatgtatttattcttactgcaacagaaatgtctcatttttaaaattagtgaatgtagaacagttagcttagtatctggatatctaagctttgaacatttacttctgttttctcattattagtagtaggctagtggctgacttccttgagagaagtttcagctaaaaatgaaatatggctagaacgtaacaagcccaattttcttgtgggcttagcaaatttgttctgaagattattcctagagggaaatcccttcaatattcaatgtttatttacttgaatcactcctagtatatatccatttaatcatttttttactttatagccaaaccttttgccctcagacatcaggagtgaggaattcctaacacaataacaatgttaccttaaatggtttttgaacttgcatagttcataaaaaaaaataacacttccttttggtttttaattgctttatgattcatagactttgaacttgcccgatcttaaatgaactctttcctcagaacaaggtcaaatcagttcaccaagctgacgtttgctcacttatcttttcaaaaaggttttgtattatttcaaaaaaaaaatctacttaaaatatgcttccgtgtggaaaaaacattgtgctaatagactgacgcgtagtcgttagatctgattttatgattataactcaggttaggaaatgcttcactttatattggaatacattcatgcatccagtcaacaatattaattgcaca

SEQ ID NO: 30876 - DNA, 2155 bp, Bovine  19866880943892
  misc_feature (1)..(1): n is a, c, g, or t
ntcccctacctgcctcgctggactctgagtcgcctcagcaacagttctgtgactggtgtacagggttcctcgtgtattcatctcaccagctcaaggaagagccagtctctgactcgtgtacttgtcaggacatgatggggctgagcacttggcctctgtgggatgtccatcccacgtattaagatgaaaacaaatgggacggcttgaaaagactcaggctgacagatactggtcgccctgcttttcatggtgtcattttcaaccataaagttacaatctcacaagtcagattttggtgcagtgtgaaggaagatggttttctttctctgtgaagtggttgttctctgcatgctttttgagcccaaggcatcctgtttagctcttttaaccaaggtctcccagtgtggttccaggtgagctggctgtagttccccactgtctgtctaacaggccaccctacaaagaaggctggctgaagaagcctcctttcttcagagagacctgggctgaatatatgagctcacctcctgggctctccaaaaccacatcagcaaatgtgtctccagacaccttgagacagttggaaatgtcgccgtgtgaaacaacagactgccatacagtgtagtttccatcagaggaataagacagtatttgtcctcagttctgcggtagtgggtttggtgctgacttgaagcacccattacttcaagaaggagtatgagcggaggaagagttggatggatcaatgaatgagtgacaggccttgggccctagggaaggcacgataccgccccattgaagtctggccttcgggaagcctgcctgagctccacatgctaaggccctcttgaccccaagtactataactaggtgtaaaatgggtcagactgtgaatgatttcgtcagtggtactgaaacccttaaatattttctttgccagatcttcaccagaaatgtggatgatgaaaccaaacgacagaacagtaacttgttttcactgttgtttctaatccttggaattatttcttttattacatttttccttcaggtaagtgtccacattttcattttctttttccatttggagaaatgtatcattacccaactggcgggatttattaaacatctgtgtgatttgctgtttagtagagtcattcctctagtcactgggctcttagcagtcagtttccttgacttaaatcaaagatgttttcttcctctggcttcctcttacaccccaagggaaggaacccttgcttccttccttctccccaccttctcccctgactggaaatgttcatgaagtcagagggaacggagtgtttgatctaacacaatgattggaagtaaaagcaggggtcttagaaatggaagctaaggggagctgtggacgcatgtttggatatataagtactgccatccagttctgatactcaagtatcttccagtgttctaaaagcaagaacaaacctcagagccccataagccagtcatgctgattttaaaaatatctgaagagtttgtcattcttttcctgaagaaggaagctttctaatgatggaagaatgtcagtcttcaaacaaaaactgtagtaagcatattcaaagtatgcttttacagattgcagatcatttggttgaaatgaaattgccaggagtttaagcactctagatgctccacatcgtaaggcagtatgggcttttggtgttaggtgtagggtcaggtatgagttgcaccagttcctaattctgtgtccttgggcaagtaaataactgaaactgtgtaagcctcggttccctcatctgttagaatggggagaatggcagctgactcttgatgatgaaaagaggtaaggtcctacttgtgtgtgagatgattataaacataatcacttattaaattaatgagtggttgcagctgctgctaagttgcttcagtcatgtctgactctgtgtgaccccatagatggcagcccatcaggctcctctgtccctgggattctccaggcaagaatactggagtgggttgccatttccttctccaatgcatgcctgcatgctaagtcacttcagttatgtctgactctgtgcgaccctatggacagcagccctccaggctcctctgtccatgggattctctaggcaagaatactgaa

SEQ ID NO: 30877 - DNA, 1666 bp, Bovine  19866880955791
  misc_feature (1)..(1): n is a, c, g, or t
nctgaaaagtggtaaatgatgtttgtgtcctaatgagatagccttgttagaagttaactttcaactaaaacataatcgaatgatagtaactttctggaaaacaaagtgttaatatgtgctgtactccttaaaaagtagtttattttctttgatcttgttaactcacttttaagaatgtctaagacaataatttaatatggacataaatgtgcaaggatgttttcacagcattctttttagtaagaattgaaaacttagttcagtaaaagctttgttcagtggtcctttaaagaactcattgttaatatatatatttaataaccttggaaaaggctcttgatatttgttaaagtaaaaaataaggctgtaaagccaaacatagaacctcaacccagttttgttaaacaggtatatttttagaaaataacagcatgtaaggtattatgtaaaatacaccaatacgtaatttttcattaccttctttatcttttcaatattttccaaatattctttagttgtctcaaatgacaattatgcagagaaaaatataaacattatatatttttaataatagcaattataatgatactataataatttatatataataattatgaactgaaaatgtgaccatcatagaagaaagagcacttcaatagaggtaaaatactgagttctcaggttactttcgctcctgtaaagctgtgtggctttaggtaagggccttcatctgttgacgcttgagaatctctttctgcagagaggagtttaaattagctcatgttctttccagatctaaaactcaatttgataacgtacttagtatctctttccatagcaaagaaactcagaggtcataataaatattatttaatatataatattaatctctctagtggaattccaactcgttgccactgctggcttttgtacctttagtgacggagtgttctctgttacagattgccactgaagcgatagaaaacttccggactgttgtttctttgacttgggagggagaggtttgaatatatgtatgcccagagtttgcaggtaccatacaggtaatagccactgatgagtaggaggggagtatggggactttttcaatcatcaggtttgttttcaggaaaattactttgaccagaaggtagggagtaagtggagagacttctagaagggaaccaattgggaagcagttgtaattctcctacttttgcattccagtcccgtataatgaaaaagacatcttttgggggtgttagttctagaaggacttgtaggtcttcatagaaccgttcagcttctggtcccatcacttcatggcaaatagatggggaaacagtggaaacactggctgactttatttttctgggctccaaaatcactgtggatggtgattgcagccatgaaattaaaagacacttgctccttggaaagaaagttatgaccaacctagatagcatattaaaaagcagagaccttactttgccaacaaaggtctgtctagtcaaggctatggtttttccagtggtcatgtttggatgtgagagttggactataaagaaggctgagtgcagaagaattgatgcttttgaactgtggtgttggagaagactcttgagagtcccttggactgcaggagatccagccagtcctttctaaa

SEQ ID NO: 30878 - DNA, 744 bp, Bovine  19866881130676
  misc_feature (1)..(1): n is a, c, g, or t
ngctcaaaaaaactaaaaaaaaaaaaaaaaaaaaaacctaaaaaaaaagaagaagaaggaaaaggagcactagattggaattcccacgaaaatttttaaagagctctccatgcaggtctaacaagtaatcaattaccatggaattcctctctagttgaacttgctctataatgcaaataccaattcttgctactatttgttgtgaaaaactttacaactgatgcaaacatgtcccattgttgtggacatgcacctgtttagggatgtgttatccaagaacaaagattatgttatgcagatctcagcaccaaggaacacaaggtgaagccacacataccatcaaaaaaaaaaaaaaatggttcttcttaaataagttcattttataaaattttatattggagtatagttgataaaaaattctgtgttagttcaggtctacagcagagtgattcagttatacacatcttaggaggcacactctgaattagccttactgagtttccagttctgatgtcactgaaagccctcgattctgtgattcctggtggccaaggacccttctctccagtggctgctgctccaacaagctggggtggggaggggtgctgtgcaaacattggcatcagctctgattttctcatctccattcaggaagttaggcagcctcattacctatttatgctctgctatattctgataaatcagtctctccatcatcttggccattaactgcccattactagg

SEQ ID NO: 30879 - DNA, 700 bp, Bovine  19866881146614
  misc_feature (1)..(1): n is a, c, g, or t
ngacgggaagtgtcctgtaaacatgacatagacggggacgggaagtgtcctgtaaacatgacagacggggacgggaagtgtcctgtaaccatgacagacggggacgggaagtgttctgtaaccatgacatagatgggaagatgcttgtccacagcaggggtgtgttttggttgctcaattctcttcacctttgggatccagccctttacaaatcacaaccacaggctcccaggcactgcaactggtgagagacttacgtctggcagcatctcgatgaaggggtggatgttggcctccttggccgcgcgctcaatctcctcctgggacacgacccggctgttgtctccgtaggcgatgttctcgccgatgctgcagtcaaacagaatgggctcctgggacacgatgcccatgtgtgcacgcagccactggacattcagctgctttatttccttgccatcgattaactgaaaacaagagatcatggatcagcctcagaaccagaacatttttgaatttagcaaaattaatgttgttatttcctacattaagactgcaagttgttatgagactgttgttgttgctttattttggactgtcgaggttaactgaatcaggttataactgcatgctttggggaactgtcatgtttcttgcattttaactctagcttctgatatatgcatctcgaaggcagaataat

SEQ ID NO: 30880 - DNA, 1241 bp, Bovine  19866881208716
  misc_feature (1)..(1): n is a, c, g, or t
ncacttcccaacatgagtcatagttaataaacttcattaatatatgaatgttatcatattttatttatctcaaattttaaaaattaaaaatttggtttaatcttttttcctagaatcttgatggttacttctacatgtgttctcacaacatgttttcatacttagctgaggacttgcttttgctttttatatgttttaatagactcttggtttttctagacagagcttttcatttctgtatttcactctttggtacctaattctttttagtttcttcccccattggggtgtactattttgctgctgttgctgctgctaagttcttcagtcgtgtctgactctgtgcgaccccatagactgcagcccaccaggctccccatcctactttgctacttccccagaattaagctatagcacagaaccaacctgtccatttttcatgtcctccattctgaagcaactgctgtttctgaaacttttcaattgcatcaatattccatttctcaaatatttatctacaacacagttatatgtcaagtcaatttcaccactgccaagatgtggtcattttgcaactgatttagacctaaatggtgtcattcgttttgtagaagcatggggctatgacagtttcttacaacaaaaatagcactgcttactggcaagaaaatcatagattgtgaaattgcactttccttttcttgactctaataatgctttcttttaaaattaaaaataaactatgagatctaactatttatttccttaatgaaatatatccttcttgatttcaggaattggtgagcaaattttgcttcaaaataaacaatctagttttcagaatatgtgcttccataatcacatatcaccaagcttgttctaatgcttgactttgttaaaaggtgtagtatcacccatgtcttggtttccaaatacctcttcccactaaaaagaaccatgagtccttggagaaatggttgaatcccaagactgctatcaaaaatgtatctggaacatcatcttatgccagagaaaaagtactcaaaaaattatgatatttacagaatttagagtcagctttgatgagactctggtcaaatctaggataattttaacatcaaaatagatacaacagaaacctgcacacagatgtttatagcagctttattcataactattaaaacattggaggaaaaaaaaaacaactggaagcaatcaagatgtttttcagtaagtaaata

SEQ ID NO: 30881 - DNA, 1460 bp, Bovine  19866881240596
  misc_feature (1)..(1): n is a, c, g, or t
nattcctaattgtctgagccaccagggaagccctgtaatagttgttacctgctgtcatttagggaggctggatgaggggtacacaggactctgcaatttttgcaacttgctgtgggtctatgattatttaacaacaaaaggttaaagatagaatcatatggtgaaacttaaagatctgctgctcttcaagtgctaattatgtgggctaaaacgaaaaatgagttacctaagaagtggtgtgactggagaagacaggccctagggatgaagggacagcatttcaggtggagaaatttcagcctcggctctcatttcagtagagcctttcagcgcctacttaaaagtatttgaagtacacacagaaagatgttgtggttggagctggctgagctaggcagagagtggcatgaaggcaggaagcgctggcctgcttcctctggaagccctactgacaaaatgcagtttgggagttgtaagctgaggatcagatcttgagctatgattgcctttccctctcagaacctagccagcgtgccataggaagcagcctgagatatgtgggctggccacatgacttgactcagcacagcccacagccagtatcaagtggcagccacgtgagggggtaccacagacttcaacccattcaagcctttagatgaccagctccagctagcacctaactgcatcttcatgagatgagacccagcgctatgcccagtcaatccacagaaccatgagtcataaaaatccagtattttaagccagttgataactagagcaagtaatagccctctgagttggaaagcctataaaggactttcacttaccttaactcttgaaaacttcaaaagtatcctgtaggctgtaacacaccccagtcagcatcttgcacgttggaagtcctcactaagaacatctgttaagtgaaaacaacaaaagatctgttgatcttaggaaagagatcagatgagattttcaggagccatctgtaactgtagtcctttgtcccacttggaacttacaacaccaaggtgaaagacctctgctcttggcttcgggaggaatcaggagagcaaagagaaaagcgggaatgctcactgatgtgtgcaagaggcaaagatacatgatgaaatgttttcaccaggactctttcaaaagagccagtttgggtcataaggaaaagtgacctttgaattggaaatggaacatttttgctttctgtgctaggcagctcaatttaaatgttttccctcttattgattgtcggttgttctgtggagaaccatcaaagttctccagccagaaaacctgggtttctctcctggctggctgtttgttacatatgtcattctttgggcaagttactgattgtctctaagtctttatttcctcattggaccttatggaatttcaatagctacctcactggattacttgaacactggatattataatat

SEQ ID NO: 30882 - DNA, 1078 bp, Bovine  19866881398427
  misc_feature (1)..(1): n is a, c, g, or t
ntttccatacaaatggtgaaatttttttgttttagttttgtgaaaaatgccattggtaatttgatagagattgcattgaatctgtagattgcttctggtaggattgtcattttcacagtgtccatttctcccaatccaggaacatgatatatctccccaattgtttacatcatctttgatttcttttgtcagtctgctatgattttctgtttacgtgagctattgtttcctgactgcttttcctttgtgtctgcattccctcatttccctaaattcaaaactgcttgagtctcttctttgaaacccagggaaggcctaggagattaaagcctttctcttgaagcgatagcacactgtcatgttgatttcagcgttagtaaccaagaagtagaggtaatttcagtgtccatgtgtccatggatgaatggacaaagaatatgtgatatataaagactctgcatctatatacaaacatatacaatggatgataatgcagccttaaaaatgaaggaaatcctaccattcatgacaacatggatgacattatgctaagtgaaataaactagatgcagaaagacaaaaactgtatgatcccacttatatgtggactctaaagaagtcaattcacagaaatggaataaaatgattgttatcagagcctggagaggcagggatttagggagataaagttcaggagtacaaagtttctattatacaagatgaataaattctggagatctaatgcatgacaaagtgactgcagttaacattattgtatacttgaaattttctaagagggtagatcttaagtgttctcatcacaaaacaaagaagttaaccatgttaggcgttggatgtgctaattagcatgagtgtgattattatttcacattgtatatcaaatcatcaagttgtttactttaaatgtatacaattttaaattatcaattatacttcagtaaagctgaggaggataagactgaattgtgtgggtgtggccaaattcctaaataattcctactgagaatctaaagagaaattagttatctaccaattcagaggtagatactacaggaaa

SEQ ID NO: 30883 - DNA, 1793 bp, Bovine  19866881423542
  misc_feature (1)..(1): n is a, c, g, or t
ncaagataattagtaagtgattagaaataggaagaaaatcccaataaatgtccaatcccatctattctaggcatacaattattagaaattaatacaattaatttttatttttaaaaattaatgtttattttgcatgcctctgtacctaagagttagtgttgattttagattgattttgggtttcaggtttgcagtaatgagctgaagtgtgtgtgtaacagacactgggtaggtgaagactgcagcacttacttcccttacaatgatgatgcaaaagctggcattacactgtctggcaatggtaggtacttactttggtcccattatgttgtctttatgcacaaggaagagaaaactgcccttcctaagcttcgtttggattatttttatataattcaaatataagttaaatccacataataatgaattacaatgtacaactggggccctcattatgaaaccaattatttccattatctcgtaatatgaaatattgaatataacttagtctattgatttagccatatcttgttctatatcaggctgatattttccaagtattatacttatttggagctgacaacaaatcctagcatcttttttaaaaaatatgatttagtttttatttattggctatgatgggtctttgttgctgtgcatgggctttctctacttgtggtgagcgggggtcactctccagttgcagagtgtgggcttctcgtggtggtggcttctcttgttgcggagcccaaggtctagaacatagactcaatagttgttgtggacaggcttagttgctccctggcttatagaatcttcctggaccagggattaaacctgtgtctcctgcattgacaggcagattcattaccactgggccaccagggaagccctagtatttcttttaaatgaataaagtaatcaaaattgttaagtgtatgattttatattttatacttcttatatactgggactaagtaaatgaggaaaaatttgaattgattttaaaaatattttgttagctttaatattctctcttaaagaaccacatctatattaaactccagtttctgtagcctctactgtaggtaattctagaagtagtaaccttggccaaggtgcctggaaggggtttgacatggataagaagcagcaggtgtagttctaaaagcaagagttgcccaaatggagaagtagaaattaaatgcagatagtggaaagaagacataccttgaagatgaatgtcccttttaaaactatttttatcatttcattattgagtattcttctgcataaaataatgttcaagtcctgaagtccattcagctccaaagaatgagaaaattattatttttattctaatcatccatacaggttaaatgtattagtcaatgtgactttcataataaaactcacagagtgattaggattttggcatcttcagtcttagcaatggttgtggggctggttcctgcacttaatgtagaaagaagcctcttcaggtctgtggatttaactggcttgtcaaaagtcatactattacttagaagtaaccagaactagcatttgagttgattgttgttcagacgctcagtcgtgtctgactctatgacccatagactgcagcacaccaggcttccctgtccttcattatctcccagagtttgctcaaactcatgtccattgagtcagtgatgccatccaaccatctcattctctgtcccccctttctcctcctgccctccttcccagcatcagggtctattgatccctgttaattttctggagctctc

SEQ ID NO: 30884 - DNA, 1057 bp, Bovine  19866881498876
  misc_feature (1)..(1): n is a, c, g, or t
naaccacagacctcagacgtacatgcataaggggctagaaaaaacctctttttaaaaaactgtcttcacaccaatggacttaagtatgtacaaacacagagcccatttataatgctgacaaaactgttctgccaacaaaataaataaaatctacaaaaacactgacatcagtaatggtaactgaatgggacttacgcgttagtcactgaacttgaagctctacttgtgaacatggaactgtctaccgggaaacacagctctccgagagccgagcatgccttttgcatgaaggcagagaaggagatgggagagctccatctttcccttcccctaataacagcacagagtctgggtggggacaactcagtgaggtcacaactgcctattcccactgattgtgaacagaagatttaacaccaagatattttagaagatttaacgtcatcgtcagtgtcagggtcatcatgtgacagaaacagccttctactggaggagttgtggagtgttttttgagggtggagacagtttaatagcctggattcataggcttcacacctacctttgcccagatagcagctgacaggccaagaacaggactgatggccagaatcacaagggtgagcttccaaccttctgtaaatcctattataaaaccggtgaagaatgttgccattgcctgaaagaacattccgattttgtcaccaattccttcattaattttggagatgtcactgaaagaacagtgttagaaataaacatcaggattatgaacaccagaacttttttcctgaagctagttgagtgtttgtttgtttgtctcagtgtggggtaaatcagtttacatctaggattttgctcaggaacatccccagcaagtatcatgtcaccgccctaatgctcactcccacaagatgtcttgggtctggcaagtccaacccctcattcactaccagtcatgcgggacctcttcatgccctgtcagggttctgggaacgaaaagacgcatgaggcacgatcaagactcagaaggactttagtttcagaattactttcagat

SEQ ID NO: 30885 - DNA, 1221 bp, Bovine  19866881539156
  misc_feature (1)..(1): n is a, c, g, or t
ntttaacattcaacataaaataggattttctttataaaaccacttacacttttaaatacaaaaatactaaaaatattgtgagtttgaagtctcagtctgtatctgttacaaaaataactaaggtcctaagaagttatgtcaactgtgattgcagttaaagcagcatttatcaaatattcaagaaaaaactaattataatgcattataatttattataatacatatccatttgctttttaaaaattgttaagtgcttaagtgtctccccaatggaacataactgccacatatacaggcaccactctgacttgaagaccttacaatacctagtattatgccttgtaagcagaaggcacttaatgcatgatggccggactgaataattggtggagagggtatgacacaaatcctcagctcaaagccaaagtataaggggcctaggagtcggcctacggcctggcaggggaatggggcattttagccctgggcccaggccctgagtctagttcggatctgttataaataccgtctgactgaaaatcctgacaagaggccctacaccaaacagtgctctctcactcactggacttggtcctggctctgtcagtcccaagccagcaatccccataaacacggcttgtttttaagcagcaggggatcattatacttatgagccagggtttaaaccctgccccatctccccaggtatatctgaggcattcttctgaagtatcaccgtattagtgcttttaaaatgtaaagttacaaagtcacaggcaaaatgtgcgtgattgttaaagaccctttgaactgatctgctttgagtgacatgtgtaggaccccttctcccccttcccctgagaaacattcacatccacgtgctgtcagggcctgggaggtgcccagtgtgggagacctaagtcactatccgctagtaacagtgcagctggaacgagtctatcagccaagccccagcacagaaaccaagcagcagcaagtgggccgcggggctgacttttgatctgtggaaacaaagggttcagagggcacctcttggcaggaataaacacgagcatcacgggtctcccggggagagaaggaaagaaggagaggagagggatgtgggggcacggaatattgcttccatctcctccgcctgcagctgctgaggcggagggctgacgggagcccgcctggagacgccatcggcgcgcggggacc

SEQ ID NO: 30886 - DNA, 1692 bp, Bovine  19866881680642
  misc_feature (1)..(1): n is a, c, g, or t
naaatagaagtgaatttttgctttctattcaccttttactttgaccgtagctaaaatctgaagtcaagacccttcacaacaatttcttctacctcaagaaccttcttgtctggtggtcttcttgtctgtctctagttctctgtcccaaagaaacctccttcccagcaagtgtgtcttctgttgcgttgttctaaaatactggcaatggtcaatcctgtgctttggtctcccacgtctggtccactccgtgcattgtctaaagctggagctttgtcctccagtgagtcagtgctgggaagtggagatttcatgcagttgctcaggacatggcattaatgagcttttgaagttagcattctgggtcttctttagccttgaacctgttacacccattttgtcaggagtttaggaccatatccctatgctcagtctttcacctcacacctgccaaatcacttacacataaggtttcacataaaactaaaatctatcttgtaaaatgactcacagtacacatcttagataatactgagtaacatgggtttcttcatatatgagcaagtgcactaccttttcttcctgcctgtagtacaagaaatggaacatacaaaattgtgaaaccaggagctgaattttattacttacaccatttggtaacttgagaaggactgttagtcctgaatactagttagaaaggcctttgatttgccaacccatcctttctctatcgtgtattcaaacccttatttcaatgaagggaaaaacagcttttgtatgagctttcataacagagtggaggaatgcaaatcttataattaagaacttagtcttcattattagcctgaaaatcatacaataaaataaatctggcagacatagccaaatgttcttactcagtttatttggaaatatattcatctgttgtgggctgctgttgcggctgacagttttggtttccttcatctctatttagggtttctggcaagtggttctgctaaagacagtaagaacctgaacagggcaactgttgcaaatgtagaaaagaggtgggccatgtcaccacctagagttttcttcatgaatcgtccccttcattttcatgagtgctgattctactgatcatcaggcttttcaactgggtgatggccacagagccacaattaaggaaacatacacatacatccctttatcttgtcagataaacttgtattcttacttgtcatctggtctcctcacatcacattcagtgtcattcttccagaatggggcagtagtcatgctattcatggtcctagactcctttctctttttttggtgtcaaaaaagagaggtgggaatctgaatctgtctgcatttatctagcttaatgacatgaatttggatgatatctctctttcattccctcagactctctttttaagtaggcagtttatttccaccccttaaaaatagccctggcttcccttttggcccagctggtaaagaatccgcctggaatgtgggagacctgggtttgatccctgggttgggaggatccctagagaagggaaaggctagccactccagtattctggcctagagaattccatggactgtatggtccatggggttgcaaagagtcagacatgagtgactttcacgaaaaatagccctagaggcttacacttaaagatagcagaacctatttctgtt

SEQ ID NO: 30887 - DNA, 1337 bp, Bovine  19866881696518
  misc_feature (1)..(1): n is a, c, g, or t
naattcagtgttcaagataaactttcatgtgtgttttatatatatgttgatagtatagcattaacataattttatatgaaagtatttagctagaagcacagtggtagctttaagaaagcacaaaatattgcaatgaaaatgtatttatatttttatggatatatatgttgcaaacttaaggtaaatcaacacaggataaaataaacacaaacagcttaaatacaaaccctatatagtttatttcaggtgaaacattaaatagttttctactatattagaaaatacattaattcctaccaacactagagatttgtcacttaaatatatattactccattttagggaaaaaatgcttcacattttcataaaatacagatagactgcaataaagtgctttttcttagagtatacagatcctgagaaaaacaaaaatatttaaaaatattgtttgtcttgaaatcatattctttttcattcttacattcataaactaaacttcttaggcattagcctccagtgaccaaaagctctttcttcaaggaaactgccttggtagttcttgatctagcacacttgtgtgagatgtgtaaagtcaagggacatcttgaacatactctgtctcagtgatgttagaacaagcgaacagacgtgacctagagaacttcacaaacggtaatacctgatggcaagacagctgaaaccagaggcctttcttgtgctgaaacagccttctcactgcctgaatgcaatgtgcttttccactgcacacccaagtttgaagtgaacattgaatacggtcagtgaacgctctctctcacagaaacagtagataatacggggtctttagacatcaaaaatagcagcatcaatatcacacaagttatatttttggttcatgaatgtaagatagccatacctcggatcagagaaatcttaatacacatgaggccttaaaatagtaacagggcggggtagcaggggaaacacccaaatacatatgaattaaagaaaataactgataggcaatatttggtaaatgatgtgaataataatatttaaagactgctttccgttatctactttgttgaaacacttaagtatctacgtccatgatttaaacgtgtataaaagacttgggaattcttttagactctgtacatcattcagcacacaactgcaaaaatgtctgacgactctgacactcccaacaggatgaagttacacagaaatctgtaccaaactctgagattattgctttcagtgtagaataatttttctcttctttacaagaatgctcaatggttagacttcggaatatctttttcaattctcaaaaa

SEQ ID NO: 30888 - DNA, 1283 bp, Bovine  19866881798262
  misc_feature (1)..(1): n is a, c, g, or t
ntaaaaaggataagaaatggaatagaagaacactttaagaaaaaaaaagtctaatgaatatcctaagaagaaagcacattgtatctaaaaattatagaatgccatgagaagggaacagcagaaaacatgaaaaaaagtttggaaattaaaaataagatttcttgagttcagaaatttagtataaggatttggagaataaattaaatgaacactcctagaaagcagggcaaaaggacaaagaactaataagtgagttaaaagataagggagaatctgtctttaagtgtctgctaataattttagccacgaattatacattgcatacaggataccgggtattaatagtattctaaacactttacctttcatttaatcttctcagctggataccctttttgttcccacatttttagatgatgaaacaaagacccagagagattaaatactttacccaagcacacttagtttataagtagtagaactagagtttgacacgagacagtcccttacgctgtaggcctaacctagacattatgctgcttttctgtactatgctaatgctaaaatgttaataactgtttttgaaaaataatcactgagaggcagatttttaattaataattctataattaagtctgttttgaagcctgaaggcatttagagtgtttatcactgttgcagagcttagaaattataatattttaactcaggtttatgttaaattataaacatacttcattgaactttcagttcagttcagttgctcagtcgtgtccgactctttgcgaccctgtgaattgaagcatgccaggcctccctgtccatcaccaactcccggagttccctcaaactcatgtccatcgagttggtgatgccatccaagccatctcatcccatccagccatctcattgaactttagagaactttaaataatggagaacatatgttaaatttttaattcagttaaaaccgttttatttaccatttattcagtgatactttgaaataatttcattacaatatagctaagaataacatttaatctactcagcatttatcttcaagatacatattagaattttgcacttgttatttccagggttatcttgaagaactcttacaacttcgagagaaccagctgtctgaatctgtcgctcagaataaaatactactacagaggattgaagattctgacctggctcataaactggagaaggaacaattagaatatataattgtggagcttcaagatcagctgtaagtgagtcctttggaaaagttt

SEQ ID NO: 30889 - DNA, 637 bp, Bovine  19866881976575
  misc_feature (1)..(1): n is a, c, g, or t
ntggtaatttataatagcatcgtttctttaacatttagtttctatgcctttgcaaatgtcaacctggactataatgaagaacattgttgctaagaatggattttctggattatttacaggtaaaaatatttcctttaccaaactgttgactaaaatgtttactttttccttttaaattaattgcctttcagcagaaaatttttgaaaatattcctcatttactatttcctcctaaatatctttgctgtaagtttaaaaattttaaataccagttgcttttgaagtaatttggaatcaaagtgaggagtgaacagttgggcttgttctttgacaccagttatgggacagtgttttatatgttacctcacttaatttgataactgtcagaatgaaaccaaataaattacattttaaaatgtacggtaagatttggtctgaacttttctcttccctttctaggactgattcctcgtttaattaaaattgctcctgcttgtgctgttatgatcagtacatatgaatttgggaagtcttttttccagaaacaaaatgctcaaagacagcgatactagacatgctgtttcaacctgaaataacagccatgaccaaataataagaggagactcttaggcaagag

SEQ ID NO: 30890 - DNA, 1444 bp, Bovine  19866880127245
  misc_feature (1)..(1): n is a, c, g, or t
natagaaagatgactgggataaatctgaatcttcagaatataagcaaaaatggtattttgtacattcagttcagttcagtccagtcgctcagtcatgtccgactctttgtgaccccatgaatcgcagcacgccaggcctcactgtccatcaccaactcccggagttcactcagactcacgtccattggagtcagtgatgccatccagccatctcatcctctgtcatccccttctcctcctgctcccaatccctcccagcatcagagtcttttccaatgagtcagctcttcgcatgaggtggccaaagtactggagtttcagctttagaaacttccaaagaaatccttccaaagaaatcccagggctgatctccttcagaatggactggttggatctccttgcagtccaagggactctcaagagtcttctccaacaccacagttcaaaagcatcaattcttcggcactcagccttcttcaccgtccaactctcacatccatacatgaccacaggaaaaaccatagccttgactagatggacctttgttgtacattactgttgtttatttttgttcagtccctaagtcgtatccaactttttgcgacccttggactgcagcatgccaggctcccatcactatctcccggagtttgcttaactatatgtctgttgaattggtgatgctatccaaccatcattactatgaggagtacttaattgaacctttgattaccttggccccaaatattcagatgacttttttcttaactaaacttatgacaccatcctaaaagtgaataaactgtatatgcagaagtaaattgacgggcatagcttttgctttgttaggtacccattcattgtgttatatctttaaacatggtctacattataacatcccctgaaaacatttccataactataaaatatatttttcaaagttcaaagtcctaactgtgggacatcaaaatactttccatatattatggcctacgttttgttccttaggaaagaaaaatgccataaaatgactttgacactttgtttacaaaataactactattaataattgattattattccttataaatatttcagttaaaatgtataattatataagtgaggagtctgagataatattaggataaaaattgatgtaatcgcatcctgcaaaggttagtggtgagcattctgataagttaatgtatgtgaaagccctttaaactgtaaaatattatataaatatcaaaacttttttttgtttgttttcataaactctggattatcaaacccttttctccatgtatcttctttacatttcattttcatttaaaacagcaaaaataagtagaaatagttactaaaaacctattgtcattttgtgatataaatttacttgaaatttaaatactttagagttcaaggcaagactccaagactgaaa

SEQ ID NO: 30891 - DNA, 4083 bp, Bovine  19866880412843
  misc_feature (1)..(1): n is a, c, g, or t
ncttacgggaaaagggcggtatcaattactggttttgcaaatgtttaaaactacatatgggctattagttgggagaatcctaattttaaaacattgaaaaccttaaaatcttagtttctgaggaaacttcatctaagatggcatcaactcatctcctagtttttccttcagttgtgtatctttggcacctaccacagtgcttaataggtagtgagcattcaaagcacgtttgctgaaccgagttgtcaacgacaaggttgaaactgtcagcggaggcaaccaaaatacatctcctatgatgacaccaaccaagggcattcaccttgatgcaaacgataacaacagaccacaactgctcctcaacttacacacgaattttctatctccggagctcctggatgcacagacttgcaaaatgaaagtttcctctaagcttctttcaaagtataaagttctgaatctattaacaaaccaggacaaaggctacttgctcaccactttctaaacttcagagaagggcatccctggtggctcagtggtaaagaagctgtctaccaatgccaaggacactggttcgatccctggctcaggaagatcccacatgccaccgggcaactaagcccatgtgccacaattatttagcctgtgctctagagcccgggagccacaactactgagcccatgtgctgcaactactgaaccccaagaatcctagagccagtgctctgcaacaagagaagcctgcactctgaaactagaaagtagcctccactatacaaaacaagagaaaaacccgcacagcaacgaagatccagcacagccaaaaataaaatttttttttaaaattttaacttcagagaaaacaatagctttcagcactataatgtacttccagagaacaattttaagcccatccataaattccaaagcagcccttagggagaatgatatactcaggaacacatggagataaaaacaggccgtggaaagatcagacctggtaaccagccctaaccacttactaaccatggaccaaggacacatttctcagcctctttgtttctcagcagcattaaggcaattataaaagctcccctatctaaaaggtaagatttacacgaagaactaataaaataatgtataagaaccaacttaaatatcatagaaatgaacaacactagtctagcagatctggctttcatcctggctctgccacttaccattggcctaaccttgagtgagctaagaacactctctgaacctcagtttcctgaataacaggagtaaaccacaacaaaaggcatctgccatctccaatcgcccccaccacccaacatgaaaaattctccaaaacttggataagtccaaaaggaaaacaaagcagaaacaaagcaacccacataaaacccaagaaacccatatccacaatttagaaaaccaacaaagccaaccctaagaaatggcacccagctatgtaaactcctttaagtgcccgaagtgtttaaagagtctgtcacagaatgctccagcacaaagcaaaacacactgttacagctgctctgttcacactttttaaaaggtgtcggtaataaagggccaaacatgcgactctctgaatgtgcatgtatgctcctctcccatctatctgtctgcctccagttctgctgtctcatgacctggcctcacttactcagcatcacccaccccagcacagcacctctgaggctcaactgcaaataaagttaaaagctatgcataatcagtctttagatagcaaaattgaaaatgtctctctttgaaggatcacaaagctttctgtctgaaacctctgacctttctagagaaatcagagtcactgtagtttaaaaatgtaggtggtaaaagtacaaaggattacatttatccattgtgcatgtttgccatcttttctgagatgaggggcaaataccttcagaacaattagttcttcaatgctaacatttcaggctgcaataccctcattctccaagaactgtacacatcctgggcccaatgagatggcccttttctgtttgtttctattcctattttacagaaaatctaaaatacacgatttcagaatccctttttttaaaaaataagacttttgtctgtacagtaaataagcagaaaaaataataataaaaattcatttgaatcttcttaaaaaccacagtcatccttgattgggttggaagggtaagggacttttaaaagtacatgtaaaagaaaagagaattcttgataaaagtccttgtcacatattaagaggccatacaataaaagtattgcaatgactatctttccctgacaggaacagacaacaatagttgtgctgttgaccagcatcaagttacaaagacttcattctcagaagttacttgaaactactttcccaaagagaacctccaccatttaaaaggaggggagaaaagccaactaaagaaatcaatcagaaacgttagtaactcggtaatttttatacacaaggcatccatgcaaaaatcctgccacagtcctacagagatgcagaaagcttctgccaaattcttatcccaaatccttgcttcatcttaagtgtccgtaacccacttatctttaactttcaattacttaacgctaaaaatgtactctcaggtatacactgttttccatcaacaacacttttaatgtttaatatttatgaattatactcaacataaaagatgtttactattttcattcttaatctgctattatatctgagcccatacagctctgctgaaggtttacatgcagatgcacagtatcttaattactcattctacagtaagctctttaagcatctccattcctcattcatttggaatgtttaaaaatgccacaagaagggcttgatgtcatctcaacactgaaatccatctgtctatggccctcttttgactttactccttttgcagccaaaattttcacaaaagttgatgagaatttgtcaacctaaggacttgtgatgtcagctcctgtgaaaggcaatggaatatttgaaagtgacaatgatgggatcccatacatacaatattcactttatgtaggagcttaaacttaaatcactaatctcttcaaaattaaaacacacagaattctaaatgtttctaataggggaagaggaaaaaggtagggatataacacagaagagacagttatgagtttcccatattaagtaataggtcccaaattttgaaaattaaatgaattattgatgttgtagcaccacagttcctatttatccactgacaaatacctttccctaccaaaaattaccaatcggataaagctatatgactcaccacagatacatcttccccaacagcatgaacatgttgttgcactagccaatcacaggctggcaaaattacaaaaggaaataaaatcagccaaaccatagcaacaaagacaacagcctgacaatggcagatgctacacagaaataccaacaaaactgctaaatattattcatttttaaaatatgttttattgctactttcatttcatcttgcttttataacccatagagcatttcaaaaatagtcattaaaatatatacatgaatatatatgctctgaaaacagtttttgtttggaaactcacaggctattggtcccaccagaaactctcaccagagacatcaaaggtaggcagtatggaacctgatggagaggacagtggggtgtgagccctatttttttttattacaatcctcttttgtttccaattgaatcacttttaacacacacctcaggtttccctttctgggatgacatactccacaccctaacttttaaatttattagcacttttaaaaaattaaacttaaaaagaaagtcacatttctattttattctatgtaaggttcaattcaacacgcttatttttttaaataaatattagaaggattcatatatacaatgaacagatatagtataaattataattatcaccttttttctatttacaattataaaattcatgttgagtgaggctctaaacttttacacttaagtcattaagaactaaacctgctgaagt

SEQ ID NO: 30892 - DNA, 1214 bp, Bovine  19866880421914
  misc_feature (1)..(1): n is a, c, g, or t
ngacccataagaaaatggaggatgggggtggtggggttgctatttgattagagtcaattcttaaatttccacagcaagaaaatattgaatgtgctataatggttgctggattttcttaagaactgaaatcattacactctggctgcaatccaagttcttccctttttttaggttacaatttgaaacggtgcagaacatgctatagggttgtagtcattcatgtaatgtcattgaatcgagcttctggaaatagacaaaggactttgtgtcccgaaatgttcttctggcagaaaattgatagcagtctgagatatgctattactgggtttggttctgcctccaaatttgtgctgactaaagtgatttcatgagggagagagagagaaaaggagagagcaagagagaaaatggctaaatgaacttgcaactgtgtggggcagctaaatacttaaaacaaatgctgcatggaagaaaagcacacatttcccagcaaagatgcgcgaggtttttcaggggtcactaaaattacgtgaacctctttgcttgctttgcttaagttgttgttgcccaaatggagatgatgaacaggcaaatgcctgacacgaaagccctgggcaattcccccaagccttcccctcccatccctgccctctgcagcgttttcccgttcagtgtcacccctcgtctggagctctcaccagactcatcaggacgacaagcaactccagcttccccaatcagggatgcagcctgaatgcaaatcaagctttggcctggatgctcctgccaggacacatggtgttgggcacaaacccatgcctggctcgttctttgcccctaagtcctttccaagattcaccatcttcatcactattgtccctttcaaaagaaaaagttagagttgttttgtgcatgatgtgaaagacatgtcaataaacctcctttccacataaatagcacatcaaaatattaccaaataatgctgctgactttgccagcaggcagaggattccatctggagataatatcttccaactgagaggcatccaaggtgccctttcctaggcaacgggcaagttgaccgctctgtggctgaatcccatcctctctgaacacacaggctctcagcaattccctcctctttggtcaggtccagaccacctgctcctggatctggagtcacctgctcccctccaaaagaactcacgaatcct

SEQ ID NO: 30893 - DNA, 2297 bp, Bovine  19866880465867
  misc_feature (1)..(1): n is a, c, g, or t
nctagtttaaccccaaaaaaattaaaaaatcttctcacattttcactgccatgtttctttatttatttatctttaatttattgtggtgtcaaagctcatgtctggtcttggaaaaattctggcacaaacttggctttttataataccagactattaaaactacaaaacctcaattaaaaagctgccaggagagtttggtgctcagtaccaaaaatgatataaagcctgccatcaggaaggaaagaaaaggagttactcttgcaagaaacccaagtcttagtcatataactaaaatcctagatataagggcaatcagatagagtctatattttaagaatatcatccaactcatgttcctggattctgatttcacacatattctgattccaaactttatacctaaaggtcataaagcattttatttgtttgtttcagtagatgcctcaaatcagatccaatcaattacatcctaacatgtgtaaataagaaaatttgcaacaaatcctgagacagattagctaccactctgccctatttgtgactgaataaacgcaaatcattcctgtgacataaccataagaataggatagagtgtgtgtgtctgttttacaagactgggagccatgaactcgggactttaaattacaattctgacagcagcgctacttaggaaaatgacttagcctccaggaataatcccatattccatcctatgcctcacccaattctaggcgcacagaaataataactacccagcaaacgaaggaattcaccaacctcgtggcgctggggtgaagattcatcagtccaaagtaccgtgaagatggaactattctgactgcagacatgtggggtgattaagacagtggctttggagtcacctgactggtgcccattttctactcaggaaatcggagaatagtaactcacacagagggtactgtgaggcttaaataactgatacagaagcttacaacactgcctgcctgccaccaagaagcactcaataaatgctgtcattatcaaaactcaatagccttataatcagacatagccagatatgacattttcccttatccgaaaactgcagatgtgaacgagagtttccccaattcctgatgtgatccaaaccaaatcaatccatcagcacgtatttaatgagggcctatgacccaacattcccagcactcctgttggccggctctccttacatggaagacaaggaagtcttttctaacacaggcaaacagatcctgtataataaaacattcatagttaacttaccgatttagaaacacagtatttatttgaaaacagaaaaagcacctgtggcttattcttgagccacatacagaaccttttctccatacctatactctaggttctgaggccatgtgctacctagacagaaagcagaaagaaatgcagaactccagttgttgcccaaagatcaggcccaacctcacacctcaccttcaggactcctgctctgtctgccttgactatccagtcctcctcctcttcaccctgcctgccctttacgtgccttctcctggccacagaagaccacccatctctttgaccccctcaccttgcctacacccgctttgaattgatcacagataatctgttggttgatgatgagcctgaatgactgactagccatgatgccctcaaatttatgaaggcatctaaccagccattcttcacgcgtatcatgtgtcatcttcacaaagagcctgttacgtaggtattactatccttgtttcacagatgaggtaacatttactgtacttaaataatttatctacagagggaatcagatatacagggctttgaatatcaactcaagtaccagttatatgaatttcagcaatttatttaatttagaaaaaatacaaattaggtatggactggtaggtagcaacagttcaatggtaaaataatgactataacctgccccaacttttaatgaaggaaatgttcaggtacaccgaatgactgattaccaactttgagagaagagatttccatccaccataaaagccttataagattaattataaaattcctctaaataacaacagcagcacagagttaaataatttggctgaaatcaaacagtgccaagtggcatggccaggattcgaacctacattattaaattagtctgttttaagatcaagactgaatgcataattcatatggggaaaacaaatttttcaagctcaagtaaaaaaagaaacaaaagaaatctctagtatcttgttccgagttcccagtatacatcttgctct

SEQ ID NO: 30894 - DNA, 1003 bp, Bovine  19866880505677
  misc_feature (1)..(1): n is a, c, g, or t
ntcagagcctttaagtgctacaattcacttgtattgtcactaaaaatttttaaagtggaggggatggggggaatgtgcctccccttccataaagagtaccagcaccttgagttcaatcaactaaagtcagagaacagtctccatttgtaaaatggtaatattaatacccaccacctgcttcccagggctggtatacgggtttgtgttcatttctgagaggggcttgagatccttgagtgaaaggtgtgatgcacagtattataattctcaccacagggtaacatatggagagggaaagaaagtgtatagatacgtatgtttctgtttaaactctgtgtgcaatgctgacttttatcttattttgcctttaagctaaactgcatgggtcacatttagagcatatgttgttatcatttgcctttttttagctcaagaaaattgagtgaataacgggtattgttttcctatttgccatggttagaatggttgcacgtttcaaaatctctgactcgacacacagaacagcagattctcttattatgatgcccagggtgaggggtttcattgtgtgtttctcccagtctaccatccatgaatattatagatcccattttgagtattatgaaattggccaagtattactttacaagtgaaaaaatcttttcagcctccttgatgaaaagaacggacaattaaaccatctccctgttggttacccacatgcctctcactcacagcgccttaattggtctaatatgcctttccctttttgctcttttcctataatgagctctcatgttagtgatcttgtattttaaacccttacggaggacccagcagtgtgttaggacagaacctacacttctgcagaaagcctctttttcaatttgattttaattagaaaccaggtggtacaaacccaaaagtttggtggtgttcctcggatgtaagatgtgaaaggtttttaagtaacactgtattagtcatgaggcagcaaggagta

SEQ ID NO: 30895 - DNA, 1354 bp, Bovine  19866880526905
  misc_feature (1)..(1): n is a, c, g, or t
nccctcttaaatatatcacatttccatttgcttggctttttatttcaagtgtatgggttagatgccatcttgctattgtaatactttgagcctggaataaatttagtatcttggaatttttttccacactcccttttacttaataattttagagaacataatatacagtgtttgataaaagatttggaataaaaggaattgagagagtaaataaatcttccaaggttacagagcaaatcctgtatctattcaaaggccttatactatgtaggcaaactaaaagtcatgtgtgcctgtgaatgcgcgcacgtgcacacacatacacacacacacacacacacactcatagagcaaaggtaaacactgcattagcaacttaggtgttattttctataaactctctgtctttcctatttagggaagaatacctcttctttccctttctcctctcttttaggaaaatgaaacagtccagtagctatttttttaaaacagcaacaacaacaaagtctgcttcttccaagcttatcaagaccaaacacctttgtagcgcaccatcactgacgtcggcacagcttgatgataagtgtccagccgttaaaaaggcagtgacactaatttttgctctgctcagaccatcaaagtaccaaagtaaagaaatttactacagcactcaatgaagaacaccatttttcagttaagttcaaaatgttactaataggtatccttgtcacttagacagcaacggcagtggggatactcttaggcaagagtgcaggttaggctacagtcttaaacaaccagaaatcctacagtggctagcatacagggaaaatgcaaaatgctatgaccactggctgccaagctgggtttctgggctatccccatagtgtaggtcttggctgtcatttgcccagaagccctacagcttcttagaggtcacctcaagttttaccctatactcacatttacagaccttcttcctaccccatcaaagtaaaaggaagttttaagacgctgctatggatcagagctgtgaacccgtctaatcccacctacattttagatccttcagggagacaagtgtgaacttattcattcactcagcctctctggggtcagggaagcctttgggaactcaatgaaagctacagttgacagggtctagaagttgtagtcagtcagctaccactcatgaagatctctagggcaccccttggggtaggatgaggaggccaacatggtatccgctggtactcagtaaagttctgattgtctgacccataccaactgtcaccataccttccaagaaacacagtaaatgcccaaagagtacgtggctgaggtagtgggg

SEQ ID NO: 30896 - DNA, 1096 bp, Bovine  19866880553774
  misc_feature (1)..(1): n is a, c, g, or t
ntgaaagtgaagttgctcagttgtgtccaactctttgtgaccctgtggactgtgtccgtgggattttccaggcaacagtactggagtgggttgccatttccttctccaggggatcttcccctacccagggattgaacctgggggtatccctcattgtaggcagacgctttaccatctgagctaccagggaagtctcagctgcataggcatgtgaataattgcttttcttttgtgatggaatcaatgagctttttcttctgtataattgtctttgaaaaaggcagagaaaaagttaaagggggagagagagagctagagagaaaaagagagagagagagaaccccaaacccatcaagcccatattgcacattggctgccagcaatgtttcttttaaaataaaataaaaatgttcagttgtagattttttcccttttggagagatgcaggaattgcaaagacagtgccagacagcactagcatatgcttatttttctagctcaatgtgggcagcctttcttaaacattttgtataaatatatttattctcccactgagaccttgcctgccaggttcaggaacaactgagtaagcagatgcattataaattgaggaaagaaaagaaaggattgccatggaaatgctgatggcccctttattctagctgagtacattgccctggtataataaattactggttgatgcattgatgataaatctatagtggttttcatattcaaagtaaaagatatttcactctgtctttgctggagatgtagtcagaaggcaaggaaatgttgacatccggtgggcaggattaaaaaaaacacacacacacacagaccctttggtgtacaacccacatttgcaagctgtctgcgtttcttgtattggcctcagctttgacaaatgtaaaaaagtcactaatattttgacactctgcctgcccaagtctgataccagctggctgtgaagccacatactcattgttctgctggattttaaagactgggtcccagccaaaggactggactggatccattcattcattttcaagatgaagttgcagcttaactgtaagaccatttctcaactcaa

SEQ ID NO: 30897 - DNA, 1206 bp, Bovine  19866880577408
  misc_feature (1)..(1): n is a, c, g, or t
ncctatgtaattctttcactaatgcacccaggtagcaagacactcttaaatgtcttgtattatttaatcttctctaagtattatctcatttaatcctcccagcagccctgtgaagcagtatgattagccccattttacagaggaggaaacagccaaagagaggttagatggcatgcccaagatggcacagctatccagtcccaggatcgcatatgtttttgctgttagaacatgatagctaccctgctcagtcactttggcattctttggtgctctgtgattgcttccatcatgtatgaaaaccctgaaaggattctgcgaagagactgtttcaccttgttagcccctggtgccttattggtaaatgtcagctgtaacagtatccacctaccttgtagggtgattatgagaattaaatgaggtaattcaggtaaagggcctagcatattgcttagcatatggtaagcattgaacaaatgcttgccataactagtattgttgtttgtttagccgtgttgaaatgagctttgtgatcccctgggatgggtctgagccctccttctcctggtagccctcacggggaggatagacccccaaagagaaaaagttggcagcagctgaaatggcccgccacccaggttgttagcatcgtccctcagctgcctctccaactgccatgactgctttcctaatttaaaaattactcttcccattttatatttcggctcagaaatcgatgcatctgtgaggcagtttgttttcccgggaaagtgtaaggagcccctggtggtggtatggagacgcgctcggtttagactcaatattgccacccactccctctgcagtgtcagagaacactggggaagatctgttcctcccccttgcacactggggactgcaggccgtcccatcctccagggctctgcttttctgcgggtgtggggaagcattgattccttgcaccttgcctcctcctctttgtgcctctcacgtttccctatcttccagacttcagcactggattgacgcccgtgtttctcatagccagggttccgtgcccactaaaatccagggcaaggctcttcagagcccgatttcccatttcctcttagtgggtttctgcgagagtcgatggtgatccatttgtgcctggacgaaggcggtccttcaagggggaggctctgctgcctctgactgcagttttag

SEQ ID NO: 30898 - DNA, 2038 bp, Bovine  19866880624983
  misc_feature (1)..(1): n is a, c, g, or t
ntgataaaacattttttgaggcatgagacaaatttaaagcagaagtgtacaatggattcctatgtcaggaatcttgaaaattagtactttttagaagtctgtttcttggtaggcataacataataaaagagagcctcactaacgaatctttgcagtgcagaaaattatgggatgaaaagaaaggagaccttttaaaaatggactttagattcatatgaaatgacctttgtagcatcacgttgtcaccagccttcccctctcctcttgatcagcaagtagtaccacttagagctttattagaacatccctttgccaacttggaatggctccaggcaaatctgtcttccaaggacacagtttgaagtacttaaagtaaattgcaatggactggatggatgggggccacgggagtggatagccaaatcaagcagcattgcttgagataaagtccccctccaagaggcacttggtatccaaatggagaccagaacatattcatttttaaggactcccctcgagcagaaagatgatttttacacctttaaaaggaaccaaaaatcctaaatttcttcactttaaaagagtttaaaaaaaaaaaaaaaaagactcagggcataattttgcaaagtattttggggggattcacaggagttaaaaacaaaaacaattccactgacaaatctgggaactgctaaaagttctcagactcttgaataatgtatatcatgactcttcaagagagacaatcgtatgcatttatattttaaatatatttcacaataaaaacccaaaaccctatttccatggagtgtaagatgcaaatattgaaacacgtattttggctaatataaaacagtataaacagtaaaatgtttgctgtttagttgctaagtcgtgtctgactcggttgcgatcccaccaactgtagcccgccaggcttctctgtccatgggatttcccaggccaagaatattagaatgggttgccatttccttcaccaggggatcttcccaacacagagatcaaaccgagtctgttacattgcaggcagattcttcactgctgagctcccgggagctgttagatttaagtaaaactgtttacaattaaattgaatagctgaatccaagacaataaattaacaaaaatattttttaaaacaaactgaaattctttaataattatcctatgttaagcacattgtctgaccttattgttctattcctcagtaaataaaatataattctattagtggtaaaaaaaaaaaaaaaaaatctctcttcatctccacaaaagttctacctcaagcatttctcttcatattaggcaagagtcatctggtaatttgtaagtggagaggccggttttcaaacagggtgatttctgattatgggctttaaattatttataacaaaatttaattttcctggaaggttcctctgatgaaggtttagatgatatcctcagaaaacctcaaggtaaatgttaagaaagtttagcagccttgattcccttgagtatggccaaagttgtctgataaaagaatgctaatctgaacaaacagaaatacagaggatggagtaggggataataactattattttaaagaaaattactgagaaatgagaaatccatactttcagaccaaaaaaaaaattagaccaaacaattctggaattacatggaatctaagaaaaagtcaaaaagtgattacagaaacttttttttttcaaaatataatttgatatgtttatcttaagttaaattttagggagcttctaagtaaataacaatctcattttatattttcaattctcgcctctcaaacttgaaaaaaatgtaaatctgtacaggtagactgtcaaaattcaaattatgcttctctgcagaagtacaaggaaaggctcttcagctcatagttgcatggagcacccttcatgaaagctactttagaaaagtgatacaagaatctgcttgggttacagtaaattttcctgggaaacatttgttctgctttatttttgcttttggactctgc

SEQ ID NO: 30899 - DNA, 1842 bp, Bovine  19866880626525
  misc_feature (1)..(1): n is a, c, g, or t
ntggctttggatggtcagcttttggggaccagtttggtaattaggtaagagggctttgtgaagaaaaaccatttgaaaccagtacctactcatggaatttattttgtgtgttccatcctgttctaagtgctagcagaagtatgaagaaatgcaggagtaattcttttgagatttacattctaaacttcaatgtagaaactttttgctctctcccactccctaggtccatgtcttagttctatcataataaagtggtggggttaatgttcggagaacacagactccacctcatacattaagctgacatgtttctcttctgaaattactatcttcatcctagaatttcagttacaaatttcatcatcttctggtatggttagataaaagagtgaatgttgaatacttgagattttataatagatagcatagtactttggagacatttgttttattctctgatgtgtaattgtgcttctgtgtcatggaaacacatattggttggggtgtgttgggcatgtatctggagatcttagctacttctttttggtacctttccccaacagcaacagtgagcaatccagggctctttttagtaatgaaaggacagagtggggatccagtctatatgtcactttgaaactcattcatattcttcatatcacctatggtgaatcacagcctgacctccctaagttgcagtctcagagcttctgaatgtgggctgcaggcccacaggtgtgagggctatttgagaaactgaactgctgctcctgttcatgaagatgaattttcagccaaagccattggtgagggtcaaataaacccatgttatgtgtgattggcatcagatggactaatctgatgggatagttgctcagaaagttgattatactagaagcttatggtagaaattaaacattttcaaataatttagatgctataaaacatagcagtatagcatggactccttagtgtctggaggcaacagagctgactggatttaagcaagaagagcatagacacatggttatttaaataaccttagagatgccttgaagaagcctagagatcatggcaacatctgaaatagttgaaagaaagggttatatcgatattaaatgtattagggccaagaacattgtctcataataccctgtataatcctcataattaatgcctcacagaggtgaacagaggctcctaattacaccttctaagaggcataaaggagatttagacttagtctagactggccccaaagcacaaggttttcctactctatccagtcaatcccaggcccttcagccttctccaatctggccttgatttacgtgtccaactttctcttccagcgcaaatgatgggctctttttcttgccaccatcacctcaatctttattgtctgtttcctgcgttgtgagaacacagaaatcacctccgaccagtttacttgcagggtcacccaggaccagaagttctgagactccaacagccaattctaattttacctaccctttagttgttgacacggatggaggagcctggtaggctgcagtccatggggtcgctaagagtcgggcacgactgagtgacttcactttcacttttcactttcatgcattggagaaggaaatggcaacccactccagtgttcttgcctggagaatcccagggataggggagcctagtgggctgctgtctatggggtcgcacagagtcggacacgactgaagcaacttagcagcagcagcaccagttgtacactcacctggctgcaccatttgaatttttaatgagacctcccctttttgaattttattctcttaatcagcttgcaaattc

SEQ ID NO: 30900 - DNA, 1170 bp, Bovine  19866880646452
  misc_feature (1)..(1): n is a, c, g, or t
ngggatgcttggggagtagcatcatggccctgtggctcccaccgcagggttgaagatttgcaatttcattacaggaagccttcatttctggaaaatatgagtaaaaatacgagtaactaagtcacttcagtctattttccatatttagatatttccgggcacctgcgtgccgcgtccacagcccccactatatctctcagaaggtgctgtcttctcctgccttttgctaagtgacaggatttaccgtggccccttgcattaggtttaaatcaggctctgtgatggcggcattttgctaagcaagagctctggtgcaggggctcagtaatgaatgggtctttccacaagcctggtgcatttaataactgctaggttatccccaagtgatttccatgggagtggaccccaaattgcctatcagtccaaatgaagtatgccacaatttcccctgcattccagttactctcttatttcagcaccacctgctcctagtatattccaccagggctgactatgccagcatcgtcattaagggctttgtctttctgtgatgtgtaactcatcattgcattggcctgtccctgctcagtggctaaaagaagtatttggcagtgtgtcagcaaacctctggtctgaggggcaaaaaataagctgcccctttcatatcagaagagactttgaacctattggtataagtgtaccacattattatgttgtgtgtgtaaattattcttggcatcagggtaagttttacccaggcatggtatgtggaaacaccagggattttggtgtcagaaaggactgggctcaaatcctagttttatgatttactaagctggtgactttaggcaagttaattgtgttaattaaatgcttcacgtttccccaacagtaacatgggtgtggttcctgcctcatgggattgccgtgagtagtaacagagcacatgggaagcctgaagactggcctgctacttggtgctttcctgctgcatgtcacttgcctcccgctgtcttatgcgtgtggtctcgtgagttttctcatctgcaaaatggggatatgctgaacacagctggaggtggagaacaccagctctgtagccagggaaacttgggtctgaggcctggttctacctcttaccagtcacatgatcttgggaaattacttaat

SEQ ID NO: 30901 - DNA, 1957 bp, Bovine  19866880655722
  misc_feature (1)..(1): n is a, c, g, or t
nacatctttctgtaagccttgaagataattataattcctggctttgcatatcatctatgtgtcaaatactctaccttaacctttctctgaactacagtcacttttttttttatcactctctatttgatatatctaggtgatatctcaaacttcatctgccccaatatgaaatgttgatttttccactaaagtcctcttcatcacagttaatggcaccacctattcatttgtttaagcctaaattctgaaggagatcagccctgggatttctctggaaggaatgatgctaaagctgaaactccagtactttggccacctcatgcgaagagttgactcattggaaaagactctgatgctgggagggattgggggcaggaggagaaggggacaacagaggatgagatggctggatggcatcactgactcaatggatgtgagtctgagtgaactctgggaattggtgatggacagggaggcctggcgtgctgcgattcatggggtcgcaaagagtcagagacgactgagctactgaactgaaatgaactgaaattctaaaatagttccatgattttttttcaccaatctctcattggtaagtccaaaataaatcatttttcttttcaatttgaatttttaactcctctcgttcataatttttttctctccatggcaattatagtgatatttctaaaattatgtcaagctgcttccctgcctaacaccctccaatgatgttctgctacatcaaaaaaaaaaaaaagaaaaaacaatgcaaacttattcctgtgtcctaaaaattgtacatgttctggctgttgccagaatccatctttatcacttttcctctctgttctcgtgacagcctcatgagtcttctttcttttccttgaacactaacttcattcatttctcagtactttgtatttgctatttcttaagcttcgacactttttcatgtctagctccttcttatcaggtaagatacagctcagagaagccattcctaactaccttatctaaagaaaccaagttaaagcactggatcacttttattgaatcatcttattctatttttcacataactcatctatgtgaaattttcatatttgttgattatccataatcctgccaaagaatacataatcctcaggaataaaccaaaatgcctagaatgatgtgtaatgcacagtggttgtgtacttattaaagtactgtttttctatttaattttttttaagctaacttctccctattctttcaaatacttagtacacgatgacaacaatgtgagttcattaactataatctattccatgttcacaaacaatctattctagttaccttgccctatatttgctctgagcagaagctggtcttcacctttctttgaaagcgtcctatgcgtttttacaatatttgtgtacatagtaagtattgaataaatgttgatgaatggactatagaatgggcttttggctccatacatcaagactttcttgaaggacagataattacttctactttatatctgacattttaatataactggctgtggtcattatcctttggaattgcattctagtcaattcttacaaaaaaaagaaaataaggcacaattactttgtgagcaatccacaattggatttgcatttaaaaattgccgagtgagcactcctgcctgatgcccaaatgaaattaatctcttgtaactcaaggtcttctctatttggagatgcaggggtaggagggttaaggaagactgaaggattcctgaatggtaaaagtcgtctctctcattatttatgtttatggggtgcttgcattgatctctcactgaactacccaaggggaatataaaggtggttaagatactgtccctattcctgagaagctctccatctctaggttacatggtcacatccctgtccagcctgcacatgacttcttggaaacatcc

SEQ ID NO: 30902 - DNA, 874 bp, Bovine  19866880692289
  misc_feature (1)..(1): n is a, c, g, or t
nggcaagacaggagtaagtgagtccaggactacacttagaaattcactgaccaactaaagaccacattggaatctcatttttttaaaagagaaaagggttatcttgcctgtgatagctgttcagtgaaatcatcattaagaagtactactatccaagtagtttcctaaacattcttaattcagaaatcgccaatgaggacactttgacagtttttgttttgagctacatttctatgcccacctgctacaaatcttgtacctgaagcactttgtgcggaaactcattaaatgctctcacaaagacagcacactaccactgccttccctttgtttaatggcacaggccctctccctcataaattcattctaattaaattatgcttctcaaggtgctccctctcacgcaatccttatgtaattgtacgtaatattttctccacaattgatgttacattaaataggcttttactacctgctatcctcctaatggcccttactcctttctttctttctttctttctttttcagctcaaaagagacaggaatttgacaagaaaaactctattataaaagtttgcctcaagctttcatcaagcttttcataattttcttaatgacacgtaatatacacagaggctaaacaaatgtatctctctgaacaccagggagaatattacattttaaagttcaacgaaagaaagaaaacaggtcggctcatgggtcgtttgccatatttatctcaaggcatgatgctataggtgagaggatgtgttgattaaaatgagtacaaggaattttacaaaaattatcaacagtcattacctttttcataggtatagtaaaaagatattgattctttaagctatcagaagtg

SEQ ID NO: 30903 - DNA, 763 bp, Bovine  19866880692729
  misc_feature (1)..(1): n is a, c, g, or t
natgcattctgcatacagttactcttaaaaaattaagcatgctgataaaacaaaaaacaaatatcatagtctcctgtatgagcttctgaagcatgagtttttttaaacaaaatgccactagtcggtcatatatcgcgtgtaaaatttgttctacaccaagaatgcagtaaaatgcaacttcatgagcaacagagaaaaacaaaggcatatatattctcagtgacagacgcttcccaaatttatcttaaattagcttttattaataaccggttcaagtgaagattcctttaacttgagacagctccgcagacctaggcgtttacgacatgaaatgaatactgccttggggatgtgctttttttacctgctaaattcctctataaaatttatacaaatttcttgtccaaatcaagtgttaggtattgcttcctaaccctaggttttcagtagcacactatagctacaattttctcaaaagctaccactaaatttcatttaaaatccactgaaagcacctacacacaaaataagaacatacctcctaagcaaatttacctttaattttctttataaagttaaaaacttataaaagtgtgaagtacagaatttaaaatacacttttcaagtcagaaggagaaagacaagtatcatgtggtaccacttaaatgtggaatctaaaatacgataccaacaaactattcacagaacagagacagactcacagacgtacaaaacaaacttagttaccaacgggggagtgggg

SEQ ID NO: 30904 - DNA, 1299 bp, Bovine  19866880740301
  misc_feature (1)..(1): n is a, c, g, or t
nttctatgatgtaatctgcatataagtaaataagcagggtgacaatatacagcgttgacatactccttttcctatttggaaccagtctgttgttccatgtccagttctaactgttgcttccttacctgcatacagatttctcaagaggcaggtcaggtggtctggtattcccatctctttcagaattttccacagtttattgttacccacacagtcaaaggctttggcatagtcaataaagcagaaatagatatttttctggaactctcttgctttttctatgatccagcggatgctggcaatttgatctctggttcctctgccttttctaaaaccagcttgaacattaggaagttcacagttcatgtattgctgaagcctggcttggagaattttgagcattactttactcgcgtgtaagatgagtgcaattgtgcggtagtttgagcattctctggcattgcctttctttgggattggaatgaaatgtacaattggaatgtacaactgtgtacagctgtgcaaagcagtgagagtccaatgaaccaagtagttgcggtgcttacggtgccaaatctgacactggtagacatcagcaccaaggagtaagggggctgtcagagagaaagagaagggtgccaggagaagagcaaatggctccctgttaggggggcctccccccaaattcaatagttatcttcttcacagagtcttaactccctctcacactttcagccattcttctgaacctttagtaaaggctagaaagaacctagtccttcctctaaccattgatcttctcactcatttgtcatttacacagcatacacaccgaacatctcctttccccaacacacaatgcagagcctgaggacccagagatgagttcaatgtgataccagccatcaggatgctcacaatccagtggggacgcatgaaaaaccctgcaatgaatgtgctgagagctgggatggatgcatgcgcgtgaggatggagggagcatgggtggtccttcatggctcctcaaaggactctgcatccctccttcctccgctctcccacctccctgaagctcaccttatgctgaatcaccttatgatgcacccccttgtgctgaatcaacaagatcaggtacaggcatccccagtgaggaaacaatgagggcaccagaaggtcaccacaaataggaagcagctatgctgctttgtgatttaaagtactaaatggtacacttatttccattaactgcaatagagtggtgttctcatgggtgaaaatagtgggattttcataacatca

SEQ ID NO: 30905 - DNA, 1023 bp, Bovine  19866880785585
  misc_feature (1)..(1): n is a, c, g, or t
ntaattttatgttggtaaaaagtgatttcaaaatatttgttacaaaaagtgactttgagtatgaaagagttgagacccacaggcttagaggcataaggttacaaaatgtttcagctggaaggaatctgggggattatctacttcattgacagataaggaaatttaggctgaaataaattatatatccgacttaaggttacccagcaattattggcaatgccaggccttgaacctatgctaaaatccaggactctagaaaggaactaattctttcttctttgccttcctctcttccttccttccttccttcctgccttctctccaaggaacaaaactgagctcttactgtgtgccaggcaatagggtgggtcctgatgactcagagatgactaaggcactagctctctcttaagaagaccacagacaggctagaatacagggaagaaccaaatatcatgaaacatgcctcagcatagacctgtgttcaaaacattacaaggagcaaataactgagtcttcctcagggtcttgagcaaaggacggactatgaatcttcaggtagaagagaggttttgctctgttgagagaaagtaactttcattccaggtccttggtcagcatggacaaagacacatggacaaagacacaagggcccaaacgagagcatctgtgatcaggaattgagtgtccacagcccttaatgtcaaggagtgcttcccagaagcatggggttggtcattattctgacaaatatatgcaagcagagaacaagcacagagcagggctggcctcagaggactcaggactccctgagatcacaggggaaaaggaaacgaagggtgacatctctgagctgctctgtaggtgataagggcctgataagcctttggagttctgcaggcactggctggagtgcaaactaagaaaagagctcgttgattgctgaagtgattaagtggatcaccttattgattctcacctagcctggaacagacctcaataaccaacatcatttgctttaat

SEQ ID NO: 30906 - DNA, 1273 bp, Bovine  19866880824893
  misc_feature (1)..(1): n is a, c, g, or t
ntcaaaaacatttctgaatagagtcaggataaatacaacccaactacatatccatgttctttattctgtgctgtatgataaacaactgttggtggtacaggccttcacagaacagaaacctaaatttttgtacagtttcacactcatgatttcattgaatcctcacaaaacttcaatatgtaagcagggctgatgatacttaaacatttttcagagaaggaagccagagggagaggttgaactgtctaaggccacagtgagcagagactagaaaaccagatccattcacagctcttcacacgaatttgcagttctaaacagctgctctcaccccaccctcgtttatttttcctgaaaattatcactgaactgtctgaacacgtttaggtaaatcttttaggtacccgcctggattttatagtcgtccattcgatttagataattaactgttttctttctcctatcagattcaaaagcagtatttcttcactttcccaggcctcttttcaactttgatatcagagatagttattcactcctttcccattcctgcaaaatatcctttgcatgatgtaatgaaactggcactgaactggggattaattctttaccagctgtaagaccatgagcttcactcggctagtttcagttttatcatctgtaaagcgtggtggctggagacttctgagttccccttcccctttccttctgtgaattgggtactttgctaccttcactctagttatgacacagatttcctctctctggttagcccagcagctcagttgtgcgacaccatctttggtattgaggaatttctgcagtttatcacggtgtgtatctatgctgctcaattgcaggtgtgcccaactgctcagtcatgtccaactcttttgcaaccccataggctgtagcccgccaggctcctctgtccataggatttcctaggcaagaatactggagtgggttgccattttccccctccaggggatcttcccaacccagggattgaacttgtgtctcctgccttggcagggagactctgtaccactgagccacctgggaataagaaggatgggtctagggtggaggaaacgaagagctgttattcagtgggtgttaagtttcagctatgcaagatgaataagtcctagagatctgtacaatacagtgcatatagttaaaacactgtactgtgcctttcaagatttaagaggttagacctcaagataaatgtttataccacaaacaaaagtgggggggcacaaggaaa

SEQ ID NO: 30907 - DNA, 3407 bp, Bovine  19866880857631
  misc_feature (1)..(1): n is a, c, g, or t
ntatatacattaaatacgtgcagttctttgtatatcaattatatctcaataaagcttttctatttttttaacaatggatccacgtgtttgcctttgattacgattagagcccactagtacttaaaaaaaattgaagcctgaacttgttcctaagtcagaaatcatagctggagctttggagaggaatgctaaatgaattgaactgttttcaaccactcaccgatgaatgaccttgagtaaccactacagtttcctgagccttagtttcctcaattgtgtggttagaatgacaatggctgacctgcctagaaggaaaggtaaaggtgagaatgtgtgtggaagatctgtgaaaagcaaactcaacgtcctactattttattacttaaaatttccatccagtgataatgccatgtcttgcaacagccatactcctgaccttgtgttttatcagactgaaaggttggaatgcccaccatttgttcatctattcattcacatgtgaatttgcccaacattcattgaggatctactatggcactttgcttataggaatccaggaaggaatgaagtcatcgcgcttccaagggagctcatggtctagcagacaaatggacaaataaataattgatatacaaactgatgggtcttccctggtggctcagacagtaaacaatctgcctgcaatttgggagacctgggttcaatccctgggtctggaagattccccagagaagggaatggctaaccactccaatactgttgcctggagaattccatggttagatgaatctggcgagctacagtccttggagcgcaaagagtcagatatgactgagtgactaacactttcatacaaatttatatacaatgtgaagagagagctgtcctaaaaatgagtataagacactagagatcatgctggagggacggatggattctgccaggggagttaggaagtagtatttggttcttgaaaaaatgagtggaactcattttttaagggatttctggacagaaaaaaatcacacagacaaaggaagagaggaatgaacatgtatgctatgttcagaaaatgatgagaagagatgagttatttagtgtgtatgggatgagcaggtcacagaattgaggcaagaggagagtctggaaaaggaggctgataataaaagcaaatgtaatctgtaccaagttgggggaaaaccataacatctttatagagaaaattatccaaagatctcatgagattattttgtaatcttgattattagttgtagtaaatgctaggctgctatatcagagacctcagaaccagaagtttaaattcgatctaggctgcaggagcaacttcgctccctgagatcacttagggaccaaggtccttccatcttgccactctcttgtctctgagggtgcagacctgctctttgtcattgaagtctggtctctgacatggcctcatggaagcccttagagaggccaaaaatttacaacaaatttcttttaagcaagtaacatggaacttgcactcagctatcctgcttccatcctattgagaagaacttaatcatgtgtcatgcctatcggaaatggaggctggaaaatatagactctaattgttcatctatgtatccaaaagtagagaacagatttaggtggggacagtagactgccacaacttgcttatttggaagcctcttcaaattctatatttaaatttgcttctagtatttatattgccgtgttatgtattatcctttatattgccatgttagacctctaaatgccagtgttcattacttaccctaaaaagttctttggatgatctaggatttacccaagcaaatcaagaaaatgtgaagtatacctttgtgttcaacattcaatttagtacagacatttaaagttattattagaaaaatatagtgattctgaattatgtttctattctgtaaggctctgatgttctagtctccatatcaatgccctgcaagaggattaggtttttatttgggtcaacaaagcaaaattcctggaagagcatactattttcgaggcataaagccagcctatgtggaaacatgaggctctcaaatgggttgacaactcaaaaccaccctatttaatgtacagctgtttttcaatggggctgaagttactagaacacaaattcagggagtggaaagagctaatagagagtaaacagtcaatctatgtgagctactgttatggttgctgttattatttttaaattatttaatattgtaggtttaaggatatagaagtagcaatttgtggggtgaggaaggtaagaagagcttctttcattaacagatattaaacgtcatgtagatatttggactttgggaagaatgtggaaacactgcactcttatgttgtccctattgatcaaagtccctgaaatgaatgtgaatgatgtgtctctcccttgcttccacacctctctcctactctctcctcttccctcctttgttctcttgctcattcatttcttctgtgctatagttcaagacttcatcttctctcgccttgtcctaactggtctctttgcctccactgctacccgtgatctttctaacttgcacatcttatcttgactatcttttggttaaatacctttgaggcctctccagtccctcaagcaaaactcataagggtctctaccgtcttgcctcagtctgctttaccaactacatctctagttactagctagtgcaatgagccacaatcgaaccccacccgattctctggcccattgcatacgctgatatcaccgtgctttcctagacaagagtactctgcccctcaattgttcacctgacaaatgcatacttttagcctaacactaatgtcacttttttttttctttttatctgtacacccaaggaagatcaatcatctgtattcctgctgccctttatgtatatctaagttcgagatagcacttactatgttgttatttacctttatgtcttgtctctgccattggactgaaagcttcttggaggcagggataatatcttattctctgtttccttagctcttaacacattcagtgtacctagaatacgggtgtatgtgtgtgtgcacagtgcatgctcagtcactcagtcatgtttgactctttgcaaccctatgaactgtagcccatcaggctcctctgtccatgggatttcccaggcaaaaatactggagtaggtttccatttcctcctccaggaaatcttcctgtcccagggatcgaacttgtgtctcctgcatctcctgcattggcaggcagactctttaccactgagcaaaccggaaagctcacctagaacactataaatattaaacagtaatagtattattatagctacctttattgatcacatatattgtagtaattta

SEQ ID NO: 30908 - DNA, 4008 bp, Bovine  19866880902468
  misc_feature (1)..(1): n is a, c, g, or t
ntctgctggaagaaaacacacataatgtaacaagtgatgttaaatattatgaagaaaaacaaagctagataaagaaaaacggggctttctaggtgacactagaggtaaagaaccccctgccagtgcaggagacaagcgatatggttccatccctgggtcgggaagatcacctggaggaaagcatggcaatccactcctgtatttttgtctggagaatcccatggacagaggagcctggggggctacagagttggacaggactgaagtgacttagcacgcatgcacacacaagggctcaacagtggagtatagggcactattttacagaaggtagtcagggaaggcctttttgacctgttgacttttgagctaagacttgatgatagtaaagatgaggactatgcagatatttgggacttctcttctagaaagagggaacagaaatggaaagacccagaggcatgtgggaggaacagtcagggttagggtggctttgtggtgcatcagtgaaagaagagcagttggcagcagggctagcaggaagccaaattatggtgaactttgttggccaaggaaagacacagcaaatctttgatgaactataatatgcttgacaaaggaacgcacataccaaatccattcatctacttgctgtggtggctactgccctgagcccttgcgctgtgttagatacttaatgttgagtggtgaacaaagcaaaaaggcctaattcatagcattgtcaaaggagactgtcgtctgccatggcagtatcttttagtatcctgaaaggttttcccttatgcatatgttactgaaaaaagagtcacttgcataggatatttggcttcacatacactctcatgcaaacaattctttttttttttttttaatttaatggagatctaaatctgtggggctgcagtttaacccttatctcaggactctgtttagattgtaaatcctcaggtctcaagtccatgaccacgaagcttgatattttttcctcccaattgttgctagatttagcaaataaaaacacaagataccaagttaaatttgctttgcagaaccacaacaaataattattttagtattacatgggctctatttattacaaaaaaggacttgtttatctaaaccaagtcacgtattttatctggccaccagtcctagttctctgcacactcccatggaggtttcacgggcagcagtaagagcagtactggaaaaggttcaattagtctgtgatgatttcagtgatcacaaagggtcaaaccactggaatttaacctgctggaaatgagacctgagaagagtatcgcaaagttctaatgactcaactgcttaaattccattcattctgcatctgccggtagcccagtcgttgtcttggaacaataagccacttgtgtggcatagtcagtaggtacaatactgtagttgagagccattcaacccatccaggtcagtgtgtaagtttaattagtggaactgtaattgagtaaggcatagggacatcgtgtgagtcacttcttcaaaggaagtatatcttgtcgcaagtcctagttattggcagactgtttgcctcatgaaagatggtgaaagtagaaaatcagtcaaatcacacagcactggaaaagtccacattcaaaagtaacgtagagaaaagacctttaggttgacttgaaaatagacggtgctattttctttatgctctacaggaatctaaatatatattatgttctcatttagggctgtttcactagctgtgacaaaacatgtttgaatgtgttataagaacatgatgtggtctttgtaccctccaacttaaagaaaggataatgtccacagattcaaggaaagcacttttggaaatgagagctaaactgtgttgagctttggagccaggtaataatgaatattacaaatttaacaaaaataatgaatttgctggcaacagtcatgctattgataatagctcccatttgttgtgggtttaccatgtgctggtgtggtagtttaggtctcccaagaagaatatgcccttacagaattagatgtgcagggattttgggggctaaaatctgtgagctataaagggagggagccaggttggctgcagaggcttcagactgcaaatactgatctgatacctgtgagaggagagaggaaaggaagaaggattggagaggaagaatcttagatgtgagggagcttctaagaaaagttttgtacaggccagtggaaagtctttgagccagtcactagttataaagttttttttgtcttcccataggaaccagtctgcattagtatcctcttctttaatcatttactgggagcctggaggaagctctctggaacaaacatggtagtaaatccagaggggagcgattggagttgtcaggcagtggtgcttcttgtcacatgtgatacgagggccaccacagcaaggcactgtgccaagagttctagattcatgatcttatttcactctaatacaacccttggagatcggtattattagtgtacccattttacagatgaggaaactgagacacaaaagaatttagctggctttcccacagttaagaaggcagaaagagtactcacaggacagagttttcacacttacatgtcagaagctaattgcttaaccatgaccttgcattatagaaagaacagtattcaaactctggtcctataacttattgatgacataaatttgggcaaactcttggacttgtgttttctcatttataaggtgggatgccatcacctcgtcaggaagtgtattttagttgctgttttgttttgagcttaagcggtgttcgttcctttccttccccgtgttgttcgctcctttaggatgggcatctcatactgttaggtatctgcctcagccttgctcaggcacccacaggcttaattaatcctgggaactaaaaggactgtttctgtgcagattatgtatatggatatatctctgtggatgtgtgtatgtataaattgcccagaacttgtagtgattcataggagatacacaataaagggtagtctacctttctttcatccacctctttgcttcatggaaacgaactctgtgctagatggcaatctgaaatgtgtcattttcttgtttttaattttgggggcaaaattacattcttttgggaaaattatgttcttatttttcgtatgaacatttttactctttttcctacaatctcagcactattcttatatggatcaacagtgaatatttttaaacagtggactaaattttcatttgatttttgtgctgaaggtggagtgtataaaagtagttgtaaggtgtttataccagatgccattgtatttgttggacggcgtaaaacaattatgactgccaataaatttgaaagtatttcacttggaaaagatgtaggaatgtagtttattgaaaacataaaaataaggagtttatttccactccccatttttgtgcagtacaatagaaatttgtacatcatccctttgattttagatttctgaattatttaaaagaatcggttaattctccatttcaagtgagtaagacaaagttcattaggatatctgattcctagcatgtcccccattcacagatcatgttaactccttggagaggtttatcttttaaaattgcaaatgctgtccaaactgaaagcttttcaatttaatgccttcttacagtttgggactataagtaagatctttaatacagagaagggatgagtcaccttgtcagagcatcagtcagttctaaaggtacgcagtgctcaggacatgcatgtgcagtgagttctagtagatttgcaaattgctctcatgaaagatatataagtaaaattcaacaggcgccaacagtgctcctgaccagtggttacctactggtggttcttgaatggagtcaaagaaaaaaaatcttaaaagaaatggtgcatttttccctagataataagatgcataggctgacagtttttg

SEQ ID NO: 30909 - DNA, 1463 bp, Bovine  19866880905378
  misc_feature (1)..(1): n is a, c, g, or t
ntcatcataatatttgcttgcctcattgttggggaagaaatgtatattatgagattatatataatttcaaaagaaactagtacacatgtagcacatttatagctggtaagtagatacttgtacttaatgcctttgaattttaacaactttgtctctgctcactttgtctgtgaatttgctaactttggtattgttttaaatacacgtgtttaatacacatttgaaggagaaaatctgcatgtctagaggcttggtagggtatactcacatctcaaagggagcctgatctttagagatagcatatttggataatcaaggccaaggaaaagggatttcccccttcacttttattttttggttcatatagatcaaaccatgtttctttggcctatatcaggtggtgtaaacttggccataggtttggtttgggccccgtagtattcgtaattatgagaggacaggactgaattaacttaattgtagagttttacccagtgtcttcaccaacctcctaataaagtaatatgaaattcagtaagttatgccaagtgggacagtgcttcactcacataagcttcctaaacgtgatatattcttatggcgcttctccagagtgtagaagaaacacatttatctaggtgattagtattctttctgtctgccagatttaaggattgtttggaaatattgttagaatggaaatcaacatttgttgctacacagggttgggcattccaggcagactccggtcgtttttaacggtgttgctctcatgtccacttacgtcacatctgccgtgacagtgacaggtttcagtaacacagctgccatcagagtgataagcttgtgagcgaagcctttgggaaagtaataaagtcatttctggtcccatctcaaaggacattattgaaaatgtctttaaaagtgatcaagataacacccatgaggctgtgtaacgtttgggtgtttaaagttacgaacaatctgcagttgagtccatttcaagctgaaaggtggctcttgcacaaactcccttttaaacaccatagctggttcaaagttttaggaaaatataaacatcagaaattaatagtcaatttcaatagtcagtagtcaatagaaagttctagggcagaagatacttctaagtttgtagctgccccgatcagatttaaaacttgaacatggcagtgctttgcattttgtaatatcttatgagggcctcgtgatttattttgttaatagtatctattagctgtagtacaggtccagttttaaaaatctcgaataaatttacgataactatattaacaaattgcaaggtctcacattgacctccaggacattaggaaatcaaatttaaaacgttgcattgtctgttactcaatgcagtgcactgaggacagcgtgtgacttgtgtactgggaatgatgcaatcgctaaatattctagtgtgagttaag

SEQ ID NO: 30910 - DNA, 785 bp, Bovine  19866880968297
  misc_feature (1)..(1): n is a, c, g, or t
ntccttttctgttggcctaaagctggagaaacgcaaagtcttcacaaatgaatgctcccacatttcccactccacactgctactttcatttgaacgtctacagctgtttcaaaagtacttactgtaaatagcaaagtataagcagatttcagagtctgactctttcacaacagaggatatcattttttttcctgcatttttacgcctggattgaaacaaaactcccaagaaaaaaacatggaaaattcgagtgcctggtacagaacccagcacatagcaagttctcaataaatggcatttcttgttgtagggaatatctggcatcttattaaaagaaaaacagtctgctcatacaggaaaaaaaaaatcaagagaattctggaaataaggccttctggcttcaaattcactaacttaaggtaggcctttgttcttcagggactttggggaaactcattttatagttttgtgaagaatttacacaaaagaaaaattaaaatttcctacagagtaaaactataatgagacttactatcacaaatgtcagagaacctcaacttatttaattttttgatgttcacactaatcaaactcttctactgattgcaaacttctagaattcaacggactacagttcaagagatcacccttatatttcttaagcaaatggagaacattaacatgttatttctccttaaagtgacaatccctaatatcctttctgggttttgccaattttaatcttggcaggaagtggaaatctgcgcactcagcaacactgcaat

SEQ ID NO: 30911 - DNA, 1922 bp, Bovine  19866881025385
  misc_feature (1)..(1): n is a, c, g, or t
ngccccccaggtactccaccctcagcttccaccttcggcctccttccctgcttcctgtgtacagcctcctcgctctctgcagctctcccttgagagactttgtcatcgccctagagcctagagtgctgtgttttccttcttctttcttctgagatgtttacttttctttcacacccaatggaagctcatttacttggtaaaaccttcctttcctaactatctcccaccacaagccagtgtggaagttgcctcatcttttttgcaccacatctcctctggactgggaagtgtttaccaaggtatttatggcagggaaccggcatctctctcctttctcatttgatcttcatcccaggccttcataacatctagaaagtggcaagaattcaagctatgtttgttgagtaaatgaccaaatgaatgaattaggaaattgaagcagagaatagattttgtccagctcccaaagctggtcatcccctcatccttcctgttaaagttctttatctgcacttctctttttcaatgacatttatcatttttaaatgtctgtctatggacagttatctatgtacaagttttatcatggctcccacacagcaggttccctgaggcagttatcttagatcaaaatcaactacatgtctccacaaacagccagtctagtatatcccacatgttgttttcttaatattctttcaatgaataattcttaaattgtccttatattactttgctcagaataaaaactcaacatgtttattgaattaaattgaatttaaccctctgttacacgtatgcctaatatctagaaaggcctaaaaatggattgaattataaagttcatgagggcagagatgatgttctgtcttatttaatgttgttcctactagaagggtgaacaaatggcaggcactaaataaatatctattgattaaatggtgaacatctcctattttacccttaggaagaaagcaaacccaagtagccaagagtaattctaggaccactttgtgtgaagaccctcagaatggatggcattttttctctgaatataattaaccaacccaaagtcaggaatggcagttgtcttaagccccttactcccttccttagcttgatgaataagcttccttttgatttagaccacagttaggtatgtacctttttaaaaaaattatttatttattttcagctgtgctggatctgtgttgctgtgcacaggctttctctattactctccagttgcagtgcacaggcttctcattgcaatggcttctctgttgtgatgcacgagctctagagagcaggctcagtagttgtgttacatgacttagttgtcctgtggcatgtgagatcttcctggaccagggatccaacccttgtccccgcattggcaggtggattcttaaccactgggtagggaagtccaggtatgtatgtttttaatcctgatgctctgacatggtgcttgggtttccaaaatcactggctcagcagcccaccatgttgtctttcctgctgaagcactttccttaatagatgcagtctggggtgcttaaatgcgaatgtgctcccctatcggtgaggggcagtattttagctgccacgatggagtgggcagtattctgtcagatgagttacgtacaactgtttagggttcccttgatttttttttctcctgacagttcaccttgtgcccaacattctgtttcctggagtcagacctgcagagccttatacgccactgaccgtctccgctcctgagaacatgagccaggggcgctgcctgtcacattcctcatcatccttcagatgaatttcccctgattactagaatgggaacttaaacctgaggatggtatacagcccttcctcgtctttccaccaacgtgccgtgaggaaaaccagcatccccaggt

SEQ ID NO: 30912 - DNA, 1532 bp, Bovine  19866881071208
  misc_feature (1)..(1): n is a, c, g, or t
nttatgtattttatttgaaatagtttagaaaaggttcttggagtaagagacagacgtgcaactattaatcctgttatttctgtgaggcagaaattgtgttattttccatgaaaacatttgcaggttttaggtgttatgatccttttagttttcttttaatttcatttcctctgtctccaatctttcagaagcgtgtcatagcttatccttatctccagtagatttctgggtgtgcctggaaatccccccagctcagatcctaaaggttatttaaatcacagtgttggatgctctccacatatacagattttgttgtagaaataagattatgaagatttcatgacaattgataccttgcatttacatgatggatcaaaggactatggaagggccagtgggagactgtggggtcagagctttttactaaaagatttctgggtttcctcatatatcagccaagtttgacaaatacatttatgatattaaggcatcaataattatacaaggttgtggaattaactcacactgatatatgtgaggtcttaaccaatacagagaccaactataaggctttttaaaaagtgatgtttttgtggaggtacaagaattgacttatatttatataatttttcatagcagctaatctctgcctatgtagaagtttgtctactgtgtgtgcatgtctactgtagatatatattgagagagatagttggaaagattatagtgttggacacagaagtactgaagtaaattgtgcttttactttaaagatcaaataaaaataaaagagcattatttacaacataaactaaatacatagctgggtgagcctttaaaaaaatatatctttttgagatccctttaagagacagttttagttttgcacactggagctatgtagagattatgggccctaacatcttccatggctatgattcttgaagataatgagtgaaaatttctcttgttatacttctttaaaatggcattttatttgtggtaccctgagactagtgcctgcctctaggatggaggtgacttatctcttttctaggggttgaaaaattaagccctggctatagcggttttgggtgttttctttaagcccatagctctgatcacagttttttgaaagcttaattatgaatggttgtggagtatttttttttaacccacttaccagcttttttttttttgcagcgtgactagcttcctttgcttatggaaggccccacatttatttagaaaacaaagtccgccttatcctaattttgctggtgacaagatgtggctacaaaaaaaaacaaagaacaaacctgttgctcgtatcagacctgtttgggggaagcctaaattaataaaatggcagtttgttaaacttagctcggactctgtttaaggagatctattatttacaaaattgagttgattcctccctaaagggggggaaaaaaaagtaattttagtggctcttgaaagcttttagataaatactcccaagtcatttttcccaagcttaaaaagcaaca

SEQ ID NO: 30913 - DNA, 932 bp, Bovine  19866881077657
  misc_feature (1)..(1): n is a, c, g, or t
ncccaccagactcctctatccatggaattctccaggcaagaatactggagtgggtaaccattcccttctctgggggatcttcctgacccaaggatagaatccaggtctcctgcattgtaggcagattctttactatctgagccaccagggaagccctcctatcctcataggctgctttaaagcttgacaaatctaactggatttgaaagcatttcaaaactgaaaggtagcacagaggtgtgcagcataatagacgacaatttcatcataatgtcagtcccattcattctctgcataagtggcagagaatttgtggctggtgaggacagtgttaaatttacagagcaacccaaggagagactcgcttgccataaggggagacccacgactgatggtaggcacttaacagcatgttccaattacagcatttaaatctaattgcatactctgttaatctctgtcagtgcggcatcatttaatatcatctcggcagcctctaatattgtgagcaatgtgagctgagctgagactattgaaaaagttcagtcccaggtcttcatatcccctttaattctctctgtcaattatgcctccgccaagagttcaaataaaggtcttgggatccggggttggagctacctttttgaagcaaagcctcttataaatatacagattatatcaggagcctccaactccttgccctggttgtgtttgacgggttagttgcagtgactagtccctagggtataacttactataggcttctttcaaacaaatattgtaaatacaatctgttccatgaattatagctctggaaataacgtgatatcacttgcacgtatattttctcccctccccaatccccctggctcaagtaaggtcgatgtgaaaactcctcctgactcttacttagctcaatttttttttgcaca

SEQ ID NO: 30914 - DNA, 913 bp, Bovine  19866881129367
  misc_feature (1)..(1): n is a, c, g, or t
natggagaccctgcttgaattaacccaatcatgtcttctacacctacagtgcaccttggaacaactgggcttttttataggctattagaagctgttaggggaacttccctggtggtccagtggttaagactgtgtgcttccaatgcagggggcacaggtttaatccttgattggggaactaggatctcacatgccatgtggtgtgccctgcccccataaaaaaaaaaaaaaagaagaagaagctgttaggattgaagacaggtgagaataaagactggacaggcagcccccaatacccacggcagtggagcagaagtaataatgttactgtaatggaaatctttagatttgatctgggaaaaactctggatactttcaagggcatgtcgtattcttcagaggtatttatgaagtgttcatatgcgaggggaaaaaagcggtgtaccgccagccacctcaggcgtgcgttcacggccaaggtccacaaggataactgtgtgaatgtctccttgcttaataccacttggggaatacatttccccactacattccaggctgggccactgtcctacttaagaatgtacttactggtggttattttttaataggagggtggcggtgcaaagataatccagtctggaagccaaaaataaaaggaagccataagtttcgatatttggagttgaggtttggggtagagggaaattaaatggttctgtgaggaaaagagttgccttccaatgaagatgctggctcccttcctcgtattcctatttgtttaggcttcccacaaagcacacactttaactccctgctacccctggaaaagcaagctacctcaagagtaaacattctgcagttaaagtgcccgtggaaataaggttatattttaacagtagccaaaagaatgcag

SEQ ID NO: 30915 - DNA, 637 bp, Bovine  19866881152291
  misc_feature (1)..(1): n is a, c, g, or t
nctattcgttgaccctacaatcccacttccagaaaattatactatggatatgttttcctatgtgaaaattgacatgagcagtattattcttcatggcaaagaattggaagtcacctaaatattcattaacagaaggctggttaaatggaattgttcagctgaagcttttaaagaactgatatgcaaagatctccaagttacatttttgagtgaaaatcaagatgtagaacagtgtgtatagcatggagtgggacgggggagcctggtgggctgctgtctatggggtcacacagagtcggacacgactgaagtgacttagcagcagcaatggaaaaaaacaataaatattcatatttgctcctattttaattgaaatatatctgaaaggacacagatgacttaatgacagttatacatttttctgttcttgtttggctttttcatttgaagagaggtcaactgggtaactgtaggatttgaacaggagaaagattttttatttgtcacatttttttttactatttgaattttgaatcatgtataatataaaaatataaaattaatatttataaaattaaaaatataaaaattattttaagaaaccaaatgcctacaagatagattaatgaacaagtca

SEQ ID NO: 30916 - DNA, 1836 bp, Bovine  19866881168405
  misc_feature (1)..(1): n is a, c, g, or t
ncaataagtagctatctcccaccattgaacaagtaggaattttttgcaaagcactacgaaaattacaaagataaaaaaccaggatccccacatccagtgacttagagtgtagtaaaccattagaaagggaaagagttacccagatttgaggacagacctggatttgaatcagagttacattacaaatttgttggatgacactgagaaagttactcaacctttctgaccctgatgtgcctcaaatacaaaatggaaattgtagtgcgacagccctcattatgttgtctgagggactcaaggagataagacatagaaagcattcagtgcagagctaggcacataaggagtcaggaatagatgttacttttcattatgatgttatagtgaatatgttttacagcttgctttgtggatttagcatttcataatgagaatcttcctgctgctgaatacctctcctaaacatcatttagatgatgatttaatgtcttattatatggacatatcataatttacctcactattcccttgtttatttatctattgggtaatattttttaattatatttgtttaattttaatagatggatgatggctttgcatatactggtttaatttctgtcatatatcaacatgaattatccataggtgtgcatatgtcccctccctcttgaacctctcttccacctcccaccctttcccacccctctaggttgttacagagccccagtttaagctccctgagtcatacagaaaatttctattggctatctattttacattgggtaatattattgtcttcccaatatatatgatgtttttatacattaaggctattaggtttttcttcatatttgttgcatcatctaaattctttaattttttcagacaagctttactgggcccctgctacagcatggggaagcaagaacaagtaccaggttaacttgctcactcatggggcagagttggtggtagggaaagaggggaacatgagcttggtgcaatgcctgccctttacttttgcttcagattttttgacctacaagtattggtcaattttatgtagttaaacctatctaaattttccttcatgattcctcctattaattttaagcttaaaatatccttcctacaaagagatcagagggctattcatcaatgttttttagtctaaagatacatttttcaatataaagtgattcacaaactaaatagattctaaaatttaatgttagtggtcttttctattcatgagcaacctcaatatcccatgacttgaagtaacttgtagctgctaataaggatttttttcataatgtagtttgggggattaaatcagattgtcacatcctgggagtctttggtgagttagtctgcagagatttataggccctgagaagtcacccagatctccacgcatgctctcatcagtgtcaaagctctgctccctattttcactgaaattcagcaggatttgaagaaaagactttggagtgaggctgacccaagttcagagtgcagccctgctctgaacattatagtcacccaagtgtgtaccaggtacatcctctgagcctccatttcctcacttagaaaatggaagaaaatgatggaaccaactttagagactgactgtgaagcctgaataaggtaatacacggggacatccctggtagtccagtggttaagattccatgcttccaaggcagggagctcaggtttgatcccttgtaggtgaactaggatccctcatataaagttgtctggcacaaaaaaaaatttttttaagtaaaataatgcatgcatgtaaatctcttagaacaacacatgcag

SEQ ID NO: 30917 - DNA, 787 bp, Bovine  19866881189156
  misc_feature (1)..(1): n is a, c, g, or t
nttgttttgaaatcttgctatcaatagtgagagggaaagacaggaaaattcacatggaggaatatgtatgtaataccttgggtccagattctcctcaattcaagaagtaaaagaaaacctcaaaggtgtaagaatgtgagtgaatgcttccttttttctgtttcttagaatgagtgcgtggatagaagcagttgcttcttttttcactttttattacagtgagattctgcttttaagtgcatttgctttgggcacagagaaacacctagagttttcctgtaacagagatgttttacaaaagaagaccacactggaattgttcagtcaaggtgtgtctcaggtgaaatgttaatccattcagcacttctttgtgttttggaaatctctttagtgtgctgggctggtggccacattttctggtaatgtaggcttggtatcagactttagcaagtcaaattttaataagtatgagaccgtggggctgaagtagggagaagatctaaaagtggaagggctcaacctccttccacttagatctgccattatctttgactatatgactgaaagcttcatacgtttcaagagcttttcagtactttaaccaactctgtagtagaggctttcccccttgtcaaaatgcccagagaggaagcatcttactgcctttcagtgtatggggagtaatgaaagggggaattcagttcagttcagttcagtcgctcagtcgtgtccgactctttgcgaccccatgaaccacagcacgccaggcctccctgtctatcaccaa

SEQ ID NO: 30918 - DNA, 1743 bp, Bovine  19866881193792
  misc_feature (1)..(1): n is a, c, g, or t
nctgttgcttctagaatgctttctacacccacgtcttaccattattgatttacaagttcagttcaattgctcagttgtacccaactctttgtgaccccatgaacaccagacttccctgtccatcattgatttatgaggttacccacaaaatgatgttggccccaaatcacctagtttgtggagggtctttactagtaccgtcccatccccactcacacgcatgcagtgcccgctttctggcctgggagtcctggatgagttgttgcatagcatcagggttacctgttctgccacgtccaggtatgcacagccacgcactggctgtccagcacactgaagaatgcaaaactctcaggatatgaggatataagaagagtcaccctgtgccaaagtttgggacccactctgttctggcatgtctttcgcagggtcatccatttttgatccatcttgcttcctctactacacctaacacagtaccgtgcatgtagaaggggttcagaaagccttgggttgattactggagagtagattactcattttaacctaaagcagtgtctttagggaaatgcagtgtctttagggattcatgccatcccatggtatggcatgaatatggaaggatataggccttctacaataaccataccacaatcaacaccagaaaatgtgatttcttaaaaaccgtaatgaaatccagttacctggatgagtgtgccgaatgatcaagtaaatcagccaataatctctagagaaccatttccaggacccaaatatggtcatgtttcctttttgtgttttccccagcacaaggaagttggcgattgagtcacctgtttgtgatagcgaaacttttatgaacctttagcagatccatttataggcatcttttaaagactccagattttcctgggccttttgtggtgataactgatgcatctgaagtagaactgggagctattctttgtcaagagatagaaaatataggcagtcttgtcttccttataaatgtaagttgttgttgttattattattattatgtcagcggtaaactgctcccgggagaactgagatacagcatcgcagagagagagtgcgcctggccgtgaaaatgggcagtaggagtatgatgatattatcttgtggtaatgaatttacctttatgacagatcattatccccttctgtagctgaatcggatgaaggacaagtctagcagaataacctggtggtgcttgggatttattggctttaaatttttaaactggaaaaatgcagttacagccaggttatctctatatgaatgttgcagagggggacagagatgaaagaagtcacattttctttctggtaatggtagaaagcaggtggtcgtgacagtctttaacaaaacaatgaatgcagttcctcatatgctttgtcattttagtgcttgagtcgggatgaaatgaatggtaaaaaatccataggacatcatcatcttcattgataataaaaacaacttaaggtttcactgagtattacgctataggaaagagcaaagatttatattttacatgatgagatgagatttccctcctaggtgtgtgtcattcgagttcgtgatttcaaggcttcatgtaaacatgggactgtcttatgttagtgactgtgggagatggtagattatagttatgcacagaggtgagctggggtatgatgaggtaggcgtctccatggggagaggatgggttggaatcatgta

SEQ ID NO: 30919 - DNA, 1243 bp, Bovine  19866881328575
  misc_feature (1)..(1): n is a, c, g, or t
nctaagttatgtccaactctttgtggattatgggggaacataatcccagcccataagaacctcttaaacaaattatttacgcataaacccttttcctagctctgctttggcaagggaacatagggctatgttatgaagctactctttctttctttgccccctcttatctccatgtacatatctatgtattatttacccatctatcaatcagtcaatgaatctatcatatatctatctatccacataatatctaactggttgttttatttttgtttttgttgctattggggtggtggtagaaaggcatgtgagtgtgaaattacacccaaatacaaaatctggtcatctcttcaagaaattctgttcagaaaattataacagtatctgagaagaaatagacttctttcatgcctgacgtttaagcagccttaattgtctagtgcttttgacaatgctctgctgataacgagttacacatgctttgtaagccccataaaaggctatacaaaccccttttgaactttctcatggctaagtagttatgccttgattgatggaagagtaagcacaccttgattgcttacataattttgaattaattatattacttccagattcgtttgttattaaggagggtgcttatcaactgattctaattaatgtataacaactttgtgatataatagaggctttaaacatttaagatattacagtccccaaggttcaattcattcattcattcaacaatattaatcgaagtttcaatatgtagaaagtactttgggagttggtgtgataaggcagagaatgtgttaacacttggtgcctgcatcctaaggtggaaatgacaatcatagagtgaaacggaaatgtagggagcagttgtcctagctttctgttgtcatcttcacttgtttcagtccaactgggaaaataaaacaagtttgagggaactggctacacatgtgatagaaaagatggggagccagcaggcacagaaggcaagacacagatctgcagcagcaagaggcccctaaccctaccagcttagagcggccaagacacgggagggtttctggagccttgggctgggtttcactgggagaatttgatgatgactggtctacaagatgggatctgtatctgtggaagtgatgtggctcttgagcatacagaagggatgtgggatgctctggcttcccctcttctcttgcctcttcagtcccctcagaacctctcgtgg

SEQ ID NO: 30920 - DNA, 1124 bp, Bovine  19866881412404
  misc_feature (1)..(1): n is a, c, g, or t
naaattcaatttcgtcaccctataaaatgagtgaaataattcttttcctggagaggctttataagaattagttgaaattcagttagattaaacatacagaatgcttggcacagtacctggcacgtaataggtgctcaaaaataggtgcccacatttaaaagaaacttctgcttagctaagggtagcttcaagtgacttatcccataaatatgtgaaaactggattatgaatgtaaatattcaacacagtcttatggatcaagatcactgtaagggtccttcatgctagaggacagaggctcatagattttggaaagaacggtgactcaaacgtagcaagtgaattatttgaagcctggagtaaccaaatggagggacactttggaaagtcgaaaaacttactaaggtgctaagtgtcttgtataccttgttatgtcatttaatattgaagacagctctgcaaggtagttatcattgacctaattttatggacaaggaaacagagattcagaaagactaagtgagttgtgtgtcaccatggtggaactcagggttgactcagctcagagcgcgtgcttcattggatggaaaactagtgccgacatgtgtatcacttttgaaatcagatttgtcataaaacttactgcaacacattctctttttttcatccttctcaatgcacttactttgtgttgtgtttaaccctcagttccatggctttgggactgtggttctcggtcttggctgcccttttagcatgcctgggatgggatctggcgtgagtattttctaaagctgccctggtggttccccgtgtgcacacagggtgctcagatatatctaccttcgtcgtgggtatttgggttgtccccagttttaagcctaagtgtcagcagtgttttgtcagagtcaactatgatccccctgctggtttaggggaagatatatggaaggcctgacatctattctagttgtgatagatgttgcttatgcattaattagcatgtaaaaattaaatgttcttactctattagctggttttctctttttttttttccagttgaagaaggcgaattaaatgcaatgaagattatggccaaaaaaaaaaaaagattttgattatgg

SEQ ID NO: 30921 - DNA, 3119 bp, Bovine  19866881420510
  misc_feature (1)..(1): n is a, c, g, or t
nttggccgctgatcgggctctgcgcctgtgagcagaactgtctcaccctttgcagagacgatcaggctggggggagtccagaagagccggagcttggtgtgtgtgtgtgtgtgtgtgtgtgtttaagctgcattgaagccctctctccctgttctctttacttgtgatgtttcactaggtgggagacaaaggggctttgtgtgttcttcaaagtactctgtgctgactgtgatacacatccaggaaaaacccagcccaaagccgtgacattgcccctggttcaaaccccaaatgcaacttacagtggttagaaatgacaaaggataggtggcaggacccagaggaaaaacagtgaaacccaaaggaccttaaacagatctgagggcaacgatttgatttttcaggtgagatctttaagaaaatcttaatcatagtcttcctatctgcacatacaggaaagtcagtagagtgtatatttcattgtctgcccggcaaaggtaaggtcccctttaaattttctttgaagattactgttgtttttaatctttaggatgtgtgtaggggagaggcacagagaggcagcgtgtcagatgtttttctttctttttttaaggctcacctgctcttaagagcgaattgcattttgtcagtggcagaagaatgccttggcgttcgggctagtgtttggggtgtaattgaattgctgggtgctttaaacattgcagggttttaagccgagaaataatttaatgatgtggcctttaggattgttaattagcactgtctgtatgaacatgtaacaataacaccacctaccgtaaaagcaatgttctacacttcagaacactcatttctttcgggcttcctgcagagaagcagtcattaactctttttttgacaaacacttttagacatgctctgcagggccataaattcacccctcaggcctatctctgcatttatccacggggcaagctggcaaacgggggaagcttggagaaggatgagcccagccctccaccatggcaccgactgaggaggaggttgtggtgttttctgtgctgaattcctgagacactgtcactccagaacccagggagagattcaggtgagaatgtggggaaattggaacccctgtgctctgttagtaggaatgaaaaatggtgcagtcgctatggaaaactgtatagaggctccttgaagaattaaaaaaaaaaaagaaatgggacctaccatatgatccaggaatcctgcttctgggtatttatccaaaaagattgaaatcaggatttgaaagagagagtaacactcccatgctcactgcagccttattcccagcagccaagatacagaagcaacctgagtgtcccctgacagacagatgcctaataaagatgtggcttatatccacaatggaatactattcagctttaaaaaagaaggaaattctgccatatgtgacaacattgaggaaacctgggggcattacgctaaaatgacctaaggcactcacagaaagataaatattacgggattccacttacacgaggtatctaaaactgtcacattcctagaatcaaagagcggcatggtggttgccagggactgggggaaggggagaaaacaaatttactaatcagagggtatgaagcttcggttaagtaagataagtaagttctagagatctgctgtacaacattgtaccataatcaataatactgcgtttttacacttaaaagtttgttaagagggtagaccctcaagttgtgctcttgcctcaagtagaaaaaatgtcaggaaatcaggtcatgggaggagaggttgttggcttgccccctgcccactctgctggaggaaaccttcagtggctgatccctctagcagagttcaggggggttggaagcgccacgagtctggaaggagtccacgtatgcagtgaagagtgggaggccgatgacgatgggtggaggagtaagggcttcccatgctttcttccatccacctggtaatgacccagtgctttttccatcttctcctcttaagtcacaagtgtctttctcttctgaagacctgtctcttcttcagcaagacactcggcagcacttgggcatctaaacactagattgtgccttgtcttctgttcagccagactgtcccatgaccttgtgtccaggcctggccatctcctgtgagaactccatcttggaaacctcaagttctggtagcttctctgcccaccatctccttttctctcaggtctctcactccttcactctcacagactcatctggctgctagtccagagatagccactacctggcttggctgttgccactctttctgtgcccttagagaacattcctgactgatggtgccatcctgtcccgtggagcacagaggtaactttggaatccaggattctatcatttggagttgacatctcagatgaaatctatttgatattcagctccaacagcttgaccctttttctttcagtctatgaggccagaccctgtggtcggtcatctgagctttacagagcatccctggttcccttgcacacgcccttgctgtgtctgtccagtgaagagctccctccactcttacactcagactgctcagtgctgttggagtgttctgggttcctatgtggatttatgccacaaagcacttatgcttcatctttcaccttcagagctgccgtttctttttttcccctcttttttcttttctttcttttttttgatgtgaaccatttttaaagtctttactgactttgttacagtattgcttgtgctttctgttttgattttttggctatgaggcatgtgggatcttacctccccaatcagtgatcgaacctatactacctgcattgcaaggcaaagtcttaaccactggattgtcagccaagtccctagagctgcctttttctttttctcctttttggctgtgctgtgtctttgttgctgcccgaggactgtctctagttgcagcaagcaggcctcgtgttttggtggcttcttttgttggggagtgtgggctctaggcatgcttcagtagttgtggctggcatgtggcatggggcctcttctaggaccaggaatctaacctgtgtc

SEQ ID NO: 30922 - DNA, 1212 bp, Bovine  19866881452392
  misc_feature (1)..(1): n is a, c, g, or t
ngggaaggagaagtatctgtttaaatattgtattctacagtaactcaaaaattatctttaaatgacaaaaagtaaggtgtcaggtaaacatctctatttttttcctttcttaaaattatgctaaacttacgtttaatgttaagaccttgaattataagaagcactctaatttttctattccttaaagtactattgatctctaaaggagatatttaataagtgaaattatagcatctagggaaaaaaattcttcttttctgattttgtaaggtagtcgatgctgcctcgcaatacactcctggcctttcttgtactggtcattttctttatttctcctgtgtagctgcttgaacacctcccagcgggtgaggagtgtttgttcaggtggcacagagtagagagatcttgactggtagagagtaacttaatatcagccactataatgcctatcagtgaaattctagctcatttaattattacttaattctctgattattttttgtatctgagagaagaagattgtcttcgctctggggaagtatggatggctagatgttgctcttgcagtttcttaattcactatacctggtaaggtgttttgagccagaacacctttttaaagaatggggtatctatgtacctacaaaaatggtgaaattctgactggacctgtgatgaaatagggaatcctcacgttcagttcatctttcagtactggatgccactcatgtttggtcagatttctaaaaaatttgttttggagatcattcataggatctcaggtctataaccaggtattgaatgtttatcattggaaggaagctttgtattcatttatcatttcctttctgccaaaccacaaaaatcccaccttgttgatcttttctcatatatgtgatatatgatgtgtgtggtggtgtgagagagagagagaggctgcgtagctctttacagcaagcctgtatcgtcatcctttcttaacctctttctaggaatagagatttctttgaaaccaagcataatcgagaaatgaaatagattgttaaaagactgaatgatgcattttaagtcgaacagacatgtggattatctgctgtttcgatctgtccatcccggaagttccctccatgatcactgtaccctcaatttttgtatgggaattggagattagatgtaaaatacaaattattcacactagtcaagtaaaaagaa

SEQ ID NO: 30923 - DNA, 1674 bp, Bovine  19866881471565
  misc_feature (1)..(1): n is a, c, g, or t
ntatgagatcatccccagtgggaagtatagactgatatagttgccgtgtttttacatttttgcatgaagtggcaaaatattaaaattaagaagtatatcttaagccttagagcagccattagaaagataatgcagagagttataactaagaaaccaggaaataactagaattctaaaataatcatcaaagaatccaaaagaaaagaacagaggaacaaaatatcagaggaaataaatgaaaaacaaacaacaaagcttaatgtaattattaaagtatcttggaatcactgggcattgtcctctagctattaaagcattcatacttccgtttacatgcagcggacaaaccaatactgttttgtaaaatcactcattcaataaatatttactgagttaattctatgtgcagtgcattaatgttatgtgcctggtacacagtgataaaaaagattttgtcttttttataaaagtaataggaaatcaggaaaggtatttgagcagggaagtaacatgataagatttgcatttgtaaagctctctgtgtgaggaagtgggtggaggaggtgggcagtggggaatgcaagaggaagaggacagggggctgttgcttgattcaggggagaggtagagatggcttggaaatggctaacaaggctaaacttggagaaactcctctgaaattaaaagatctaaaaatatgttagaaaaaaatgtatagggcatggtgatgaattgtttataaggagtgaagagaagggtgatttcatagagcatttctagttttcttttgtggaaagccactagaggagggtgccatttgctgaagttaggggacaatggtaaaagtgaagaccgggagttcattcagggatattttaagtttgagtaacactaaagcagccaactggagatttcaattagggaatttatgttgtattcaatgcagtatccagtactcaatacagtgtacatttcaaaataaaaattcaacacatatttgttaattgaccagcttggaataagaaaaaaaatattaataataataatttattaagcattgactcttccaagcattctgagaggcattttgtctgagacatctcatttaacagttcaactttggtgattccaactttaccgattagggaacactcaagaagcttaagtaagaaaacaatgaaattgtagaatcaaaattaaaactcagatctgcctggtcacaagtcacttgccaagtctttgttcttactcataacctcctgatcacccaccacaatgtaacatttattttatggaaaataactcagcttcttcctctgtatcttagaaaaactctccctctcttttcccaataatcatgtattttctcactcaggcatggatactttggaatgaaatttgatgatttctactttgcctctaccagagattaagaaaagagagtctgctgccttctctacctgcactttgctggagaaaaattaaaatagaaaaatggaaatactcccagtgctccaagatcacggatgcactcatttcatgtgtattcttcaaaaatttcaaggaagctgaaatctaatttaatctattacatgattgttctaaatgacttaaccacatcaaagcatccgtggactcacactctgggaagggacattgtaaaatggttttcaa

SEQ ID NO: 30924 - DNA, 716 bp, Bovine  19866881544146
  misc_feature (1)..(1): n is a, c, g, or t
nttattaattaacctcgtatgttggattgagagctcctgaacatttacagatttgtcaaacaggagagtggtgtagagggaaccatgtctgcaaaactggtcctgtctgctctgtctggaggaaggcttgcattttcacttgtgtgtctcttaagtgccagccacagacagcactgtactgatatttaagaacagcagagccaatcttgtctcttcccagatatgacctcgaacaagttttctaacctctcaaaggcccagtttctttgtttgcaaaatgaatgtaataatagtgcctgtctatgaggtgcttggcatctgtcaggtacccaggaaaacagaataaaatcgaaccaatgcagaaccaatgagtagacagaccagggaatcatagttctgtttgtttatgacacaaagacctatagtaggtaatattgaatgacctgcatttcactgtgggaagtggtatgttttcattggaggtgtataagaaaaagctatttgcatgggtggaaatgtacaccatgtaaggtttcttttattcttactatccagggatgctatgactgtcacttttttagggccagagagaaggcaaaagggggagtggtagtcaaggagtcttagattctggttgtaacttagtcactgactaattttacatttgtctaaacttgagacaccctagaagttctctctattcttttatgtttaaa

SEQ ID NO: 30925 - DNA, 1328 bp, Bovine  19866881591990
  misc_feature (1)..(1): n is a, c, g, or t
ncatagtttgagtggactgccattgaattgtgtaatggcaaacaagaggcaaggtcacagccactgttcatgctagggctgcagtctattttttattataatctttctggttcttcctttaatgctcaagcccaaatggtttctttcaaaagaagaacttgcgtaagaatacaatcttatttttaaaaataatttccatgccctgatcaaaggtgaaccaatacgccacttgttcagaaaagaaagtttcatatctactccactttaatgaagacctaaaacccagcaaatctttaaaatggcgcccccgaaggacgaggacattcggaatctcttatcctatactaatttcttcatgagcctttctttgcaagaacatgttgtaattttcaagtttgggcttgtccctgtcaaagagattcatttcctcgttgtacctgggaggcgagttaattctgttgtagtagctccatcgtggcaggttagactgttaccaaaagagttcctactaaattgctggccagaaaaccaagggtgtggatgtgggttccccagagatgcacaaaggacctagaggcttcaaaaagaattttacgaatgaactgcaagttggatcttagcaacgattcccgtgtgagaatacagaagagtgcgcatttctaaagcagcaaacagccacttagggtgccacctcatgccaggctgagcagacgccttcctccattcactcctgctctccattgacaaacacctcgggaattctgtagccacccagcagcctggctttgtggcagagccaggatggttcagctgctggattttaatcgattctgcagcagtgcaatgggaaccccaaatcagtctgggtaactgagagtggttttcacacccaaagattctaaggctggccacagtgtactgagaaccctggcttttcaaaattccagggccatgaagtcatccccagccacgaagtttacttaacccttgcagccggctcgggtgtacaaaccacggctagaaaattagaacccgtcaggccagagtcacaatggcctgtgtgtatttgcggttttcctcttttcccagtgaagtatttaaggtttcagagtcactccaccaacttcaagacagtcagcactttagaaggaaatgggcagaaggagtgggtttttttttttaaggaggattttctgggttcataccaggcagaatatctgacagcctcaaagcactcactctgaggaaaacatcggtgccaaataaagaagagagggtgctgacagagagcaccatctaagcggcatcattcagctgccagggagtgg

SEQ ID NO: 30926 - DNA, 1357 bp, Bovine  19866881723054
  misc_feature (1)..(1): n is a, c, g, or t
naacactataaaaagccaaggcttaggaaatgtaactaaactaattttgtggaagattctaaaatattctttaagtatggctctaaatgattttgtttccaatacttcctggcagaaaaatattacccctgcatttcaatgcagaggaaataagcaggctacatttggccaaattcatttatttaagttatttcctaaaatgagtgtaatttggaaatcactggtattattttctcccagtacaggttaatgccttatccgtggcctctggaagggacacttcttgcaaagagagttattagttttttatttagaatgtactgtatgggtgatttgtgggtgtaacaaacctgaataatttaaagtagtctttatttgctgagaactgcagtttttattttttaagtagattttaaatctttaaactttcagagattaagagagatcagccaggggatttatttgtagcaggaatttctttttcttatgcttgcgtctttcccagcacccattcttctctcctgcctccatctagaattatgtaatgtcagcaataaaggagatagtagatggccatcttttagagcggtaggtttcagacttcttttatggccaaatcctttatgcaaagaaaaattttagcccctctagcaataaaacagggaaaaccagagctgctctggtggggcttgggagtgggaatcatccttctcagctgaccagtccatcttcatgccaagactcacagaactcctgggaacacaccttgaaaaccaagaccactcatttcacagtaagagaacagaggccagagggtagggaatgacttatccaaggtcattcagcaaggacaaggcagaatcagaattaaaacagtgtctcccattccctggtagctcagatggtaaagaatctgcctgcaatgcaggagacccaggttccacccctgagtgggaaagatcccctggagaagcaaatggcaatccactccagtatccttgtctagagaatcccatggacagactatggggtcgcaaagagtcagacacgactcagcaactaacacctgcttgcttgctcctgacccaacttatgtgcatcccatcagatccagctgcctcctgcactaggctttgctgttcgctcgtagatctgtcaaccatctttcaaattcccatctcttggtgggagtgataagaagcaactcagcacaggagcacagcacagaatcacactcgtgcatgttagcagcggtcgtaacggtggtcccaggccacatcctcctgatgtgcacttagcagccgccctctgcctccagcaaggcttggtggctcgtcatttctaagcagggcacgtt

SEQ ID NO: 30927 - DNA, 1469 bp, Bovine  19866880217681
  misc_feature (1)..(1): n is a, c, g, or t
nggtggtgtcatctgcatatctgaggttattgatatttctcccggcaatcttgattccagcttgtgcttcttccagcccagcgtttctcatgatgtactctgtataaaagttaaataagcagagtgacaatatacagccttgacgtactccttttcctatttggaaccagtctgttgttccatgtccagttctaactgttgcttcctgacctgcatataggtttctcaagaggcaggtcaggtggtctggtattcccatctctttcagaattttccacagtttcttgtgatccacagagtcaaaggctttggcatagtcaataaagcagaaatagatgtttttctggaactctcttgctttttccatgatccagcggatgttggcaacttgatctctggttcctctgccttttctaaaaccagcttgaacatctggaagttcatggttcatgtattgctgaaacctggcttggagaattttgagcattactttactatttacacgtattaaatacatatttgtatatttataagtgaatatatttatattccctcaactatagcatttaacacattgtcctgtaatcagagttttaggtgattactgggcctctataaggccctggagaataggaaccatttcctatttatctttctatctgtggggtctagtctagtgattggaatttcattaatgataaacttgtttttaaatgaaagaaaaagtgactgttttacactatacacattacaggcactgctggggccttaatttttaatttataaaaagggctgttatacttcaccagttttgttttaatagttttaaagagtcactgtgaatattaaaataacccaacatattctatggaatttgctgattagcctagaatatgaaccattctgcttttctctgtgacctatttctttctagccattgtattatactaaagagtgtaaaaccataagtctggaggaaatttgagtggttatataatataatgccttatcattaggcagcttgtaacctaaaccagattagacaccattctctcctcaaacactgcctgaaaagacaattctaccgctttacttggcaccacatcctgagattttgtgtcactgagaaaatgtttctgaatacggaatctggatcttctaatttggaatttaagcattatgtgtgctaagtcacttcagttgtgtctgactctttgtgaccctatggactgtggcccaccatgctctgtgggattctccaggcaagaatagtggagtgggttgccacattctcctccaggggatcttcccaacccaggaatcaaacctgcatctcttatgtttcctgcattggaaggcaggttctttaccgcgagtgccacctgggaagcccttaaacactagaggttaagcactgcaggttaggtcaaatgttctacagaagtgtagaaactctgtagagacttttt

SEQ ID NO: 30928 - DNA, 1018 bp, Bovine  19866880276509
  misc_feature (1)..(1): n is a, c, g, or t
ngggtgaaaaaaattgaaatacacatacacattagcattttagaattaatatctcttattataataatttggaggaggggactccaaaatcactgtagatggtaacagcagccatgaaattgaaagacgcttgctccttggaagaaaagttatgaccaacccagacagcatattaaaaagtagagacattactttaccaacaaaggtccatatagtcaaagctatggtttttccagtagtcttgtatggatgtgagagttggacaataaataaagctgaatgccaaagaattgatgtttttgaactgtgatgttggagaagactcttgagagtcccttggactgcagggggatccaaccagtcaatcctaaaggaaatcaatcatgaatattcattggaaggactgatgctgaagctgaaactctaatactttggccacctgatgtgaagagctgactccttggaaaagaccttgatgctgggaaaaattgaaggcaggaggagaaggggatgacagaggatgagatggttggatggcatcaccaactctctggacatgagtttgagcaagctctgggagtggtgatggacagggaagcctggtgtgctgcagcccatgggactgcaaagagtcagatgcaactcatctgaactgaatgaactgaactgcactgatatgttgaaaaggttggaagttcaaaaggtgaactaggaataccaataagaaatatccttagccttattttttcatactttttgctgccttattatctaagtctagtaagttaattaaagtatagagaatattttatataagaatgttaatagttttggatcttcaatatttattgaaattatcttgtttcatcgtaggtcagacatatttccaactttttggatcaaaaccttgtccaacaagactttcttcagcgaagaataagaactctcaggtagctgaacacagccccagtacaggtattctatgactctgtcataaatacgatttacagatttttag

SEQ ID NO: 30929 - DNA, 1296 bp, Bovine  19866880359326
  misc_feature (1)..(1): n is a, c, g, or t
ntggactgtagcctgccaggctcctctgtccacggggattctccaggtaagaatactggagtgggttgccatgccctcctccagggccatcttactgaccccagggattgaacccacatctcttaagactcctgcattggcaggcataaaagcccctttatttatattagttcttcagaaaaagtgctttaaattcttctaagaattttataaagtgagaaaaacaccccttttccacctcctcaaaaagaaatgcttctaaatataattattttcatgcattttgaagtcacaatagcaatatttgtagattcaaagtcattctcttttataaatgaaatggaggctatcttcaattccagttgcaaattgctgaggaatttaactttgtttcattaatattccctcttaaaagaatttctaattcacagcagaggactaagctaaggtcagcaattacgatggcagagtagcagaaactattaatgacaagcaatattgcagctaccctaatgcccagtgacagcagttcatgtcaggctgttaaacagatctaaagcacatagtttgcagcaagtagctttctaaaatcatctacttgagcattctatttcacagtgtaaagtgctcacaaggaagatatgcacagccctggcaaacggagaaaacttttcctggccaataaatagacaaataaataaaaccctcaactgaattgctgaagaggatatgtgggtataaaatcaagacaagaagagttagatagaatcatggtatctgtgtccacagagacagtctttacatcttttcaggaatagtcaaatgcattctcaacttaatactattcactatgattagtactggaggatctgtttagtacaaaagactgccacgtttcagttcagttcagttcagttcagtcgctcagtcctgtctgactcttgggaccccatgaattgcagcacgccaggcctccctgtgcatcaccaactcctggagttcattcaaactcacatccatcaagtcggtgatgccatctagccatctcatcctctgtcatccccttctcctcctgcccccagtccctcccagcgtcagagtcttttccaatgagtcaactcttcgcatgaggtggccaaagtactggagtttcagctttagcatcattccttccaaagaacacccaggactgatctcctttagaatggactggttggatatccttgcagtccaagggactctcaagagtcttctccaacatcacagttcaaaaccatcaattcttcagcactcagc

SEQ ID NO: 30930 - DNA, 1612 bp, Bovine  19866880452409
  misc_feature (1)..(1): n is a, c, g, or t
ntgtgaatctctttgcatttatactcttaaagtttgctgaacttcttgaatatgtagatttgtgtattttaccaaacttgggaaatttttgtccgttatttctacaagtattctctctgcctctttctctactctccatctgaggttgccattatgtgtgtgttggtatgcatgattgtgtgccaaggttctcttagtctctgtacatttatcttcactgatcctttcttctgcctactcagatctgcaattgaaatcctttaatgagcttttcattttgttcccctttggtttctttttgtaatttttatctttctttatattttctatttgtatagatatgttatttctgatttcctttaggcttttgatttattatgaaagttgaataagtccaattgctctgcttcctcagggacagtttctgttaatggatcatagttccttattttttgcattcttcatagatttttagttgaaaactggacatttttaatatttgaatgtgctaactctggaaatcagatttctccccaccccccactcctgggtttatttttattgctttctgtatgctgggactgtttgtttagtgatgttttgatgtaatttttaaagtctgttttctttgtcatatgtggtctctaatgtctccattcctttagcttgtattcagttagtgtctttacagatagagattaacctgaatgccagaaagcaaaataagggggaaaaataggaaacagagcaatcgaggaaagaaagaaaaagaagaaacaaagaaaaaaagggaaaaaatgggaaaatatatctctaaacctcttgtaattcttgtagattggcttttgctggggcactcattcaacagtttgccaggctactatttatctctgcattaaccttagtttgcttgtgctcatcctacagttcagacataggtgaaggcataatgtctgattaggtcttttctgaacatatacttttatactttttcaaccagtttacgtgagtgctatacatgccctattttcacaaaagtataactctccaactttttcttcctggctttggatgctatattgtatgcctcaatcgttatgttttgtgccagaaaacagtgcatttttgtttaccttacaatattatcaaatgattcttgtcacttttctaagtaagttcccagatgggcaaaacaaagtcaggtgccgtatattacttccctgcgtagtccccagaatggcagaacacacagaaccctttgtgagttcttctctgacttctctggagcataggaccagggtagtacactaggtgagccagctgccgtctttaagactgttgttaccctagggagggagggagggcaagggcaaatgagaacatcacaaatatatcctcccgttttaaaattttctttgctctgattcagtgttcacttggttgttgcaacctcagactggtccccagagttctgaccaagttgattctgacagttttgtttgatttcttgatgtttctgtgagggcacgggctccgagagctgcatactctgtctgccgtgtcactagccgtttccttttggggccttagttaccatgtgatgtgatatgca

SEQ ID NO: 30931 - DNA, 742 bp, Bovine  19866880616447
  misc_feature (1)..(1): n is a, c, g, or t
ntgatagcattaggaggtggtgcatttggggtgattagttcttagaatggaggcctcatgaaagggcttagtgcccttataaaagagatcccagaaaactctcatccctcctacatgtgagggcacaagaaaaacacaatctatgagccaggaagggggtcctcacaagaactcaaccacactaacaccctgacttgcagcctcttgaagagttagaaataaactactgttgttaataggccacccagtctattgtacattgttatagcagcctgaactcacaaagacagattttatttcatgatgtctgttcttaccaaacaaaaataatctttagatgggaggcaggacaaggtgcaaacaacttagcatttacctttagatcaccaaagaatgactccagagatattcatttgacacaccaaaaaagtggtaactatatgaggtaatacatatgttaattatcttgattatgatcgtttcacaatgtatacatatatcaaaatatcatattgtatgccttaaatacatacaatttttgtcaatcattactcaataaaactagggaaaaaaatatcatctgtgaagtgagatcaacacccttcccccggcaaaaattaaatcagccttcaaaacttttctggtcattttaaatactaacagtcttcccctatagcagatgttcttcaaagcctgagtgtcacttcggccttcccaccatgtgagctctcagactagaggt

SEQ ID NO: 30932 - DNA, 1263 bp, Bovine  19866880622819
  misc_feature (1)..(1): n is a, c, g, or t
ntgtttaaaaaaaaaaacagcaaaacaaagaatatgccacaatctgtgtggcttacaaaaccaaaaatatttattttctggtgttttacagaaaatgtttgctaactttcgacctaaataataggcatataataaaatacatttagaagaaaatgaattttaaaagtgtatataaatacaggaaaagtagccacatgtttactctcctttcagattagcttcaaacttttttttttttactgttgtgctcagaaattacagataaagaaccacaatttaaaaagtagccaaatacattacaaatgtatacatttgttaatgacacaagaagtgaaaaagaataaagacagtctacaattgtaataaagtgatcttaaactacaacataaaatcacagaattttagagcaaaatggaacctgaaaaatcatctagtctagtcttcacaggtcagagatgagaaaaccgaggcctgtatctggcaagtggcttgcgcaagttcacacagagaattttccgtaaaattgtaactataacccaggtctactgttaggtcaatagagataggtcaaaattgcatcaagtataacaggtgaaggtgataggtcaatacctgtatagatcaatacctaatatatgtatttcccattttaatatacattgaagttgaaaaaataggacacctctcacacatctacagaaataaatccttttattatataacattccttttcttttttaagatgcatacagtacttgtagcccaagaattctgagaaaagctagagaagacctggcactatacttgagaattatacaactgggcagcaaaataacacctttataaatgtcaggacatacagaaataaaatttagtgtttgcacacaaaaatagggaagttacattcaacacgttttcttaaacgtgcatttaatgtttaaatgttttctaaaactttggtcatcatgctttattataacttgtaaaatttcacaattatgtagatgattaaacccaactggtaagcaaatatttcacttaacacagcagcaaaagcaagctaatactgcacaatcatattagcagactgatttcagaaatacatgtttttcacaaatagcacataaaacatagtttgtgataacatagttcaatgacttttcttccacttcattaaacaaggctgagtaatgagacatagcaaaacatgattacataacaaaaagtatatttttaattaaaagtctaattgtacatataggg

SEQ ID NO: 30933 - DNA, 3206 bp, Bovine  19866880647019
  misc_feature (1)..(1): n is a, c, g, or t
ntttggttgtgatgtgcaggcttctattgtgggcgtggcttctcttgttgcggaccacaggctctaggccactcaggcttctgtagctgctgcatgtgggatcagtagttgtgtttcctgggctctagagcacgggatcaatagttgtggaacatgggtttagttgcttcacggcatatgggatcctcctgaatcaaagattgaacctgtgtctcctgccttggcaggcagattctttacccccagggaagctcggtcactatctttaaatacaagttttcaatatctatcaacattttgattttaaagtgtcatttatggtttaggataattatgtgaaaaaacttttaagtcaaatagaaactcatcacttcagattagcaaaaaacacagaaacaagaagcataaattctcataagaatatgtctgagcccatgatcacattgaatccctctgcacagtccacaaaaacctcaaacaaacttaaatacatatcccaagtactctgttctcagagttgtcaggagatatgattcaaagtacataaggcaggttcctagatattgtatatctctcaaattcactgtcaatgagcaatgtgaaatatctgagtcttgaatgtctgtacagatctccttcttatcctcaaacttctagtcaactcagctacttgaagaaaaatgatgaaaatggtgttatgctgccatagacacattactagtagaattcaaccaagccatcaaagaaaattttcttttagctacaaaatccagaatgaaaacgtgtatgttagtttttcttttagggaaaaatattagttcttaagtcaccttttgtaattaaaaccaaatgtcttagaatatataccaaaagtgcctatttagaatttgtattaaaatgtaacttaggctgatggagctttaatttttaactctatctctttaagactactatatgcgtgggtctggtatattctaacaacagctacgtgactgacattggttcgctgttatgatggcatcatatatgacacttttggagtctatcatcttaggatgggtatattttataattttggaggaaagaacatatcttccttgaagacacattttccccccacattttccaccctccctgccccacatttctctttctctaactgttatgttcctaaagttcttctgaaattttcccttgcttgcttatgatgtgctgatacagggtgatatgacttcatcaaattcttaattaccagatgtgatgtgtcaagtgagacttaagattggttatgcgatcagtaatgactatatacacacatatgcacacacacataattttaaaaataagaaaattatctccaattctgtttgaactgattttgagtatcaagtttcaaatgagatattgttgtgtgttatatagcaaactgtatattagaatctatattgccaaattttaagccccattcttagaaaagctgatattagcttactgactgaagatttttcttctgggtagacatgtgatgattattttttttaaaatctataaatctttttagttgtttccaatttgaaattgtatataccattattggagaaggaaatggcaacccactccagtattcttgccttagagaatcctgtggacagaggagcctggtgggctgctgtccatggagttgcacagagttggacacgactgaagtgacttagcagtagcagcataccattattactttattttcatgacaaagtatttttatcttttttgttctgctgtggtggatttccaggtggcactagtggtaaaggacttccctgtagctcaaagggtaaagaatctgcctgcaatgcaggagaccagggttcgatcccttggtcaggaagatcctctggagaagggaatggaaatccactccagtgttcttacctggagaatcccatgaacagaggagcctggcaggctataatccatggggttgcagagtcggacacgactgagcaactaacacacaagtggtagttatatacctgcctgccaagttatacacctgcctgccaatgcaggaaacctaagagatgtgggtttgatccctgggttgggaagatcccctgcaggaggacatgacaacccactgtagtattcttgcctagagaatcccatggacagaagaacctgatgggctacagtccatagggttgcacagagtaggacatgactgaagcaacttagcacacacgtggtggatttcactgtaataaggttaattatttctctgatttaaagctattgatgaactcacattccctatttcacttttctgaacaatcaaactttgaggaaatccagcacagatttatagagaatatttttattgtatggatttgtcctggagttttgagcagcaaagcggggttgtttttttttttaatcagcagttttatattatatcatattatttcacatctgatatgcaaatagatgtcagctcttctgtattttaaattatttttgccgttagaacttgttctgtagcctcactgactccacggcgatgcatgatgaagacagtatacacgatatgggtaggctgtactgaagccttttcatttaagacatacggtttgagctcaagtggccactgtggagctgctgtgataaaaagtcccctctgatatcacagcaggtgattgatttcctgggcgactcaggagccatgagaaccaaatctttgtctctgctttgattttaccacagctagatctcacatcctcattaatcctttatcctgacgaataaatcagttccattccccagtcccaaactatcttccaaaacatgatgaccctcatgtttttgataggccatagaatctacagctactggcctgactgaaggaaactgcccctacaagcatgctctttcctacctttaagcctgtaaatacttcatttacaaaatcagacccatatcgtgaatgctttatgaagccttaaagcacttaactttgcttcctcattcctaaatgcaaaccaaatccactcttcagaccagtcttacagtatattggacatgtgattaaagataaggacaaaattaaaaagttttatagataatgtttgggtaaaattatgtgtctgtaagggagaaaatgttgggtaggagagagaaaactaaagccttatggatatgaagtgcatcta

SEQ ID NO: 30934 - DNA, 1598 bp, Bovine  19866880647563
  misc_feature (1)..(1): n is a, c, g, or t
nctttgttcatagtgatgcttcctaaggcttaagtatcaccccagctaaacatttttcagtgagtctctaccatctacatcccctaagacctacaaagggcattcaaactgcttagcacagaatacaaatgccttcatgacctgatgttaagtgcctctccagccatatcccacctcctcacttttgtactttatattctcatagtacttaactggaaggcagtgtaggtatgttacatacattatgtcattcatttttcaaaacaataactcagttactgttttacctgacagggaataacaatgtgtatccactaccaatcttttgactactatcttagtctcaagtctccatccataccctactttggatcaaggaggttctcatcatctacatctgacactaatggtcttgttaaagttaaaaaaaaaaaaaaaagaaaccagcagagacactgatttcaacagatgaaggaaagtatttctatcaccatctgttgggataataggtataaagcttttcataataataatgccatcagtaacttccatcattaaaaagtattccccaaaatgctctacaacaatattttacactataaaatatttttaacaagattacctggcaataagcataatttccaagggctttatgagcttcatcgataactagacactttatttcagcagctgggcaagctcctctagaaagatcatttaccatgacttgaggcgtaaggaaaagaaccctcttactgctccagatttccttcctggtgaaagcctgagtagatcctgtaaaaaaaaaaaaaagtgacatcacacattctacacttcagactgttacctgtaacatgtaaacagcctagcctattttcagaatgcattcctgcattggtgatctgcttccaaggtgctaatttgacaaatatgagaaagcaacattttaaagctttgttgtggtccagatgtcaatgccggcttatactgaaaatcacacctagactgcctttagagaatccttgtaaaatgacataatacttaaagagaagaaaattcttcacctgggaaatccttctgaacaagaaaggcagaaaacctcacttccacttaccaatgaggtatacacacataaccacttcaaaatgctttgacaagttacagaaattctctgaagattgaataaagcaaccctattagagctggacttgctacaaggagatgatgtttcaagacagaagtaaaataagcatactgtgatctggggtctattccacatgggtctggaattcctttggcgctagttccatcagaacacgtgctttcccctgggtgcccagctcttaatttcaagttagtccactgtttctaagatacctgtcatttcggccatgtgggactgcgggatacccatcacccggtagcaagcctcgatctgctgtgtcaccaggggtttcgtgggggccatgaaaaccaccttgccagaagggaaccagcggtagaaattgtacatgaccacagcggcaataaaggtctttcccaacccggtgggcagacagaccagcgtgttgcagaacagggcggtccggcgatgtgca

SEQ ID NO: 30935 - DNA, 1699 bp, Bovine  19866880748869
  misc_feature (1)..(1): n is a, c, g, or t
ntttgggtgtgttttgatggtaaaaggaaatgattcccttgaaagacaaaataggttgaaacttcatgatcagactttcattcacaaaaaattacagaaagaatggagactacttacagagaaactggaccttaaaaccagatagaaacctgggagcaagaatctacttatattcttgactcttctgtgtaggtactgtggaagaaatgctggtaactccttaaacaagtatgtttcttttctattattgattattttctggaattttctttcaagcctgacttaaaaatactataatatggtgtgctgcaattcgtggggtcgcaaaaaatcggacatgactgagtgactgaactgaattgaactgaacatatgttatcttataaagcagatcctgtttgattaaaggataacttgatattgatgatgatcgtaattattttgttctaccacagacccttttcctcctataaatctatatgagaaattatatgaaggaaatttctcacaaaagatataaaatgaacaattcacttgaaaccaggaatttgcctgaagtcagaagcagcactgaagtttcataggtctccactagatggcaagcattctctttcaatttctcaatggtaccaagatcaaaaattgctgctttttcaaacctagtctgcatgagacagtgggacttgtatcaaaaaattacagagaacctgattcatagatacagtcaaatttagaatcaagttgttcaaactgaaatggaaaatatattgtgatgtttaaatgttttaattggagaatatatattcattcatttgacgcacacacacacacacaagcctggacagtttgatccagagcccattctcctaactattatttgtttttttttttaactgaagtatagttgatttataggattttggatatgtagcaaagtgattcagccatgtatatatatatgtctaatatatatactctttttcagattcttttctaatataggttattacaagatatttaatagagttccctgtgctgttcagtaggttcttgttgtttatctgttttgtatatagtaaagtaaagaaagtggtcgctcagttgtgtctgactttttgcgaccccatggactgtagcctaccaggttcctctgtccgtgggattttccaggcaagaatactggagtgggttgccatttccttctccagatcttcctgacccagggattgaacccaggtctcccacactgttagcagatgctttaccgtctgagccaccagggaagtccttgtatatagttgtgttcatctgttagtcccaaagtaatttggtgcttccctccctccctccctttccctcattcccttttggtaaccataagtttgttttctatttctgtgagtctatttctattttgtaaatatgttcatttgtattattttttgagattctacatataagtgatataatatttgtctttgacttacttcactgagtatgataatctctgggtccatctaagttgctgcaaatggcattatttcattcttttttttttggctgagtaagtaatattccattatatatatatatatatatagatatttatttatttatgtatgtatatgtatacaccacatttttctttattcattcacctatcaacttactaatatccctcccttttgtcattctgcct

SEQ ID NO: 30936 - DNA, 907 bp, Bovine  19866880830013
  misc_feature (1)..(1): n is a, c, g, or t
naattttaaaacatagattgtagtctatgtaccaatctcatttgtgattaaaatataatgtcacctttgttagcttactttaaaatttttttcatgtttggcattaaaacttctcagcccccagtcttttactttatacaacataaagtaaaactctaaactgtatttttttttagttaagcatcttgtttctttatttttttttcctcctctaaacactacagtacccggcaaaagagcttaaatttgagtggattattgcaaaaatcgactctttcttaataacatactctctcattctaaatgacataggaaaacctatatagtctaagttatttccctatggttttttcatttgcaggctgtgctttcaagcatgaacacaactaagtagaaaaaaagaaaagaaaaagtggcttcagttactaaaccctctaagccagtacaaaaagacgcagctaaagatgctcttttccatcaaaacaactatcttaaatgcatttcattgtggtacttccaagtttggatggtattttaatggaagtaaatggaagctaaagccagtttgagcagtactgtattacaggctgcagccatgactcagagtaatttgatctaaccaggttcaatacattacatcatgaacttcagatttttctctgcagtaaaaccatttggaatcctgatttccagccaacactgactttgcctgttacaattcctaaattagagtagtatggaccaaaacatgccaatgtccaaaatctcatacatattcagaaaaaagttggccaggtgaccttgctcagtaaggaggcaaagagtaagaacccaaggagaaaaaatgtatgatatttctagagatatataaatatatagagagagagattcctaaaacaagaaattt

SEQ ID NO: 30937 - DNA, 1790 bp, Bovine  19866880862049
  misc_feature (1)..(1): n is a, c, g, or t
naaaaaaatgctatctaatggttttaatttaatttatatccttcacttactactgaagttttaaaacatttcaaacgttcattggctctatgtactttccttttgaattacctacacatccccctttgttcattgggtttttgttttgtttgaagaagttcttcttatattctgaatgctaatccactataaactctatgatgccaatagtttttatctgttttgctcactagattcctatatccaaaaatgatacgtggaacataaattgtactcaataaatgtttattggaaatatgaataagaaagtgaatgaataaacatttcccagtgtactgcctgtctggactttatagggtccaatttaaacaaaagttttaaattgtgttaatcatatttatcaatgacttttactaagtattttaaatttcatgtcttataaccatttcaatgaaagtttataaacagattcttgaatattcccctctaattctacactccttttaccgactctattcattttactcaatttaatccactttctttatttatgatatctgtaatctgaataaaaatggtaagtgtattaatacaaatattaagaaattgattaaaagtaacatcatgggaggcatctttacagaaaatcacatttcagacatactgaaattttgttttactactgatggacttaaaatttgattctttttattaaggaagttattatcttcctgaagcacattcaaacatggaatggtacacaaggttcccaagagaaggaaatagcaacccactccagtattcttgcctggaaaattccatggattgaggagcccagcggactacagtccatgggggttgtaaagtcagccatgactgagcaactgagcatggcacacacaaggttatgtttctgtgatggtgacctttgatagtcacatcagtctccaaaaaaggctctatgaagtgtgtttcggaagacagcacactttccatttgtattcaatctgttatttaaaattaaactacatcgtatattgggccctcaatgaaatattgtaaataagatagagaatgtcaacaccactatttctttgcatgcatgctaagcaaaactcacagaagaaaaaccctaggacatgatgtcaagcaaagccttcagaaacatagtagcagtatacacttggaaaataaaaagtaagatgtgcacaccaaagttaccttggtagctaaaacagaaagtctgctatgagtgttccttatcacagcaatagtacctggaaaggatggatggtcacatctgtctttctgaccatgttcccagtcctgagtagtagcactggcaacacataatatgaaaactatcaatacatgctgacagtgtttgtacttcagctggtgagaagccctatcagctgaggaaggaaaaacaaaaaacagggaccagtatcttagactgaggtgagatgtattacaaaccatggaagaaaggagatggaaatataaaatgatccaaataaggcagaagagggaactgatcatttaaggaatcaaggcaatacattcatgttcatttaaataagagcaaaagcatctgttaaactatttatcactggttttgcatactagcgtgggttgttgcagattatattactcatgtacagtcatccactgaaaagttcagcacatgactaagaaactttctcttggtgagtaattatttgtacagtgcttaccttttatgagcaaaaattattaacactaatcaatataacctgcttaattctgag

SEQ ID NO: 30938 - DNA, 1718 bp, Bovine  19866880915952
  misc_feature (1)..(1): n is a, c, g, or t
naactatcttgcagtgttgtgttattttgaagtgtaatgaagatgtaacattccaaatcgaagaaaatatagagacagaaatctgaattttaaagtgtttgcttttataatatttatattgtttttcttatctatatccaatattcaaatttttggaaaagaattcttagcacttttttttttctgatcagtctttttgtggtactatatttttcctggcaaaaatgatttagctgaaagactcaagagactttattaaaaaaacattcagcaagcagacatgctgacctgtagtttattttatttataacaattaaaagaagacattttaaatagatatgctactttatcatttctactcacagttttctatttttattattttgtatcttaaaagcactggcaagaaatccattttccaaaactgttttcagttatttgagaacattaaatgattttcttaaaggcacttccctgttttctcatttatcttagctcgtagctaggaagtttttagatgaagaagcagaactttcccaagaagatgcagaatatgtttcatcagatgagaatgatgagtcagaaggtgaacaagactcctcactccttgactttttaaatgatgagactcaactgtcacaggctataaatggtaaatcatacaataatacttctttttcttttcattttcaatgcttttactatggttatacttaaatattgtagtaattttccaaagaaccttgactttaaagggaattcaatttgatgtgtaaaatacttggatattttcattcaaattctgtaatattttctttatgtgagagttgcttgtttataggcttctactaattttaaaaactactacttttaaaaaacagtctctagagacctggctggctgtcagttgttcatttaaacaagtatttaatgcctggtatgtacctagcactctgtaaggttcttgagaaagctgtatctgtgaacaaaatggacaaagccccctgtgcttatgaaacatacattagaatgggagaagagaaacaatatacacaataactaaattatttagtgtaagacaaatttatagaaaaacaaaaacaaattgagtaagatgaagatttggagtgtcaggggttggggtattaaactgtaaatttgagtaaggtaattagtggtttacctcactgaggtgacatttgtccaaactctaggagatgggaattcaaccatgtagtctgttaaaactagctgagacacaaagctaaatttattaaattcgtcaagtacaggagactacttttagaaaacagtctccccaaatagtgcttgagcaggtcttctatagatggttcagattggctgcaatggaaatgggaaagattgtagtgggctcttctggattcttacctttcacaaatcttgccattcttctgctcctgcagggtctcacatgacttaagatggcaaagtttcccaaggcccacaactttaaagaaggctttaaatacaaaggtctcagtagtgtgttgctgatacagatatgatttgcagcataaggcttctttcccaggtttatagcagaatctggtgggagaatgttgatgcaaagatgaccagtgtaaaggccctgaagcaggagtgtgcctggcgtgttcaagggaacatcattatgactagaactgaaagggaagaaggggggtagtaggaagtgaaat

SEQ ID NO: 30939 - DNA, 1354 bp, Bovine  19866880937786
  misc_feature (1)..(1): n is a, c, g, or t
ntatgatagttctgaagccaattgtaaaaatgccaaaaagtgggtagtgacccagctcctgaaaatccctgccccttcttcaaaataactggtgaatattgctcccactcattagccatgaaattgttgtttaatagctatgtcagactctttttcaaccccatggactgtagcccactaggctcctctgtccatgggacttccccaggcaaactagagtgggctgccatttccttctccaggagatcttcccaacccagggatcaaacctacatctttcccttttaaaaatgaatactgtctcatagtatatatgtaccacattttatttatccattcacccactgacggacactccacttgcttccacctcttggtgattgtgaataatgctgttatgaacatgaatgcacaaatatctcttcaagaccctgatttcaattttttgggtttacacccgtaagtgaaattatgggatcatattaggtaagattttttaatgatgatgacaatgttcttgaattatagtggtaatggctatacatctctttaaatatacaaaaaccactgaactgtatgtgattcatgttgaggtttgacagaaaacagcaaaattctgcaaagcaactatccttcaatacaaaataaattagtttttaaaaagagattatatttctctttgaaagaaagaaatacagatgcttatgcatttgctgtttaatgataattcaaatgaggtactttagccactaaattcaacaaacaaaaactgctgtagttttataaatagtagataaaaaaagaaatgggggaagtggagatggaagaacaagacataaaagatggagaaaaagacattaaaaaaatttaatagaagaaagaaaaataaaaatggacataagctcacacataaatttaggttaaaatgtaaacatccaaatccttttaatcctgaccgattctcgtttccccattataccacccaccatagctccctcagccctctttctgatctctgatctccctctcacataagcatgtgaatatgaattaaagtgctcatgtcatgatctccaactcacttaacttgtaaggatcaaagtaaattaccatttattaagcagaacagttagctggaaagaaacttgatttaggagtcagaaagcttgggttcaattcaattcatctattttccaatctcatatgctgtcaagctgaagtactgagaacagtgcctgtggttgaaaactctgaatttctcatcatattagtagtaattgatttaaagatctaataaaaggcattgagaattcaaaatagcatctaggctcatgtcaagatgtgccaactacaa

SEQ ID NO: 30940 - DNA, 2175 bp, Bovine  19866880960487
  misc_feature (1)..(1): n is a, c, g, or t
natgagaatctattctcttaaccttcaggggcttggggagctgaagaaagagaaaggagatcagtctggtgtgatagtgaaatagtatagaaataagaacagtacagtatctatttcacaatcagttcaaagggacattctgaccctgtatagagaatgggatgcattatcagtcacctggttttcctgtatcttgtgacactccttcaactgaccctccacagaactacaagggtagtctttcaaaaccattaacttaatgatttcattttcctgttaatgagatatcaaaaacttcctatagcttcaaagtgatacaacctctttgcttccctattctccccatcagtcccatgctctggggctccattagatcactagtagttaccagaatatatcctagtgtttcatgtcaccatggtctcacatgtactgtcccctcttcttgggttaccctcctctttcctcacacaaccaatatgctaatacttatctattctttaaaattattcagattttgccctccaaggaaagtcttctttggccccttgaataatttatatacccattgtatgtgttcccaaagcattcaacatttgcctctatcacactcaccaactgttgtaaggtctttgaggaagtattagtcatctttcctttatccctgtactgcctggcacataataaatacacaataaatttttctgtatggtaatataactgttttcatagatgtatattttcctagttccaaacaaattggtttacaaatatgttttgtgagctcaatctgctcagaagttttatagactctattctgggatattgaaagtcacctcatacaccacacataaataatcaactgtcaaacagaatacagtaaagtacactaactccaaaactgaataaaatgtaagctgttgttcagttgctcagtcatgatcaccgactctgtgcaatcccatcagttcaattcagttgctcagtcatgttcggctatttgcgaccccagggactgcagcacaccagggttccctgactatcatcaactcctgaagtttgctcaaactcatgtccattgagtcggtgatgccatgcaaccatctcatcctctgtcatcccctttttctcccaccttcaatctttcccagcatcagagtcttttccaatgagtcagctcttcacgtcaggtggccaaaatattggcgtttcagctttgacatcattccttccaatgaacacccaggactaatgtcctttaggatggacaggttggatctccttgcagtccaagggactctcaagagtcttctccaacaccacagttcagaagcatcaattcttcagtgctcagctttcttcacagtccaactctcacatccaaacatgaccactggaaaaaccatagccttgactagacagacctttgttggcaaagtaatgtctctgcttttgaatatgctacctagggttggtcataagtttccttccaaggagtaagcgtctttgaatttcatggctgcaatcaccatctgtagtgattttggagcccagaaaaataaagtctgacactgtttccactgttttcccatctatttctcatgaagctaacatcatacttcagcagtgaaaagctgaaagcatttcctgaaagatatagaataggacaaggatccctaatccaaccacttttcttcaacatactattgggaagtcatagacacagccattagacaagagatgaaaggaatccaaatcagaaagggagatgtaaaactgtcactgattgcaggtgacatactatttcatagaaaatcccaaggacattaccaaaaaactacaagaactcaataaatttagtaaagatgcaggataaaaaaaatacatacataaatctggtgtttctacacactaacaatggagtatcagagagagaaattcagaaagcacaccccacttataattgtatgaaaaagatacaaaacctgtagtcagaaaaccagattttgaagaaaaactaaagatgattcaaacagatggaaagatgttatactcttgcaatggaagaatcaatactgttaaatgaccacactactaaaggcaatttacagcttcaatacaaccacagtaaaaagatcaatggcattttcctcagaaccaaataattctaaaatt

SEQ ID NO: 30941 - DNA, 900 bp, Bovine  19866880965687
  misc_feature (1)..(1): n is a, c, g, or t
ntattcattcatattcatttcttcaacctcatattttctagtcactagcagttaagaattaaagaggtttttaaatgatgagatttgaatctgagtttgacaaaaatgaatcattagtaggctttctgagggacatagtcatttcagttgtggaaacaggaagaatggagtgtcatttgttgttaaagaaaattctctttgtaatgtggtatatattttgggtgagaaattgacatctctatttaaatgaatgagggccctcacctggaaatgtcattcatactaacagagagacataatgcataattatctgttacagtttttgatgtggtttttgtgtagattaaggtgttcattcaaagaacatccccacttacaaggttcatataatacaatgtgtaagaaacttggtgccccagagttttaaaaatcattaatcgtagtgaattaagacatttattcaagacttagacactgacaaaagatggtccctaaagatttctacctagaaaacctttagaaaatgatgatttttgctttctacttgactgcctcagtaagccaattcatttttgtaggagcagctcaaggtcagtgatatgactatggcagctttaagtgatgttctcccttacacttgtaagctaaacttccattgttataactgatgatcagagtggtactgtcaagaagccctgagattgtctcggaggagaataagtaaaagaccaatagtaatatacatttcattttcaaatgaaaacatttaattgatatgtatatttcaaaatgcaatgacttttttttttacaattaataatgggtattactgtatcatgagaatatgcagaagaattaggctagatcatggtatattactctaggaaaaaatcaaagaaa

SEQ ID NO: 30942 - DNA, 857 bp, Bovine  19866881071562
  misc_feature (1)..(1): n is a, c, g, or t
natcttgcatgccttcaagtgatcttcaactgttttttcttttaattaccaaggaaaaaaggatacttggcatcaggctgtcctttctttccataagcccattctggttcaatctccagtcgagccttttctcctttactcatagtcaagagtgcttcatcccactaaaagcgagaacatcaaattaaaactaatgatacttcacagaaaaatacatgcaaaaccagaagaaaggcaagattacatacaaagtattctgttacaagacttcattatgtcctaaggtaatgtccttgagtgagcccctaaatctgtgtccttcattgtcaaattaagaaaaatttaaggacatattaaacagttttttagtataaatacttgaagtcttgaaaatgacaatgtcattttgtacaaatttggatcttaggccaaattatcaaaaataaatcaacataatggaaggatacagaatgtattaacttatatagactctgttaaaatgtaacagttatataagctcagatgatacagatttgtcacatactggaagttaagaatttagttgaatagaacaaacttacagtaagcacattagttataggaacagaaaaatagctcaacttgatatatcaacttggtataatcaggtagtagtaaaagtgatttttcaactaaacctttagtttcaagatgttgtacaatccattttgggctctggataagattgagtagtattttaggtcttaacgcagtacaaagaataacacattgagggttctcgtaactgcacttaaataggcatttttgttattaatgttctgaatacaaagaatttagaacaataagcagaccctaac

SEQ ID NO: 30943 - DNA, 1317 bp, Bovine  19866881139549
  misc_feature (1)..(1): n is a, c, g, or t
nctgtatctatagtcaaattagttcattcttttgctaagccctcctatgctgtttctgataatttgtctagtggttctgtaactgagaaagtgaaagtgttagtccctcagtcctgcagccaccccatggactataaccctccaggttcctctatacaaggaatttcccaagcaaaaattgtggtctcggttgctattgccttttccaagggatcttcccaacccaggaatcgaacctaggtctcctacattgcaggcagattctttaccgggtgggccaccagggaagaccactgaaaaagctgtgataaagtctcagtgacaacctctattagagtctactatgattatagttcaagtatttctcccttaggtctatctatttttgctttatatatgtatgttcacgtttgcgtccgtgctgagtcgtgtccgactctttgtgaccccatagactatagcccaccaggctcctctgtccatggaattttccagacaagaatacaggagtgggttgccatttccttctccaggggattttctagacccagggattgaaccctcatctcttgatgtctcctgcatttgcaggcatattctttaccatgctacctgggaagccctaatttctttaaatgttattaacgtccattgtaaattacagaagattggccaattaataccctgaacactaaaattagtatttaacacactaactcaattttccttaaatacatacttaaatcaaaagtttgaacaactttagcttacaaagaaaacaaagctttcattttttgacttaagaacttgaaatacccagaagcagaagcaaaccgaaatcaagtaaagtcctaaaatggtacaaacccctaaaagccaagcaggtttgccaacaaagctccgcctccgtgcaaaccctgcccacttccggctgccccacccactttctaaccctggaacacctcccctttctgcgaggtcccgccccctgcacctgatcctggtacccattgggtgaatccggatgctgtgtacacaccctccacacgcacgtttggcagggccctcttcgcgcctgcgcagcagcggcgtccggcagctggagactaggtcccggggttggggggaggggggaggaggtcaggccgaatcttcctccgtaataagaagctacgcgtcccgcggtcctggctccgtgggtccggtcggatcgggcctgggcgctggagctgctctggctcccgccgcggcgggtgcgatggaggccgtaccggagcccagcgctcacgccgggggaggccgaaacagccggcagtg

SEQ ID NO: 30944 - DNA, 1094 bp, Bovine  19866881260181
  misc_feature (1)..(1): n is a, c, g, or t
nttttcctatgatccagcagttagaaaaaccagccaaacacaaatattataaaaacaaacttactttatttgaacaacctaactggagagaaagggtgagtaatgtactatataaacagagggaaaaaatttttcatgtccaatttaaaacataatggcagaatatgctaaaagatgtttatttccaaagaagctgtccaaaaggaaaacagtgtttattatgacatgacatagtaacttgacttcttacagtagtagatctgtaacctgaacgttgtctaactcagtcttttaaatactgagaccaaatttttgctatgtctgcttaaaaatacaacaaaatgttttctcattctacttaataaaaatacttaaaagcaataaatgaaatttacataggtttcacggatgtgccaatcacaagctttaagaaaaacaatcaggagaaagcttgtcaaatggtttaaacaacatgtaattaaaacattagatctgacttgtataccaagtggtgacaaatgctaaccctaagttttcatgaactcagaagctacaatctatattctgttctcccccatctctccctttaacaatactaacattttcttaaatgatttaaaaaaaaaaagaaaacctgtatggaacacgattttcctcaacagactaagatgcttatgagacataaaacgtgaaacctttgaaaaacagtgtgcagtttctataaagaaaatatatacacttcagatgaagacacaaatacactgcctgcttcttgataaacatcctggacatgttctcttatttatactattcagaatcagaattcgaaaaataataatcgttctcttcttcatctaaagactccatagcctttgtgaaaagttttccaataccagagttttctgctaattctgtaacgagaagtttaataaaaaagattaatatgtttctaaaagcaatttcaaggaaattgaaaataactataggaaaaaattgatacgtctgcccacttgagaacaattaattttaatactgtgttaataaatagactaccctatagtagaacagagctacaaaagaaaaagtatattacc

SEQ ID NO: 30945 - DNA, 1266 bp, Bovine  19866881401052
  misc_feature (1)..(1): n is a, c, g, or t
naatgctcaaactaccgcacaattgcactcatctcacatgctagcaaagtaatgctcaaaatccttcaagttaggcttcaacagtacatgaattgagaatttccagatgttccagctggatttagtaaaggcagaggaaccagagatgaaattgccaacatcccttgggttatagaaaaagcaagagagttccagaaaaacatctgctttattgactactccaaagcctttgactgtggattacagaaaactgtggaaaattcttagaaatgggaatgccataccaccttacctaccttctgagaaatctgtaatcaggtcaggaagcaacagttagaactggacatgaaacaacagactggtttcttattgggaaaggagtacttcaaggctgtatattgtcaccctgcttatttaacttgcatgcagagcacatcatgagaaatactgggctggaagaagcacaagctggaatcaagattgccaggagaaatataaataacctcagatatgcagatgacaccacccttatggcagaaagcaaagaagaactaaagagccttttgatgaaagtgaaagatgaaagtgaaagtgaaaaagttggcttaaaactcaacattcagaaaactaagatcatggcatctgtcccatcaattcacggcaaatagatggagaaacaatggaaactcggagagactttattttggggggctccaaaatcactgcagatggtgattgcaaccatgaaattaagaaacttgctcctaagcaattttagtagatttcatgccgactctgtgtgcaaagcctcgaaccgacgtccctcagtctacctgcccactagggagtacccgtctgaacagatcatcgtgacagagaaaacaaacattcttttgcgctacctacatcagcaatgggacaaaaagaatgccgccaagaagagagaccaggagcaagtggagctagcgggcgagagctcggcgccgccccgcaaggtcgcgcggaccgacagcccggacatgcacgaggacacttaagactcacgcccccctcaggcgcctcccatcttgtctgctccttgcccacctgccttgtgtaaagcgaaccccgccccacccctttcgccggcccgcccataccccttccacaccacttccaacctcataggagccaatgtatttattttccttgagtttttatttatgctgtaaaacgcaccaagcgatggttacaggggacgccagacccagtagtgtgatgttggta

SEQ ID NO: 30946 - DNA, 1598 bp, Bovine  19866881427188
  misc_feature (1)..(1): n is a, c, g, or t
nctttcttgcagactgatacttttataaaatacaataaaagtgttatgacaacagtctctaaaaggttgttctcactttctgtatttatcttgtaagcatactcttctgttcaaataatataagggtaaccttcagggaagcactctccttatacttcttagaaataaaacctgtaaagcctacattataggtgaaaaatcacaaaattagttgatgtctctagaatgaatatgcaacaatttgtggtttgttactatttatattatttgttatatttgtacttccattcctactttgaactattggcttagataagaagttttgtgggtttttctccccctagattttatgacggtaatagtgaaattatttgagaatgctgaaaattcaaatttcaaataattatatattatatataactattatatatagttaattatatgttactgagtcattcaaatttcagtatgatagttcaacatattccattattagtcatgtagtcaccctcagttaaacctcagtacagtagtttttgagtattatgagttaaatgaaatcacaccaaatgttaaattccacttactttgaggtgccattttttcatttcctgtatatttcattcgttcccagggattctgttccttcctttcagaatctttaatgtcaaaaagttctttttcctcttttctcttttgtctcatcttgtcataagtagattttgaaatagaaactttaatctgcatgaaaaagttgaaatatctctaattatttagaaagtctgacacttaactatcttcatcttaggcaactgtaagctatacaaaatgaattatacatttcttagtccttatttcagtaattctaaaattgaatagaattacatagtaccaactgcgaactaaatttgtgcctaaagatactagtttgttactccttgacgatatcctggaaaattgtcaaatatatacatgcacacatatatatgtatataaagtacatgtagaatataaagtacattagatactttacaccagaataacaatatatttggtggaaaaggagaataatctatcatttacatgattaaggttcaagaatttcaatatcattgagatttaaaaaattataatcaaagcacttttatcaccccaaatctgatatacacaaaataatgatgtatcataagcttgaatttatcctaataattaagaaataaccttacatctttttcattctcagaatcaacatatgatggaatactctgctgaactgctcttccataaatgcctgatggtggttcagtatttttaactgaaaacgaaaccccattttccacagaagttatcactgattgactgcaggttgctggtgctggaattggatttccaaatacccctgaaagcaaccaaccatcaaacactgtcattatttatgtgatgttattctggacaacaaaattttaagacaaggttttaaaagaagtaaacaatataattaataagaaaaacatgttaaataatcacgaaatacaaaaacacctatcaaatgataatataataacaagaaatttcatgatgtcaaatagaactgcata

SEQ ID NO: 30947 - DNA, 1014 bp, Bovine  19866881466662
  misc_feature (1)..(1): n is a, c, g, or t
ntgatgcctgaatgtgaaactgaagaaagtgaaaatgaactttatatgaaacaaaagaaagctaaatgttctgctaaagaaaaccttaagaaacctgatgttggtaatgaacttccgaataccgagaaaatggggtctagtaagacaaacaggcattccttggaatgtttgcctggttttactcaggatgagtgggataagaaagaattacagaaacttcattggtaagtagttagatttgactttgaaatctagagtggccacaaaacagtttataacataaaaacaagaggctgatttatgacttctaatcattaaaatggaaaatgtcatccaaagacacttgaagagaaattgaaatttatgtagggtggagggagaacacagataatatctaactaggtggccatctgcagcccacatatgaagaaagtgaaagtgaccttcttttcttttcattcccatttaatatttcaagacagtcccctccttccctccccaaaaactatttgaggggacagatatgttaattaatttgatagtggtaatcacatcacaatgtatacgtgtatcaaatgatcacatgtacattttaaacatatataattttatctgtcaatcatacctcaataaagtaggggtaaactatttcaacagacaaatgcaactctctcatttagcttcacattttcaggaatattttataattaactttactattataaaaccttaaatttgaacccaaatttgtaggttatttcatagtcttttccccctcattgataaatgaaaaattggtctcaaaaattgggtgatttgtccagggtttcttaattagtgctgcttgataaaccaggtatggtaagaattggatttggctacatagacttgaaaagcagtttcagtagtgtggtagttggtattggaagccaggtcacagttgagcaatggacagtaaagataacctagaggacagcaaaagatatgggcaatgttggggaacagcagaaggca

SEQ ID NO: 30948 - DNA, 1057 bp, Bovine  19866881513894
  misc_feature (1)..(1): n is a, c, g, or t
ntccgggtaagtaatgatctgttctaactgtgaaataactataaatactactgatggattgtgaatatttagacttctgatggtaatttgaagtgatttgcagcactgaattcctatactcagtatctcaataatgtgtcaatccatgagcaagaattcttaatattctaggccatctttatggttattatcattaaaatgccaagtttagtggatcctaagactgtgttgtgtggcatcctaaaacctgatcaagcatttttgcagctaccttggtgttttacaattttcatcttgatactacatataattagtgatcaaatatttcaagattgggtgaaaaggggaacaatgaaaggagaagcagccatccttggcaaatgtgggtcaccattctggaagcaggaacaggagttgtgttgtccagtggaaaactgtgagcttctttaatggcactgtactgccatctagaggcgcaccaacaggactatgacatgcagcatggttaaaattgttaaaactgaaaatctgaaacgaatgcaagtacgttaaggtataagagaaaatatgtcaacttctagagtagtcatcttttcaaaaaactcctgcctcaacaggaaataggctttggaatcaaaaataaaagtaagggtgtttcaaataaaagataggcattttcccagaaatctgaaatgtaagtaaattaactatggaactttcagcagtacaaagataaagatataaatgggtaaaaataaattagggggagggtacaacaagatgaaaagttttctgggaaggcaagttctatgaatgatgtgaataacaaaagatggtccagaattttgcacaggccatgaaggttgctcagttttaataacaagtagctatcttagtcaaattatgaatcattttcatcttaaaacactatttgtaaaaattatattcaacagaatttcatttaacataaaacaatataaaatataaccaggactcctgatcagcccaaaataaaaatcagtatttaaatactgatatttcttgtatttaaatactg

SEQ ID NO: 30949 - DNA, 1116 bp, Bovine  19866881650941
  misc_feature (1)..(1): n is a, c, g, or t
nacctactgcagataaaacttgtcctgaaagaatgttgcgcatttcttgaaagcccacttgatcctggtaattgtattggaatttctcgttttgcagagacgtatggttgccatgacctttatttggcagccactaaatacatatgccagaattttgaagctgtttgccagactgaagagttttttgagctcactcatgctgatttggatgaaatcgtttccaatgactgtttgaatgtagctactgaagagactgttttttatgcacttgagtcttggatcaagtatgatgtccaagaacgccagaagtacttagctcagctacttaacagtgtgcgattaccgttgctcagtgttaagtttctcactagattatatgaagcaaatcatcttattcgtgatgatcgcacttgtaaacgtcttttgaatgaagctctgaagtaccactttatgcccgaacacagactgtctcatcagacagtcttgatgacacgacctcgctgtgctcccaaagtactttgtgcagtaggaggaaaatctggactgtttgcctgtttagataggtaaatataaggttttaaaggatggatgtgacgtgggcttgatccctgggttgggaagatcccctggagggggaaatggcaacccactccagtattcttgtctagaaaatcccatggacggaggagcctggcgggctgtggtccgtggcgttgcaaagagtcggacacgactaaagcgacttagcacaacacacattaatagattgtatactcttaaaatttgctgattttttaatatttttaaaatagttttattttcctgtttactttctttgcttttttgattttttctcttcttcttaaaacacttatctgtctgttttaatcagattgttgtccattctctgtaacactctcaattaacccctcttccctcccagtgcaaaaattttatccgtcctacttactcgtgaacttttctaccattttatgcccttttttttccctttgtgaaatcatttacatctttgagtcagactaggtcagagaggatttattattgctagctatatcagacaatgctaaagaagagagctcaaaatctgtgatgaag

SEQ ID NO: 30950 - DNA, 1000 bp, Bovine  19866881678072
  misc_feature (1)..(1): n is a, c, g, or t
ntgccaatacttggaagcaaccaaggtgtctttcagtaggtgaatgggtaactattaaactatgctacatcaagactgcagaatattattcagtgctaaaagaaatgggctgtcgagctcttaaaagacatagagaaaatgtcttatcaggtaaaagaagccaacctgacaatgctatacactgcaagagtccaattatatgatattctggaaaaggtaaaactataaagacagtaaaaatatcaatggttgctaggggttttggggagggaagatgaataggcaaagcactcaggacctttagggcagtgaaattactctatataacactataatggtagataggtatcattatacacctgtcccaacccacagaatatacaacactgagaatgaaccctaaggtgaattatggactttgggggataatgcgtcaatgtaagttcacctattaaaacaaacacaccactacggtgggggacatggacgatgggggaaggtatgctcgtgctggtgaagggtgtaaatgggaaacctctgtacgttccttaattttgctgtgaacctaaaactgtacttaaatcttttaaaaagtaaatcaagcaggaaaaataggagatctagctactttataagttcatacctctcccagactaaataattacgtcctacgatatttaaaagaacctgtgaatgagacccctgaatcattgccagtgcccacaagactaaagactattttaaaaaataagacagtaatatctactaacatcttggaaaggataatgttaattttagataacactataaaacaaattattaacgagttgatttgtgaatattgagaagatgatgtagtgatttctaacactaggatggacgaactaacaagaagatgtgtcacagatgaatcttggggtttctttttatgtatttgaaagacttgcagatcagaaaaatacatatatttaaagacagatttgagaacaaaaccagaagt

SEQ ID NO: 30951 - DNA, 1563 bp, Bovine  19866880425497
  misc_feature (1)..(1): n is a, c, g, or t
naatgccaagtaaaaaaataataggtgaggtcttaagaagtatgaaaacatctgtgttccccttagtcaaaggggaaaaaataaatagtcatttagtaaaaattaggtgacatttttgctatacataaaagttctgttttttgttttttcctttcataatcaaaaccagttattgaagttctctggtgggttttggagtttttctgcttggtgatattcagaaagagtctaaaaaaatgttatcaaaaaatattttagacatttacctgtctaaagacaagcagattgaacagaagatttctcaaggcctttatagttttattatcttataattctataatttcatggtgatccaaaccactttatactgtcagtattctccatttatgtcaacatgaatcaactcctgtatttcatttcattcataagagaagagcttgaaaagcactttcagatagcaatttgtacatgatctgatatattttcatggtttttttaagcatgaaagatttaaaagaactatatccaaggctacattattcataaagggaaggtatgaagcagcacatcataaaagaaattaaaaggaaagctatagaatgctagtcaaatcctctacagcttatcgtattgtcagatcaaacagaaggccacactttgaggacagtgccagaggactatggaattcttctaggaggcactaaagacatttcttttctgcaataatgaatgagatcatttgacacagccagaaaatttgttctaatttcatttagtgcttaacaaagtatgtattgttagtttgctatagatttgttagtttgctaatgatttggatttttccttatgattctcatcgaaaacaaattgacaaacacaaaagaacatttattaacatttactagaatactaacctccatgtgtgttcatttccctatctgtacagtagggaataataatagaacctgcttcatgtggcttttgagagaattgagtttatctgcttaaggactcataataagttctcacttgtgttaaaaatatattattactgcaacaactatcttaactgataactgtttaataaatgaattcattttatgttttaatattgtagtgtttgatgtacatatacatatacaaattatatatagacatgacatgacatgacattgaagtcactcagtcgtgttcgactctttgcgaccccatggactgtagcctaccaggctcctccatccatggaattttccaggcaagagtactggagtggattgctatttcctcctccaggagatcttcctgacccagagatcgaacctgggtctcccacattataggcagacgctttaccatctgagccaccagggaagtccaagaatactggagtgggttgccattcccttctccaggagatcttcccgactcagggattgaacccgggtctcccacactgtaggcagatgctttattgtctgagccaccagggaagttcttcaaggctatggaaagggttcaatacccataattttccacaaatcttcagtagatcaaattttccca

SEQ ID NO: 30952 - DNA, 3312 bp, Bovine  19866880630540
  misc_feature (1)..(1): n is a, c, g, or t
nctcagggatcgaacctgagtctcctgcgttgcaggcagattctttactgtttgagctacaggggagacctaacttttcagcagttttggaaatgggtaacccctctgttcagagaaggcgatggcacccccacttcccaagtattcttgcctggaaactcccatggatggaggagcctggtgggctgccgtctctggggtcacacagagtcggacacgactgagtgacttcactttcacttttcactttcatgcattggagaaggaaatggcaccccactccagtgttcttgcctggagaatcccagggacggggaggctggtgggctgccgtctctggggtcacacagagttggacacgactgaagcaacttagcagcagcagcagcaacccctctgttagaggctggataggagaggaaaacaagaaaatcccaacaggttgcagacatattcaaacaggttcatgacagatttttgttgttgttactctgcaattatgttgttattatttatagatttattaactcttctcacgtgctataataaatatatatcatatctgtttaaaagccatggttccaaaggaagggctagggtggggggttatcttctttcctctgcattccacagagctgctgaatggtttctagcttggtgtaagtttgccttggtattttgtgactggtgttgcgtgagtaatgaaaataatgtatcagaaccctgcattagaaagtaggcagctgacaatatgcttgtgcttttggctacaaaatataagcaggctgctgtactttatgaaaacttcaaccttcacccgcctctgtgtgcagtgacaaggctacactgagacagtccagatgttacagatgcatggatcccactgagctgatcttgatcctggaggaaatcccagaatattctggccggagaaaggtgaaagaaagcacttagagttacatcatatacaacgttaagtccagaagcaataatgaatagtttgctttgtttatttgtctgagaattttaagacaacacccatggtgaaatcccaccgggcatatgtataatgaaaaatatacaaaatgataaaagctaaaagtcatttttaattagcgtatcaataatgaaaagcgcaactgaacagatgtcccttgctttgggcccagaagttcatgaactacaagctctgtcaggtgaaggaaaaacaaaacaaaacaaaagcaacagttcgctttaggatcttagtaggagcactcttgctcattttaccctttgtaactttatgtggatactgatatctctccaaaaatatcaagggccattctcataatggagatttacagatcatatttgaattatatcactgaggagttacattatattacatcatctcaatacatttgtatggaagtcacagaacgaagtatacctggggtatgttacttacatcaagcctttgctgtactcatacccccaatctgttttccacaagtaatttttatgaaacattggctgcatatgttctgcattatcattatttacaagaaatatacacatatttggtcattcaggtgatcaaaatgtgtttctaatacacatttggtattcatccacagcttctaattggcccttcaacgcaactcacaaaacccttggaatttcctgagcaataagagcaatgagatcatcttttgctaagacatttgatatcttgtcttcaattcctgaaaattctgcagagccatgagatgggtgaaatggctgtcttcttattttatcacaaatgtctttccactgctaccagcttcacgttaatgaagagggcttttggaagcacctagagaaagcatgtagaagggactgtttgccaagggagccaagaatagaatactgaaactttcaattccaccctctgatttcctgggaggggagaagagtagaggatgaattaatctccaatggccaatgagttatacaattaatgcctatgtaatgaaacctccataaacgccccaaagtagagggtttggagagcttccagcttggagaaccagaccttctaggttctgggccaaacttcacaaggatagaaattcttttgttcagaacctcaatctatgtatctttatatctggctatttttatcctttaatatcctttataataaatcacttccctggcagctcagacagtaaagaacctgcaattcaggagattcgagtttgatccctgggttggaaagatcccctggagaaacaaatggcaacccactcgaatattcttgcctagagaatctcatggagagaggagcctggcaggctttagtccatggggtcacaaagagtcaaacacgaatgactgataataaatcagcaatctaatgagtaaatgcatttcctgaagagctgttctagccaattaactgaactccaggagggggtcatgggaatttctaatataagccagccagtcagaagcacagggcttgcaactagtctctgaagtgaagggccatcttgtgggactgaaacctttattggcggactctgatgccatctaggagtggatggcatcagaactgagttacatttatttgaatttttggacaccgctgatatctgaactttacttgttgttgaggggacgccttcacaggcgtgtgtgcacacacacacatacacttgcctatgctttgaaattaggtccaggaacccctaaagaacttcctacttaaggaatcattgagacctcaggagaagatctgggtatataaagctcaagtcactcgcaaaacaacatcacattccttctcagacttctctcccataaatattcaacatatcctctccatttcaactttgcatttttcttacacctcatgtggtacttaaaatacagataatctcaccacttcttagtatttacatccagaaaagcctattcatttttcaaggtttagataaaatgatatacttttcatgtagactcattccatctatatttctctatattctgctgcctgcaaaattagctgttgtttttctcatctcactgtttgtcctaaaaatagacgtagccctactgcaatggctaaagaagtcaggggttgattagattaattacatatgaaatctgggagtagactacccaattaacagatgtattcaaggaaacatgctcttgatatcttcttgctacaacatcttttctccaacttgtgttccaatccagaataatgaggaaggccaaaaatattctgctagtgagatattgtctgtttctttagaagtcaagttatctacagaaaaa

SEQ ID NO: 30953 - DNA, 1692 bp, Bovine  19866881062382
  misc_feature (1)..(1): n is a, c, g, or t
naccacgcagttactctctctgaagcaggtcgcctcgcttggcactattggggagatagcacacgttcttccctctcacagagcatataaaatgatttcacttgtgacattttagagaagctcttcagacacccctctgcgctttcagtttccaccaaccatgtggaaactattctctatatattttctggattcatgatgaatattttcccattaaaactccactataaacacaatagttgaaagttgaaaaaaaaaatagatgctagtaacttttattttattcttactaatttactttgttaggagtacactttttagagggccaagtcttaagaaaagtcagagttaggctttgttgagttttattgctgttatattagatttggtaatatactgtattaactgtgtgttcaatttaagctattaagttttaattgtcaaaaacagataaaatggaaaactaaaattttctttctccaaaattagggaattcaaatatggtctaaaatgtattcatttgtcttatgcttttgttctctctctctgtctcttcaatgtaatataatatgcataaaacaccattttaactctttagagacatacagttcggtggcctcaactacattcacattgttttgtaactatcgccactgttcatctccaaaaggttttcatcatcccaaactgaaattctgcatccacaaaacagaaacaccccactctactcacccccgagctccaaataactgctaccctaccttctgcctttgtaaattaagatggaatttggctattctaggtacctcctgtaggtggaatcatatttgcacttttatgtctagctcatttcacttagcataatgtcttcaagtttcacccctgtagaatataacagatcctcgttctctcttacaggacttttctttatctggataccatgagcatgtttagcaacgaagctcagaaaggaactggaaataaggagcttagtggacagtaagttaaagcatatcttttgtcatgagagaggaaaaaagagatagaaagagagaggaaaaaaaaaagagagagagaaatttgggagagctaaaagcataaaatgcagaagctgatattacagaacttgaatttttcccattgcactggaaaattaatttcaatacttttcagcacctcttcatttcaggtttacattagacacagggctttttaaatttatcgcttggtttgaaaatgggcaaaaggtttgtaacacagcctccctagctaaactccttttctcaaattttataaaaaccaggtttttctattaaaaatatagtcatgggaatcttggaagaagatgttattgttataaaatgatgcaacaagcagtaaggacaaagactgccaagctaaacacaaagcgtaaagtccatctgcgtatccccacactcttgcacatgtatcccagtgtgaattgtctgtgagtttctgatgacagaacttgacccattaaacactcattctgagaaagactcagctttctccacaaactgcatttatatttcccagatgattacatcttttatcaaaagcagcagttgagaaatgggcaagctcaacatcagaaacatagtccagctttgacactttgacaaccagtttcacttgcaaagataagggaaaggcaaggagagcaaggcagtt

SEQ ID NO: 30954 - DNA, 1144 bp, Bovine  19866880366147
  misc_feature (1)..(1): n is a, c, g, or t
nataaaaaggggggtaaaggtagaaatggaagaaagagaaagagagaggtgtttacatgacttactataggtaacaaagcaattcattgtgtgcagaatattgaaaaaaaattctctggttatatacagaaatataatttgtgtcattggatttgtaaagattgctcatgaaccaatttcaatatatctttaagtttcaaatgcttactctaacccagcatataattttatttctaaggtcttaaagaaacagggatctatgaaatataaaacactaaattaatttgtgtgatttttttgttctggtgcaattttcacaaatacattaagatatatgcaagtttgtttgtgcccaaatactggctttttctcagaggttatccactttttctgtcctgatgacacttccactgaattttaaggtcagtgtaacagcagattccttttttgccctgattctttatttcagagcagttatacttgtctatttaataatgctgcatttgaaggaaaactattattaacctttttgttaattgtattttttttggtagaacccccagtagagatttcttaataccccactgggaaatgaataggtaatcccattatcagagccctgtttaatggaggtttccagtattccttctgtttgcctttcagcagctaatagtaccttaagtagctaattgtaccttaaggtaacaattctaggccataaaaaatgtcaatatttggccattatgaccttttaaaatttattttcttttctttgaggtggtgaatgaaggggtcaagtagtggacttggattcaaatttcaattttttctacacatcaaaattaatgaggcctgtgtccttgtactagttttcttttgaaatcattattgctacccaatcattccatggtcactggcaataataatagatttacctttttaaaagaaaatctgtttcttctattttaaaattagtgtcaagtttcactaggtgtttttagacactgtcagttttattttgtgcagattatttcctacaaagactaactattccccacaccaatctttttttcttattttctaagtcatttgttaggactcattattttttcctctgtagcagtacgcagggaaataatttagg

SEQ ID NO: 30955 - DNA, 1604 bp, Bovine  19866880435896
  misc_feature (1)..(1): n is a, c, g, or t
ncttctgtcgtccccttctcctcctgcccccatccctccagcatcagagtcttttccatgagtaactcttcgcatgaggtgcccaaaatactggagtttcagctttagcatcattccttccaaagaaatccaggggctgatctccttcagaatggactggttggatctccttgcagtccaagggactctcaagagtcttctccaacaccacagttcaaaagcatcagttctttggtgctcagctttcttcacagtccaactctcacacccacacatgaccattggaaaaaccatagccctgactagacggacctttgttggcaaagtaatgtctctgcctttcaatatgccatccaggctggtcataacttttcttccaaggagtaagcgtcttttattttattttatttttaaactttacaatattgtgttggttctgccatatatcgaaatgaatccgccacaggcatacacgtgttccccatcctgaccctcctccctcctccctccccataccatccctctgggtcgtcccagtgcaccagccccaagcatccagtatcctgcatcgaacctggactggcgactcatttcatatacgatattatacatatttcaatgccattctcccaaatcatctcttttattttcatggctgtagtcaccatctgcagtgattttggagccccaaaaaataaagtctgacactgtttccccatctatttcccatgaagtgatgggacccacatgaagtgatgggaccagttgagttagtggctcacagtaaacaccacataagagttaaaaattattaacatgcctagtaacataagtagtataaagacaaatatgttcatctactgtgttcactgacagattaccaggcacagaacagtgcctggaaaataataggcaataaatacatgatgaatgaagggacatgaaagataaagggaggaaggaaggcttcttttatttgataagaataataattcacatataataatatgacaggaatattactaataatgattattatgtgtacttaggtgcatttgaatgtcttttatctaattcatttcattttcaaataaattaagacaagcatagatttcgtaacttttggatagaaatccctatgattcactctctcgtgtatattggagtcaattttgaccaactgttgacttaattttaagctatatatattatcacctaactctaagtccacatttctctttaacttatatggagatcaacttattttaaaggagaaccatgctctatccagacagttaagggattaaaaaaataacagtgtgttccctggacagcagaatgtgaaaggtgtaaaacatttcatattttccttaaggatttgtaaatgctttgaaaaatgtcatgaaacgattgtctttgttggaaaggccattttcattattgatgagcgttgcagtagaatgttatcagactagtcagcctgcttttatagcactgtcaaaagagattagttatcaaattacagtgaaccttaagaagccaactgtgggcttccagtttgaggagacacagtaagaatttctgattcttttctcaaaaaaaat

SEQ ID NO: 30956 - DNA, 3113 bp, Bovine  19866880445115
  misc_feature (1)..(1): n is a, c, g, or t
ntccaaggaaataaaactgtaatggttttgcaagagggtaagcccctcatccctgagatgttctacccagaagttgaaatggccactagcactcattcaagcacaagaggagaagccattaggtgaacttttaaaggttccttctacccttaacccatgagactatcagcatttcactttcaagagagatttttagtgttattgttcccaatatttgattgcagtagccaaatttcttttaaattagttttcttgctctaatagcccaaagcaaaggtgtatatttagaattaagaaaggcctttcatggtattatcaataggtttttctaaataccagcctatctttgcagacaacccaaagaatggaacagttgatcattcatcagctgtgacctctggagtagtttctttacttggagaaaaattgaagttccaccccatcacacttatacttgcttgagttcacaactgcaatacgcccctctagagagaggttcattgttggtgtcatgagcatcgatcgattgtatctaagctgctctcacagtgattataccttccctcattccccttaagtttcacagcccagagcatgcccagggctcactgcaggcagactcattctgatcagtgcaacaccagcatacagcatacattcacagagccaaaggcagtcagggtcccagggtattccaatcatagacagaatttcagctttattaggtaactgtcaaatttgccttggtgtctcttacaattttaaatcagaagaaaatataaatgcagagaaaccatgataagttaatttaccaatctgttgtaataaacatgtgcactatgatcatacattatggaaatcagatggagagcccagagagtgataatagcgcaagatatgtgcacatagtgagatcataaaaatcataaatgttatatatcaggaagagtttttctttttaaacatcctggtcaagattcctgctcaacatatttgcagagcaacctacccttctatttaaaaaaattaatcattcaaagggtaaaattatgcaaagaaagtttgaaacccaaaaggtaatatatacaatgaaagcagagaaaggcggtattacagtgtggaagatgatacccatgtacattgattgcctctactgaaacccagacatggacttcattgtcttaatttctctaatttctttgtttctgtatacaggtcctactgtgtgttcattccaatatatctttctttactcatgagctgcaaaagagaaaattctacatctaaagcttcttcttgtataagcctcagcttagagtgggagagaagagtagagaatgtttctttataatctgatggaaaaatccttaggtaaagaaatgcattgtttagcaaataataggcttaaaaggctattttatatatgaatagatagtttccttggcaagactagaatagattgtgaatgaggggaaaaaaaactctccaaaataagaaaaggaaaaaaaatgagttttcactagctacaaaaagaaggtgacaacagtcataagaatctggaaaagcagaggggatgtgaggagtaggggagaaagcttagaaaaagagcaggagactgggacagcaggaggagaaacagacagtgggaagtttctggagctggtttggccacattcaaggatggagaaggttaaagatcagggtcaattatctctctgttatgctctgatgaaacacagccttcttccagaaccactcttcatcttcaaagtctattaacacaattgccttttgtgaatttcaagatgaaaattgtggcataggaactatattgcccatttggatcaactcagaatagacagaaggaaatggaaaagattataaatgaaaaagatcaatggaaaattcatcagacttaacaaacccagaataagtgattagaagattctgagagccattggaaatattgattagcataccatacatgaagttgagatgggtaaggaactgaatccagagaattactgaaataggctggaagactagagacacagtggcgatcgaattcaggatcaagcacactaaaactggctgggtatgactcttggtgatgttaaagtagaatgcctgcttcaactctgtctcttagagatgctttaagatctgacatgggattggagaggggattagagcaagctgaaggggagagactcagtcccaaccaaaaccagtccaattctgcatgatttgcaaacaaagattctatatagtatttcaattctaataagggtccatatattaacatataagtataaataaatatttttaaagttttgatactactgctgaaaattcctaaacattagctgaatcaaactagaaagtatttacaacttgtgatataatttacaattctccaaaaagcagcaaaatgaaggggaaaagaagaaaggagaatgagaacaggagatggctggtggccaatcagtaaaaatcaagttttgttttattaatttttaattcaattttaattccatcttcttgccctaatctcagaagttaaaatttccatctcataacctatggcaatctctgtagcatctggataagtgaagttctattattcttcccatagtcctatgaatactatgcaatactgctaccaacaccagatggctgctcacctcttcttcatgaacacatctagactgctgctctcagcctcacttaaatagctatgacaacatgactgagtgctagccaacaaaatatgtgtggaagtaaacttcacacttctagggctggcccattaaagtcatccgtgttcttttccctactacttgctgggtgttaatacccaaggcagcctaaaagcttcaagatgaagatggcagagcttctatcagcctgagtgtgtgaatgactgtgtggatcaaagcacttcaacaaactggtactaactctacatttctgaaccattaaaacacttcaggattcatttgttttatttatgtgtatgtgtgtgtgtatatatatatatatatgatgctgacttgttatgttaataatgctacctaactagtataagtatgatctctgatctactccatttt

SEQ ID NO: 30957 - DNA, 2197 bp, Bovine  19866880476822
  misc_feature (1)..(1): n is a, c, g, or t
ntttgttcccagttgattccctatcaaaatatggattttgtcacattaacttttatttccagattgttttaccaatgacctcctgtttccacagtgtgcaagactctgtggggtaaactgtcaaaatgttttgtatggaataacactcaaaattcctgttaactgtaatgggaccaatgtgaggactcccgtcaccattgtgaggtcacactgccctgaactgctccaaattattatagaaaaatgtttaagttaatgtcatgatcaaaaatgtagtaattttatttcacatttttctccaagtaattactctttttttaaactgatattgtaaaaattagaaaacaataaagcagaaaactcttttagagaagcaagattttatttgtttgggcttccgtgttgaatggacaggcaggaggtgatacgatcagtggtgaataacacattatgttccctggagctacctgtgtggcatagtacaatcttttgtgatgtttcacatggttttttgctaaattccacttcagaattatcccctgcctggatgcattaagggcgcgaggcttttcatttacaaaaccctggcgatcaacatttgcagtctgctggtaagtagaaaagtctgctagaatgaagtgtttctgttatctgattttcaagggaagctttttggactgagatctgcattgattgatatctccattgtattatgttcctgtgccaatgaaaagactgcagaagcagtactgagcatcagagcatgattgtgacccttttccctctgagtctaccagccaaaggaaagtgaaagtaattcaccttaaatagaatagatgacttgagtcacgtcctgataggcaggcaggtaggttcttggtcttcttcaagaaatcaactgcccagacaatgactgaatagtggccttattttactgcaactatcataacttttttttttcctacaaagtgtcagtaagggtgttttggagttgatctaatgcctttcaaccagtttcaaagcttcccaagtagcacagtattaaagaatccacctgccaatacaggagacacatgagatgcaggttcaatcccaggtcagggagatcccctggagaaggaaatggcagcccactccagtattcttggaaaattccatggacagaggagtgtggcagactacaattcatggggcctcagaattagaccaactgagtacacaccatatttcaaccagcattatgtttaattagaaaataattatatcaataaattagaaaacacaaagaatttctcataattaaatgtaaaatattccaattataaaaaatattgaagaaaaagaatgtctaccccattaagaatcatattttataatttaatcatgagagtgactatagtggattgagtacttgttgtattcagtatagttcagtgactcagtcatgtctgacacattgtgacccaatggactgcagcacgccaggcttccctgtccatcaccaactcctagagcctactcaaactcatgtccatcatgtcagcgatgccatccaaccatctcatcctctgtcatcccttcccctcctgccttcaatctttcccaacatcagggtcttttcaaatgaatcagttcttcccatcaggtggccaaagtattggagtttcagcttcagcatcagtccttccaatgaatattcaggactgatttctttcaggattgactgctttgatctccttgaagtctaagggactctcaagagtcttctccaacaccacagttcaaaagcatcaattcttcagtgctcagcattctttatagtccaactctcacatccatacatgactactggaaaaacaatagccttgactagatggacctttgttggcaaagtatggtctctgctttttaatatgctgtctaggttggtcatagcttttcttccaaggtgaaagtgtcttttaattttatggctgcaatcaccatctgcactgatctgggagccaaaaaaaataaagtctgtcactgtttccattgtttccccatctttttgccatgaagtgatgggagtggatgccatgatcttagatttctgaatgttgagttttaagccaactttttcactctcctctttcactttcatcaagaggctctttagttcttcactttctcccataagggtggtgtcatctgcata

SEQ ID NO: 30958 - DNA, 2607 bp, Bovine  19866880538947
  misc_feature (1)..(1): n is a, c, g, or t
ngaaaaacctttcctttatgttccctttctgctaccactctaccgctctgctttccttaatggtaaaattcattggaaaaattgcctagacttgctgtgtccattttcctcctctcattctttctaataaatctacttgaatcactattttctcccccacccctccactgaaactcttcttgttatggctgtccctgacctctagcttgctaaagccaatgtcaggtcatctgtgttcatcacattcattcaacgtctcagcagcatggcaacactctacctggtttaagggaccctagatatccaagttttccttttatttcactgcttatttctgagcttttcttaccgacttttccattttccaatttttttggccttcctttttcgactacctattccctctagatgacttcatccaatgtcttgtcatttaatacaattataggctgatgacttataaatttataaatctacctctaatttctcccctaagtttcaggcttgtatattcaactgttcatttgactccactttgatgtctaagagatatcccaaatgggacatgttaagaggtgaactcttgattttttgctagcctccttgcttgttcccaattgttgtcattttgattaatgtttctacatgtctccaattgctcaggcctagtaactactcctccctcatatctaatcacttaaaaagccatgttggcacttgctcactttaaaaatctgtctcagcccagctacttctttctatctgcactgctaccatccttgttcaaaagtcactgtcatttctattttgaatttttggactctcccatcttatttctctgcttttaatcttgcctggctgccatccattctctatagagcaatcagagggatccttttaaaatgttaacaggatcatgtcatgcccttgcttaatatcctccagcactatgggtgtgatttaagcaaatgatatggaactctagttaatgggcccaagattctggtctacatgcaaagtttggtgaaggagtgcatttatattttaacttataattatgttcagtatatataccataattctttattaatctgctcctaacaattttttagctatcaaatatggattaatttgatgaaggggatttctagtttatagttatatttttaacttgatagggaaaagagcattcccttatctaatcatttgatcaatctccttgaaaatagctatctaatatttcattgtaatatttcaatcatgtatcataattgaaccctctcatattgtttctacatgttattataaaagaataaagatgttgtgaatgcctctgtgcataaagggggaaaagactgtatatatcttgaagcccttcaatacatatttctggggctttgtttagaaatcttttagaaaaggattggtccagggtcgaagggttggcatgagaatagaaactggagcctactatacagagtgaagtaagccagaaagaaaaacaccaatacagtatactaatacatatatatggaatttagaaagatggtaatgataaccctgtatgcgagacaacaaaagagacacagatgtatagaacagtcttttggcctctgtgggagagggagagggggggatgatttggaagaatggcactgaaacatgtataatatcatataaggaacgaatcatcagtccaggttcgatgcaggatacaggaagcttggggctggtgcactgggatggcccagagggatggtatggggagggaggtgggagggggttcaggatggggaacacatgtacacccgtggcagattcatgttgatgtatggcaaaaccaatacaatattgtaaagtaaaaaaaaaaaaaaaaaagaaaattgatatcatcctctgacctagatttttcttaactgtttccctgaattctctctacttttgtaccagtgctctttggagagaagattatatgtgataagcagtgtttcaatattctatagaatccagggagaaaaaggggttctgcctggtagcctcattacattggtgatgtgaagtaactgttgaagcatggaatcaagaagcagggtgggtgtaagcactgcatgtgtagtgggagtaccaccagcctagttgaggatgagcatttagagttcagggatccacatgtcaccttgttgaggagaacgtgagaaccaaattgacaagttgggtgctagtgaggctaaatttatctttgcaataggagcttttctgggtagtggaggggagagaagagaggaaagctagacttgaaagggacaggagagagacaatggggaagctgctatgtttgggaaagtgaaaggagaaatggagaaagatgatgatacatttttccatatatcatgaatttttctaggaggttgttcaattcagttcagttcagtcactcagtcacgtctgactctttgcggccccatggactgcagcacaccaggcctccctgtccatcaccaactccaggtgtttactcagactcatgtccattgagtcggtgatgccatctaaccatctcatcctctgtcatccctttctcctcctgcctccaatctttcccagcat

SEQ ID NO: 30959 - DNA, 1314 bp, Bovine  19866880584231
  misc_feature (1)..(1): n is a, c, g, or t
naataataaagtagggtaagtataggcgtatgctataccaaaagtaatgtgaatatagtttcattctctctccaaatatcctactgtataaatgcaatccattttccatcttaaaaaagcacttatttactatggccctaacttttgcagtctatggcacaaaacagccaaactagcatgaatttttttcctttctttaattccatgaatagaagattcattcttaccacagatcatagcgacctcagcatacagtacttttttcttttcttattaagttgagaactttaaccttttcaattaaaggaagcactttggagaatttaatccatttgtgtttaaaataattattgataggcagtcagcttctatatttgtgcactttggggccattattaagtgaaataagggctccttgaagaagcactgtaataccacagtcaatctgataactgagatatctattaagtgcctaacaggcaggatatgctagaaaaaggaatcatccagatcctgagcaagacagcacaaaatttgctcatactgctcagcatgacacacaattaaaaacttatgaattgtttactcctggaattttccttttcatatgttcagatcacagatgattgctattaacagtaaccaaagaaaacaaaactgcagatgaaagcggattgcttgtacagagttttccatgtatatgtccttcttttgaaactctcacactaagcgatcattttatatcaattacagctctagttgaaaccgtttcctcttgcctttggtggcataatgatctgcttgatgacaagtacagagtgaagtggcacctagcacagtgcgttatacagtgtcggcaccgatggcttgctgatctgcagaacaagtctctccaactctgacaaggcattcacatattccttaagtcttccttctcgtcacttaaatcattaagtggaatttaatcaacaaaccatatagggctctgaaggatttgccatgtgtgcaacaatagcattatgtgctggttagatatttgtgaggcagtctgataagcatttactgtttattcacagtaatatcaacttacactgacattcctttcatccttactatttcactttactatctttattcctgaaagttttctgacaacatattccaaagtaaaggttttgcatgtgtatagaaatgtagagattttatttaaaatatgatcactaaggtagatattttcctcttcttctttgagtaatcatatggaaacaactaagagaataagaaatagaaacacattgtctgcctttgatttaa

SEQ ID NO: 30960 - DNA, 641 bp, Bovine  19866880603176
  misc_feature (1)..(1): n is a, c, g, or t
nttttcagtgtgacctcagcaagggggacgtaaaggacagacctttgaaacagagtcacaagcctctgaggtccacagacgtgtcccagaggcacgtggaccacgccagagctgccgcctcccctggggcagggcagtcggcgccgggcacgaggaaggaggtggtgcccaagtgcaacggctccctgatcagagtgaactataaccagtctgcagtcaaagtgcctacgacaccggccagcccagtgaagaactggggaggattccggattccaaagaagggggaacggcagcagcagggagaggccccagaggcggcctgccaccagcactcagactactcctacctgggcctaggccgagttccagccaaggagagggcaaaaagcaaactgaaagctgacaacgagaatgacgggtatgtccctgacgtagagatgagtgactcggagagcgaggcctccgagaagaagtgcatccacgccagcagctctatcagcaggaggacagacatcatcaggagaagcattctggcctcttgatgaaacgggcacgatggtgcaggaggcgagagctctgacacaggggaacgagcggaaacccatcactcctgagctacacaaatacatttacttgcaatt

SEQ ID NO: 30961 - DNA, 1143 bp, Bovine  19866880644932
  misc_feature (1)..(1): n is a, c, g, or t
ntggggtgaggctggtagtcagggaaacaaatatgaaaataagaacgtcttttattgtaagactataaaatcatcccaacttcaaaattttgagtcaaaagatagtggaatgcaaaacaagtcagcttccccatgcagctcagctctgcctcttgccttgacatgtgtcaggaagcacaacagcagaaggagccaagcccaagttactcctaatagctgagcaagaaggcagatgaacttcaaattttttccttaccacttattctaggctgcaggttgaggaaaatgtatcagctctgtaggcagagaacgtaatgcagccttgcttgactttcctactccaagaacactgggtgaacataaggacttgtttctgatatactagtagagaaatgaaggatggcaaagtcaaatctagaggtaaatagttaagattttaataggttaactgtaagcatatggtctaggaaaaagtgaaaaaacatctaatggcaagtattcttctcttttttgggaaatttgaaaaactgtatgtaaccaatttgggaaggaaactaaagaaaaaatggtttctaacacactagtttttatttctctgtgcttctagaatatatagaaattcatgctttgaaaaagcactccataatgacaatgatgaggacaatatagtacattttgatttgattattgtgaggatgaaacaataccatcccaattatcttttaatcactagaagtacctgatgtaaccaggtatctttaatataaaacatatgagtgttttctctgtataatgccagtacctacatataatgtgacactggaggtggcatggcaattagggtataattgctgtaattactgatggaattactcatattcctctatgctactttttctaattattttggtttaatgaaaatgtgtatttttgcaatgaacaggatgtggccatcatttggctgcctgcctgggatgatggacagtggctgtcccttgaatgaacatagagcagagaggtcaccacttgtttgcaggaagaagaggtttctggaacacaacaggcaatttaaatgcatgtcatgaacatcctgcaaaaactcacagatgggtttcatggaagaaatataacagtaggggggga

SEQ ID NO: 30962 - DNA, 1422 bp, Bovine  19866880648269
  misc_feature (1)..(1): n is a, c, g, or t
nggaagggaaaagggggagagacacaaacattcagtctctagcaatgagcatgtaccattgtatcagatcaccaagtaatttaataaaagcattaccacaataatttagcatgtgaaaatctgtatgggagcatcaccatgtggaagaaacaggttctctcttcagaagcacatcactacacggagtcactgcacatcctcaaatggaatgaaaattttcatctccactgcatattaaggctatgacgccataaaagctataattttaaaaactggagcaggcgagactagaaaagcagggttgtactgccatctgctggcaggactccaggatgactgtaagaatattccatttgcaggttagtaagtacaggtcgggggaagtattgatacttaccattaactattttaatagacaacatatatttaaaactcatctccaataaactgagttttatgaaactcatatgcactgtattataattagataaggaaatgttaatggtatcttcttagtttttaaatagtaaccccagaattaaatgtatttttgtattcctactcttgagttttttaatatacaccttgttatttccagcataatttaataagataaactatagggagaaggcagaattttccatcagatttcaattaactaaaacaagatattgttggcgcttgaatgaagtagactatattacattccatttattgaccaacaaaatatttaaatgcgttttctttgtcctggtttgagaacagattttattgcaccgaatccaaacattgtgtgcgcttccctaactttccctgaggccttcctttaactataaaaccatttatgaccaaaaaaattaagcaaaccagttgttccattacttgctggttttcattatatcctgaaatatccattcagcatttttatctgctaatgtaacacaaactcatctgctcaatgagatttattacttgttttttttcccacatgttcacaagatattcttgtacattttgcaatgggcctttattatctagtaatgatggcttgcaagttaaattagtttttaatggcatagttaaattctaatttatgttttggagctttgtttaattcatttaggtataatgtaatcattttcttgctatttcttacattatataaaagaacaaaagaacaggggctcatcatcacattcagttgttttttgactttattaaatcttgtcactaattgcatttcccccaagaaactttcaaaacaattgcagtccgatcttttgggcaaaactatctggttgctcagcattctgcataagaagttgaatcaaactattactgtaactcaggggttggttagatattgcactttctcatactcattataaccccactatgctgtgtaatgtactgggcaattat

SEQ ID NO: 30963 - DNA, 1465 bp, Bovine  19866880698773
  misc_feature (1)..(1): n is a, c, g, or t
ntcactgtttggtgccaacgacattttacatcagcgccccgacctgcaagaggaacacgccacagcagagcgtttatgctgggctttgtaaagacgccaaatggccttcctctgggttttcccattcaggttgactcagcaaacagatgttacagaaacataagcctgagcctttccagctgcagacatttcagacaggaattctttaataaaatcagtctattctgtgaagatatgaaaaatcatcaaacttccttggcctctcctccttcaaattaatgttctggaaaaaagaggtcaatggcaacaacaacaacaaaaaaacatcattttatcatctctgtttaaaagagaagcagagatcccaatcgcctgcctcctgtaagcatcaatgaaggacctgctcagtaaagggtgtagtctctaccctcagaacatcaggtacctcagaagaaaacaaatttccatttttcttggttagcacagcttgtttcctgaaagtattcacatgggcagtctatacacacatacatatacccactccaatgtcttttttatttgctttactttgtggcttttaaaaaatttctcctccatgtcctctgaatacaattctcaggccaaaggcttttgtcatgttttagttttaagcagattccattcacatacaaaaaatctgcactattttcaaggtccacagccaaatcccaccagctgtctcctgcctcaccctctgaatatttttgttacattttggattcttgaacaccagtggaagtgataacgaagaaaagcacaactgcttggcgtgtaaaatgcaaactttttaaaaaccaccagccactggataccttaccgagaggaatatctatcagccaaaatacaaactgattttgtcaaatgaggtcacttctttcaaagccgcaactggtggtctgaccgagcttgtgcggtgtatgtctgtgctgagatgctgtgttttctgcatcaagagagaagacaccccaaaccaacacctctgccctcaggacgtgacctggggactgaggaggagcggggaggacggaggaggggggggtggagccatggccctgagggggcaccccctacaggaggagccagcagggccccaggcaggacttggagaccttggtggaatagcgtctcaggcctcttaagtcaagactagatgccaaaaacgtgaggcccagaaattaacttctcaagcagtcttttacacaacacagaaaaccaccaggccatctatattttctccttaattcttcctacattatgaccttccacacttgcctgcacatggacacagaaaatacaggcacaatttttacatacaggctctccccacaaccccacctccccacacacaagagcattaaaaaaaatcagaaatccaggctgtgtagaaccctaggagcagcactcaggggtgccccctacccagctg

SEQ ID NO: 30964 - DNA, 1002 bp, Bovine  19866880717912
  misc_feature (1)..(1): n is a, c, g, or t
ntttcaaatgcttgctttttcagaaagggcaaatggatacatctccctctggaagtactaaatgtttctagcatttccagccagtatcttccatttcccatggaataacactctccctcttttggtccctatctgtcccaagactacatatcagcatttgcagccagtgtattccatttccacagattaacactctttttttgctccctgtctgtcccatggctacatatcagccctggcaacaaaacagtcccccctcaagattatgtgatactgcgagttgggagtgaggaaagtttatttccatgtgctacctccaaaacaatcatttcccaaatactttgcttatggcagttcaaacaaagttcactcttagcaggatactataataaaaatctccaaaagcaaaggcttatgcaatgcattgttattttattagcatcctatttagacggctgttacattgcattactttaatacaggaatgtagtcactttcattccaaaagaaacccacgataacactcaataacagacacctgaaaggggaactgacaaaagctcgaatgcctcttcctctgcctccttcttgggcagacttcccggactgtactgccaatctgtgcatgcacgcccatgcgcatctcctatcactttgtctgatcgcctcgtgctccaaatgcttccttaattctttggaaagcatcaaggcacagagaaaaatatgagggattttgaataagttaagtgtgcactgaaatctcaatttccagttttggaacacttgtgtttgtatcatttgatttcttgcatcttttcttcttcttgtgtaaatggggataacaactatcccacccagctaaagattagataaggtaatatgttgagtatctacaatatctgctgcatgatgggcacccaccggtcaaggttcgttccttcctcttgccttctctcagtgcacctgacccaccttcatgctcacctactctttgaagaactc

SEQ ID NO: 30965 - DNA, 823 bp, Bovine  19866880729321
  misc_feature (1)..(1): n is a, c, g, or t
nccagcatatttctatgtaaccttttggttatacagtctataataacagtagtatagtaataaatacccaagtttcaaattgtagtacagttttttaaaatcctatattgcatggggagtgagagaagaagatggaaatgattaataaaaagtttaaatgataagtggactttgtatagcaatggccatgagaaaaatatctcaaaaatatgaaaattggccagtgcccaaaaactgtcatttatcatacaatgagaaagcagagtaagagggcatagtaatttcattctaatgcttctctaacccaaagccattttccattaagaaaagtttttaggtattcataatattcattctctctgaaattaacaaactctttagtccttaaaaccttaagattttctctagtgaatcacttttggggttgtgatccagcaaaaacccagagtaaacattttttctaaagtatttttatgcaggcataccacagtggaaaacagatcaagctggtgcactaagcataaccccataggagctggaagctttactggttttctggaacaattcacacaatcttctgcactgcttgaaacattcagttacactgaatggctatcattcagtgttatttctgctttatagatctgttaataactgaatattttatatttaaatattcagtgttttttttgggtactatcttcatgtattcagtattgctgaagcacatgttgcacactaatgaatatttacagaagtctccagatttgggattagaaatagaaaatcagatgaacatgggtgacaaggataagtagaatta

SEQ ID NO: 30966 - DNA, 1178 bp, Bovine  19866880736686
  misc_feature (1)..(1): n is a, c, g, or t
nttcttgcctggagaatgccagggatgggggaacttggtgggctgccgtctatggggtcgcacacagtcggacacgactgaagtgacttagcagtggcagcagcagagaggacagagaaaaacagcaaagtgttttcaagacctggtgagagcagaccagcactaagttttaaagggaagattttcagaaggaaagctttgacactcaatatggcacaatcaaggtatgctaggaagcagggtgcttggatcgaacatgaaaaagctcatttttgacagctgttagtaaatacttttcacctgaatggtagaatgcatcaattgatgacatatacagaaaaatccttatggggagagtcaaatgcataaaatgagccatttgaatttttaaatgtattgctctgtgtctattttgtaacattattaataaaagacctaattggttcaagacttgggattgtattgttgaatcatgctaaaaacaaaaccatttctaaggagagcaaatgactccttccccagagacacagaatcaccaccggagcagtcagcctgtgcactactggtataacagcatccatccaactgccaatgcccagtacggatgctactgcaagtatgtctagcacagaccatacttataacatagtttttcactggaataagcataaattttaatcttcaacttcaaaaaatataaatttattgtggctgccatgtaattctgtattatgacctaaggtgagatttgtcagtgaaaatacttcagtgaccacttttatattgcaaaaacaactttaacatggggatttccctagtggtccagtggctcagactccctgctcccaatgcatggggcttgggtttgacccctggtcagggatcagatctcacatggcacaaccaagacccagcacagccaaacaaattaaaaaaaacacaaaacttcagcttgatttcatatatattcctcagtactatgtctccaaagaggaaggagatacaattcataaatataaaatctcatacaaaatttaatgcattctagaattagtaatttttttacaattaaaaatgaaataagtatgtgtttatttcacatacataaatctcatgcattatatagcatgatttactttgaatttcagctaaactatttcaaatcctaaaagacgatg

SEQ ID NO: 30967 - DNA, 1296 bp, Bovine  19866880785105
  misc_feature (1)..(1): n is a, c, g, or t
naagatcggttctccactatgatttctgtggactttgtggactttgtcatctacttattttaaaatattttttattatatttaaaaatataaaaatcccttgtacaacataggtggtatgccatagtggttaaaagcaggtagaatgagtaggtttgaaccctggctctcacaccgttgagactctgggcaacttgcttaatccctctctttttctgttttgtcatttgtaaaatggggacagagtacctgcctcacagggcttttatgtgtgtgtatgaaatgagttaatacatgtaaagtactttgccaagacgtaagtgacaaaaatctgctactgttgtttttcctgctaccaatccttgaggacaaatttgtcaagcaccaaagattgattatagtaactgattatgttaggaagaaaacaactaattttctctaaaactcttattactacatcaaagaacagaggtatgaatctaaaatgaactctctctccccttagaattccagaaccatttcttcagaataggatcaaatatattgttttactttcctaatacattgtcagatagtcatgactgatttatccccaccactcaagctttcaattatcaatatacaatgtatttttatgcttatgtttcctcaccccaaatcacccaacagatcatcagaaaaatctgttaagccctaaggataatactcctcagacttctgattttaaagctttctaaatttcctgtttcaagtcatggatattagtgctaaagaagttactgatataaagttactttaaagaataatcgggtcctgagaatgcgctattgagcagcaaagtgatagaacattttttttctgccagccttaatatatttatgtatctagaagttcaattcataatcatttaataaagtgaacacttatagtcttaaatattaaaaaagaaacaggctattaaaagttaaaaccctattggtatttagctatgttaaaaaaaaaaaaaatcccaggaatattgtaatgagtctaggtttaggagcaggcattgtgcaagttaatgtaagtaatgaacctttcatgtgaaatgatgtagtgtcacaactcatttgcatcccacttaaagtgtaattaagtttctctgacagcatggcttatggctgaaagaacagacctggctgctaaattaatccagagtccctcagttaataacactcagcaaagaaaactttatacactctttcatttaaagttcctaaactcccatttgcagaagcaaggcagcctacagagaaat

SEQ ID NO: 30968 - DNA, 1389 bp, Bovine  19866880863221
  misc_feature (1)..(1): n is a, c, g, or t
ntaaaagcctttttctgggtggtattatgaacggagctgtcatgtggagtctggaatgtaggtgtaaatttcagggagtgaggattatgttgtaaagagaaagggaagtataaattggagctgtaggttggtgaaagaaagggaatgcaaggcaatcgaaaaggacgcatggggcacctattacaactattaccaaggggcttccttcagtcacggccttccaagtaatggtttctgaagtaatattttcaaggatcagatgtaaactctgctcagcaggtgtgctgtgtttgagcaacctcccttttttgtcacctggcagagcctgtgattaacctggctcacacgagaaaaaaatgtcctaggtttaaattatatgtacctccatcactggggaccctgcggcagtggatgtaaatggagcatccgtgtgcccagaggatgaggaatttggcaccggatgaaacagacccaagggatacacacagcaaaggagtgcgtgctaaagagctgatacagactgctgactggctaagtgtgttcacggagctgggagcccacaggtctccagaagacagttaataatcatcgtgacaggctgtcaagcttccatttttcccttttctgttttgcatattgaccctgaactgggtggcatgttcattttctatgccttgccacatagcatcagggctgggccagccctgcctggtgtctgccacttactaatgagctaccacttttgacggctgtggcagaacctcatgcttgtgtttataaatgccatgcacagagactcgctggtaggcaaggctgccgagggtgccacactgatgctgtgcagagcatttcaggtgagcagagagaatctcattagcaaagtctcccctgttcttcccgtccaactgccagaaagccaatgaggccagcagctcggaacacaggcacgggagtggacattttctgcccagacttagagtgctggcctgacctccccactggccacccccaattcagtaatgaagacaattcttgaatttagaaaattcctcattggctccggttgaattccccaaaagcaaagccccaaataaatcacttgtgaaagtgatttattagaaagtgatttcagaaaaaaacaggtagagggattgaggaagtgggaccacaaggagaggagactgtggtagatagaatgatgcctcccctgaaagatgcccacctcctaataatagaacttaggaatatgttgccttctttggtaaaaagggaagtaaaattacagatgaaattaagattacaaaacatttggtcacaaaatagggagattatcctagattatacacagatgggctcaatctaatcacaggaggacttaaatgagaaaaa

SEQ ID NO: 30969 - DNA, 734 bp, Bovine  19866880863759
  misc_feature (1)..(1): n is a, c, g, or t
nctcatcactccaaagaaagacgaagaggacaatctagccaagcgggagcaggatgtcttgtttaggaggctgcagctgttcacgcacctgcggcaggacctggagagggtaatgaccgacactgacaccttgtagtggcctagagaagacgacggcagagacggccgctggcccggagcaagggacggtagccgttcatttactctcaggccctgtacacactgcagcatgaggtggtgttggttccgtattttatggctgggaagctcgatgtacacacacgcaagatgaccgcagaatggggagcttctctggtttaattttaaatagttaactgttcttctgggagatcacatgggtgcctctttcccctcctccattctagagctagagggaacagccccagggaaatggccaagggatgggcttagaattgtttacagactgaggagccagaacggatttcatggtgtggggatggggcaggcgggcagaggagggagatcttttgttcagcctgagggggcacccccgccttgctgcctctcggcccagccctgttcctcggcttccctcgcggggccttcgcccttgcagtcactggagcagagcaggtgtgggtgccagcgtgtgtgcatcaccgccacgcccgtgcatgcctggttgcccgtggttctcccgcagcgaggtgctacgtcgccactgaggctgtccgtgttgtgtgtctgtgtgg

SEQ ID NO: 30970 - DNA, 1068 bp, Bovine  19866880880471
  misc_feature (1)..(1): n is a, c, g, or t
naaatttatcgaccaaaataaatgaatatgtgtgaccaagaagcatatattttttattctagtattcaaacgttctccagtgtgaaacttttgaagtgagatacctattttgttaaacccactttgtatatacagaaaaacttaaatgcaaaaacaaaacaagacaaccacccatacactacggcttgaggtacccttatgctcaactgctgatataattatgatgtagttcccttcctaaaatagcttgatgtttaccaaattctcaactgtcttctttctattgaatttatgaaattcccatttgatgccagcactaacaaagaacaaaatttggactgatgagttttgttttaatcagatttccacaaaggaatattatattacctgtagtaacaaagagatgtaatttggccaaaaatgctatgactcctgaaaggcaaaactacattattctaaactggaagaaataaacttctaaaagttaataaagaccaaataacacttttaacaggcgtgttttattgagccatataaacttgtcttgtcagattttaaaaaagaaaggtctctataggaaaatcaccaatgattttcatgtgacaaataataggaaaccaagcattaaaggtagggtgaggctgtatcaaattagaaaattttatttttagattttctactgatatctataagggtaaagagttatagagagttaaacgcaattatgctaagccaatggaatcaatataaatacacagtctggataagcaggatgcaaactccttactgtatcattgcttcaattacagggcttaaaatttttgcccagctcttgtcagataagtacctctattctctatcttgcttatgtagacacagtcctaaaagaaagccaataattaatgtaggcttctacagccattttttatccctctaataagtacttttgaagttctattttttcagatccaatactactagtgagttataatttttttaagatttaactgtagaggggcaaaaaagtcataaaatcaaaacgatgtcattctctttgcaggggaatag

SEQ ID NO: 30971 - DNA, 1662 bp, Bovine  19866880896479
  misc_feature (1)..(1): n is a, c, g, or t
ntatacttgctttacaaaaagtcatactaagttcacaaccaccccaaaaactcaccacctgatgtggccctgcccatcagagggacataatctagctccacccaccagaactaaagggtaggttttaaacattaatgcaatccttaccttgttattttcagagctctgttaaacaaacaagtgcctactgtgtacaaggcacggtgttgtttcatgaagaacaataagaattttttgatttagtgtaagagagataaaaccaccatataaataattatcatataaggtagaaagtgataagtgccatatgagagataaaaataaaatgctaagggagttcagagaaaagagaattcacacatttatgtgtgactgacctatttttactaacactatgataatcttagctatgtggctcatctcaaccttctgtaggggacagtctttataaagacatcctatttataatacagacttcgtccaaccaccgagtgcctgcaggctgacagtgtaatggcatcaaaactggagagtttcagtgggtttaagctctagatcagtggaggtatcagaaatggaggcttaacattaattcagcttgggggctgtaattgttaggtgtaagccagtgtgcagttttaatcactggcaatgggcaaagggaaatattgagaaaatcagaaagtataattaatgtattcatggttatctttttttttctggatacagttgctaatgctctacccatggaggaagcaagtttaaagtgtgaagagacgtctttcccttcattttaagagaccttctgtccaccctctctttgcagacaccaccaaaatagagctactgtataccatcataagccctgggtgtgtagctcatggtggtcagcctatgctttcccagacatgtgaagactcagctccattagttgctgagctcagatttaccaggtctgctaaatggatgtcccaatgtaccagctgaagagatcagaataagtttttctgctctgagtccagcttttggctcactgaactgtgatcatttcttttaaatcctgctgaagttacctggcttttaaactaaatttcaaaaaaaaaaaataaactaaatttcatatctttccatctttaagcagatcatgctatattatcagcagaaacaataattactttccaccccctggaaataatagtgatcagagccaatgtcttgtacttaaatctgagctctcatcaaacatttctaaaaggcaaacatagcaaatgcaacacagtggaaaaactccagatttagagttggaatccccattcagttgcttagtaattgtgttactagggtagatcagtgaatttctttgagtctttgtttaatcatctgcaaaacggattgttctaggattaagtatgaaatataaatataaggcttacaatgcttcataaggtagagtattatttattgaagatcaacagctctttggttgttgagaaatgcttttggtttcccctcaaattgtatatactggggcatttagtatagccattcaatctatacatcaaagtaaagacttcattcttccagacatgcagttggagacatgtctatagaggggagaggagtgcgatgttatccaccttttcaaggctataggcttgcaag

SEQ ID NO: 30972 - DNA, 1151 bp, Bovine  19866880953626
  misc_feature (1)..(1): n is a, c, g, or t
nagatattaataacatgctaagcttattacctctgacttatcttggtagagataaccaggagacgtttgagctacaaaaatttaataagctcttatctttagagattatggaagccacaaaagtgtacataagatgaaataggtcaaatttcaacaatttagaggctttcacatcatccataaacttaataaacactgtttctacattgagagcacacatgtagtatgtaagtcctcaataaataaaaatagactgctaagttacaaattctgtatacaaaaacagttatctatgcctgctaatgagatcattccttaatggctaaagtttttttttaataaatactctgataatgcctctctaatgaaaagatactatgaacccttacacaaatgcttttgagtcaatctttacactacatacttttacaaagataatactgttgttcccaaaagacacacaaatgaagtcctttccttcaaagacttcacaaggcagatataaaatctgagcacgcatggcctgaaaagtaattattttcatgactcagctgaatatacattataaacaaatatatatgacaaaaaaatcacctacagaaaaaaatagcataaaatctcagttaaaaggaataaatgctcagtatatccacaagaaaagaacagtaaaaatatctgctggaatgaatgagagaagtattcctggagaaggcaagcttaaaccagatttagaaaattacaaattttctacaaaacagaataaagatcaaatgcaaaaaggaaggaacggaaagttcttcatgagcaacagcaaaatgactatcgtatctaactggagggttgggaaagaccaggtgaatgaacgctctttgaaactaggctgacaagttttgtctgctatgatgggtatcactagaaactcttgaaaagaaaaatgataaaagatttaattataagttcacatgattctcatttttttttgtatcattaacatcaaacaacaaattgaaactagtaaattttcagtataagtatacacttacacaaagctagtgtttaaatagcttctaatgtagttatttttggcacagatacacacatacagggcatctcaaaacctaaatttttggtagtatcaatatgcccatcat

SEQ ID NO: 30973 - DNA, 1606 bp, Bovine  19866880963536
  misc_feature (1)..(1): n is a, c, g, or t
ncttttctcattgtatgtaaggcctcctcagagaatgattttgccttcttgcatttctttttcattgggatggttttggtcatcacctctgaacctctgtccttagttatttaggcactctgcctaccagatctaatccttgaatctaatatttcaggttcctgtgtgatattgttcttacagcatcaggctttactttcaccaccagacgtatccaaaactgagcatcattttgctttggcccagcctcttcattctttctgaagatattagtaactgacctctgttcttctgcagtagcatattggacaccatgcgaactgggggggctcatcttccagtgtcatgtccttctgcctttccatactgttcatgggattcttggggcaagaatactggactggtttgccattccctcctctagtggcttatgttctgtcagagctcttcactatcatccatttggggagccctgcatggaatggcttattgagttattcaagccacttcaccatgacaaggccgagaaccatgaaggggtgagtcagcagagttaccccttaattacttgaatactttctcttggttagctctatgctgttaaaacatgtattagtatatggatgcctgttcctcacctcagagatactgatttattggtctggtgtgggtccagatagtggccttttcaggggaagttttccatataatattggcacatgcccaggtgtgagaactagcaggttagatgtccccaaatcagactcctttcattctatgcaataacgtcttaagaaatatcatcgaactaaatattaatgtcatgaacaactttctaatctttggaaggtggttcaattcatacattaaataatttatcatttcatgtttatatttttgaagagtcagtagtagataaaagtgtagactttaagtcacacctgtatgtatccaaaactcagttctacacaattagtagctgtgtgattgggatcagttgcttgttctttatatggtttcttttctcacctgaaaaggaagtttccttccttgcaatagagtttgggtgatgattaaatgaacaatttaagtaaaatgcttagtgaactgcctgacataatacaagagctattaacatttttacagtatgtcttcaagattgatgggacagatatcattagcatgctttagtaattaaataattataggtaagttaaatatcttactctgggtaatttgactgatcaatttatttgagtctctccagtgtggaaatcctgactgctctggaccctatgagaacataaaatatgtatgcaatatccagcactgttagcaagtcaggcacaaaggggaaccataagaagtattttagtagcagagactgcatattaaccaccagatctatttttcccatgttccgtttttgagtatatggaataccttctaagtctccactgtgattattgtagtcaggtacttattgcttgcaactggaatgtgagtagaaatgacatgggtcacttctgggtctggacctaggaggagtgttgggtataccttcccatgtcctacccgatggaacctacatgtagcagagtctcag

SEQ ID NO: 30974 - DNA, 1971 bp, Bovine  19866880987238
  misc_feature (1)..(1): n is a, c, g, or t
naatgagagggagaagaaaaagaatggaagcaagaagatctagttgggatgccatttctatgatttgagtaagcagtttcagtaatttaagaactgcatagctgtaaagttcaatataaatgttaatttaaaactattatctcaatacgattgaattcaataacctttaaggcagtagatattgaggcaggattttttgttacttagcttcaagtaattcaggtaaaactgatgtataatttgaacataatgaccaaattcactaatgagctgattgcaggctttatgttctaaccttaaaatatgaagtacagtcgcaactgaaggaaaaagaccaaaacaatgttggacctgctgggaggcactgcagattgtagttcacagaaataaagagttttgtttctttttactcaaatatgtaaaaagccgtactcattagtcaaaattgggatctaattgaaatctacacatgacagtttaacattgctattgagatgaagttcatggtcaaaaaagagatttcttacaatggaaagggatatgggttacaatatttcttttcaaatcagttgcagcatgtatttaagtaaatcaattttgtatcagaatccccaaagaaattgggatgtgtttaaatctatgggacatggtgtggtgcaggatagcttgtccttttctacctgccaccattttatgagcatgcttatgatgccagaaaaaccatgtggtcctgcaactcaagccaaagaaaagacacagactctgtaaacataataaggcagaggaaatacatgaagaggaagtcagtcttgacaaagtaatttgcagtctgcaattcctaggacttcagctggatgtgagaacctttttttctgtctgagaatgttgtgttgatagcagccatccctgtctgccttcttcttcccttaccccaaggtctagatgttaattggcatctagaccttacatataaacatgaagaaagggaagccattgtatgcacagactgggaaactcatgtgccagctttgcaagcttatttgttattacagcattgtttgctgatttttaaatgaatgttactaagttttgctggtagtagatccatttgagtgtgataggtagtcatcttaaagtttttaatcctcaataaaataattggaaaaccttccatagcaactgactcttaaacctgtctgttggtcagaatggatgacggcaaagagcctcaaaacagaaaccaattgttttctccttataacattattctaagaaggaaaatcactcattctagaagttacttattattggaggaagtaaagaaatctgtcaccaaggtatgccactcatgtttcagatgactttgttggtgaagataatatatcaatgcaaatgtattacagtgtatcacaggcaataattgactgaagttgtgtcttcttgatgggttttcttgaatgaattaagctcacatgtcatattttgtcttgatattctctatcattttggattataagaaccatgtgacagtgaaatctactctttatatcctccatgggtatccaagtcatcattccatcatcactctcaaaaccaaggggtggcatttctgagacagtatgaactaaaaccatagcccatttatgagacacagtagtagctaataattgttgttcagtcattaagccatgtccaactcttttgccaccccatggactgtagccctccaggctcctcaaacatggggttcttcaagcaagaatactggagtgggttgccattttctccttcaggacccacatttcctgcattggcaggcagattctttacagatgggccaccaggaaagcctagtagctaatacagtgacccattaataaaaccaaaattagttaatactcattgactgactaacaatccaggcattgctgtaggattggggaacttggcagtgtgaatagaataaagtcc

SEQ ID NO: 30975 - DNA, 1552 bp, Bovine  19866881060948
  misc_feature (1)..(1): n is a, c, g, or t
ntaagtctgtgctagtagtagaatgatttagcattaggttcccgatgctccaacgggccaatcttgagaaaaaatactttcattctcttttgaaatttttatctcataatgccatcaatttaaatatgtgtatcaatttattttggtatatatttatatttgaggcacaattttgagagcctgagaagtttggggagaagtccctttctactcagtaaaaataaaaactaattttttatacctcttttatgtttataagcactttgtgtatatattatcttatttcatcctcctaacaagtccatgaaattattgtataaaaaacgactaacattatagcctatagaaggggaaataccctgaaaggatagtataatgaatgaaaattattttctgggttgaatattgcttttttggcattagttttggggcaaatttagggtttagggggaatttttgtatcttgtggaaatatgttacaaactctgaacattagcacatgcattcattgggcacattggggtgtgccaatgtatctttcatagacatatttcttatagtttagatggataaagctgttggtaaacaggttctgttatgcagctgatccactaaaattttcttttctcatgcctactaaaatcaggattaagatatcaattttctttctataataattaggacagctggtatattagaattatgggtatttgcctcttcttgtgtcttgtgcttaatgggatggaggctacttatcagactaggacaaggactggtcccttcatttattcaacatgggtccatttacagaaggcagtgaacttggcagctctgctggaagagctgttttctgggcagatgacagccaagggcctgattacattttagactaatttacagtgaagggaactgccttttccattcctttggtctaatctaaagacaatggacagaaaaaatgtatagaccttaattaagaattgctcattttcctggtctgggtggtgtagaccattttatttataaagtaaatttgatgatgtctatggcaaaccaagcttgtatttttcaaataccaagcttgtatttaccaagcttgtagttttcaaatttatgagccatcagtcttttcttcttcaaaaagttcaaagtcttctggtaaatttaattggtctcccttttgagtattctgtgcacagtgggatcactgcctcccatttgtctgttacctattatatactgtatgtgctgaaatgacatcttctacctagttttccctggtttgtttttcgagtcaaggcctcttttctatcaaggaatctttaattggctgactcattctgttgatattttccttatgattgttaattttttatccttaatattttcaagaaaactgagtccattgttagacatttttttcagtattaaaaaactattagtattgtactactctccggagaaggcaatggcaccccactccagtactcttgcctggaaagtcccagggacagaggagcctggtgggctgcagtccatggggttgcgaaga

SEQ ID NO: 30976 - DNA, 827 bp, Bovine  19866881077541
  misc_feature (1)..(1): n is a, c, g, or t
ncgtatcctgtccttagtggattactgcagtgcctgtgtttaaataaccgttatttaacttaataatgccccaaagcacaagaatagtgatgttggcaattcagatatgccaaagagaagccttaaagtgcttcctttaatgaaatggggaaaattctctgtttaataaagaaaaaaagcttctactgaggttgctaagaccaatggtaaaaacaaatctgcctgaaattgtgaagaaggaaaaagaaattcatgctgattttgctgttgcaccaaatgcaaaagttacagccacgatttgtgataagtgtttagttaagatgaaaaaggcattaaatttgtacaataagagaaagaccacattcacaaaacttctattattgttaaaattgtttttattaatttttgccattaatttctcattgtgcccaatttaagctttgatttatgtgttgtatagagaaaaacatggtatacgtcggtttcagtaggatccacggttttaggcatccactgggagtcttgggacatgtctcctgcagataaggggggactgctgtatatgtacctctgccaggtaatagttttattttagctgagataacagatttttctcagatgtcttatgtcccaatttgaataatattgtgtcttttattataaagatgctatggaaatctggaattcatcgatcactagttttgattcatagtgactcttggaaactatcctttgtgagaaatggccctgagcagatgtgcttagtcataagaattgccagacagtttcttatgcgttggcagcctagtttttctgagagtagaaaa

SEQ ID NO: 30977 - DNA, 2877 bp, Bovine  19866881112357
  misc_feature (1)..(1): n is a, c, g, or t
ncagggaggtctaggactgggtgatcttatcaaaacaaggaaaaaactcttacgacatggggcctagaatcgagacttaaatctcagaaaatcctaaaatcccagcagtagctataaagttttaacacactcaagccttttaagtcaaagaaatcccagagcacacctgaacttagctttgagaggaaagaaactgcacctcacaggggtgtaatataaattcacatacatgagattttgcccttctattaaatcaaaccaagaaacatgtattacaacagtcccgagagatgtcaggaagtatgaattggtaagggacttaatctatatctatacacatgagtttttttaattagaactttgtctttcacactagcaatttattttaaaaaataacttaatctccgttaggtatagaaatatgtgtggcaagtcaaacattcaagctgagagctctctaattaacttccctttttggtttgtctaccaatctatggaagaatcagcctatttgaatgacagtcatagatgaggaggaagaaaaacacaccacccagaaatatggaccagtatatttcctgatttctcagaagcaacagttcaaggcatttttggaggaaactcatctgaaactgtgttgcaattaattttatttcctctttagttacagatcagctgtacagatgagggaaagtctatatgtgaccgtgtgccaggagctgaaacatagttatggaaagggcaaaagctctctctgttctcaaagagctaatattaggacattctggtttcatattttaaacatttgacacaatgattttaagtacccatggcatcattttttattttccaatgtgctaatatattcccatattgtgatgaaggatgtactcttaatcattggagatattaagactggagaatcacttttgatgtattaattcatgcattgtttcactcaacagatatatattgagtagttactatgtgctggtcaatgtgctagatgctaacaataaaatgattaacaaaacagtccttgccctcagcaactacaaggggtgacaattaataatgcatatacagtgcatgcatgcatgctcagtcacttcagtcatgtccgactctttgcaaccctttggactatagtccagcagtctcctcagtccacaggattctccaggcaagaatactggagtgggttgccatgccctcctccaggggatcgtcccgacccaaggattgaacccgtgtcccctgcatctcctgcattgcaggcagattctttactgcacagggaaaccctgaatatacagcaaaaggtatttattaagctcctaatatgtgccagaagtgaagaagtgaagtgaagtctctcagtagcatccgactctttgcgaccccacggactgtagcccaccaggctcctccgtccatggaattttccaagcaagagtactggagtggattgccatttcttctccaggggatcttcccgacccagggatcgcacctaggtctcctaaattgcaggcagacgctttaccgtctaagccaaatgtgccaggcattatgctaaatcaggagatacagcagtgagtgaacataagttagaatactgttcaaacagagttcacatctgagtggagagacagaaaaataaacaaggaataaagttgatgagataaagagcaattcaggaggttaagtagggaatggaaggcactgaaaatgtttaaacaaggattaaagtgatccaatgtatattttaggaaggttgactgatacacacagaaaaaaaagaaggcagctaggacgtggcaaacctgctattcttctattgcctgagcctggacaaaaaatgtcagtggagaggagcagccaatagtatagtgattccctgtgaacagaagagaaactgggacgagcacaagatcctatagattacaacagtaccaacgataacaacacagtaacagtaacaccagttttatggtgtttgctgtgtacctgtcaatttgattggtacatgttagaaattcttagagaagatattagtatatctatttttacatacaatgaaactgaggcctaaaagttaatcaactgcaagatcacatagctagtaggtggtggaggaagaatttgaactcaagttcctgactctaactcagaatgtttaactcttaaaggaacaattacactagcaagaatgtttattgttcagtggtctgaatcaagtcttacattatgtgcaattatatagctaattattataaaactttaataattaatgtagtatatgctatataattatcatttaccaacataagttacataagtacagtatttagttagccaaagtgttcactccaattttcctttgcttgtctcttctcctcttcaatgttaagagttccccaaggctctgtcctaagcccacttatcttcttttccttctctgtctccctagctgacctttatcattttcagatattcaaagattattttttgccagagaccggcaatcaataaaacagactagaagtcatatatccaaatatgtcttctgggtatcttactcggtgtctcacaaagcatatgaaaaatagcatgtccagaagctaacccaatacaaaatccgcttgaattcctgtcaccacatctcagtaaatgatccttccatcacccagttttttatgctataagcctggaaactgttattgattccttcctcttccttatttgcagtacacagtccatcaccaagtttggtccagtctccttataaatatatttatgatccatccatttgtcatttttctgcatcccctcttccatcaccattatcaattagttgtatcattgcaataacct

SEQ ID NO: 30978 - DNA, 1262 bp, Bovine  19866881122587
  misc_feature (1)..(1): n is a, c, g, or t
ntattcttttctacaaaataggcatttattacaaagtataactaatccctgggcttgagttaatccaaattactaaaaataaattgcaagccacttttcaaatgcagaaggatgaagaaggtaaggtttgtgtttcagattcagcagcttcttcctttccttttccaattaaattcttgttgtttagttgctaagtcgtgtccaactcttttgcaaccccattgactgtagcccgaacaagtgatcaaaaggagatctgccaggaaaaaggcctaggagtgtgtggacatgtgcactgcctgagttctaagtgatcaggatgtgagcagaacacacgtaccctgggccctctaatcttcacagtctgcccaagtgttgacaggaaaatcctctgccaggaagaatccgtctcctctcaagacaagacggtcccggaattggtactagcaagatgctgttgcggtgagggatgggagaagcaccgtattgacatttctcttggctgtatgaaagcagtaaatctggctgtgaagacaagtaaacttgaattgtggggaaaatgttctccagctaaaagtcccaggggctcagcaaacgttttcatattaataatagttcacagatggagtctttcaacttagaaattttaagatgtcatcgagtacataatctaataaagaatgctaggacattaaaagtaatataaataaaggaaatgtaatccatgtaagggtcatttggataattatttcatctcttgcatccagaattttgaaatgaaatatagtctttcctcacttcttctgcaataagtcatttataaaaagtaagtggcttacaaataaatgactatatctatgactactctcccaaaatcaataatacatttattgataattctgcatttaaaggttcatttcaccttagtattgacattctgtctcctctgccatttcattagatttaaaatttttcattcttggtaatgaactgtaagaaagttgctatgttagaaagtagccccatttcaagttgggcaatgcaactcaatatatcattttctattaattaccgtaatcggtaaagtttcttgtttgtgtgctcagcaaaattagagttaggagtctggctttaccttgaaaggcaagaactcttggctctccttaaatacatcactgaggtgctctgtaaaatggtggttgttgtggcttaggtgctaagtcatgtcctactcttctgaccccaaggactagagtctgcaa

SEQ ID NO: 30979 - DNA, 1105 bp, Bovine  19866881124365
  misc_feature (1)..(1): n is a, c, g, or t
ntattaccaactttaactataatgactcaattaatccaggcatggtttcccaaagcaaactgaaaatgcaattatcagaccaataagatgctaaagtcagtaacttataacctcaggcagactattttataaagtgatataatcaatattgtattcaagatagtatgtggtggtgataatttgctacagaaaatacagaaattccattaccttttaaaatatctcaaaatcgactgatgtgttatcagttgcactttgagtaactactttgcagcatatgtacaataaaaaagcttacattcatataccttcaatgttgggtacgaaaaatcatggctaataaatgcttggactttagtaatagtctatagagatataagttgccttatcaacatagaaacaattttacatatcccttctgttagggaaatatctttacataattcttgttcataaatccactcacaagcatcacagttattctctgattaagcttcccttcaaaataatctgttgactctaaaaccaagtcattgctacatctgtccatcatagctctttttaaattgaaggaaacagaataccaacatacctttgatagagaaaatcatgctgtcttctaggcatccatttcagttatttattttggactatgactagtattctccatgaactcttacaatcctctaactcagaattactgatgcttaaaagaagtgaaatgcataaagctataaatctgactcaataagacttgagactatgatcaggaactactttaagccaaaggaaaaatctatgatcagcgaacagtgcactaagctttcttttctttttgtttttcaatatgaaagcactcttaaatccaaccacagaataagaataactactaattggttttctgctcaaagagacctatcattggttggcaactaaagtagcaagaatagtattttctcccactcacagctttagaactgagaagaaaatctgatgtactgaatatagataaggaaatcttttagattgaataaacttgctaaaggaatattcttattttcctttaaattgattggtataatgatgatcattgtcctcaaagaaa

SEQ ID NO: 30980 - DNA, 1129 bp, Bovine  19866881154591
  misc_feature (1)..(1): n is a, c, g, or t
nagaaccgaggactttttacaggagaaacaattatcacaaaatgtccagaattgaaaacagaagaaaataagttttcctaactgtcatggcttgctttgatatggaattaggataaataaaaaagcactagaacaaagaaaaacagtgaactcgggtaattatgtcttttttgaggctttcaatataggggcacaacttttttctctagagttaatgtttctattctcttcctattaagcttaaaatagttctcctgaattgacaatatatttttacagactatggaatctcaagatttttcagattttgagcttctccttattccttttacttctaaaaattttgcttcctattatgtgtttctttagtctgacttacaaaataaattatatttatgctaaaacttgagtagcaagaattggcatttgaataataatttcacctaaagacatttcagacattatttttgtcagcatctgaaatcttttaagtcattttttttttcttctctttctgcttctatgtcctccttgaggttgttgtaatttgtctgagaatgtttccatccccaatctgaacctgcttctttttaagcttatctctcattatcctatgaagacatttgagtgggacaaggtgtcatgacatggttactaaggcctaactaactttctacaattggtggttattttttttaaattcttaattatattgcaaatggttatatcttactccattatatcttttaaagtaaatactggaaaagagcagttgctcttttctcttaatcccttagtcttatggttctcgccacatcattgagtctgctacttctatttttacactttacatttagcactcaacctggtgttgcctgttttccttgctgatgctcagcaccatgaaacagacaaagagcagcaagacggcagtaatagcatacgtgcgcatgtacacacacagacacactcacacacaccaggaactcttgaaaggaggcaatgttaacaataaagctgaaaaagtcacgcagatggaaaacaaaatttgcagcatctggtccatctgctggacagccagtaatatccagattttctgaatacttctattgatggatacttgacctat

SEQ ID NO: 30981 - DNA, 788 bp, Bovine  19866881204997
  misc_feature (1)..(1): n is a, c, g, or t
natgtcatttcaatttgaccatgttttcataatcatttaaatctcactgacattggcgtatgatctgtttcataaaattttaacaattttcttccatgaaaaacattacaatgaataacttttcatgcctgggttttttcagtgagtacttttctatcacttttgaacattaatcaaaagataatataaagatgactttgtttcacttagagtcaaggaatagttttaaagtcatttgatactgcattcaaagagccatatctcctagtaaattattctccactcctttaaaggttcctttgtcataagtcaagtaggagcatcaaaactgactatgatcagttcaactacaaaacagtgttttaattggtctttccacttcttttctcaaacttcatatcacaaactctccttctcaattgctgccaaaattgtaattatgccaagcttctgcttataatacattagtatttttgtacttcctatgcagtaggtacaaactccttagggtggcactacagagtgtcattatgagatctaatgtattcataccctctcatatacttcatcctggtcaccctaggtaaatatttttatcagctattgtgttggacttctgtagttttcatcacttctttatatctgagccatggctctgcctcaaatacctgtcccactcttctttgccaatcaaaaacttccctatcttttacaattcagtaaaggctccatcacctccacaaaatctttctatttccctagacataactggctactggttcctttgg

SEQ ID NO: 30982 - DNA, 1734 bp, Bovine  19866881228924
  misc_feature (1)..(1): n is a, c, g, or t
nagattagtggatgcctggaaataagaagacaggaaggggagatgattggtgacaggaatgtgggtgtgactataaaagggaaccatcagagagccttgtggtgacacaaatgctctgtatcttgactgtttcaatgtcaatatcccaattataatattatactatagttttgcaagatgttacctttgggaggaaatacataaaggtaaaaaggagctcttagcgttcttccttacaagtggatgggaattcataattatctaaaaattttattataagtttgacttttataaaaacaaaactcatagcattaatgtcctatacaatatcactttcagttcagttcagtcgctcagtcgtgtccgactctttgcgaccccatgaatcacagcacaccaggcctccctgtccatcaccaactctcggagttcactcaaactcatgtccactgagtcggtgatgccatccagccatctcatcctctgtcgtccccttctcttcctgcccccaatccctcccagcatcagagtctttttcaatgagtcaactgttcacatgaggtggccaaagtactggagtttcagctttagcctcagttcttccaatgaacacccaggactgatttcctttagaatggactggttggatctccttgcagtctaagggactctcaagagtcttctccaacaccacagttcaaaagcatcaattctttaaacaatatcactttaaaatgcactcaattttcatgagtgtaaaaatatcagtgtttgcaaattttatagatttagtctctttttcagcatatcctttattaatgaatattcaaatctggcaccactatttctgtttatttgaactcactcattcaattactatatattacttcacattctcatcccttccaataacatagactcattttatcatgcaggatttttattcctcattttcatttttaaaaatgaaattatattaaaatatgcttcttgaatatattttcttaaatgtcttatccagtataaactacaaaataataacaatgacaatcaatgggttagttactaacattattttgtccatgaattgtagaataaggaatgtagaacatattaaatgtacctgaagcattagttcaatatagaaagaaaatttaaaaactttgaacaaatgacctttttgaatgtttaatgggatactcatgaacacttcaagtgacttttgatagcctgtcaaacagctaaagtaattaatttccttatgagacaatcatattggtcataaaaatctgaaatatgtatttaagacatcatagacatatactaattcaagcctattatgtaagaacaacaaaaataatggttatactagtatcagttatatttcaccatgaaacatataattttgtctaaaaagaagtttgcctatgattttcaaaggaagagccacatgaactttggcaaacattattttgcaaatgccactcttaagaacagtaccacctagcagtaacctgacatttataactattctaaataatgcaacaaaagcattttcaaggttcatgtgtatcttttcatatgcagacttttgcagttctcttcaataatttagcttgtttggacacatcttactgaatcatgttttttgaactgaaaatatacattatcttgtgagtcaagcatttgcaaaaagttatactcttgattctcttctttacctgaccctttttt

SEQ ID NO: 30983 - DNA, 1486 bp, Bovine  19866881236154
  misc_feature (1)..(1): n is a, c, g, or t
nttttgaatctgaatacatgtgtgtttcttaataaatactaagaatggggctggtccaagaagaaaagatggacagttttcaagagtttcacattaaatatttagagagtcttcttactcagggacacctgctaagccatgataagaataatgcactctgggctgttcagaattgtttgaccctctgaaacattaaagccattttattctcaaagggttctcttataaaagggtaaaagtaacgtcattgttcttgtagagtaaccaaaaaggaactcttacatcagctttctaaaaaacagtctagctaatctcaaagtacaaaatgcaaggcctttacagccatgatcttactagagtataaggttaaccacacataataataggtcactgggagagctaatagtacctaaaggctcttctgtccagagattgatctacccagcctactatagtactaactcacagaatcccaaagttggaaggtacctcgaagagcatcctacccaaaaaattcattttataaatgaagagaaacaaaatgactcatcttaaatcactttaacaaaagtgaattgacagcttagggactaaaactcagaccttttaattgccagaaaattcgctcttcacattattttggctgtttccctttccttctggtggtgacagacttacctttaagatccctactggataagaaaacaaactcaacaatgcagcatctccctaaaatcactttaggagcacatcagcataagcatatttgtcattagcgatcactagtgtgcatttaggaggaagagactcgtgccttagccctgctcaggtagccttcccacctctgcaaatcacttcctcacttctgacagaaaccctgtccaacactctcccacctctggatttctataacaacattcatacacaatcttcatcttcctactcgacaccatagaacttcatttttggttgtttgacttttgcatgtttctatatgttctctgccaattagtttgtgcatttcttgatggctggcttgtgtaccttatctcattagtgtcctccatagaatcccatgtatatttttaaaacaaatggatatgtttaatacgctgtctctttccaaacagaatttagagccataataaatatgtggtgagtttaaccaaatgtgaattcaggagaatgcatttctgagagggaaagagatgatcaagagcagcagagaagtgctacatgacaaggtggaccatgaaggcccccagccttgacctactgcacagccaagataggcctgctgtcatatccacaaacagacaagtttcccctgaagtcccttcatgttttatttcacattaagtgacaccataaaatctccaatcgtgacatttcagaaaccagttgttccaagatattaaaagcagacccatcacaactcatcggacggtttggatacacaaggtataaggtttcaagggcagctctc

SEQ ID NO: 30984 - DNA, 1056 bp, Bovine  19866881248371
  misc_feature (1)..(1): n is a, c, g, or t
ntctacctgtttggcagttttctttgctctagatgtcaaaaagtaaatttatgcctacctgttatctaaattgtaagaaaagttaatatttagaaatgaaatatttatttatacaccattactatttttaaagacatttcagtactcctcagcaagggttatcttgcagtctttgtccttttgtagactaagcagagtcccaaacaattgatttaaatgagattttggatacaattttcttttactttgatttcttactaatttacttagatttcttgctaatgtagctgtttacagttatagtttttcagaagttactatatatctttgttacccttcaaataacatgtcaaaaactttttgagaaatatgattaattatcataaactataatgtgaagtaagaaaatttccccatatgcatcagaaagctaaggcaaataggttataacttatatggaaggttagtcaagaacttggatctgctagaattcttaagctacatcgttagcttaaatttgtcagatagtatcagtttattttcataaatgatgacttagcacaaaatacattgaatagattatcttttgttagaaaattattcaataaccattgtgtataaaattaattctaaaagtcagttttagcatacattaggacagttaataatcaacaatcttggttttgcttcaggcaagcaactcctatgacagttaacctctaggaaagcaatttgaatatgtttgaatttgtaagaccttttattgctcttaagatattcgtatggttgcataataacaataaaaataagcagagaacttttaaatggaaaagaatacttgtttgtcttagactcatttcttgaaggaaatccttccggaaaactcttaatagaccatctgtgccaaatgtttagatacagtcttttacaaagatagtaaatttgcttcatgtagctatttgaaatcctttgattcttactgacagggataatcccaattatgttctcctattagaatttttcttgtggggatatgttgtgcttcttttttaaaat

SEQ ID NO: 30985 - DNA, 1176 bp, Bovine  19866881250884
  misc_feature (1)..(1): n is a, c, g, or t
ntcagtgctatcacaaagcaagcacggctgtagagtatagaatcccagcacacacaagaaattttgacaagcactagaaaacattcttggtaaaaaagaaaatatttgtctaagttctcacacagaagagcaacatttccatatcttatttacttcttctcaagaggatagatgatttttacactgagtgagaaaagggaatactaaacccagtcatcatgacactcatctgcttctcaccaatcaatacttgtttgaaatttccccacaatcacactgcatgtgaattaggcaatgccaaaattgctgcaccctggcagaattgtcactctctgatgactgtgatccaagctccaatgtttgcatgtatcccttcacctagtggccagccgttgctcacaggacacagtggagctggcaactgtctgcacactgtatcggcacaaacggtcgacaacactggctacacacctatctgtcttatgcaaggcaaaatgcttcaattacgatgacattataaaaggaaccactgataactgggagagttatcaagggtatccatccacaccaaaataaacatcatattgttaattgtggttgacatgtaatttgcaaaaacactttaagctatttgtattactaacagccatctgaggtcttactttatctccttaaatctgcagcagttttctgaatgaattcttatgaacacatttaagaaaacaattagaagtgcaaataaagaattccctaaaggcccacttatcttgcttgtatgatcagagccctggtaaacaagccctttgaatagctcaggcactttcccccgtctcttccttaccatgatgataagccagtctagtaaagaagaagtgtaactgacatgtgaattatctcctttgagagacattatgtaacattaaaaattaatctctttaccttttggtgttccccaaactttttctctccatttaggctgcaagagttctcttctaagctagaagtaacaaaattttcaagaagacactatgatccttttcctctacaagtaaactatgtttaaggattcatcaccattcaggtcctccttacattattataaagtacttgaagtatatgtctacatggtatttatgtatattcaaaaaagtattgttaggttctcaaaacgcaaga

SEQ ID NO: 30986 - DNA, 1884 bp, Bovine  19866881263639
  misc_feature (1)..(1): n is a, c, g, or t
ntgatgctaagctgaaactccgtactttggcccctcatgtgaagagttacctcattggaaaagactctgatgctgggagggattggggacaggaggaaaaggggatgacggaggatgagatggctggatggcatcactgactcgatggacgtgagtttcagtgaactctgggagttggtgatggacagggaggcctggcgtgctgtaattcatggggtcgcaaagaatcagacacaaatgagtgactgaattgaaactgaagtgaacaaattagaataaaataacgcctagcacaaaggacttagtttctaataccactctccaataaaccactagggcttcctgttgctccagagctggcgcaataaatatataagatgaccatggaatttcttgtactgccaaaatttcaggaagtgctcaacaacaacaacaaaaaacatcatgttagagatgtcaagtggacgtggaaggcaactgaaagaggttgcaatttccaaatataaaacaattagagcaacaaacaaagtaggattggattataacttaatgtgtaataaaatattcatgagcttatactgatactaataaataattgagggactttcctgcggtccaggggttaagacttggccttccaatgcagggggtgcaggttttgatccctggttggggagctaagatctcatatacctcaaacaaaaacaaaacataaaacagatgcaatattgtaacaaattcaataggcactttttaaaaaattgactaaatataaggaagaatatagacaaatatctcatctggaaaaatcccaaattatttatgtagataatccaccttctaagaggtgaaaaacaagtcactccttgagtgtacaccgcagagactttctttccatcctcattgtaagtcggtgttcaaggtcacaaaagtcaacagtgacgagttatgcagatagcatgcaccctttttgtgatgtgatgaaaatcacacataagctctgcggtctttctcccaaaaatgcctatccctagtttaatcatgagaaaacatcagaaaaatggtgttttttgtttttttgatgagagacattctgcaaaataattggaccataatgtcaaagctatttaaaaaaaaaaaaaagggaaagaaaagaaagtctgaaaaactgtcacagccaagaggagcctcaagagacatgatgattaaatgtaatgtgggattctgaaactaaaaatgaatattagataaaactgaaggaaatctgaataaagtataaactttaattaatactaacatatcaatattggcacattaattgtgaggagtgtgccatattaatctaagatcataataataagggaaaatgatgcaaagtgtacgggaattctttgtacaatcttcacaacttttctataaatgtaaaactattctaaaatcaaaagtttatttaaaagaaaaggcattattcatgaattttagtcataaaatatcattttttgttaaaacttcacaaacaatattaccatatgtcagtattgcaactaatggtgaactctatgtactttggaagatatttgtcatgccacaccacacatatactggcttaaaggtttcctgaaagaatccttccagagcatcataacctgtcttttgaagctttcagaacataaatcttatgttattaactgcttggctcagatcataaattattttaagcaaaaagaagagacaaaactgcacttgaaacttacaagcaattgctgcaactctgcagttactcctaaatacttttgctacctctagaaggctaataaggtaatgcgtggaataccacagttcttccttctctttattctatttagactgaaggcaatgactttg

SEQ ID NO: 30987 - DNA, 1368 bp, Bovine  19866881313995
  misc_feature (1)..(1): n is a, c, g, or t
nctagaaatgtaaaaagcaatttttaaaattaaaagtacagtgaacagatttaatagaagattagaaatagtgtaagagaaaattagtgaattggaagacatagttgaagatatacagaatgagataccaagagaaaaagagaggttaagagcatagaatatagagtgagaaagtatagcttatttctactcaaagttctagaaagagagaacacgccaaaagggggaaatgaaatatttcaagaaataatggatgtaaatttcccagaattggtaagagataccaaccttaaatcatgaaagcctagtgaatctatcctagaagggtatataaaaatctgtatctaaattcatgatcctaaaattacagaatccaaggaatattttaatttgatataaaatgttctgataaattagccgtaaatgataaaacattgaaaccttttatttatagagatttccctgtattaacatagtgattgatgataactaattttctagtcaaaattgagtcaaactttggctctactcatttgtttatttaccattttattttatattgtatctaatttttaagcacatgaccatctggtaatatacccaggatcttggacacctagggtaaaaagaggtcaccctttacagggtcatttattaaagggtaaataaataaatgtcatttattctagtacttactttaaaaaaataagaaaatagaagtactgcttttctgtattatagagctacttaacagtttcagactcgtctcaaataagaaatcattctcaatgactaatttctcctcccactccccttctctagtctgttgaagggaaagaccatagtttaaataataatactgaaaatactcacataacaggtaaaatgctctttgctgaaacagtgttggtaaaactgaagtaaaattggagtcttttaaaatagaaatttcaagggcacagtgggaagaaatattgctttttggcttaaagtcacaaattacattttaatcaaccactaaataatattatatataggaattgctgttaagattcacaagaactcctttccccaagattgccgagagcagaaaaaagatacattctctctcaagggggagaatacttttaagagatgcacctttgttccatgtggaacattctatttctaaattaaacctacattttaaattaaacaatagtatgtccaaagcagtagcataccataataactcctgtcttctcattgtatctggcctgaatattaatggaaataccaacaattttattttcttagcctcccatccccataagcgctatgtaagcttaataatgtttccaaatttggcttctttttatagctgcagtt

SEQ ID NO: 30988 - DNA, 1079 bp, Bovine  19866881388919
  misc_feature (1)..(1): n is a, c, g, or t
nctcataaaactgtcaaagtaatctgaatccatagatgttgacagggaaataaagatgaaaatcattgttccaaaaattggggattatagatctcttacataaatatacatgttcaatttaatagtgataatcctccaatatagatgagcagcattatctgccttgataatattttttaatatcaagggcaggattttaccttccacatcaaaaacactttgaaaaattattacttggggaccctatgcacactgtaaaagtaatgatataacaggattttttcttattgatatgaaagtggaattagaatctatgcatttacaggttaaaaataatctcttaaagcttattttcaatcaaaattcatagcaaaatccgaccactttatttttcttaagggaattcatcactatggttatttctccactaagcctgtcctgttaaaactttataaaatgtaagaacaatttattaactaaagaatgtttactaaagttgttttaggaaatcttgatgtttaaagtgcagctttcataggcaaggattgttggctatttcattttataacataacaagaaaaaatataaagaaaagtaatgagcaaatattatcaagtattttgctgttcagtcacttagtagtgtctgactctttgcaacaccatggactgcagtacaccaagcttccttgtccttcaccatctcctggagctcgcaaaaactcatgcccattgagtcggtgatgccatctaaccatctatcctctgttgtccgtttcccctcctgccttcaacctttctcagcatcagggtcttttctaatgagtcagctctttgcaacaggtggccaaagtattagagttttaacttcagcatcaatccttctactgaatattcagggttgatttcttttaggatggactggttggatctccttgcagtccaagggactctcaaatgtcttttccagcaccatagttgaaaagcatcaattcttcagtgctctgttttccttacagtccaactctcacatccatacatgactactggaaaaaaaatcattgctttgactacacagac

SEQ ID NO: 30989 - DNA, 846 bp, Bovine  19866881598062
  misc_feature (1)..(1): n is a, c, g, or t
nattatagtaagcctctcctctcctttcctctctttccccctctctccctcgctgccttccctctctctttcccttttcttctctccctgtagtctcaagtctgtgcatcacatagtctttccaagatagctggacttgcaccataggttgggctcataacgtgaggattctgaaagacaggaaatggaaactaccattctcttaaggttctggtttagaatttgtcacagcatcactcctgccatattttactgataagggactcacagaacataccaagatgcaagtggaggggacctataaccctcctctcaatggaaagagtatcaaagaatgtatgaccatctttatcatgctgcataagtccatataaaaatgtaatatcccaggccatttactttataattattggttcaataattataatattataataaattacattattccatcctacaataaatggttgaaagaggcctatctatatgtaaaaacaagttagttcattgttatgtgcttactaattcacctaactcacacaatgcatgcatgaacttctaaaaactgctctcttgtttttttaaaaaagaaaatacctaaagcacttgtgtgagatgaaaagttgacacctctacaactctttgtttggatttgaagctgcataggtaaaaataaggaacattttcttttgtcagatgaaagctgctgaatataaattatgttgattaataatagacatgccatttctaaccttccagtctttgcagtcggaaaaacaaattctgctagtcataaacatcctctcaactgtacatatgctccaccttaaccttgtatcccctcca

SEQ ID NO: 30990 - DNA, 1309 bp, Bovine  19866881609914
  misc_feature (1)..(1): n is a, c, g, or t
natttaaaaaaaaaacaacattcacagtgtaggggtcccagaaggagaagagagaaacgacctgagaaaatatttgaagaattgatagctgaaaacttccctaacataggaaaggaaatggccatcaacaaagttcaggaagcacagagtcccaggcatgataaacccaaggaggaacacagtgagacacatagcaatcaaaagttcacaaatggataaatagacaataatagccattgtttgccatatcaatgacttgagaaaattgtaaggttatagtatatattaaaagaaagtgagaaattattaatgaagcaatataaaaacaatctctattacagaaaaagtattcactgataagtaaaataaaaaccagagtcaaccaagtgaacactgctaataaaatttagaattcaagacttgtttgtttctgtaattctattatatgcattgaaaaaactgacctcataccatctatgtgacaaaaatttggttccaatacattttgcagcggaggaattagctaatgggatataaaatgaatagacacactgttgcctggaaaaaaattttttcttttaatttttttggactgtttctaattgtacaaaccatcatatcagtgcccaaagagaaaaataatagttaataagaaattattctttctaacataacttggaccttggagcagtggagattattagatgacatttggaactttttcctgcctttagattctactgaggaaaagtctgaggaccagaaaaccttagttttaatctaggttccatttagtcattgtgcaacactgaacttcgccctctttagttttcatctttactaaaacgaacattgttacaccagatacctctctacagatatactcttcctgttacacaactttcactaaataaattcaaagatgtggaaattacagtaattatccaagtgatttgattagtatcatctgcctatttaggtgacctggatgaatataattcttttttcctaaatagaattttcaaatgtgcgtgttagtcatgtaattcttgaaattatcctttcagctacttctggatagatagcatcagacacaaagcagttcagccattcaagaggctatgcttctgccctgcctgcaatagttaaaaatgttttcttttataaatgtctgaattaattatacttcttatggtatctacagtcctatctttatacacacccccatttgcttacttttgccattgaaatcatgaagaagtgaataccttctacattaactataatatacctaacccatgtaggttct

SEQ ID NO: 30991 - DNA, 610 bp, Bovine  19866881665557
  misc_feature (1)..(1): n is a, c, g, or t
ntttgttaaaaaatgtaaggctgtaaattttgccaaaactgtatatttttaagttatttaaatatataataaaagatatagtgaacattaaaagtatgacaaatacgatatttctcttaattcttttcagcaatatgtgagcaatatatagttgaaaaccagtaaattaaaatatttaaagaggagtcaaaagattacaatttaataactaatgaaataaatgtgttttttttttaagataatatttgggcagctggaagttctttgataaattaatagtgcaattatgaggaactagatgacagaaaaacctgttggctcatttactatccaggaagtttactaaaaaggtgtccaactaaatcttaatattactgatatgttgaaattttagagaaaagtaacttcctgatagaactaggctgttttgtttaattaaatcattgaaaattgtgagaggtttgaaattgcttcaaaatgcattgaggattggacaccatgatagcagttgaaatggcagttgaaaaaatgtaaggtaattgcccattgtcagaaaatgtctgattctgactggaaatagagtccctggaaaatatgcactaacccatgc

SEQ ID NO: 30992 - DNA, 1606 bp, Bovine  19866881730993
  misc_feature (1)..(1): n is a, c, g, or t
ncaaaagctcagggtcagtgaagcagcagattctaatggggatatcagaactagaaggggagaccctgaccagagaatacaggctcctttcctttgctccttcaattaatttcaattaccagattgttggttttgactgtggacgtttgaatgatacagacagaaaccatttctaatgatgagacatcatagtttgaatcaacccttctgccatataatttacctgaagtctccaactctactctgacccacaggtggtgaaagagcacgcacgaccgtgtccatccctgtgcagttggaaacagatacagaatccaagctaggaaacattgcccatcgggtgaatgcaggtcttctcctgggtttctaatgttccaggctgaaatagggatgcggaacaaagtgcaggcgcccagcagtacttccagcaaagctactgttgtctcccaccaggcagcagtattggtaggactgtaattattattatttgcttttttaaaaaagatcagttcagaaatcctgaataataatttacctcacaagaattcactcattatgtagttattctattccttctgctctttcaaaaccttatttttgtagctaggcatgaaataatctcccagagcttcaggagcaggtcttttttattcatgtgattgcaaacagaaactccttattcaagaaggaaaaggttattaaactgagcgaaggtctttcaatattaaaataaaaaaggaactgtgactgcaatcttaactgcgaggcgcgatgtgagaggtgcgggcaatgcacagctccgagtcggcctgtccaaaccggcacgtggccagcagtcaatttaaaagtcaatttgctaataatctcattcgcaatgcgttcagttattttttttaaatatctgcttattgtttgggggtgtccaggcttgtttcctaaatgaaattcaaaataagttattagaaccttgagctgctatattcagagatgctcattcgggaaccatcttgatactcaggtaatgatttccaaatgtctctgaggtcagaacacagacttcctacctgtttatgtggccgatttgtactgactcttgagcttcagttcacttaacattgatttgggataggagttcatgctgattatatggtgaaagaaagtcctgtaatttttgccgttttatcaccttatcatcttctgctctgccacaaactgggcaattttcttttataaagtgtattcaactacatcacaatccagaaattttagggcttctctacaatagccctctcccaatgcataaattgtctccaaagcatcccaatttccttcaagactgcaagacagaatttaccagccagcattctgagcacaccacggacttcataggaaattaagcagaaaagtcatatgaagccatcttattgtgtgttatcaagaaacaaaatgaactatcatttcctttttccccccaatgatttgcaattccttgatgaaagtcgaataataccaaaaggtttccaaggcaacccctgtagaaagtgaccttttgctttccccatttcattcgtcctacgtgttaattgactttgaaaaagcaggatat

SEQ ID NO: 30993 - DNA, 729 bp, Bovine  19866881808523
  misc_feature (1)..(1): n is a, c, g, or t
nttacttacttaatctaattctttccattctcctgccttcattgtttcccaatctttaaattttatactatgtggagaaaaagaaagattgcaaaattaagtgagaaaagaaataaagaaaattgagaggtttgctagaaagtaattggtaagttggttaacaagttgaagaaaaagtagaaaggggatagtgaagaagggaaggaaggaatggagggagggagggaaaaaaaggcaatttcaagaaaaataaaggggttttgatcttaacagggtaatggaattttttaacatttcatgactactcccctgaaaaatgcgtataaatacaaaaatgtgcaaacaatttcgagttaatggattgatctccaaagcccattgaacccttgcattggtattgattgtagaactatgtctctgaatgaagaataaaactgaaagatgattttgaaggacattttggctgtcgcctttggcacaaagcaacttgatacacagagactgggatatacaatgcacagggggataatatagacaggaagcatttaaaagggcaggttatataataggccaccaaaatgcgtgaaggacactctagaagtctgaccctgaatagcatggcagtagcacataccgatttctcataaaaccactgagctcttccttaaagagctcaccccagcctattttccttccactgcggggggcttgagtcatcacactgctgta

SEQ ID NO: 30994 - DNA, 763 bp, Bovine  19866881867354
  misc_feature (1)..(1): n is a, c, g, or t
ntcttggtcatgaggatcttttttgtacagttcttttgtgtattcttgccacctcttcttaatatcttttgcttctattaggtccatactatttctgtcctttatcgagcccaaacgtactgtactttttttttaaaggcctcttactgatcatttctgtaccttactccacttattttagccctctttcttggaaaaaggaagaatagaagacaaaaaggacagaagttattaaatgtagtaaaagtaacaaacagaaatagctgtaataaatttgtaagtatcaaagaaaaattccatggacagatgaagtggacaaggaaaatattattcaagattattgcaataggggtcaatactatcacatatgagagagacattgaactcaatttccctgaaacaaagggtgggaggatttttaaattgatgaactaataaaaaaagtactgaaggacttgagagaggttggtcagtgtgaccaggctatctctgttttcttatcttcctttattgaaggtaggttcttaccctcccacagagattgggggagggtgcttatctttcttgatgatgacatttcaaagtattggcttccaggtccttgaaaaagacatttctgagttgtaaaactggcaggaggctgagaagatttacatttcaaagggatatagaaagaatttacaatagcaagtcttctaaagtaaatgctcgagaaaagcagaggtcaagggcgaaagtctagaagaagccgtatcaagttagt

SEQ ID NO: 30995 - DNA, 1175 bp, Bovine  19866882021400
  misc_feature (1)..(1): n is a, c, g, or t
naaaaggaagagagcagtatattgctccactttattctggttctctctggtccccagactctcctggatgagtttgcttatgaaaacttgtatctgccctggtgaatctgctattgtagcaactgaacacaagcctcaggcactttgtttttaaccaaactgaggaaatgccactgtgattccaactgtaatcactggaatatggaacaaaatgaactgcagctgattcaagatgagccataagaaaaagcaatttatgcaaagcaagagccctgctgtggctttgtgtgatgcatgttcatacatatggtggaaaaggctatctctattcccatctaaagaaaatggaatgagattctgaaatcagggtctatcagccacatacctgtacaacacacaccagcaaatcagcttcagaaaccagattccttcataaagaataagcgttgtttaaaaatatccatatgcattgattaaaaagaagagaggttttaatctaatatatttatacccttttatatctgagaacagcctagcaaatcacctattcatttagtaaatgcataacatttggaaagatccttcttcaatttaattaaaatttttatgccattctctctcattgaacacaaacacacacacagagtcacagtaacctctaagcttaaatatatatgttgggaatggcatagaaagggtatactcaaaagatcataagtattgctagcctagatcttcatgaaagtcttgacattgtttacaagaagcatagttaagagcatgtgtctatagcatggaagagtactggtagtgagcagaaaacatacccatttattatcaattattgaaaagctatggcagcattgagatcctctctgtgacctttccatagtctgtatggttcatggattcttctaaggtttcagttgaagtttagcaacttggccaagtacctatatcctccaatgaatgtggcatgaagtggtgacaatacagaaaacatttaattctatgaagtgaaaactttctttcatgatttgatctcttaaaaaatcatataagactactgttttcctctttaaagtgcttcattgttctcacagttctctttaaataaactccaacctctttactattaatataacttacttccagtagtcacgtatggatgtgag

SEQ ID NO: 30996 - DNA, 2044 bp, Bovine  19866880113667
  misc_feature (1)..(1): n is a, c, g, or t
ncctggcttggagaatttgagaattactttactagcatgtgagatgagtgcaattgtgcagtagtttgagcattctttggtattgcctttctttgggattggaatgaaaactgaccttttcccagtcctgtggccactgctgagttttccaaatttgctggcatattgagggcagcactttcacagcatcatctttcaggatttggaatagctcaactggaattctatcacctccactagctttgttcatagtgatgctttctaaggcccacttgacttcacattccaggatgtctggctctaggtcagtgatgacaccatcgtgattatctgggtcgtgaagatcttttttgtacagttcttctgtgtattcttgccatctcatcttaatattttctgcttctgttaggtccataccatttctgtcctttattgagcccatctttgcatgaaatgttcctttggtatctctgattttcttgaagaaatctctagtctttcccattctgttgttttcctctatttctttgcattgatcactgaagaaggctttcttatctcttcttgctattctttggaactctgcattcagatgtttatatctttccttttctcctttgcttttcacttctattcttttcacagctatttgtaaggcctccccagacagccattttgcttttttgcacatcttttccattgggatggtcttgatgggattatataaatatcatttaagataatcaaattagctaactttaggtatcctttcacttggagaaaatttctaatctactgtcagaaatgcttgttctttgaattataatcatggttctttgccacaagaatatcactatcttaactagcctatgttttgaataatacgattgggagaagccagcagatacctttatagaggtcaaatctgtgacatgaaatttttagcatcatgatgcatctaacacaactctatcagtgataaatgcattttctagaaacagttcgtgctattgacttcaacttcttacatgctgatggtgaagcacacatgtcagtttgatttaaaatatttttgtctgagtccttgctggtattttcctcatctgaaaaaaataatgtataaggtgattgtgaagaagtataaaataaacaaaaggagctcttctccaaaaaattttacattttgaacttttttttttttggtcacaccacagcctgtgggatcctatttccgaaccaaggatcaaacctgcatagactgggctgccaggtaagtcccacattttgaacgtttttaagaatcttcccaacttttagttactgaattcataagctttttttcttaataaatttgaaaaggaacatttactcacacagacagcatcacaagaatataaatacccaatgcccatatcttcatatattacatataaaatgtattattttataatacatataaaataatatgttattacatataaaatgacagcatcctccaagtataggtcagcctgcctcatgcctctctttcaaaagtttttttttttcaaaagttttgacttgggattcaactttaagaattatgagaggcaacatacttcataaattccagctaagtaaattataattacagcccagattccaattaggaaatttcagcattgctaagctgaggaatgaagcttaaagatacaattaatatgagcttatattaaaggctttagtggaattaataaactctataacagtagattattactagtcttgaacacagacaacaggctcttattgtcaataaccagccaaatagccttctttctatttgcttcttttgaatagtggtattttatcaaataaaaccctgtaaccaatgtaattaggaaggccttggataattttaatggaaaatttttaaatagcacttggaatcccacaaatgaaagtttccatttgactctcaaagtatgagagggcttcccgcatagctcagtttgtaaagaatctgcctacaatgcaggatacctgggtttgattcctgggttgg

SEQ ID NO: 30997 - DNA, 1296 bp, Bovine  19866880467237
  misc_feature (1)..(1): n is a, c, g, or t
nctgggccttggttttcttatatacaaaatagagagtgggccagatggtatctgattcttgctcttaaatctatgagtttggggtgtaaatatgctatggaattaaaagaagaaaattaaaaaaaaactttttcatttttcccttgaaaattcaatggccataatttttatattgagtgtacaagatttcaagttagcaggcaattgcctggaacatttaagacactgttttagctatcaaacttacatgatgagattttcctggaataaagtctacctaaacaaatttccaaagcactctatgggattctaatctgtgtctataaattattatacagacctaagtgtttaagagtccaagttatttttacaagttgaattgacattcaaaagtatgccatgcttgcaagccagtagctcaatgaacaactgcatacacatgatgtttttaactccttttattcactattcagaccaccaaaacacttacattctaaatgtgatgtttgacattgtaatccaatttagaaatgtttaactagtagaaataataactgccctggtaaaggcataaatgttaaatgagcttcctcataaaatcatgttccagggttgacatgatcctgtggcatgcagagagttatcataaaatgacaagcaagactaactaggtgtgagagattgttccaaaaaaatttccaacctcaatcattctagctaattgaagaacaaaaatagggtaacttctcttctgtgtttaaaattacagctttattgtttgaaagcttaagcaaaacccatgatctgtgtctggtgcaatcatttcagagtcactggaggggaacaggaaagggtgaatacgataccaggtacttttctggcttctcaaatatgggataaaatgataatcaggtaaaacaaacctagaatagactaaaactggcctctcctccaagggaatttccagttcgtgtagtcctaagtgataaacaaaaacagcttggtctgggaagataatttttgccaagaatttgagttttgtagctgctaagttgctgctaagtcgcttcagttgtgtccaactctgtgcgatcccatagacggcagcccagcgggctcccctgtccctgggatcctccaggcaagaataccggagtgtgttgccatcattgaggttatcactttaattgatgatgtttaaaagtatggcattgaaatatgtatatcatgtatgaaacgagtcgccagtccaggttcgatgcacgatactggatgcttggggctggtgcactggga

SEQ ID NO: 30998 - DNA, 1352 bp, Bovine  19866880490725
  misc_feature (1)..(1): n is a, c, g, or t
nacttaataaagcttaaattccttatccttttatagcctctaactacacaatcccataaaagatttgtgcaaacacacacattattttggaatcatgccttgaacaccattgtacaaattaaagactgaaagggcttctcttggttcttacaccctacccaagtaagagtggggaatttctttaaaatatttcagccaattcacatatctatatatctaaaatatcaccaaatttaaactgattcctaatattcattatattgtgctatgaaatttctgttattaatttttttaaaaaatagcttaatgttcctattacaattttctttggagtgtagccttctggtaaaatcctaggttataacacctgcagtttgtattcctagttaggcaactgacaacccctagaatgtacaccaaaactaaacacacatacacacacactgctatgtgacattctttatgggttcctcccaatttcctagatcttcaaatgctggagtgttttagactgcactttagtactcaaactattccttcctaactgttcttattacttttagttattaatccagtctctttgctttaattattaactcttgggtaaatgaaattgccagtatggcacagttttgactgaaaaaaaaaaaattgacaattactgtggttcaacctgatattctgactaaccccaaaatttatattttctacccaaattctccatgagttccaccttcatgtacccaactgctaagtttcatattcatttaaaggtttgattggctgtagtgtcaaatatgttgacaaaataagggcaaaaaggactggaaaagggaacttttgattgacttccaggttattcataaggaagtagcaataggagagttgagagagagtaatcagattacaaagttttttgtatacatatcaggttcagttcagttcagtcgctcagtcatgtccaaccctttgcaaccccatgaaccacagcacaccaggcctccctgttcatcgccaactcctggagttcacccaagctcatgtccattgagtcggtgatgccatccaaccatctcatcctctgtcgtccccttctcctcctgccctcaaactttcccagcatcagggtcttttcaaatgagtcagcttttcgcatcaggtggccaaagtattggagtttcagcttcagcatcagtccttcaatgaatattcaggactgatctcctggttcaaaagcatcaattctttggcgctcagctctgtttatagtccaactctcacatccatacatgaccactggaaaaaccatagccttgacaagatggacctttgttgacaaagtaatgtgtctg

SEQ ID NO: 30999 - DNA, 1035 bp, Bovine  19866880574104
  misc_feature (1)..(1): n is a, c, g, or t
nactggctcgtgctacctgctgctcaacacagattaactcactaccagccatatgggctagcgacttcataaattcctctccttttgcttttggctcttagggaagttaatggatggtttaccggtggagagaaaaacaaccttgtggtgtgcaggctgggcaataatcacctgcgcccgacacaactggcacctccatctgccttcgggcagctatttgtgtgaaggcaatagattactgcctttggtgctactcctgtgtgtcagccgctgccatttgcctcaattacaaagtcagatggttaaacgctgaattcatatttatattatttacaatgattattcattgcatccattgttaaggagggtctcaaactgtttctacagttagaaataaataaataattttgatcaactttagcaagcatattcaaacaccgatgcttatttttaaatgtagtaaataaaatgctctaacaaataattcagtgaagttgaaagatcatagtgtttaagtttctgacttgggtttattgtgacttagttccctttctgtgccttaagtccctctgaaatatttaaatttttgaaagtatgttgtaaactgtaccaaagcataatttaaaaatacatgcatttaatcataaaatactgttgttaaatatagaacttctggaattcaaaagcagaaactatcaaggaattttcattttaaacatcagaagtattaagtatttttcattagcatgagatcaataatatgatcataatgttaacaaatccagatgtttagcattgcatcattcttcagcttatcttgatccctgttccttccaaatagcctttaactgattttatagacagaataatgaaatcaaatgactggctttagaattaataaccaatttaaaatgttttattttataaaaagtttttttttttttttactctagaggcataattttctcaaccttttgataatgtaataactacacaccaagacatttaatatttagtcattttttgtgaaggaga

SEQ ID NO: 31000 - DNA, 970 bp, Bovine  19866880648640
  misc_feature (1)..(1): n is a, c, g, or t
naacctgtaatggaaaagacacactactactggtaggtgtctttttcagggtttacctgatgcaaagagctgactcattggaaaaaccttgatgctgggaaagattgaaggcaaaagcagaaggggatggcagagaatgagatggttagacagcatcactgactgaatggatacaatttgagcaaactctgggagacagtggatgacagaggagtcacaaagagtaggctacgacttaagtgagtgaacaacagcatgcacatacatatatgtatgtgtgtgactgaatcacttttctgtacacctggggcactataaatcaactatacttcaataaaaaataaatgaattaatatttttaaaagatgtaggtctattaagaattttttacttaatcttataaaaatagaagatactgggggttttaagcaggagggaaggttttgagattgttttattttttcaaaaggtatttctgttgttaaacagaaaattattttatagaaaaaggtactttaataaattcttggaatcatgagagaaaggaggacaaggtagagactgtatggttagagaagagggaaaataagagacgaatgaaaatccagtgtgcaacagtcaccccacactgatattccataacagcaataaaacagtttaagtctgcaatgccagagctgctcttatcactggtatgaaaattcacacataagaagacaaggaatgttccctgattttaacttatgcttacaaaggatgtcttaagattgagtctgtaatgagttgcctatttctcagtggaaggggagagcccagtttcacaccttcccatttcatttctaaaagtccttctgtaccatcacagtccctattattatactccaattaaccggtgaagttgctcagtcatgttcgactctttgtgatcccatgtactgtaggccaccaggctcctccatccatggaattt

SEQ ID NO: 31001 - DNA, 1114 bp, Bovine  19866880724997
  misc_feature (1)..(1): n is a, c, g, or t
ncgaccccatggactgtagcctaccaggctcctccatccatgggattttccaagcaagggtactggagtgggttctatttccttctccaggggatcttcccaacccagggatcgaactcaggtttcccgcattgcagggcaaggagccttaccatgtgagtcaccttaaattagaacacttagtccacttataagcattaattctattgatatagttgttctaaaatctgtcattttcctatttgctttctatttatttctcctctctcttatcttgttttcaccttctgcttctttggggtagaatacatatttatctggttccatttttttctctgttaggtgaaaattactttttattattatttttgtaaatactttaggaatacgatatccttgacttagtctaaattaattggcacttataccttaaaaaactaagggacttaatacttttaactccttttactgctacatttcatctataagcagttgataagtattttaattttatttctctctatatatctagcctaagacattattgtttgatatagtcaatctttatttagactcaccttgatattgactacttttattgctctttattctttcttatatctatgattttccatctgaaattatttcccttccacttaaaaaatactccttgtaattaattttgtctgttggataatattctcataatttttagttatatgaagataagtttatttcacattaattttttaagatgcttgtttttatcattttgtttttctgggtacagcaatctaaagttttatttattttattttagtactataagagtatatgttattgtttttattttattttattacttctgctgaggattcagctctcagtccaattattgctcttttgaaaatatttgtgtgtgtgtgtgtttttagcttcttttatgctctgttattgtttcaggtttttaggaatatcagttaaatgtaattaggtcagaattacttgggtcacttggatcaattacttggatctcttggatcaaacataccctcttaacttttgtgtcatttatcatggtagaattctcctctattatgtccttcacatattg

SEQ ID NO: 31002 - DNA, 2624 bp, Bovine  19866880724998
  misc_feature (1)..(1): n is a, c, g, or t
ntatttacaaaaataataatgaaaagtaattttcacctaacagagaaaaaaatggaaccagataaatatgtattctaccccaaagaagcagaaggtgaaaacaagataagagagaggagaaataaatagaaagcaaataggaaaatgacagattttagaacaactatatcaatagaattaatgcttataagtggactaagtgttctaatttaaggtgactcacatggtaaagctcttgcctgcaatgcgggaaacctgagttcgatccctgggttgggaagatcccctggagaaggaaatagaacccactccagtacccttgcttggaaaatcccatggatggaggagcctggtaggctacagtccatggggtcgaaaaaagttggacacgactgagagacttcatttttttttttataagactcagaaaataataatatacaacctacaaaaagcattttttacttttttgttttttttttacaacagagctccaaagagctaatcttttcaaattaatcaattaatttatttatttgtttttggctgcatcatgcagaatggcaggatcttagttcccccaccagggatcaaacccacacctctgcagtgaaagtacagagcccccaaccactggaccaccagggaagtcccacaaagcatttttaaaaatatataggtcctgcaatgttgaacttaaaaatttggaaaaagatatagaatacaaacactaactgaaagaaagcttttaagttatatcagtatcagacaaagcaaactttagtacaaaacaatcattattaaaaataaagtcagacacatcaaatggtaaaaagttacccactaggattataaagatataagatatacatttgcacacaatgttattgtctcaaaatttgtgagacaaaaaataacatatgtatggaagagaaatagacaaatacatgataaggggatattttaatgcaagttattcactagctgatagaataaatataaaagagaaaaccagtaaatatagaaaaaaatttaacaatgtggttagcaaacttgatccaactgaaatatttgcaacacctgtagaaataccttctttcaaaaattcttggaatatccatgcttagtcactcagtcatgtctgatactctttgtgaccccatggactgtagcccaccaggttcctctgtccgtggggattctccaggcaagaatactggagtgggatgccatgccctcctccaaggaatcttcccaacccagggatggaacccaggtctcccacattgcaggcagattctttaccaactgaggcaccagggaagcactgaaatatccatagaaaatgattaaacaaagtaatttagagcacacactcttggcatttcctactaaagttgaagtaacatgtcctactttatgacaaaggaattccactcagtattacaatgttttaaaaatcatacagagaagcatcaaaaagatacatgcaaaattactcatagcagcagtattcctaatggtcaagaactgtggagaatccaacagcaaaaggatggctattaactgagaacacatttatatattagaatagagatccaaccagtccattctgaaggagatcagccctgggatttctttggaaggaatgatgctaaagctgaaactccagtactttggccatctcatgcgaagagttgactcattggaaaagactctgatgctgggagggactgggggcaggaggagaagtggacaacagaggatgagatggctggatggcatcactgactcgatggacgtgagtctgagtgaactccgggagttggtgatggacagggaggcctggcgtgctgcgattcatggggtcgcaaagagtcggacacgactgagcgactgatctgatctgatctgatatggtaatgaaaataaacaaactacagccaaaagcaacaacatatttaaatattaccaacctaatatttatcaaaagaactcagtcagggataatgtatattaatactatatgcttccatttgtacaaaactcaaaaactaaagaatagtattagaaattggcattatcatcagttttttcagaggcaggcacgaaatagtgaatgaaggtagaatgggtgctggtaatattccatttcttgaactgggtgatgattacacagatgctctctttgtgataattcaactccacaaataaattttttctacattcttttcatatatgtgttatatattaggtttatatataggaatgtataattatatataagggaaaatatatatgcataatcagaatatggagtatgctatgacacgactttcattaattgaaataagcatactatcaacctctatggcaactgacaaattttttcagcacttgaccttgacaaataaaggtgtctcaatctcttcctcttaaaaatagtctattttgcgtagttagattagaaatagtaccagctgttgtctcttctttggcccagatccctcccctgacacaataatcaagcatctcctctaaattaatattgaacaaatatttaaaggctatgatatttaaccagtgctaaaacagtagacttcataatacatctacatgactta

SEQ ID NO: 31003 - DNA, 1079 bp, Bovine  19866880732263
  misc_feature (1)..(1): n is a, c, g, or t
nttctgaatgttgagctctaagaccactttttaactctcctctttattatgcagtgtataatatggtaaaaatagaccctgttctggctaattagtgccaggagcaatatcagtatcctcagatatgcagatgaactgacctgaaagacctgtcccaccagatcgtctggagcacagagtgccttactctaccctgagctccctcaggttgtgttgaaggtcagcagctgccacagtgcagggtttagtctttacaggggcagatggtgcatgccctatttgttcagtcgtctgcaacaatcttggcatgtttcagcttgtagttgactatatatatatatgtataatggaatactgttcagctatgaaaatgaggaaatccttctgtgcaacaggctctgtgactgaactgaactggctaatcaaagtatacaaactgattgtcgtcttcagggatgttgatcacaattagtttcaaataccagggttcttttttttttgttttttaatgtaagctttttttctttccaatggccaactagattccagttaaattatactttttttgtattttctgtaccataggctacccaggtggacatgagagcagctcaggttgctcaggatgaggtgcgtgcatgttaatttgtttagccattatcctttggaaatatcccaataattttctacttacagctttgcaatttttgtttaggaaattgctagacttctaatggctgaagaaaagaaagcttacaagaaagccagggagcgggagaaatcatctttggacaaaagaaagcatgaccctgagtggaaggtagagtctgtttgtttttaaagagaaatacaggtaaaactataatggggagtcctcttccaaggtaagctcaaagatatatttagggcatataaattacctgtctctcgtgtgaatctgacttatacacaatggagtattactcagcaattaaaaagaatacatttgaatcagttctaatgagggggatgaaactggagcctattatacagagtgaagtaagccagaaggaaaaacaccaatacagtatactaacgca

SEQ ID NO: 31004 - DNA, 1952 bp, Bovine  19866880780140
  misc_feature (1)..(1): n is a, c, g, or t
natgaagatgaaaagtgaaagtgaagtcgctcagtcgtgtccaaccctcagcgaccccatggaactgcagccttccaggctcctcagtccatgggattttccaggcaagagtattctagtgaagtagataatctgtaaataaaggtatagtgcgttgtcagtaacaatgatatggtcaaaaacaaagcactgcaaggaaactattgtgctgctttaagacaattggcacaaatatttttaaaaattatctgaagacttaacaaaagagcagaccagaggaatctagggaagagctttcctgacaaaggcaacagcacatgcaagggtttttatactattttactataggacctttacatactacatcaattcatttaaatgataaaattgtcaaaacagctggggcccagagcatctttaattctagtcagaatcttaatgttttggttatggaagaaaccattgcttttttttctagttttttgtttgttttagctcttctttttctgtgttcttgttttattgttgttatgaaagtgagataactattaagaccaatagcattgtattactaacaagagctttgaaaataacagatgcttcctttttggcatcttgctcacttatggttagttgccatcatcttgaacagtataacaaccctgaagtaaaagtgagggtagaatgaaatgataaagcataaaagaattgaatttaatatgaagagagaattggtattggctcagaatgctggttatttgaaagacctaaatgaggaagtgttttcttaaaggagaggtgaaaccagttaacagaagtcaagcctttagctgcatatcaggataagcctcctgcctgcctccagactccagtaagcctcatcttttgtattgattttaaaagcgtcaatgctgaatagggtttcattaattatgatgatgattattgcacagttaaaataatagagaaactgaattttggttctttggtggaaaaatatgcagggttgaaacaaaaaaaaatcatcatggcattaggataagctggatacaaaatcatttcagagattgatgacatgtcatggtagccttgaattatctgccttattcctttaaatttctattttgatcatccacacaagcaagtgacatattaaggtctattagccccagttattttgtcctccaagtaactttggatactgcagaaacaacttttaaaatgaatggatttctttctgcattatgagaatttgaccttttatgttttttataagcaatgcttagttattctagaagtggcttgatatgctattatattggccataaaatatttctttgtgtaatgtcccttttgccctttctttcagcattagcatatattttatactttcagttcaacatctaaagatcatttccatggaaagacattcctagatcatttgtgaaattgaaatactatacaaactcattgataagaaaaacatttaaaagcttgaaacatctttttactgatcttacctaggtttgagatatagacacaaatgacagaggagatagaaagggaaaggtattagaagcagagagaaaatcttgctgaagacttattgattccagatgagagtgagaagagaggcatggttctcgctggcacagttcagctgcagggcagtaaaaaagccaggggcccaaatgggcaaagaacagcacaggcagttgtgaaccttctttctctgtctcaccaacttaataatagccatggtgccacctgaccttgaaaagtaattttaaatgtttataagaaaaagagcaactactcctacctccactgtagttacacaaacagctacttctggaagcaggagtagaccttgaaagctacagaacttgaaagctagctaccatatgctataagaggcaagaaaatcattttcctaactagaacaaggaaca

SEQ ID NO: 31005 - DNA, 1285 bp, Bovine  19866880928709
  misc_feature (1)..(1): n is a, c, g, or t
ngtattcccatctctttcagaatttcccacagtttattgtgatattaaagggatatagtttcaattggagttcttatcattttaagaacattgttgtgatgaatacgccagagaatcttcagagttaatagaatctttgagactaaaataaatcccccaatctatttgttttagtgttataaatattacaagcattcttcattttagatcaactgaaactttcaggtgatgatgaccataccagtttcagtgatgagacaatatgcccttggtgttatggcatgaaaggattgttgctcatctattttctaaattgaagttaagatgtgaacatcaaaaggaaaaccaaacaaggagtctggatagaatagtaatatagttcagacattggacttttcttctgagggtacattcatgtctctgcaattttattatcctatatatagaatcactgtggatgtaggtgaataatttaaggagtaatagacaagaaatggctgtaattttcagcattataacaatcttttttttttctttctcctttttcccttcctttcattccactttagaagtcatttgagagtagaaaggaagatgaaccaaccactagctaagtgactacaaatgaaagttaagatagactacttgggaaaaaaagtattttgttaataagttgggaaattggttttatctaaagtagaaaaattttataataggaaactcagacaagcctaattttttagcatcaacctctctgagataaagagtgcacacagggatgaaaccaagtacataagaggtataattaaaaaatttctaaatctcttatgtagaactgtgaacacctgagtttttgttcctattctcttaaagttgtgttatgtgaccttggggaaagtccgtttctctctctatctttaattgctaagtcgtgtttgactcttgcgactccatggactcctgccaggctcctctatccatgggattctccaggcaagaatactggagtgggttgccatttccttctccagggaatcttcctgacctaggaatcgaacccaggtctcctgcattgaatgcagattctttaccgactgagttttgagggaagcccaatcaactgtactccaatcaaaatcaaaatcaaatatactccaataaaaatgttaaaaagaagaaaataattaaaggaaagccagcagcatataaacagcatacacttaaataaaagatgaatgcttaacatacaatgttttttattcactataagctaaaggtccatttc

SEQ ID NO: 31006 - DNA, 893 bp, Bovine  19866880997311
  misc_feature (1)..(1): n is a, c, g, or t
ntggataaatttattaaaatctttttcatgagaccaagaaaatagtctatataaacatatagaactgacaccatggaaacagattcatgatgaaaggttttatacttagatgtcttaatggttttccattatggttgacatttgctgaagacaaatggaaacaacttgctttaatgcgaagcgttctgggatcctcccaagcaggcacaatctttctgtctctctttttttacaatatgtcattgtctgctgctgctaagctgctaagtcacttcagtcgtgtctgactctgtgcgacccggtagacggcagcccaccaggctcctccattcatgggattctccaggcaagaacactggagtgggtttccatttccttctccaatgcatgaaactgaaaagtgaaaatgaagtcgctcagtcgtgtccgactcttagcgaccccatggactgcagcctaccaggtcctctgcccatgggattttccaggcaagagaactgtctactctgtattataattatgtctctttactccaaagaatgtattaatatttttccatcattttaaattaccatctataatttgaagtgaaagtgaagtgaaagtgaagttgctcagtcgtgtccagctctttgtgaccccatggactgtaggctaccaggctcctctgtccatgggattttccaggcaagagtactggagtgggtttccattttcttcttcaataatttgaagcatatggaaggtattcaataaatgtttgtggaatatacaaataacgtttgtgtatgtggtttctttttattcctcaaaggtcaaaattcccagagaaacaagttgaaaatgattgcattttttttcattaaacttacttccagaaagagaaacttgca

SEQ ID NO: 31007 - DNA, 1356 bp, Bovine  19866881000649
  misc_feature (1)..(1): n is a, c, g, or t
ntagatagatagataatttttcttcatgagacaaagttcaataaatcataattatttaataaggttgtgctcaaagatccatgaataaaataattaagagaaatatgttattggaagttttgttgcttaacaaactcaaatcttgaaaaagtgtcttaaaacttttaataactgaactagctaaacattatttttaatttttaattaagtaatctttaatgcagtaatagttaacttcaaatgttcgtcattttgagtgatttttacttcactctgttttatgtaaataatgaaagtaatttttcttccaatgatttaacctacttttgttgttatttcatactagactttaaatatagtaaaaaataaatatgagattttagtgccccagtactgctcagagaggactggataaagctggaaattattatgggacagactgggaacaaggatggctttgctcacagccttgatttccactgtcaactctgcaaaatgaaattccacaactttattttcaagttcattaccattttcacaattataattagatttaaggctaaagtgtatgctttagtgagaggtatatagttctgcttcacattgacaggtaagtgaattctaatatcttgcagactagtgagtgagagtttattgcagataatgaacaagattcacaaatgctgaaacaaaggctcaatgtgaagagtaagaaagaacatttggggacttccctcgtgttccagtggttaagaagccacacttccagtgtgaagggcacaggtttgatccttggtcggggaactaagatcctacatgctgggtggcatagacaagaaaatttttttgaaaaacagaattttttaatatactaaaaaatataaaggaagaaggctaagcacattttatttcttttttaatataaatttatttattttaattggaggttaattacaatattgtattggttttgccatacatcaacatgaatccgccacaggtatacacgtgttccccatcctgaaccccactccctcctctctccccgtaccatccctctgggccgtctcactgcatcagccccaagcatccagtatcatgcatctattcaagaaaatagctcatggtgataattataagtaagatatattaagaatggactttacagcttcattttttttttacatcgacggaccctgaaaaataatatggatcttgaatattaaaaaagttacttttgttcctttacaatcataatagcatagaccttgaaggctttttctagtcttaacttgcagatggtaagatacatcctattcagaaaacagggcacaacttaatgttagggtagacccg

SEQ ID NO: 31008 - DNA, 893 bp, Bovine  19866881098516
  misc_feature (1)..(1): n is a, c, g, or t
nttttaattgtgtactttcagaggttttgtctgtatgtgtgtatgtttgtttgtgtacagtaagcatgtttgccagtgtttaagacagtgaatgatgttctctctcttttttttttaataagtctgaacttttttggtcacgctgatctcccataaaatgagtgacaacttaaattgatgttgtggttaaaatacttgcccattaagaggacataatgagccttcctttctagtaacccagttggaaacattggcctcatcagtattacattctcataaactgaaactgattaacaattatgtgattgggcaaaaccagagcctgcccaatatcatccagcatttagattctctttgaatccagttccacatttgtatagtggcaagatggatatggacatatttgataattgtaagatttgtttcatgtctgaaagtgtgatgactccatacaaagaaggaaaaaggcaaactataactaaaatttcactatgaatatccacatatcaaaaaaatgaaagcagttatcctgtttttccaaatcaggaataaaatgtaaaatactgttgcccaaaatagaaattggttaatatcctattaggccaacattaaataggcacaaaattattaatatattgaatgctagtacctatatattgattttcaaggatagttgtggcacattggtgtctggtctggttagaataattttcttgatgttcagttcttactggatttatttcatttgaactcaaaggaataaaccaaaactttaaaacaaaattggccagtttttcctgtgtttatacatttttgtaaattttgtgacaaaggtttgtaacaaaaccataggtctcagtgggtgcatgaggtttaagtggtttcatctcaaa

SEQ ID NO: 31009 - DNA, 1048 bp, Bovine  19866881221287
  misc_feature (1)..(1): n is a, c, g, or t
nttcttgcctggaaaattccatgaacagaggagtctggaagactacagtccatggggttgcaaaagattcagacacagtgactaaataacaacaacaattagaataacttgcagagagaaggagttgcctggatatttaagattctcaacccgtatttcaataataaaaatagagcatagaaaagtctataggaagtaacaacatttcttctttacctctgataaagttgaatgtcaaactaaaaattaaaaagaaaaaagccaataaagaagtaatgtcttaaaactctggagaagcattagaatgggaaaataattttttattgtctttgtcattgtttttcaaaaatgggtgtcttcatttttaaaatgtattattttaggatctacgggtttcctgctaatgctaagttatctttttttatatatacttaaatctggcttaccattgaaaccattcatttattctgtttccataaaacccctaataactatttaaattttttctgttcttggctcttttcaaaatcataaatacaggtttgaaaactaaatttgatttctgtgcaaataattctcctccctgtgtccatccccactaattgctaaggaactgtgactatgtccatcagttttatttatgataggcttattcctctcatcttattccccaggaaatggaaagcttgctatggatcagatgatactgaatcattgtaactaccttctctccaacttaaaccaaagaaaatatgtgaaaataagagtgaaaagaaatttgcttttaagtcaagaaaattaaatgtaattttcaagtgcctctattatgcttgcttgtttgtcatatcaaacagctaaatatcccattttttaggatatttatagctaatgtaaaagcaactcatgaacaaattaagctaataatatgctaattcttatgttgttttgtttattaactattatatggtcaattttttccacaaatataggtgaatttcttaggtataaagtcactgttaaaatttatatataccagacagaacaagat

SEQ ID NO: 31010 - DNA, 1535 bp, Bovine  19866881262060
  misc_feature (1)..(1): n is a, c, g, or t
nctctttctacacttggtcaagccctggcatcacatttgcctgtggtttctctgcagttattctaggacttcttaaaactgtaagtaatctagaccctgactgacttcctgagagtccccagccttatccacaggccagaaacttacagatgttaaattttggcacctgtctaattagttaagcccatcatgctataactaattttcttctgtgcagtattctcatcaccatcatattcaagcttcttttcctttgattcaaacactcactacacttttaatctttcagacattacaactgtattctcagggccatgtgttttaggtaaccaattctgctacttcttgccctttactgaaaatatactctcttctaagaacactatttccatggcatctgtcttaaacatatggtgctcatttcttcacacccctttgtaaccaggctaagggagtggtacctgcattttcctataagcatagtggtatttccagggcattgctatttaactcatttaaaaactctgttcctttcaggcatttgaccttcaagtattgttttcttcctgttcttattatcactaccttgtcaaagccatgtttgaccaagtcagtgggtcattgttcagcctagattccaacgctaatcatttcaaccagttcttgacccaaatcctcatctttgtgtccttctgtgtgcttttacctataacatatttactccaggttcatccatatgtcatcttcatacctgctatattctaaactggattgagacctttacaggcactaaagttaaaatacttctgctttccttcatacttcaccaaatgcaattcaaaataaacaatttaaatcataaaataaatgcaaagcatccagaaattctggctttttcatcaaaactgtttccatgattttttctcaaagcatttgccaagtatccacgttggataattcagtactgattatataaaaattcctggataatgtagagaaaagcacaccatcttcaaagtggtgcttattacaattcctgttgctgcataacaaattataacagttcagtttcctaataccactattttattatattcataaattctgtagaccaggcattcagacagggcatagcaagaatggcttatctctaaaacttcaacaggaaagaggtaacagaagaggaattatttgactgttgggtaatggaatcatatggattccatttgatttgtctggcttttgacttggacctcagtttggactgttagtcaaagcacatatacatgatctttcatgtagtctgggattcctcacaatatataagcctccatgaaattggacttcttctgtagtagaagaccaagacttcaaaagtaagtaccctagccaacaaagcaaaatctaatcattgttctggcttagagacttggacgtcactgagaaccatatgtcaaattctactaattacaagtgagtcatcagcttattcagattcggggaaaggggcataggccccatcttttgatggaagg

SEQ ID NO: 31011 - DNA, 966 bp, Bovine  19866881271095
  misc_feature (1)..(1): n is a, c, g, or t
ngttggtgtttgcctccaaccattcaggaatacaagcacacagacttatacaatactttggtttaaaaattattcataatatcaatgttaaacctgacgttaaaggaatcaaatgggatgcgaggtgtaaaaaatgaagcactgaaacacaagcttgcatagatgaatagatggagatgtataagtggcactgaagggaggcctgagtaccggagagtcatcaccacctcagccgcccaagacacaggaacatctccagcaccacgcttctcactttctccaaagaggtcatgagcaggaatgtgtgctgtacgaaggtgaattgaaatagtctgtttccataagcctcgtccagaaggatgcacacatacccgccagcacccaatcagtcacctttaaggcatccacaatgtctctcagtttcattaatctctagacaggcgtgtgatttgaggtggcctcctctttttctgaactgaggccagtaactctattccattaaggttctgtgagaaaactatgtcaaagctgcctttcccctagggcgtggctacaaaccttaagtgcttgggatataacactccacttgtttaaacatccacattccaaatgtcaaagggctttttaccaaagcatccaaaaccttttgggcactgtgcagttattaatctctctctctcaagagcgtacttttccaaaatttgagacaaatgacagcacacctcaaatttcctgagcaacttgattcatatgaaaaactcctgtactttataattcagtacctttcaagatacaactgtgttgggatggattcttcttaaggacaaccacatttacagagaattctcacttcggaatatcatttttataccctatcatctcataatacttcatgaacaaatactaccttgctttcaagaggcaggtggaaaatacagctattgctgggaaaggcattggctttca

SEQ ID NO: 31012 - DNA, 851 bp, Bovine  19866881277100
  misc_feature (1)..(1): n is a, c, g, or t
ncatcggtgcaggatgaggatggagctagacgacctccaatcgtccttcctgtcagggactgcagcggtgcagccagctggaggctctgccacttaagccctgcgcctcgctggctgagtgccagaacggctccctggcttcctcctcccgcgggaagggcttccctgggcgacccaggaggctgccggctggagcgggggcggctctcccgcgcagctccggagaggcgagaggcggcgaggcgagagctgtctacccaccatcaataatgcggtcttttgtcagcaataaattccctccaaaattaatgaaacagcccttttaaattctcatgccactacctcatctagcaggagcttggctaggcctcctgctctctaaataaatagaaaagccgtataaattgtctggaggcgatatctagctagctgggcacaatctaatcttctcaaccgcctacagaaacaaggagaaggatggaaacccaggatcgatgcttgctctccattgcagaaggcacagcactccatcacccacccggagcagggcagggctctgctgacatctgtcgccctggtcactcactctgcagtagtctgcatgtgacctagtcccagaggataccattaaggaatattaaggcagagggataaccccttccttttacacgtgaagacgccaaagcccagaggaaaaaaacaaagcaccacaatctaccctctagtgccttagtgttctaaatcccagcttctcagattttaaggagcatgcagtagtcgcgggtgggtcgaggttgggttgtgcatttctgtaaagcccccaagtgctgcttctgctactacgaggtcct

SEQ ID NO: 31013 - DNA, 963 bp, Bovine  19866881306438
  misc_feature (1)..(1): n is a, c, g, or t
nctaagtgaatctcactttttctggccttggacaagtgccttattcgcacataatttaatttctttatcataagcagtttgtttctctagaaagtcattggacttgaggttcaagaacctggcgttctagctagattatagccaggaagtcactttatatctgtgaaaatataccaataaataggggataatattttcttagggtgttaggaattttaaaaacccagtgtattggaacgttaaaatgggattctttctgtcacagttttggctgtggcccagaaaaactgagggggaaaaaaggatggtatttcctcttgcattccaaagtagggtgctagagttatgcagtatttgtaaagaaggtggctataaactatttttccaaaaaaaaaaaaaaagattgatactgaagaggtaaataagaatttctctggagcaagttactggagaacagggacatttccctcttttttcatatggagaaagggcttcaagaaaaccttgtttctcagtcagtctctatgctttggcagaggagcctgggggctgcagttcatgggtacgcaaaacagttggacatgcccgagcaactaaacaacaacaaataccctttaaagcagggtagacctcctagaacagactgaaatctaaagggcaggaagctgtgagaattggctcaattccagagtgaagagatggttacataagcaacagctttactttcagtgaccagagtcaaggatgtgggttttctgtggaacagatgtagagcaagcatgtgggtagagttggcctaggttaattataaaaggaaacttcccctgcttttggccaggggttatgggtgatgtggtctcagcaggacgctggtgatggtgctgtcaaatgaagaaaccaagcgaataggatgaaggtgaggagcaaaactgatctgctgaaagagaagcattgctggaggca

SEQ ID NO: 31014 - DNA, 4055 bp, Bovine  19866881363403
  misc_feature (1)..(1): n is a, c, g, or t
nttggtttataaatccccctttgtatctcttggcttataaactcagtttttcaaacatttctgtacttgattagtacattgatgttaaataatttaaatgatgttaaaaaacaatgcctagatctactttgccctaaaaagaaaacttattctcacaaacttgcatattaaatactaatatgcaaacaaagattaaagtcctaattatcattaaatcattttcataaatataaataaacatgtagcaatccctctattattaagaagacacattctggtgatatacatcttgttgcttataactaaactacccagttatcatcatgaaccaggagagaaaatgatatagcagaaagggtatcaggcatgaaatcaggacatgtaatccaaatcctggtctgtcagtcattatctcatttccatcaaaataatttatttctctgcagcttgtacatttagataataacattaagggtgttgtgaagattaaattagatgcctgtactaattctaaattgtattagacacataatatgtgcaagtgagaagagcttatattacagttctgaaaattaactctttgctgagccctatgtttagttttatttactcatcatgttccataaagtaagtactattactattccaatatcttgaaaagtagtacagtataaggggtaaaataccaggtggacaggtctggttttgtggctcatatcctaggtcatctatctattagctgtggcaacttgcttaaattctgaaatcctccttcataaaatgaggataataataatttcaaccacatcgcattgtcctgaggataaatgaattggtatacattaagcacctagaattgtgctcaataataattacttacttacttgtacaagtaagtggaaagcttatattaattaactcacaatgccccacagctagtaagtgatacaagtagaattcaattccagaaagcttaaatcattagcttatattttaaatgtatttaattgtacatattatatgttttaaacagtaaatattttttggacacacaatctaggcactcccaataaggcttacagagagggtgcatcctatctcccaaacatattaagacagctcagaactgttttgacaatttcagactacagagagaaaactctgctttttgcttttctcaagataatactcagaccaatgatgaagaggcccagaagcatcacattaaccttgaccctcttaatttgtcatgctgttttgcctcctcatcaaatactgtcaatcacaatgaaaaatcagtattttacctcaactatctcattcacagaatggcaattaaaataatttttccctgtatggaatcattggtcagtgaagtggcaaagttactgaatgtccataactacaggaggacttactgaaaataaccaatgacactgcctttcgagcagcaccatcttcaaaactcaggttgaaatttttttatttctagagatatactaagaacggttactcttcagggatgttaaaaaatcaccacattatatttgagtaggaactaattgctattaaaagttaaataagtcctagaaatcgggaccacaaccctgcagtttcttgatatattgagaacattatgacactgagattaaaataattaaattcagttggtttccacatatatcccatcacctttgcaactctgggttatcacccattttaatatttctgaatttaaccaaaactcatgtatgacataaaagtcatataggaagttcatttttcctataaattttacatatgtttcagaccataaaaactccagagagttattaaactatgcaaagggagttgaattaatgttttctgaatcattgctatgtgaaatccaaattaatatgttatgtcctttacttaatagattttatagagcatcaaggggttccctagttggtaaagaatctgcctgcaatgcaggaaacccaggttcaatccctggttagggaagatccccatcactgtccttattattaaaacctaaagatagtaacatcataaaaatatgttgagaaaagagtttaatatcatacatttttctctttccctttcttcaatcattgtgggttcacctgctcaaccattgtttctattctttactgcctgccactatcaccaagatttctcagacattttttgacttcctcatgtaaagtttcatgtctttatattttaagaataataaaggctatgaaaatacgtttttaatttccatttaacttttcaaaattatttttgctgtgttatttcttattgtcacaatattcctgtgaattaaatagatgtaatatgtgaatctttaatagataatatgaataattaaataattttcacataatcacgcaatgaaatcatttgagattcaagagtataaagtctccttcaacctaaatcatttttgtaaatgaatgagaacacagggctttgagaagaatctgatctgcccaaaattttacacacttttgggcaaagcaagctccaggtctcagcctctggacttgtaagccaacattttcttcatagcccataagatctgtgtgctaaattgttattgttgacttcactgattatccatctcttaaacaaacagaaatagtatctcagactttatgaaaatctttgtttcacttctgtgagagctgatatacactctttgggggcagttttatttgtgggttttcaccttctgggtttcactgtaagtcttcacactaataacgaaactggtactaacatggaagtttttcttggtttgaggtcaagtctagatacagctgctgtgtgttacttagtttccagaataaatgttcgtctcttcctgatacacactttggaaaggatcctaatctgctttttacacaatgtccttctcaaattggtaatatataggaccaaagttctgagtttttaataggtttaagttctaagcaactcaaattcagagtggtaaggcactgtagcttctctagctgcagttagcaaagttctaggtctctgctgttgaaacaggatgccaacttaatgaaatgtggtaaatatgatcattaattgtgctaccccttgctgccacagtgccttaagacttttaataatgtaaaacacatgttgttgcaatatactgacaatttttattttagaacaatattgacacactatcattctgacaaagcaacatacctctcaaataacagaaatattatgtttaaatgccagcatatatttggatcctttaaaaagagcaaaatatacaacaattatcgacatgttaacaataaacagaaagtagtaatcaaattttctttatctttcccttgtaatggcaacatcctttgacctaagattggaaactcaaaagaaatagaggtaggagaagaaaggaggtgtgggttcagcataagcacctacctgttacatttaaaatacactttttaataaatttttatctgaaattatcattttacattattgtctctgcaataaaagacatggcacttaaataaaagctataatgaaacctcatgtaattaaagttttagctcttctcaagttgatggatttccccttatgcagaggtctcattagctataacattttcaactttcatttttgcagacacagcttccttgggtgaaatgtcacagaaacatggaagatattttggtgaagttcttcacacttcttaatgattaaacttctaaggaaacttctgtcatcctttccagagcttgaacttctgtttatcacatcacagtattgttataacttcaattaaattgtgcagataatttcaatgcatggatatttttaaaatatatattttagttattcatgagtggttactataccctaaacattactttctaacaaacacaatacagtgataatgctttctgtgtgcctttaccatttacatatatgaaattgagggaatagtaactaaagactgacggatttatttcagtagaatttaggtacaatccatttgatcatcactgggg

SEQ ID NO: 31015 - DNA, 855 bp, Bovine  19866881429751
  misc_feature (1)..(1): n is a, c, g, or t
ntttattaaagaagatgccgaaaattttgacaggagttattttcatagtctctctttcagaggcacattgatccatcctttctctgtgtcctgccctctaactttcacatcaattcttttgcaagatgtttgatgacaatcaactgctctgcatgagctgcaataaattctcaaatataacagtaagcagaattggaagtatcactcttccagataaatatgaaatgtcagtgcttaaaagtcttgatagggtacataaaatctcttgggagacagtgaccccagaaggaaatctgcttgattatcatgtaatgtaccatacaaggttacagcaagatattttgtataaccatatcagtaaaatactggctaccacacagagacacagattaaacatttttcaattggtattaatatcaactctttggcctgaacttttattcatgaagaaaacatgtgaaaaagtcttaaagtttataagagatttcatttgatgtgagaaatctcacattttattctccttttcacacaaaaagcctaataatcatagactactgtagcagacagatgatggtctgttgtatgttaatttttcaagtttgataacaaaaatcattcagacgtcttgaggctgagtcaccacaaaattcaaatggtttttatgcattataaattcacgacttaagaccaaacacatttaacacattgaagaacctgtacctactagaagcagatggtgaagcagtgacttaaaccacctatacaagctgattctccaactgcaggcaggtgtgcctagagtccaatgagtataagttgtagtcaaaattctagaggttcatctcaaaaggcttc

SEQ ID NO: 31016 - DNA, 716 bp, Bovine  19866881580135
  misc_feature (1)..(1): n is a, c, g, or t
ntgagaacatgggagtcctgactaaaagagataatccaccagcagaattcttaggctgaatgggtgagcacatgggacaagatatcatcaaaggaagaaaacgagaaaataacaaaaacaaacaaaaaacaccttatgttattactagggaaactcctgtgttatgtgtggattgaataggacacttaacatatagtctgttatgtctgagaaatactctgtacataatgagctcaaactatcttaggaaacacatgcactagtgagggtcttagatgtaaggtattctactctactgctttgaaaacatgaaataaaagcaggaagagggaggaattaaaaatacttttatcatctccaaaaatcttagcggcttctatgattttgagaaataaaaacaaagaaaacgacagaaccagctgtaacagatggtactaattagtatcttagaattcattaggaactatgtcaaagttgactggctatttgcaaaaatatttctgataagttgtctaaactactttcataaatgtaatggaatattccaccacattttaccaaagttgaaaatttcaaaagaaaagacatagtgatatagacagtatttagttactattttccagtaatgacatttcctcatcaaagctaatgataaagcacctttctatttcctattagagactttataacagagggataaaggatggagggaaaag

SEQ ID NO: 31017 - DNA, 959 bp, Bovine  19866880430212
  misc_feature (1)..(1): n is a, c, g, or t
ncccactccagtattgttgagtggagaattccatggacagaggagcctgacaggctacagtccatggggtcgcaaagaatgcaaacacaactgagcgactttcagttttcattgctgattagcaatgttgtgatagtttcagttggacagcaaacaaactcagtcatacatgtacatgtatccattctcccatcaaacccacctcccttccagacacaggggttttctcttactttcagccaaaaccttcttaaatgatgcaacttggcttcattcaccaaggtgatttgggttcacgagtcattggtagaagggatcaacacattttctttgtcagggcccagataataaataatctaggctttgtgagctgaatgtgctcacttgcagctattcatccccggtgttacttcaggagggcagccagagaccagtgtgaacacgggcctgccagtgctccaataaaactttacttacgggcactaaaattgggatttcatagaatgatcatgtcagaaacattctttcttaaaatgcgttttgtacaaccaattgaaaatgtaagagtattcctagttcaggggccgtccaaacctgtgagccattgtatgctgacctctgataaagaccaggcttttctaagagttgtttcatgcaggtgagaacttttctgggtattcttcggggctccttacaatctgacaaagatacccagtttattcattgatccaaaatgtaaacatgcctcttactatgcctccaagacagttggaaatgaatgcaaaaaaaaaaaaaaaaatcagattcaaacattgggaaagatttcaagttgcttaatgttaagcatttacagcagaatttatacggcatttgatgttcatatagcatatggtttggggatgttttgctgtatctattcaaaaagagaagcatctatttatcacagatggggtattatt

SEQ ID NO: 31018 - DNA, 1423 bp, Bovine  19866880500429
  misc_feature (1)..(1): n is a, c, g, or t
nctctggcttggaaaatcccatgggcggaggagcctggtaggctgcagtccatggggtcgcaaagagtcagacacgactaagcgacttcactttcacttttcactttcatgcattggagaaggaaatggcaacccagtccagtgttcttgcctagagaatcccagggctgggggagcctggtgggctgccgtctatggggtcgcagagtcggacacgactaaagcgacttcagcagcagcagcagcagcagggatgagacctggcacgctgcggtccatggggtcaaaaagagtcggacaggacttgttgactgaacaacaaataatgataatattgcagtactttgtggggttattttttacattggttatttttttccaatgtaagcctttaacacatacatgttttgccttcctgtttggcatctacacattttatttttttaatatttatttatttggctgcataggtccttggcatgcaggttcagatatgtcaggatctttgttccccaaccagggatcaaatccacgtccattgcattgcaaggcatattcttaaccactggaccacctgggaagtctcagcatttactcattttaaagaaggagcctcaaacagtgagagtgttgtcagtttctcttgatataagtgcaaagactagacctttggagcttagggttttttgtattttgaatatttatttatttggctgtgccgggtctgagttttggtaggcaggatattttagctgcagcagacaggatctagtcccctgaccagggatggaacttggccctggtacattgggagcgcagagtctcagccactagagcaccagggaagtccttggacttaagtttttttcatctgtaaaataaggatggtgtggtcaccctggtatgatggtgagaggtgactacatggcctgaaattgttaaacctgccacattcaaagagaaaattcatacttcacacattttttaaaaattgataatgtgccctcctccaaaaagagaaaaacaaaaaatgagattttctccaacagtgtgagctaatgcccaagacacaactctcattgttttattctagtaaaagcatcatatccataaaaagaaagtcataactcaattctatattcttcaaagaattaacttcaatggctcctaattggtttaaatgttaatgtttgcataatgcataatttctttattaaaaggccacagcagaaacacacattatcccatttccaaagaagcctcaggaaaaatctttcccatagcctcagatgatttaaaattgatctcctatagcttgtcctacttttatattcttaacagcagacaaaatagttcctttcaattttaagtcaaactgttttgaggacacggggttgagttatgttgctattttcagagtaca

SEQ ID NO: 31019 - DNA, 1345 bp, Bovine  19866880544562
  misc_feature (1)..(1): n is a, c, g, or t
ncccattttatttatgtagttttattttgtggctttggtactatttgtataagctgtttcttttttttttttttttcagcacaagaggtcatgacaaatgaactgaatcatttgacactgagatcatttctactgcgcaggtgcagaaaccctgtctcagggcctcaaacacaacctcactgtttccagtgaagacaaaaccatgtttccagtgccacctcctgtttaaggtgtgagttttaaattttttaatttccgcttaaaatcatcactaagctggaattccatgataagaacaaagccagccttctgttccatggggatcctgggggtggggtgcttgtcttaaagttcctctgtttattttgagaataagagaatcccttattgcctcaaaggaccgctcatctacccccacgtgccaaagtgggcagtgttatatccctatttctacagcattggagtccacagagacagtgaggaaatgcggtggaaagccaacattataattaaggggccggagggaccaattgagcaagaaagatgaaaagagtcaacacttgagttggggggaaaaaatgaacttcagggaggcatggaagctgctctggatgtttccgatggctctgcgaccccgtagggagaagagctgtttaagacagtatcaagagtattatgaaactaagccaaatggaattaggtataagctgtatttaagcatgaagtacatcaagggatgtctcagaatataaaccactggctctctgtttaggttgattataaatggacaccacggtacactccaggagcttttcctattccctgatgtcgtcaaatccactgttgtcctaatgctttttattttttacattagtctcagtcatttaagaaacatttatgtgtaatttctattagattttggggatgattcttcttctccatggctttgataactatacatataataatggctatgattatttttttaagatttttcttgatgcggaccatttctaaagtctttattgaatttgttacaatattgcttctgttttatgttttggctttttggccctgcagcatgtgggatctcagttccctgaccagggactgaagccacaacccctgcactggaaggctaagtcttaatggctggaccaccagggaagtccctggctatgatttattgaccttttactcattcgactattaccatgtgtaatgggctgaatggtggcctccaaaagactggtccccttagaaactatgggtgtgatcttattgggaaacagagtcttttcagatttaattgagttaaagatcttgggatgaggtcattctggat

SEQ ID NO: 31020 - DNA, 2839 bp, Bovine  19866880633436
  misc_feature (1)..(1): n is a, c, g, or t
nacatgtccttctctgcatctgtgtctcttattcctgccctgcaaagtaggtcagtctgtaccatttttgcatgtttggtaatggtcacaccctccccatgctccaaagaagcaacacttcctttttatgcaacttacatacaaaaaagaaaaaaaatcaatccctaggaccatatttttgttagtctgtgtggcttccttgttcatgaccatcaaatctttgttcattgtcaccttctcagaaatcatcttacatagcaccctatcatgtctatacatcccctgctgctgctgctgctgctgctaagtcgcttagaaggactgaaattgaaaacactgacaaacatgtggagccatgggaacgttccttcactgctggtgggagtgcaaaatggtgcatccactttggaagttagttgggcagtttcttgtaaacttttcgtattatccagcagtcttgctccttggtctttacccaaatgaattgaaaaggtctgtccacacagaaacttgcacacaaatgtttataacagctttattgagaattgcccaaacctggcagcaactaagatgtccttcagtaggtgaatggataaacaaactgtgatacgtccacacaatggaatattattccttgataaaaagaaatgagctagcaagccttgaaaagacatggaggaattttaaatgcatattgctaagtgaaagaaggcaatctaaaaaaaggctacctactgtatgattccaactctgtgacattctggaagaggcaaaaccatagagatagcaaaaagatcagtggttgtcggggactgtgagggagatgaggatgaatagataaagcacagagggcttttagggcagcaaaactattttgcatggtacacgacattgtggatatacagtactcatttgacaaaatctatagaactatgcagcacaagtgaaccctaatgtaaactatggacttttaattaataataatgaatccatgggaattcctaggtggccctagtaggaaagaacccacctgagaatgcaggagacataatagacatgggttcacttcctgggttgggaagatcccctggagaagggcatggcaacccactccagtccacttgcctggagaatcccacggatagaggaacctagtgggctgtagtccatagggttgcacagagtcgtacacaactgaagtgacatagcatgcaattaatccatattggtttatcaattgtaacaacatatactaatggaaaatgcaaataatggaaaagggaggataaatatataggacctctctttctgcctaatttttctgtaaacctaaggctactcttggagtaggaaatggcttcccactccagtatccttgtctgcaaaattccctggacagaggagcctggtgggctacagtccatggggtcccaaagagtcagacatgactgagcatgcatgcaatgcaatgcaaaaaaaaaaaaaaggtggctctaagaaattaaatctgttaaaaaattgcagctacacccataaccttagtcaattctcccttatttttccatggcacttaacaatttagctgttatgaaacgtgcttatttactgtgtatcttctttattgcttatcttccccaaacccttaggatgggagcctcctggagcaggagtcagtctgttttgctcactgatgcatcttgtgtgcccagcacagtgcctcatgcctggcgggtctccagtaaacatggctcagtaaatggacagaaggaatggctgggaaagttttccaaagcaggccttctcagcatgtccctcctacccctgcctgagcctttgactgtctttgactatagctttctgatcagtcaaggattacacttagatactgttctttgtggggtttttttgttgttgtttgttttgctttttgttgttgtttttttttgaaaatgcaattattttaataaatttctgttctttatactgtgacagttattcatagtaattagatttcttcttgttattctttaataatttacatttgtatgggcatatcgttgatttacagtgttgtgttagtttcaggtggattgcaaagtgagtcagttatccatgtacgtacattcactcgttttatagattcttttcccatatacatcattaaagagaactcagtagagttccttggctatacagtaggtttttattagttatttattttgtatataatagtgtttatatatcaagccaattatcccaatttatccctcccctcttatagcctgttctttcttatttcccctcttaagatatacgcataggtgtgtgtgtgtgtgtgtgtgtgtatttttccctgcacagaagatgaaatccatcccaaggtcttaagatttattaactgttgcctgagtcattccacatgatgtcaggggaggaggcaagctgtgtctctacttagaaataccctgcacagaggtctttgggtaattccctcgattttgtaaagatgttggttggcttaagtgattagcatgagatccttaaggaggacttaacttaagcatttaaggatcttctgtgtctctcggagtgcccctcctgggttgtctggatttgcacatctggaaggcaaatttcaaaagggtttccagcctctctgcttattttctgagccccattggagtgtgtgtgtgtgtgtctggcttgggggaggtttcctccttcaaagcactggaggtcagcctccccctgcaggcatgtggtctgcgttcagggagacctgccaggcccctccaagggcctccagctctcagaggcaaaggggatcaagttacagaag

SEQ ID NO: 31021 - DNA, 1316 bp, Bovine  19866880649237
  misc_feature (1)..(1): n is a, c, g, or t
nccaagcccatttaaccctcacaaaacctggcaaacattaagtgcaggttcaccgctctttgtgcaatgaagaggctcccacaaagcctgtgtgtgcgtggacagcaaatggacatctgcacagctgccatggctacagaaatgccctatttcctatagataaaaatttctgagcagaacttagcaagtggaagtctgataggtcacgtgaccatgcctgaaccaatagccaaagcccaggggaatggcctgcactgattggcccagaatgatcatgtgattctactggaggtggattcagagtcctaaagggatagattgccagtgaaaatctgcgggtagtttccagaatctaggggaagacctcaggctggaaaaaaataataccacagtatcatgctggatatttgtaaatatttctgtgttttcaggaggatttgtcaagtaaaacatcatttctgggaggatccgttagaaactaaaccacaggacagtttctgctcttcaagtagcaaacattttaaataaatttattctgtaatatattttcttcagaagaaaaccacagaagcatggaacgacatcaagatattttggggggagacacaggaaaatgagtgcatgcatgaaacgcacacacacgagtctgaacaaaggtctctagaacatcagattgcctgtcatgtgttattcggggggagggggcagtgttctctgatgcctcactgtccatcagctcgtgtgtgtatctttcttttccccacccctgtttctgaaatgcctactgtgattaagaatttgcaagagattttcccaaagctgcctgcgtgggtgcatctttcagaatgttaagtaccccacttttgacatatgcccttggactgagtttttaaagatccctgacagttattgacagccagtaattagtctgtagaagcccgacttctgccaagagcctgacttaccacctctgagtcatcttctccatcagcctttccctccacgtcatcacttacaggaaggcaagctctcctgttctcaattccatgctgtgctcacccctggcccactttgaggatggctgcgtactgtcctcctgaatggaccttgagaatatcaacatgggagaaggaggctcaggccgttggcactatggagtgtgttagaaaagaattcaagccctgtattcagaactcatgagaattcaggtgagtgaagtgtggttatttttcaggtaccctaggcaaagtgcagttgcttaatttagagtccaaaccaggatagatcggagaaggaaatcgttcactttcaacaga

SEQ ID NO: 31022 - DNA, 2708 bp, Bovine  19866880724613
  misc_feature (1)..(1): n is a, c, g, or t
nataaggaaaccaaagtgtataaaggttgagtgggatattcacaatctgacaggtagtaagttgtgaagctataacacagacccaggcagttggacttcagaatccatactctaaatcactataatatggtgtttcactacatataaagtaaattaagataattgtgtctggttaagttctgtgctttttagagagaaaaactaaggcaaagaaacgttgaataatttcatcaagatcatagtttctacttgacttggtgtcattaacaaaagcataacaatatattctcttacttcctatattaaataagcaatcaacagccctctctggctacttctcttcttgtctgtttattttcagaggaaacctccttcaaagtttttcccatattctgcatatctaattcttacctcatgctactctacttagtcatctgtctcaaaacgcccctgagggcctagcagtgtctctgtcattattgatttctcagcagcatttgagagttgacctttctttttgaaacatattttttagcttttattaaatcataatcacctcattttcctcctatgtgatagtctttcttcctcagatcttgttctctcataggtgatgtgtgtggaacctaatctccactcttgaaacaaacattctcgtgttcaatcctgggtatcctttattcacaattttctctgttcccatggctttaaatactagttacagtcagtcttcattattcatgagttctgtatttctaaattcacctacttgctaaaatttatttccaaccttcaaatcaataattaagtgttttctcagtcattagcagacgtgcatatgaacagagcagtgaaaaatttgagtccctgaagtgcatgtacccggctgaggtgcaatgaggttagcatcttccagttttacttctcatacttgtaaataattgtcctttttgcagtgtatttagtgccttttattttttgcattttttatgctttttattgatgattttgcttttcaaagtggctctcaaatatagaactgacttgctacctaatatttacaatcacaagaaggctatgatggtccttgtaggaaaaaatgtgtttgctaactttcattcaagcatgagttacaatcctgttggccctgagttcaatgttaatgaatcaacaatatgtatcaaatatggtgtctttaaacagaaacatatttaaaacccgattaagtattgactggttgataaaaaacgttatgaccagaggctccaggaatctaaccccatgtttctccttgggccaatgatagagtctttgttaattccatgttcccagaaacttgacagaacataactactatgaatgagaactgactgtatatgcctatgttccccaaatctttgttaaacaaatgagtgaatcacacaattagttcaagaggtagggcaaggtcattcagagcatggtaataagtttcaattttccagagtgaagccattggaatagtttaggcaaagtataggaagcagggagagatggggaaaagtataaagataaaatttctgttttctgaagttcactatgtggagaatgaattagaagatggagaagtgaaatggggagaccaagaatgagcaattgcagtatttaggtgaactatgattgtggtttaccctagcttagtggcagtagaagcaagcaacaagagacattttaaatgcagaatgtatgagatgagcggctagactggatgtgggtgtgaggaagagggaggagttcaggatgatacttaatttcggctgtcattactgtgtacacggtaggaacatttaccaagaataggaagactcaaccacgtgaaatctactttaatatctcttgtatctcattagagatctgtttattacttcatttacttgatgattatagagtacctactacgcaccaggtatcatgctagttgtagagttttttggtaacggatgatttgcattaaatccccaactttggggatttttgaactctacatgtaatatattttctcatttgcggtcatttatttgtacgtccatcctgggttaactggaaaaaaggtaataatttttactttgtgttatttgtattcaatttagttaggcattccaaatgtacctgaacctcttatgtcacatggcttcattatcatgctggattgtaattacttactgatccatttcttcaactatatcctatcctctcacagggggagtacctggtctgtcttatttggtgctatagccccagcaccaggcatagcactcggcacgtaggggttctccattactatactaagggtgagataagatacagaggactgtagccataactaatgataatctataatggcaaattttctttcctaggctgggtttttttcctcctttagaaattactcatgcatgttcccaacagtttatatgaagactccaaaagcatactttagactgaaagacaatgttattattcagtaagaacatggagaatttcatttgtcttactcccacatatagcagttaagaacaaatgaaatattttctttaatagtttctgtgctttatatgtgccatttattgcttaaccaaaaagaaaccacaataaataaagaagtattattttcatggtttctggatatataagtctgtttgcctttatatcattatctcataacttca

SEQ ID NO: 31023 - DNA, 1845 bp, Bovine  19866880830707
  misc_feature (1)..(1): n is a, c, g, or t
ntacttttgctttattgactatgccaagcctttgagtgtgtggatcacaataaactgtggaaaattctgaaagaggtgggaataccagacgatctgacctgcctcttgagaaatctgtatgtaggtcaggaagcaacagttagaactggacatggaacaacagactggttccaaatcgggaaaggcatacatcaaggctgtatattgtaaccctgcttatttaacgtatatgcaggaggagaaggggacgacagaggatgagatggctggatggcatcactgactcaatggacgtgagtctgagtgaactccgggagttggtgatggacagggaggcctggcgtgctgcgattcatggggtcgcagggtcagacacgactgagcgactgaactgaactgaacagagtacattatgagaaatgctggaatggatgaagcacaagctggaattaagattgccaggagagacatcaataacctcatatatgcagatgacaccacggttatggcaaaacgaagaactaaagagcctcttgatgaaggtgaaagaggagagtgataaagctggcttaaaactcaacattcagaatgctaagattatggcatctggtcccattacttcatggcaaataggtggggaaacagtgtcagactttatttttgggggctccaaaatcactgcagatggtgactgcagccatgaaattaaaagacgcttactccttggaaggaaagttgtgaccaacctagatagcatattaaaaagcagacacattactttgccagcaaaggtccatctagtcaaagctatggtttttctagtagtcatgtatggatgtgagagttggactataaagaaagctgagtgctgaagaaatgatgcttttgaactgtggtgttggagaagactcttgagggccccatggacttcaaggagatccaaccagtccatcctaaaggaaatcagtcctgaatattcattggaaggactgatgttgaagctgaaattctttggccacctgatgtgaagaattcacatttgaaaagaccctgatgctgggaaagattgaaggcgagaggagtagggaacagaggatgagatggttagatggcatcaccgactcgatggacaggagtttgagtaaactccaggagctggagatggacagggaggcctgacatgctgcagtccatagggttgcaaagagttggacacaactgagcaactgaactgaactgagaagttgccaagcaaaggtggttaccagaagggaaccagcagggtgggaagtgatgataaaccccatctccacctttcaggcccggggtgcgcaaattcgcatcacacacagagcagcaagagcttatcagctgcagctgcactttttctttagaaacttcttccaagtcttaccttaaaatgatttgctaaatgattttgctaaaacatacttgccaccatggccctgagaaggccaaggtatgcttaagtgacaaagattaaagacacattagcatataaaagcccctcctttgtcctaaggcagggatgcctcccacctcgactgtccacaaggactgcctcatgaaatgtgacttcacttgaaattgggttttgctgcatctgaattttgctcaagactggaggtttcactgaagctacaaattgttctttccacttcatggttcaagaaaataggaggattcttgttgactggtgcagaggctggtttcatctctgacttgggtggtgagatgagctgctgagatgagaggaaggcacaggttttaaagggcccaatcttgttaattacgtgttttctttactgaggtcgatgggtgttc

SEQ ID NO: 31024 - DNA, 911 bp, Bovine  19866880997004
  misc_feature (1)..(1): n is a, c, g, or t
nttctattttctatccttgaacagcagaagaagaaaggagaagatagttaatgaaaagaggggaagtatttattttctgattatcctaagtaggagaaggaaaatgctaaaaagctaaaaagttgcctttgatttctcccaggccctgtttgctttctaatacctagaaaattgatcctcttcatcctttttaatttgtgtgtgtctccacccacaaccctctgcaggaaagagggctgcatattttgtgaggttgattaatcaatgtattatttttttccctctttccagcagttcagggctacccatttttcatcagacctattgttacttggcagaaaataaatacaccatcaaaaatgtattgccgtaccaactaaaagatgaaggagagtgaacatttcactttgggtttgtgcaaacaatattgatttatgcaaaagaaattcccaggagagtctttataatcacacaagtttattcttgattggtggggtgagcgggaaactttgagccataaatcattaatttattcatttattccttgagttaataaatatttatgaagcacctactaagtgcaatccctgagtacaaagcagaacagaccaaaaaaggttctaatggagcttacattttgtgggttggcaggtaattatcagacagtaaaacagagtaacttaaaatacagtgaaaagtgcacagacaaaaatgaaacaaaaattaagctttcttaagtaagctttaacaagttttagatccagaaatgatttgaaaaagaaagggaagacaaaagaacagaagaacaagcaattttcacaagtgtacttgaggcagtattcccaagtgtggttttgtgcatggctgtagtccgtgggttattatctttaaatggtgataattgcgtattt

SEQ ID NO: 31025 - DNA, 1418 bp, Bovine  19866881048752
  misc_feature (1)..(1): n is a, c, g, or t
nctcctgtattcttgcctggagactccccatggacagaggaagcctggcgggctacaatccatggggtagcaaagagtcggacatgactgaatgactaagcactgcacacattaattaatttaactttttggcttcattgggtcttagttgcagcacatgagctcttctttgcagctcatgggcttcccattagttgtggctagtgggttccagagagcacgggctctgtagttgcaacacacaggctctctagttgtggtacatggacttagttgctccacagtatgtgggaactttctggaccagggatggacccctagtttcctgcactggaaggtggattcttaaccactggaccaccagggaagtccccttgaattttagtgattttgatcatctttgcatgtttattgactattcatatttttctttttgcaagttgcctgtacattctttttaccctaacagtcttccaagggagagaccagtgtcatcctagggttgtatactggttaatgctattgagacataaaattgtgtgactactggtcttcgataaagcactaagaagaactaggataccccttataattaatatttggtaagtattcactatgtttgaggcactatatgtccctacttaatcccaatagcagcccagtgtgagagaaattcttcttcttttataggaacttctctgaaactcagagaagtaaaagtacttgtttaggatcacagaattagggacagcagagatgaaattaaaactagagcactgctgttaaccaacttacatgccctcggttttttagctaacaccaagaaacaggctaaagaggactaaagagtctgataattccacagaattatgaatttaggaagctgaaaattttctaattggttgcctaaaacagcccaagattaatttttagtgtatcacgcaacagtctgaatactttaccgaagataagaggttaaaacttgagttttgaatcatagttttatcacactcaagctgtgcgaccttgagcaaatctcttatcctctctgaggctgcttacttatgggtcaaatgagaataatatttcaatttaccaattctatgatatttgtgtagatttttaaaaaaaatcatgacatgagtacttaacacataatctaactagcattatcggtcctccgtgagattgaacataattattactaataataggcatatttacagagcctgcagggctgtgtgcagaaggtcacgtttgactcttgagtaaagacaggatgtaggttagaaggaaatgatccaaaccctcagatgtcacaaaaaaagaatgtgtcatttctaatccatttcagccccggcactaaaatgtcataaaacgtgaaagctcatttttattctttgcctccactaacctca

SEQ ID NO: 31026 - DNA, 944 bp, Bovine  19866881112174
  misc_feature (1)..(1): n is a, c, g, or t
ncttctgttctgctcttctagcatggtgtatgagtaattgggataagacatgacactttccagcttcccttgcagctaggtatgaccacgtatgtacattctgttcatggattgggaatggaagtgacatgtgcaacttctggattctgcctttaaatagaagaggcaggccccctaccttcccttggtccctccccaggggccagaattttccatggtgaagagccatcttggattgtgtccaccacagtgacaacttagttggagcaacaagttggcaggagtctgggcccctgatgcctctgcagactggacctgcctcacaaactgaaacatttaaacaaaaaaaataaatcactttctttctttctaaatccatgatctggggtggggggaggctctatcggttgacccttttatccaaagctacacaaacctacatggtaatccacatggttactagagagtagcttccttttgttcaccccagtgcagaaatgagagggtaacatccttggccaaagagccagtgaggtattaaggtgacttgcttttatccttaacttaagcctcagtgcttcctcccaaggtggaaaattaaaagcatgatggatgaggtgtctttgccatttagctggcctagtttacacaccgctggtgagaaaagactgcacttgagatggaacacgtaaggaataataaggaccacttatgaagaattaatgtgatgtggaaaatggaaagaaaaaagttattaggttacccaggagaggcgtggagagcagcctacagaacaagctgtcactatgtcttagaggagagaaggtagggagaaggctagaggactaatttaaggttattagaataatctctctttgctaagtgactgcctctttgccagactctttttcctcctgaacaaaaatatcaagtgtattgaccaa

SEQ ID NO: 31027 - DNA, 1331 bp, Bovine  19866881136859
  misc_feature (1)..(1): n is a, c, g, or t
natattttatatatatatatatatatatattcagctatatattttacatataaacactaagtgcttctggaatattttaaggtacactgacctttcctggaatgcaacgtctgtgtccatcatggcctgcctgttcttgatttgctgagaaactgacccagagttgttcactctttctagaagccacatcaccccacgtgctgttaactgtggtgactgtccaaacaacacgcagatcattcctgtctcattcgtggtgagtctacacagagatgctatctgcctgaagagctgctttttagagtggccatgcctgagcatctctagaccaaaatagacaattatttgattataaattgttccctttttattaatagcctggtgggctacagtccacggggtcgcaaagtcagacatgactgagcgacttcacttactcacttaggactattttggaaaatattaattttggtattaatttagatattaattttggaaaataaaatttatgttggtgggctatattatctatgagtttaatttcagaataccaaagggacatcttaaaatgttagatatagtggatgtcagatctcacctagttaagaacctgtgggacttccctgaaggcacggtgattgggaatctgcctgccaatgcagggacacaggttcgatccctggtccgggaagattccacatgctgcagagcagttaagcctgtgtaccacaactactgagcccatgtaccctagagcccatgctctgcaacaagagaagccaccacaatgagcagcccaagcatcgcaactagagagcagcccccactcgccacaactacagaaaaacccaggaagcaacaaacactcagcatagccaaaaataaagaaatgaaattatttaaaaaatgattctaatctccagcattggatctacctgtaccattgtcttgtggagctgaggcataatattgtggctgagctctgcccaaactccagatttgtgagcaaaataaatgctgttttaagcccgaaacttgggagatggtttgtcacacagaaataagtaactggactacctcctttccaaacactgcatgcactgggaaagaggaaattccctgttatgatgaagctggagagcaaaaaacaacatatggcttctctgtgggatgtggactggcttcatctcttcacacacccgtcacttgtaagagcttacttcaggggctcggggagtttggcaaaacctcagtgaccggaagaaatcaggaccaagaacctgcccaagaaaatccttctgaagcatctagggggtgctattctatttaat

SEQ ID NO: 31028 - DNA, 1682 bp, Bovine  19866881190997
  misc_feature (1)..(1): n is a, c, g, or t
ntggagaaagcagcgtgtgcacctccaccaggggttctgaacctgggcacattgggcacttggaacttgttaactcgtgttgggggacactgttctgtgccttgggaggctcttttagctgctccctagatgccagccctacccccatagttgagacaaccaaagatgtctccagacatcagcacgtggtccctgcaggacatagccacccctgattgacaatgactagcctgtgcagatgtgcttttctcctgaccccttggctgtgctactccttggtttgggggtctgtcggggggccctcttccctcatcagatctgaacagcaaattccacgattcctgggtctgtgggaagatccccgcccactccaatcaccaatcctcatcctacccctctaggaccccttgtctgtgggtgccactggatatgaaataaaagaagaaaaatgaaaaggcagggcgctcagctgagtggagcatgggcgcatttggaaaggccgagtcattaatctctcggttctctctctcttgccctcttcatctccgcagagccaaggtgaagaagggggtgaacatcctgagcacgcggaccagcgagcctcggcagtgggacgtcaagcaggagatggggaacggaggcaaacacgccaccaccgctgtggtgtgccagcgactggcgccaggcgcgcgcaacaggtaagagggaggggctccctctcgattggtgacccaggcttccaagacccgttctccacctaagagccctgccttagactcacgttaaccactgcttagtcgagctgtcacaccttggttcgacaatctggagacacttaacatcaccagcaggaccttttggcatctccggtaggaaggacagggccctgattcccagggtctctcctcttcgggttttgaaacagagattagcttgcaaggtctagtctgctttgttcaggctcattcattctcctcatatacactcatgtcctggaggctgtggcatctccggttgcccttgcttatcagaggctgctttcttacaacgtgttcgccctttgtgcaaagtgtgtgattctgtgatttatactaagaaatacatatttggtctttgtgcctgttcctggcacagagctttgaaaacccttggactttacaaggatgagaacatcaaagtgactcttgtttatgtcaataaggtgacttttggaaagcctcctagttcaccttaagatgcaggctggttgccaggggaaccaaggctgtgattagaagcctggagtattcagccccacctcctggcctcctgggtggagaggggaactgaagactgagttcagtagccagtggccaatatgagttaatcaatggtgctcatggaatgaagcctctttaaaaacaaaacaaaagactgagtttggagagcttccggggtggtgatcaggtggagacccagggacagtagcacctggagagggcctgggaacttgcccatacctcgctctgtgcgtgtctttcatctggctattcctgagttatagcctttcataataaccagtattttagtaagcgaagtgtttctctgagttctgtgagccactctagctaattaaaggaacccaaggagggggtcatgggatccttcgatctataatagatcggtcagaagcataggtaaca

SEQ ID NO: 31029 - DNA, 1842 bp, Bovine  19866881200032
  misc_feature (1)..(1): n is a, c, g, or t
nacccctacattatatcctgccccttccctctgcccactgggcatcactaacttcttccctgtatctatgactctgcttctgctgctgctgctgctaagtcgcttcagtcatgtctgactctgtgcgaccccatggacagcagcccactaggctcctctgtccctgggattctccaggcaagaacaatggggtgggttgccagttccttctccaatgcatgaaagtgaaaagtgaaagtgaagtcgctcagtcgtgctcgactcttagggaccccatggactgcagcctaccaggctcctccatccatgggattttccaggcaagagtactggagtggggtgccatcgccctctccgggtatagtcactagtttgttgtattttttagattccacctacaggtgatatcgtacatacgatatttgtctttctctgtcttatttcactcagctaaaggttttaaatcatgcaatcagaatgcttttgaatcaggtgagatttcttccccctctctgaggttttaattcagattttaactcttggggttgtaagaaataaacagttcacacttctgatatttagggaccctggagcagtgacgtgacaccaaagcagctgcaaatctggacttttatatatatatatatatatatatatatatatatatatatatatatatataatatacatatatatatgaaatatataaatatatatatatatatatgaaactgaatcactttgctgtacaccctgaaggtcctgcagcattgtaaatcaactatattttaattaaaaatcaaatttaaaaaatagaataaataaaaagagggactcaaaaaaggaaggaaaactcttttactgcaatgactactcactccattagctggcctctcttctctaaaatgtgcccggatagaaagggaccatatgtcacagggccacttatgcatgtgctaaattgtttgcaacagacaaagctgtgatctggggaaactcgaaaactaagatgacttttaaatggttgaaagaatgtggaacaaaggagtcaggacttggtcagaaggactctgcttttttctctgttcacagaactggagtcaattttatgtttaaatgtttcccacaacagtcaaatcgttctcaaatgtttcactgaagcagggctgcctggcaacccagatgtgttgtggggcagggaggggagctggggagggggccccaggcaggaaacattatttcttcacttcttcccaagcagaaagaaaattgttccttttctctcttccagcagaatacatttaaaatgacaagctggagaaaatgaaaacaaacctttccttgggagaccctcaacagggaaatgcatttttgacacaagtgtgggaaaatgagtttccagaattttctgaattagctccaaattggcagtcaaggcaaacaccattgtgttggacggtctcctcctcttcaggatgagtctggggactgtccagtcattctcgagggttctacttgaccctgcagatggaagctccgttggaaatggaggcctgacaattatccagggcaagccaggcatcgggaaattgcctttgagggcttttggtattctcagacataaaagggatcaggagaaagaaaaacacactccccaaaaattcaattacaacagcgcatacacagactgtgctcagaaatgaggggcatggatttgaacctgtaggtctgactcccctagtagagaagggtttatcttccatgtggggaaggcacacattcctattcatagcatcaccatccccccacggggaactctctaatggagctgccaaggggcac

SEQ ID NO: 31030 - DNA, 1587 bp, Bovine  19866881245879
  misc_feature (1)..(1): n is a, c, g, or t
ntgtatgaggctggacacttttccttgttgcctggaactccaatgtggctcagggtagtgctgtctcctgctcttaagtggccacatggacgtcgtgcaatatgctcatccagtcctgagcatcaccacacaaaccaggctttctatggtgcccacgagcctgccctttcatggtcctctcttcatcctctgaacactctcttccacctcaagtctgccaccttctttgttctctactgtaaagaataatgaaaataaagatcatataacaacacttggcacttccctgggggctcagatggtaaagaattggcctgcaatgcaggagacccaggttcaatccctgggtcgggaggatcccctggagaagggaatggctacaacacgacacttgtggccaggagttttctaagtgctttattttcacaagtgccctatatcattggctccccgttttgacagatgaggaaactggggtgcagagagtttaaggagcttacccatggctgcacagctgatttctcctggaattggaaaaccaaatgtctttttccagaaacctctttctttccaagaatttgggatgtatcttgaactttcttctcttttagtcagttgctattttgtaatcattcgaccacactcctgtaaaaccatcacactcccttccagctacattgctcccgttagtttatctccgctcatttttaccttaattatttcagtgcctcctaactgctacagggagatttctaaaatataaatctgttctgcagagagaaaaccaataaaacctcatccatttggcagcctttgttaaagctccagctccacaacacggctcccctgggccctcctgatctggattcttattttccagctgatcccaatcactggaagcttgcttgctatgcctctgtgtctctgaattctgcctctctgctcaccccttctgcctacgactccttctacactctaccagtttctctctcttcccttggcccactccgccctattctttggggaggaattcaaatacaataccaacagcagcagaagtgaaacacgagaagaccacagcctgatggcatcacagcagccagtttctgtagccatggaagttctccatagcaggactcaactgaccaccattcttactgcttacaacaaagaaagtcctaacaaagttagcacttttcttgttggtttatggttctattgtccttttaaactgagaattttgtccacagacttgtgtaattgccttcctaaacccctcatttagcacgggaggtggtaggcaatataggcttagctcgctgaatgaaaaaacaccacagtaatcatctactcttggtttttataaaatcagccttgtcctttcagggtaattaggatcctgtgaatttaagcggacaaagcagtaaatctaatctaggtgtttttgaggagcaaccctcttggaaagcaggatggcattcttgctcccttctgacctaaattccactggtaacagaaaataaaaattcagtcactggaaaatacttgagatcctctacttgggctcgcttctcaggcagccaagaa

SEQ ID NO: 31031 - DNA, 1500 bp, Bovine  19866881266384
  misc_feature (1)..(1): n is a, c, g, or t
ntcttttcctgtgaagacccccgacagatctgcaaatgggtgacaccacccacagagcccccgacacttgtggaggagggcttggcagcctctgcctaagctgaaatgctgtcttcttttgcatagaaaacacaagcccatcgaattctcctctgttctcctgagtgctccctgttctgtcccacttaaccagtcacggagcattttagaaggctctgtcaatcggaggttggaataatagcactgccattacctcaagcattgttgaaacatgaaggataaaatgtgtctcattattcaggttctcagaagtgatggtattgagccagaatggtcccattaactctcaaggccttacttttgatgctctccacctttaaataataatttcttctcaaggaagggaagaaaagttgaaggctatcattgacctcaaaacagcagagtttctcacatctgaagaagcatttatctgcagatgaggcttttggagtttctctgatgagagtctgatgtactgtttttagagtcaagaaaattctcccacttttgattcgaaacaatgaagaatttaaaatgcaggcaaggaacagaagtttctggtcttgttgggaatagcccggatgacaccttttggggcccgcttcctgctaagttctgcagtaattctgcagtctacttttgcttccagtagaccacttatatatgcattagtagatgtatctacaaagtaaggaattgagttagactgtatatcttatgattctgaacttcagttttcagatcttcttatattggcataagtcttagtttggtacattaaagctacaacaataatagcaatagctaacatttatttcctgggctccaaaatcactgtggatggtgactgcagccatgaaattaagggatgcttgctccttggaaggaaagctatgataaacctagacagtgtgttaaaaaccagagatatctgtttgccaacaaaggtccgtgtagtcaaagttatggtttttccagcagtcatgtacagatgtgacagttgaaccataaagaaggttgagagccaaagaattgatgcttttgaacagtggttgctggagaagacgcttgagcagctcttggactgcaagatcaagccagtcaatcctaaaggagatcaaccctgaatattcactgtaaggactgatgctgaagctgaagctccaatactttggccacctgatgcgaaaatacgactcattggaaaagaccctgatgctgccaaatagtgaagattaaaaggagaagggggcggtcaaggatgagatggttagatagcatcaccaactcaatggatgggaatttgagcaaactctgggacatagtggagaatagaggaacctggtgtgctacagtccttggggttgcaaagagtcagacatgactgagcaactgacaacaacaagagcatttattggttgattacattacttactctattctctttggtcccctcat

SEQ ID NO: 31032 - DNA, 1066 bp, Bovine  19866881361388
  misc_feature (1)..(1): n is a, c, g, or t
naaaagtgagcatcagaactaaaggaagagtgtgattccttatgtagtgatattttttaaagaattatatatacttagacaagcactgggtaactatggagagtgtgcacacacacacacatgcatagagagagacacacaatttaatgactatctgtggagacaagaacagaaaggctataagataaaggaaaattctaaactcagtttcccctcccccgctttatgctcctgtgtactgtttaacttatttttattatggacattatcgtgttttttattgcatataaacattgatttgtttcactgttcccagcttcaataataacaatagcagcatttatgttacaaaacattttttcttatgtgtcaggcattatacttgtaaagacttcatgttgtttcatgacattgccacagaaaaggtaaacgttagttccattttacagattgggaagtggaagctgagggagattaataagtatcgaaacacacgctactactcactcaagtctcaaacccaatgcctgcttaaccactgtgctttcaacactttccattccaagcagattgcaggctgaaatctcacacacacatttttataactcattaactcaaatctctagtgttttccaggttgtactaaggaaaattgggctatcagtttaggataatttctaggaagaaagtttttattggcgcttaagtgccttagacttatttcctattttaacaccttccatctcaataatcaaaaaatggaatttgtattcatttctccaagttgctgaaattactttttaaaatagtgatgtgtgtttcacagcagataatttctgcacctgtaatattcccactccatcaccaatcttttgactaaattgcctgatgacaatttgcatatcattcgatcattacttgcaaatttcactggtaaagttcagcttggagcggtgacattttcctcagataagtggttcagtgaagccaaattgcatttattgatctaaaattaagtaaatatttgataaaatccaccatgtatcccattgaggaagaaaaaaga

SEQ ID NO: 31033 - DNA, 1061 bp, Bovine  19866881468378
  misc_feature (1)..(1): n is a, c, g, or t
ntgaacatctgtcatctcatatagatacaacattaaagaaatagaacatatatatatatatatatatatatacacatatatatatttccttttgatgagaactgttagtgtttactctcttaactttcatttataacattcagtagtgttaatttatcatgctataccttacatcctaatgtttaattatcttataactggaaggtttttgactatatttattcaattctccctcaatccctggcagaataattctacttaactctggtttcacatgggcataaccttggaagctttattagggaaaaaatgatatccaggcgcaccagagaccatctgaagagaagtgaggaaggtgtttttgaaaagcactggtgttttggaaaagctcaccaagttattctgacatgcagctggggttgaagacattatatagaagagcagagattgtgagtatacattctttcagaatgaggatgatatggaccccaaaaccagagagaagcggtagagtgagaatcagactaccttctcaactcagctagaaccacacttgcttagaagacaccagggcagcgggatgctacagaggggaacggggaccagaacaaagctgctccaagacatgtcacatctggtcagtctcctccctgtgtctttagcaaataaatgaggaattgatcagaggttgtaggaacactcgcagaggtctctgagccactgtggaccacatcacattcacttgtgtatctcaagtaccaaagcacatgcctggcataagaggggagcttgctaagtgcttgacggatggatgaatggacagacaggttgggtggtgagtggagcatgctcctattttctattgaaaaataaaactttcctttatcccctctagtccttttagtcttggctgttcatgctgccacagagaccctcagctcatcaattacagacattaactgtaaattatacttttgcatagttaattcagcctcttcattatgtatttagtggtgctcagcaggcataaaattcaatagcaagctttggagcggatccaa

SEQ ID NO: 31034 - DNA, 1338 bp, Bovine  19866881526802
  misc_feature (1)..(1): n is a, c, g, or t
nccttcattttgtcatgtgaaaactaagatctttgtactgtcggccatttctgaagcagcagaattgctgggacaagcttgctaaaaatacatatgaaagaaaaaagtgaaagtgttagtccctcagtcgtgtccaactctttgcaaccacatggactttagcctgccaggttcctctgaccatggaaattcccaggcaagaatactgcagtgagtagccattcccttctccaggagatcttcctgactcagggcttgaactctggtctcctgcactgcaggtagattctgaatgaccagggaagccgtgtcaagtccccggtgctatgcctgaaaagcatttgctttatccttgtattctagttataattgtgagggagtaagccaagggattgaaaggttttgccaccaaacaaagtcaacttaaagctcttttcctttgctctcttccagaagcagcagtttattcaatgaggttgtgcagatgaactttgaaatcgccagcttcagcagcctctcagggagccagcccatcacctggcaagtggaatacccacggagggggaccacggacatcgcagtgtcagagatcttcatcagccagaaggacctggttggcatcgtgcccttggccatggtaagacttttgcgagcatggatgcacctgcattcagctatctgattgcaccttgatgtccttcttagcttccccaggatgttggctgcaattgttttatgggatgtttgcattcaaagttttccatcttcctacccgcttggaagtcgctacttttcattaatccagcctttctcaacttcaggctaattttatactggctttatgacatttgctattttatgacatttgctattcccctgtgccagatatatagtatttacttactttttcttctcgaactctacagcagttctttttatttctgttccccttttataaggaagctttaagccactacattattaggatgagtgtggtttgctgctggtgtaaaccaccccccaaatcttaggttcctcatgcaacctaggttggtcttgcttataccacatggcttagatgatgggctctgttccaggcagtccctctgggatctaggctgatggatatgtcatcatcttgcagctaaaacggcagaaacaacatggccttcttggaggcaaagatagaggaacagtctgagtcacatgcaagctcttttaagcaatggccaacggattacaaatgacactttcacacacatccttgggcagaaggagtccccatggccccatcagatttcaagaggtctgggaaacataggtgcagaggaaaagtta

SEQ ID NO: 31035 - DNA, 1088 bp, Bovine  19866881536339
  misc_feature (1)..(1): n is a, c, g, or t
ntttgaacttgtgctcacaagtcaggggcaaaggggcctataatgaccaatattgcctcttgagagaaaagacactcattagtgtgaaatgttgcataagcatgttagcatgcgtgtctgcctgcccctttagctgaggcccagcaatctgagcttttctttctctctgccatcagaatataccagctgccgccaccagggggcactgttgactctataaccatttggaggctgccctgccggtgggttagggagcagagctgtttcaaacataaattaagggcattggcgttccaaggttccaagtatttgaaacaacacaattttggcagttttccatttgaggctcaatctttgtaaaaggccctcagagagttttaaggggagtccagaacattgtagtgggtctagctattggatacaaagttcctttagttacctggatggtctcaacctgagaaaggtggttgaacacagtgaatcatatgtaaaagttatgagtatctctccttcccagaaactggctggatctgtaatgaatcttaagccatgacatagcttgagctgctgatcgcaggcggccaggagaggctctaaaacgcagattaataaataacaccatataagtgctatgttgcatcccgaagtcatgcctgagtttgaattgaattacttcctatggaaaaatgcaaagtttaggtcctgatgagtcatgactatcagacggagaaaacaaaaccaaaaagccttagaggtgaagagggtgacaccagtatcatggctgaagccgccgcaggtcaatgtcaatgaccttggagttagagtcatctgtttcttctctctggttattatggggactgcccgggagtaacaatcgctcttcctgtttgggggccatactatcttcctgtcttgttcttccttccacaaagactctgccatcctgtctttctttctttttttctttcccatcttcactgttaatctttcaccatccctgtgatcaaacactacttcctcaaaggtatcaatcagaaattattcaacaatatttcttgagttcagggtatgtcctggctctgtcctgg

SEQ ID NO: 31036 - DNA, 1103 bp, Bovine  19866881703476
  misc_feature (1)..(1): n is a, c, g, or t
nctctgagtgtgtgggaccctgggaggtctgtccatctcagctctgctggcaaagctcctggggcaagtttcccttcctctgccttccttggtttccatattttccctcttttacaaacagaccccaacaaacagctttgagaatgtggagttgattttggagacacgccttctctattccagggaagggagaacaggtctttagaaatgacctgaactaaaggtgtgaaatctgtgaaggaagctgggctttacattcaagaaaaatgcagctttagaaagccagggaaaccctcttggtggttctgcatgttagagacatggagcaaccacagtgcaaattagaatgaaaccctccaatgagccactgatacagaagcaaaagagattgtctctgtctgattactgttaacagtttctagtttgcttgttttatattaaatattttaatgttacagcaacttggtttaatttttgttccatttttaaaatttttttaccacaggtgcagtattggcttcatcgtaactcttgttccatgacatactttcttctttgcatcatgtgtgactcactgtatttatataataattgaattggttatgttttaatagtgtactaagcgcctgtgaacccatcacccaaaacaaaagctggcaccttggcatacttccacttaaactgaattttttgagtagctatcaccgataagtgttttaaaatgtagttgcataaatattctgaaggcttgattttatttttctgtttgctcaaaaaaactaaacttttccccagacacgtcttgaaatcccaggtaggagttcttaagtgctcaaaaccaaatgtttcatgattgtcttctgggtaaattatttcttctctattcaatctgtaccaagagcaataacgtactcatttttttttctaagcaaaactgtctcctttctcaactgatttctttgaggaacaaagccaggaggaaacccagggtgccatgtggttatataataaaaagaagtaagaacagacactcagcaaactcaactgcttgcaaatttatcttttcaagccagagatgttcattaaggttctagggttccaga

SEQ ID NO: 31037 - DNA, 3695 bp, Bovine  19866880017586
  misc_feature (1)..(1): n is a, c, g, or t
ntgaaagtggagagtgaaaaagttggcttaaagctcaacattcagaaaacgaagatcatggcatctggtcccatcacttcatgggaaatagatggggaaaccgtggaaacagtgtcagactttattttttggggctccaaaatcactgcagatggtgactgcagccatgaaattaaaagacgctcactccttggaagaaaagttatgaccaacctagatagcatattgaaaagcagagacattactttgccaacaaaggtccgtctagtcaaggctatggtttttccagtggtcatgtatggatatgagagttggactgtgaagaaagctgagcgctgaagaattgatgcttttgagctgtggtgttggagaagactcttgagagtcccttggactgcaaggagatccaaccagtccattctgaaggagatcagccctgggatttctttggaaggactgatgctaaaactgaaactccagtactttggccacctcatgcaaagatctgactcattggaaaagactctgatgctgggagggattgggggcaggaggagaaggggacgacagaggatgagatggctggatggcatcactgactcgatggacatgagtttgagtgaactccaggagttggtgatggacagagaggcctggcatgctgggattcatggggtcacaaagagtcggacacgactgagtgactgaactgaatatgttattattatcactcctattaaactctaagttctcagaaggcaagatcagtgtctgtttatatttgtagccacattactagtgcctggcaaagtactttaaacatagtatgaactcagtaagtgtgttctgagaatgaaagacacatgcacaccagtctgattagttcatcactgtgcgtttaccaagtgcctacaacacattcaggtactgtgttatatgctagggacatacagttggggaggcacttgacataatcttcacagtagctgtatgcagtaggtatactgtttttatttttatcattattttatcttaattccttgggatcttaattccttgaccagggattgaatgcatacccactgcagtagaagcacaaagttttaaccactggaccacagagaagtccctaaagtaggtattttttaaaataaaagaaattttacagatgagaaagccaaggcacagagatgtcaagtaatcttctagggtcacacagagccaggatttgagttcagttggacctggagaccccaaaccctgtgctccacgctcttcccactgagcacaccaccccacataatctagtccaaagtcgtctcaccctagatctaaccatcaagggcgatcacactatgagatcctttgcagaaactgttttctgcctcaggaagtttgctcttttgcctcaagggctgaaggctgttcctaaatgtatctgctctatcaccttcttatctcctccttattctgcctttacgctctggtcctcctccatgtaccagaacctcctaaacttgtggccgctagtggccaaacaactgtcttctaggaacaggttttcctagaaggacttttctggcccgagagtcgtctccctgctgcttcgccatgctttggctaggactgacattccagaagctgactttatcaacttcctcctcctcttccaggaagtcttcccagcctgactatacttgactcgcccattatgcactctatttgctcttctacactgatctgaactcatgagcgacaccctgtgagcatcttttatctgcttcctctgtgtgcctgtgtctaccccatttgttggatgccctcaagggagcagcgtataaggaacagctggtttcaaggcccgtgttcaggcagggcctctctttggctgctggagtggggagagatatattccctactgaatagttacagcctgaccctctcatcctaatgaagaagtgtgtcagctgctgctactctcctgctacatttcagccctgaaaccagatccccatcctcttccaaacagggggaaagggctagtcctctggacatcaacctaactaagccaggatcccccagtcctcagcctccctccagtgctcacttgttacaatgcaaattttctgcctatgaaaatttggaaattctgctacttcagttttgcagaaacagactcttcttgtctagatcttccgggccaagggcagggctaggatgcaagagaggagctcagaacagcctcgacaaaagataatttcacaatttattcttcatgtttccttttccagcagctttaacccacagcgtcttcaggacatatgtttcttaaaggggatttaatggcataaatgaatgtagaacttgactagtattacgtgagtgccgttcttgggcacacactaagttaaggcaaagccaagcaacacaccagtccctcctggatgggaggggaagattctgtctgagatgaacacacactttaagctcatcacacatactaactataagcctttcctgcgccatcacagaccttcctaacccagccacgacccagctgcattgaattcaaacccccaaatccttagaggagccaaaaggctgagcctgagctaacagcttcattttctccttcactcccattgggaaaacagaggaactgcaatttggctttgttacctaagccctgggctgaggcgtcagggagtgaacaagactctgatagctctgcctgtcactctacttggtctcctttctgggcaaactggcactggggagggggcggaacaccatgggtggaggagggtgcagagctctcccatctgagtgtcattctgggccccaggccaggcatttggctttctctccaagagaggcaaaggctgaagctgctcagacaaagggccaaatgaaagctaatggggagttgggtgactttagcctctccccttcctcctcccggagactggggctcaagtccttggcaggagagggtgcaaatcaagacctggagctcagctctgttcagattcctgttgcctcttttattctcctggcatccacaggctgtcttcctcccctcaccacctcccacctagggtgctgtaaaaaatgcaaatcagtgggattttaaaattcaagcccatgccaggaacacccacaaaccctctattaaggcagatcctgaggtgggtggtgtggtcccagattccaagcaaaaaagagaggattctgctagattcttttcttgacttgagtcttggacttcagacatcctcttggtgatcttgacctttctctctggtactggacaaatgaatgggaaaagtcagaactgtgtatgtgtgggctgggaccagccattccaaactgacatggaaagcatgagaaaatgaacatgagaagggacatgatggagactcttctgtccctcatctaagaagcaatcctctgggtaaagttcccatccgagtgtcagcacaaaaagggcttcaggaggaagtcccagagaaatggagtgggacagacagagtgcctgggccacttgaccatgaagaatcaaaagggacccctcctacccaagctggcccctgatacaactgccaagctccctcctcagtgtggagagtgggagaggctgtcctggactctggagagtacgagctgacactttctggatccaggtctgttgtcgt

SEQ ID NO: 31038 - DNA, 1566 bp, Bovine  19866880357915
  misc_feature (1)..(1): n is a, c, g, or t
ncccagtattaaatttccccatatcctttcaacttacacattccacccagcacatgcaacttggaaagggcagttgggtccaggcctatttctttggcaagctctgaatctttgagaaaaattctagatatgcatatacagttcttgactctatgaaatattggataaatcctggaaactagggttttcagagtaccttcccaccttggaagtcctcattgggttcaactgccatccaatgtctccctttgtctcatctaagagtcatctaatatctgttccccccacatctgggaggccaagatatggaatatagagaattagaaagttccctctttagtgtgctgagccctgactttgggctttttggggagggagatcctagaaagaaacagcaaagtttccctttgtccctctttggttgtccagcctgacttctcctccctccccactatttctaacactttttgccaagggtccagggttggccccactgcccttcctttcagcctgttggtgaggcacaagcatcattccacattccagctggggtaccctaagccatgactctattttaacaataagcctttcagaatctgaattccctgagaatcgcagggtggctaagacggggcggcactggtaaaatccctggctagagcaacatatgcactgcctctttcattcactgtctcctgtttcaagtggagtggagggagcagagggacccacaagttccatccgtctagccccagggttgggacagaagttgacattcttctctgctgtcttgtagcaatctattataaattcagccctacttttgaagagtgatgcccatcagaactgagaaactatagacatagcccttaggcctcagtaactaagaaatgggccatggggatggggatagaggggttgtgtgagaagtccaggggaatggcctcctctgtgccactgcacgacagagctggcctccgacccttggggtcttccttctgagggttggtagagacctcattgctactcttttgatctaaggggacagactttgacttctgaagcttggcccaaggtgaggatgtgggcacagagttcacactcggtaagttctgaccttagaaaagggtcaggggtcggggatgagaaaggaggtggcactgggctgggactcacagtggttttttccaggcagtgcagcaggtgatggtgctggctctcgatgagtgaggttgtcttgcccatgttctcctcttctggggtgccctaggaagaaaagatgagagactgagcgtaaagctggtggctctccttctctccatctccttcatttctccacagaagggaggagggaccagaaaaatctggatgaaccaaattttagggtcaccctagaacatgttagcctttggctaggggcacctaagctaaagctggcttagggatacaatgataaccctaaggaagaggtatgtggagagggctgctactgggggaaagtctggggctttggggcagaagtgctggtgcccctgggaggagaaaccaagttcatcctcccttcca

SEQ ID NO: 31039 - DNA, 842 bp, Bovine  19866880364914
  misc_feature (1)..(1): n is a, c, g, or t
ncggcaggctggagtgaccctggaggtgtatgtttggggagcaacccttgccctggctcatgggccctgtgctctctcccctgcagatgtccatgaaggaagtgggtgatggcttgcaggatcagatgaactgtatgatgggggcgctgcaagaactgaagctcctgcaggtacagacggccctggagcagctggagatctctgggagggggtcctgccccaggttctcccgaaagcccccggacacagctcgagccccctcagtgggagggcagcagaggtcctgtcagacctggggcctgctccccctccaaccaagcttctcttggcagcaccagcagcggcaagtttccatcgcataggagtgtgtgtgggagggagctggccaccccgcccaggacaccgctgccagagccccagccctctgcccagcaggggccagagctggcagaacctgatgactggacctccacgttgatgtcccggggccggaatcgacagcctctggtgttaggcgacaacgtttttgcggacttggtgggcaactggctggacttgccagaactggagaagggtggcgagaagggtgagacaggggaggcgggagagcccaaaggagggaggggccagcctcgggagctgggccgcaggttcgccctgacagcaaacatcttcaggaagttcttacgtagcgtgaggcctgaccgcgaccggctgctgaaggagaaaccaggctgggtgacacccacggcctctgagccccgagctggacgctcccagaaggtcaagaagcggagccactccaagggctcggacattgccccttcccaggtgcctcggag

SEQ ID NO: 31040 - DNA, 1359 bp, Bovine  19866880366432
  misc_feature (1)..(1): n is a, c, g, or t
ncatttacactggaatcttcctatctccagcaatacagaactgaaaaccctgatatctggtggaggctggaactttgggacccaggggtaagactttgtattcaaggcagaatcactcccagattactcagtctcatccagacgtcaagtgctctaaaattctctgacacaggttgtctctagatttcaggtatcagtttaggtatcccttaactttctcatcagagttctctttgaagtttttccttccttgatcatagctcttaccaggctgtattttaactgactgtctacttatctataccttcctccaaaaaagctcctccagggcagaaactattttattcatcactataccccagcactgctactgctaagtcacttcagtcatgtccgactctgtgtaaccccatagacagcagcccaccagactcccctgtccctgggattctccaggcaagaacacttgagtgggttgccatttcctcctccaaagcatgaaagtgaaaagtgaaagtgaagtcgctcagttgtgtccgactcttggcgaccccatggactgcagcctaccaggcccctccatccatgggattttccaggcaaaagtactggagtaggatgccaccaaatgtcaaatgaacgccttgtaacttcagtccagtaaagcttgatctttcctctgtctcataggaaatgtatgaggcttttgggcacgaagtcacccagagcaacaagcccaggttgctgatttctgcggctatgtcagctggcaaaggtacccttgagactgtctatcagatccccgaaattcaaagtaagtaacctccaggcctgtgggcccaagttcagagctaattaaccctgagacctcccccatagattggctaatgctcagataccctggagagagaaggctctgtcccaaaagaataagatgatctcaaagcctgagagagacatgggaagccagtcaaaattcttaatgacaaaaggctacttggaaaagttagttgagtttcaaacttctataagacctgaaggtctgagtgcaatgagttattggttatagattgtgcgtcttctatatatcaacttttcaaataaaggtgagacagaatggagtaaagaatactaaagcataatccttcatgacatgattacaaaccatattcagttgggactaggacctttaggggaagtaggatggagagtattattttccttgggtcatttttcttctcttgtatcctaccccccacttcccaaggtacatggaccccatcaatgtgatgacctataaccttagggtctcctgggaggttccacaggagaggacagcccctgtttttaggaccctac

SEQ ID NO: 31041 - DNA, 490 bp, Bovine  19866880374532
  misc_feature (1)..(1): n is a, c, g, or t
ngctggtctgtctggccctcccgtgcagatgtgtgcaggggttgagaacacgtggcagacacaatgaggcgaggggcactgtcagagaagagaaaaagtggggagaaataatacaagccccagaattctgctcatgaataagaaatgccaggtctctcagcaccacgtcccaccccctcagcttttggtccttggatcccagcaatcgccatgatcagttatgggacagagaacagcagtattgcatcttgagggccaagattatgttatgttcatttctggcatccttagcatctttataggcatgcagtccacctgtggctaagtgaatgactttttattacattgtctgggttgagctcaactgggagcctctttattgctttcattgtcctttaccctccgagttacagatttgttcccaattcctacaggaaactcaagctgaggttcagaaaaatgctagctggggtttgcggagcattctgtt

SEQ ID NO: 31042 - DNA, 3309 bp, Bovine  19866880391353
  misc_feature (1)..(1): n is a, c, g, or t
ntggtctgaggaaccggactctgcctggcacacagcccatgaatgtttggtaaggggagctgtatgctaggtgccagtggtccattcgttcctcttgtcctagggcttcaactgcctcatggctagttttataagcagacaaataagacacaagtgaaggggacttccctggtggcccagtggctaagactccaagctcccaatgcagggggcctgggtttgatccctggtcagggaactaggtcccatatgctgcaactacgaccaggtgcaaccaaatagatagatagatacattaaatgcattttaaaaggacactagtgagcagataagggaataagataatttcagatagtaagacacgtcatgaagaaaataaggtgattgagtaaagggccactttaagctgagtggtcctaggagccttgctgaggaggcggcttctgagtgaaggacacccactgacagagccactctcagtgctgttaagaaaacatcctttctttgaaaaaacaacaacaacaacagtgaatcaactttttatttcactgaccagaacttccgattctctctgatgctgcatttaaaatcttgagagtccgcccaaatagcatccaggcttcctgtatccagaggcaggggccgaggggcaaagcgtgtcagggcccaggcagcggcctacattcctgagcacgtctgtgtcatttttaactgaaatgcccttaagctctccatcctgaaacttttctcagtggcatctgtggcagaaatacactcatctcttttgagggtatacacagctccatgggagtaaggggtggccattacacaggtgccagccaaacttcttattcagccagaaactaggcttctggctcagtttcatagcagggagatgagcacaactgtggtgagcgtcctggctcttctacaaggtgagctgggctgaatgtgagcgctgcccatgatagagctgaatttgactctataaaaaaagaaatatttataaagttgctcctatctctatgagtagtctatgagctgcttccaagaacccaggggtgcccacatctcataccccatccagacatggccagttcctcatgcatagctacatgtgaagcaaagaaaccatctgttgagacttccctggtgctccggtggttgagattctgtgcttccaacacgaggtgcacaggttcaattcctgggcagggggctgagatcccacatgctgtgcagtgtggccagaacaaacaagcaaaaaaagtctggcttaaaaaaaaaatcttttttatttaaaaaaacaaaacaaaacaccttttgctgactttggggggtgggaattgggcctgggagagatgcggaatggactttttattccccctgggaaaaaaaaaaaacctatgtgtatacccatacacatacatatccatgttcaaggatgtttttcttccaggactacaggaccccagaatccagccctcctccagtctgagagatgatgcctattaactgcacagatctggcatgtgaacatactgtataggacttccctggtggctcagtggtaaagaatccgcctgccagtgcaagggatacaggttcaatccctggtccaggaagatcccacatgtggcagggtaactaaacccatgaaccacaactactgagcctgtgctctagagcctgggagcctcaacaacgagcccacgtgccacaactgctggagcctgtgtgccaaaagcctgtgctctgaagcagaagaaatcattgcaatgagaagcctgtgcactgaaactggtgcgcagctcacagcacctggagaaggcccgcacacagcaatgaaggcccagcacagccatgaacaaataaatcataaaacaaaaacgaaacccacatactatatgaggctcttgtgttgtctcacaagctgagaggataggggcaaagggagtggatactcataggggatttgcttttctgtctaaaatccagtctacctggcaacactcttaggagaggctctgtgggcaggatatggtgggtgacctggtggtcccagccccctgcagtaagaagggagtgactgagcagggaccaaatagcatcgctcacaaagtctctgtgggctcagcttctaaacaccttggaaaggcctgggtgagcaggcttcactgacagaggccaggaagggggccctgtgtggggagaacactagcccagtgacgccctgggagtgtgcagctgtgttggggacacggcttgcactcttggtgtccacaagggaaacaatcgcttctcatcaccagagacaaagacttctgtctgctgaggatgccaagccagggaggtaggaaggtgggcagaggcaccgcagccgatctgtgatgctggcttgggacagggggatcccacagtaaaagtctgctgtcctcactgcgtgaacatggactccctcactagattaatgggaaatacaaaagttaccaagtatcatgactactttgagctttctttttgtaatagctcaaaactgacctttggccaaaattaaaccacagtgagcacatcataaatctcaactattactgggttggcttctaacactgcttgaagcaaggcttcaaatgctattcagaatgatgtgagttaccaataaatgaaaaatagttaaaagaaaagaaacatggagtccttgtggggagaggcagcaatacaggtgacccgtccagagtgagcttggtctggattcagaaccatctgctgagcaaggtcccggatcttgatgcagaagtctttgtttcctctgacagcttttgtgccacagcccgggaccctgtagacacaacgtgatctgctcgtacttgtagaacttgctgccaacgagtgtctcattttcagccagtgcccacaggtcaacagcacctgggctggaagccactaggatacctctggctctgatggtatcaagtgaggtcagcctctctggcctctgtctggattccagtggagtagaaaccttccttgggggcagcacaaaggtccataaatggccagagggagccagcccagcagctggctgctcaagctggaaactcaagctgcaaactggagcaggaacacccgatctgaccagtacctcacagcctccaatggatgctccatacaggtggacacattaaggggaagattccagtcccaggccgccaggggcacaaggctgggtaaagtttccttcagcaactccatatttccaacctagcccccaacggaggactgccagaaattcagctccgccagacccca

SEQ ID NO: 31043 - DNA, 4881 bp, Bovine  19866880412972
  misc_feature (1)..(1): n is a, c, g, or t
nctccttagaacctaaaaaaactataaacaccttgaaccaaatccatatgtaaaataaatatgacactgcatgttttattttttataatcatctgtattttttcttacatacttgtatatatagctcagcatttcaagtgaccctgaagtttaatagaagctatttttatggaagttaaaattttactttttatcaaatcagactactgttttggaaaggggagtttccttccctggcaaaagccttgagaatgtgaaccaaacaacagtgtgaaaaaattctctcactcttgtcaatacctccaaagaaggggcccaagaccctgtgtcagaaaaataacaaatgctaaattaccaactctgaaaaagttgcatttatgtggatccaaaggagaaaagaaagggatgtgtgtgagagaggtgagaaaggttaatattgactaatttcaagtcataaaaatacttttaacatgataataaaaatctttaaatcatcagattaaatggagtaaatgtttttagattgaggtatctaggcttatcttaatattttaagttgatttccagtgaactctcactattttcttcagaggatcctgtcccctaaagaattaggcctctcagcataacttagcaggtttcaccctccagtgcctcgttcaccagctaacacttaccatggggtggccttgaagggtacagcaggctatagttttctgaggcactagcagtatctcactctttgttatccagacacatgaagtcttgccatcaggctaagtaggggactaccctggtagtctggtgatgaagaatccaccttgcaatacagggcacacaggttcaatccctggtaggggaactaagatccatgtgagtacctcacatgttatcctgtgagtaacatgctgtgcgaaactaagcctgtgtgccgcaacactgagcctgcatactctggagcccatgagccacaactagagaggccaagttccacaactactgaagcctacattctctggagcccacacgctgcaactacggggcccacgtgccacaattagagcgtccatgcactgcaaagaaagctcctgcatgacacaatgaagaccctctgtgccacaacgaggacccaacacagccagataagtaaataaataagaagactaagtaggcatagaaggaccttcccaatacaagaagctagactacacttaatgcccattctgaagaaactatacttgagttattaaggtttgtgttggaagtaaaaggcctgtcttccaggcatgtcttggggcttcccaggtggctcagtggtaaagaatccacctgccaacataggagatgcaggttcgatccctggatggggaaggtacccttgggagaaggaaatggcaacccattccagtattcttgcctggaacattccatggacagaggatcccagtgggctacagtccatgagaccgcaaagagtgggagtgcaactgagcaaatgaacacacaccaggcaatgtctagatgagtactttgaacgtgtctctcatgacttttgaccttggcacacctagagcaacttgtgaggctttagggtatgattcaaactggaagacgggggcagatccaaactactagcctccctgggaagtccttttcacattgcagttcagggccgtggagccagtagatgagtctactctgatttctgctgcatccccagtgcttgccactctgcctgaggcacgtttggaattcagtatgatgatgaccgacagactaaatagatgatgtaataggaaagggggaagggggattattggttctttgagttttacatgaacatgaggaaggcaatcaaatcaacaacccactccagtactctttcctggaaaatcccatgaacagaggagcctggctggctagagtccacagagtcacagagtcagactcaactcagcacagcacagagaaatgcagtcaaatcaggaccttcccactccatgctgggaaactcggacactttgaagcactcctgaaatatttactctgtctttaagtgtcctctgggtcccaaaagccccaaaacaaggcccagcaagccattcaaagccttggcatgtatagaaaaataaatagtctcctatcaccagggctagtggtgtggtggtttagttgccaagtcgtgtctaactcttgcaaccccatggactgtagcctgccaggctccactttccatgggatttcccagacaagaatactagagtgggttgccatttccttctccagaggagaggctctcccaactcagggactgaacccataactcctgcatcacaagcagattcttcactgatgagccaccagggaagcccccgggctagtggtagaaaacataacacttgtggctgggaattagagggcgaggacccacaagtataatatttcagtcaagtgaagccaccctgctgaacattcactaggaactagcccttctacatgaatacacaacaaaccagcacaaggagaaagagccttgtaaactagtctttacactgtcatgtagtacttatgaggcccttgcccctccctgtgtcccatgctggcagacaggagggtcagagcaatgcagaaagacaagagcacctctgggctctgcattgctctgtcctggaggatttgtggtcaggaggcgcatgtgaagggagtcgcagcttttcagtcatagtacaggcttaggtaggccagacggttccgatgctttctaaagtctttgtctgtgggcagctgcaatgaaagaatattatctaggtcaatattcaaatgagaacccactgcctctggtcttcctggctctgtgaaataggcatgtatgttatacctgttgtggcctagctgaacctcaaccccatagtaacctagcctcactgagtctctcagcattgctctgtgcatctactctttgtcgtcttactctggaaatgtcatactaggaattattttctacttgggaagttgtcaagtatagctggtaggacttccctggtagtagagtgggtaagaatccacctgccaatacaggggacatgggttccatccctagtccagtaagattctacatgacatgagcatctaagcgcgtgcaccacaaccactgagctcacatcctagagcccgcaagtcacaactactgagcccacgtgctgcaactacggtagcctgtgtgtctagagcttgtgctgtgcaacaagagaagccattgcattaagaagcctgagcactgcaaggaagagtagccccagcctgctgcaactgaagaaagcctgcccatgcgcagcaacgaaaacctagcacaatgaaaaataaataaataattaattattttaaaattatagctggtgaacttcttgaaaagaaaaattatatatttaattcttgaatgttacccataggctctagcataatgatgttaatacatttggtgtttaatacatacttggagaattaatcccaggttccactggataataaagggcacctctggaattatgatagctgatatggactgagcatttattatgctacaagtatggcactaaatacttttctacaatatctcaatctttacaactttatcagatagagtctattattatatgcattttaacactaagcacactgatgcttagaaaagtaagattattagacaaaatcacacagcaagcaaatatggaactagaatttgaacccaggcagtctgttcctaaaatccatattcttggcagaatgatccacagcccttgatgatctaacactaagtggtgtgatgggaagagcagtggcttaggagtcatcagatctaggctctatttgagcaacttcaacaagccacttaatccatctgagcctcagtttcctcctcagtcgcagaggataattattttggactaaccacagaagattatttgaagactaaataagaaaatgtgacttctgttccatcatactcacctttaaaaatctagtgaaattgggtaactctccaaaaaaaattcccatatgtatatacacaaaattgtgcaagtaattttaggggaacaaggacttaactgaagcttattcacagacttctggttaagaatcactgatacacacggaagtattaggtaaagaactccagagaagtccaatcctattacctcagttctcagggttcttttctgtagacatggaacctgagcccagtctggagatccaaatttcattggccatctgactctcttgggtggctttatctctaggttgtatgtggtagggctagaaaaaatacagaacgtcatgtgtaatgagttagcaatcatatataaccttccacccctgatctagagtcctaaccctttgggaaaaggcagtcaactgattcacataggattcttttgcctgctaaagtatttctgattaagtttcagtgttcaaggtatctagtcttgacaaagtaaaaactcaaccccagtttaaaatatttctggaagttcagtctccttagctgagagatcaaaagatcccagaaatggtggatgataaagttaacacagtgatgcataagtattgctcatgatgtaaaattgaggaggaaagaaaaatgctaatttaaagtatcaacgacctgaggtcagtaaagtagaaccatgtacaattccttgacaatgggattatttaattatagcctttgttcataacattcttttggtatagactctttgctgtggaaataacatgtagagtgtacataggaatcaagattcaatatctctattccttactacaaccttgaaaaagttacactcactctctgatctttgaaattctcaccagtaaaaaaaa

SEQ ID NO: 31044 - DNA, 1195 bp, Bovine  19866880423736
  misc_feature (1)..(1): n is a, c, g, or t
ngaggggtgttccccgaagaccgcgtgcgtgagctagtccggtccgcataacctggcccagagagcggcgcccccgtcaggatcaggtccagccgggtgctcatgctttgcgggcggccccaagaatcctggaactgcagtttcgcaatgcccgcggtctgcagtcaccgggatgggtgactgacttggaggctgtgtctcctttccccgctcccatccccagaaccggggatcgtcccacaatcctcttgtaagaggagccaggcttggcctctgcctgtcaggacagggccctgggcagctgccttgccacacggcccgcccttgccttccacgaccctgcacacatcacctgtagtccagtggcctaagcaggaagctgctctcagggcctctgagaaaggagagcaaggaggagggctgagaggaagtcacaaagatcagcttaaaaataactctcctctccatgtcagacgtgcgcgtggagccaagttctgacagcggtggctcgaggcggggtctgaaagccccaaagtgaaccagcagacacccatctgggagcacacgctgtgtccttatcagccttagcaagcccctgccgaaaccctgtcttctcagaaacttccgcccaaccagcagctgtttcctcccctatatttaaacaaccaggttagtgaactggagagagcactgctgcccgccccaggaagaacacagtttcccatggaacacatagggcacaggatgaccctgagggcctgtggcctgtgctgggctcctgcctggcttctgctgggtgagtggggcccagagttccagggaaggcctccagccccatggtcccggcagtgaggcaggagacctggggggagggtgtgcccagatggttttctgggtgtgagcagtgtgtgataccttccaacactgaatggggtgaaggggacccccaaaaaagccagagatccatgaaacaatgcctatgtcacagccccagccccgagcaccagggagtgcaactcctcaacgagtcttgggatatagtcaggcctcttggctattttggggggcttcccaggtggcgctagtagtaaagaacctgcctgccaatgcaagatatgtaagagacctgacctgggttcaagccctgggtcaggaagatcctctggagaagggaatggcaattcactccagtatt

SEQ ID NO: 31045 - DNA, 1772 bp, Bovine  19866880435135
  misc_feature (1)..(1): n is a, c, g, or t
naggattccaatcttatatcacttgaagattgataaaaattagaatttgtaagcataatcgtttctcaaaatctcccatcatacatcccccttcagagatgttgctctgcaacatttttccccaacagattccagatctctatcttctcctccaccttccacaattaccaccattttcacttccacattctctgtcagctctttcgactaaatattttcctctatcttcctacttctctagacaaattctctctctcctttcacttctctaattctctatagcagaaaatatgataattggtcagtcaagatcttatttagcatggtggagacaaagaggtgctagtgaaatatgaaggaatagtctcatattagtaaatcgagtccacgtcccacagcgatagtcaaggcagaacagagcttaacctgtggggcagtttctgttgggtgttattttctagaatccagaagcaaatagaattctctagctctggctttaccagaactatccgatgttgtcccagcaggtttgtgcttgctgatgaatttcaggtgactcatgatagcttgcatctggttgtatctaggtattgagaaattcccagaaattacatctctaactcaagatctttgttctatgtggttgatcccagaggccagagcatgaataaaggagaaactgaggcagggacagtggctgacaggccaggggatgaggatggaggtgaactggggctaacgtgcagctcccttccctttgacacaaagactctttcatcagagaaatgcaacagaaaagaaataaggtagacacaactcagttcaataaaatcaatgcattatgtgttatgtagcctgccagactcctctgtccataacactctccaggcgagaatacctggagttcctatcccttctccaggggatcttcccaacccaggaatcaaaccagggtcttctgcattgcaggcagattctttaccagctgagctaccagggaagcccctagaaaaatacatacctacatccaccatcaacaacttacatatatctgggattgataatactttacatcttcctttccagatatgtcctaaattacattggttgaagtagttttgaggtcccagagcaataacggtttttaatttcctggaggcagcatttctgcatgagaagaaccgctccagatgatcactgataatgagataatgcaaattcagctagtgagcttacttcaaacagaaaaagtgccccaaaagtaaaatgtcctatcaaggggagtggccaagatggcagagtaggaagaccctcagctcacctcatcctatggacacaccaaaattacagttatttacagagtaactattgatgagaatgacctgaaaactagttgaaaagatttcccacatttaacaatataaagaaggaatcacaatgagatgggtaggaaaaacagagatgtggtatagtctagactcacacacccaggtaagtggcccacaaacaggaagatcatcacaaatgcagaaattctcccccaaaagtgaggtattcaagctccacattgagctccccagcctggggatcctgtaactaggatgacaagaatgtctgactttaaaggtgagtgggacttgcctacaggagaaccaaagggctgtaggaagcagagactctactcctaaaagacacatgcaaaatctcacccattctgagacccagtgcagaggcaataatttgaagggattccagtctgactcacttgctga

SEQ ID NO: 31046 - DNA, 1056 bp, Bovine  19866880441580
  misc_feature (1)..(1): n is a, c, g, or t
naagggatatagagggatgtggagggattttgtggcatcctcagagctgaagcaaagacttgccggactttgtaggctttgacaggattgcccccgcaggggcagcaggcagggagtccctgactgtgagtagtgggtgtgctaggttgtctttttctggctttactgggtgaggtccttatgaatcctgggtaagcatgagacacaagattttaaaggcattgaattattcacagaatttggagagctttgctcttgaaggccaatggggtcacaatgtcagagttatcgtttcttttgatgattgattttttcccacctggttatgggttgaagtgaaagtcagttagtcgtgtccaactctttgtgaccccatggactgtagcctgctacgtccatgggattctccaggcaagaatacaggagtgggttgccattctcttctccagaggatctttccaacccagggtttgaacctggatctcctacgttgcaggcagactctgtaccgactgagctgccagggaagctggttatggagtatggctccttaatacacctaaaggcacaggattccctaggtcaagtgtcagcatggggaggggatgctaacagactgtcagtggaggccatcaggatagggtggagtgcaacacaggatgactataatgtggttgtttggccaaggtgactaaacatctatggcatgaacagcctggccaaggctgccagagtgaggagaagtagcatgagaacagagttcagagagagagagaccagccccgacattcgataccagcagttcccatggggttggggggtgggggcatagacagacgtggcacatggacactcacaggataccaacactagttccatgtcccaccaccccctccaagcccctggggaggtcaaaaaagggaatcagaaaggcacaagaaaactggaagcctgagctggtcctgggtgtgacagcagaggtggagtaagccccagaagaatcaacagcgcatgcagagaaccagaccagggggtaaaaagaggagactccacaga

SEQ ID NO: 31047 - DNA, 715 bp, Bovine  19866880453218
  misc_feature (1)..(1): n is a, c, g, or t
ntattccaggctccttgatttcataagcacaatgacctatgacttccatggtagctgggacacatgtacaggcacaatagtctcctgtatgtaggaaccaaggattgatgtgacatgggttattccaactgtgtaagaaagagaagactcaaatatgcagaaggaagatggggaagggatttggagccttggttgtgggaaaacaggctttctctttgggggacaattagctagactttgttaataatgtgggacaaacaatggtgaagaataaggtctgtgttgcttctgcagggatatgctgtgaagtactggagagacaacggcatcccttcagagaaactcatcatggggttccccacctatgggaggaccttccggctcagcacttctgacacctcagtctgtgccccagtctctggaacagggtcatctggtccttacacacatgatgctggcttctgggcttactatgaggtaaccaccatggctaattcaggctaaaatgccctggggaaaattcagccctccaagtcatcttgctattcttatattcttgagattttataccctggctttcacaggtctgtggaaaggaaggttgatggctgtggaatacttttcacttaaaaaaactatctgaattgtcttttggggttttgaagtgtaggtaccatctttcccacagcccaaagctatactaatttcattgctg

SEQ ID NO: 31048 - DNA, 788 bp, Bovine  19866880458534
  misc_feature (1)..(1): n is a, c, g, or t
nctggttctgggcatggggctcccctgccagagatatgctgttcccatctgtaaatggcttcagtgcctggaaaagtggccacagacgagtgcttagcagcaaacagatcactccccactgagtcggtgattcaccagggcagaggaccagcctccaggcacagggaggcagtagccgtgggaggtgccgggaaggggcatgggactctggcccacacttaggacagatttatttcttctcctgtccatagcctgtcgggctattctgctagttcttcaacttattttatttttttcccccgaaggctggagagagtttccagcccagctatacagggcatttccccagagaggcttagaaaccctcagaccaattagttggaaacctgtgactagggtcttttttactctcccttctcagcaagcagacctctctcctctgggaatgggcctccctacggcaggtgcaggagaagagggagggtgggttgagaggaagggaacggggggagcaatgagggaaagagtttctggaaggggagagcaggaggaggggagcaaacagagaagaaaggcaagcacacacagagaagaaaacagaaaggagtggggttcgtgctgttccagtgatctgtgccttggggccttaatgtcacattgcgatgcaagcagaaaatcagtaacaagcatttctgggccttgtctcggtcatccagcactatgggagaggcacaagtgtgaaatgctgccttcaccccggaggggcttacggttatgcgaaagggtcg

SEQ ID NO: 31049 - DNA, 529 bp, Bovine  19866880489266
  misc_feature (1)..(1): n is a, c, g, or t
naaaaaaaaaaaagaaagaaaatgatttctgaattctcttccttccaaaacccagtcctccagctgagtagaaaggaaacgaatattgacttctaatttaattcctacaaccctggacgggaggaatccttttcgcttctctaaatgagggatcggggataagggaggtttgacttgtcaggttcccaggctctatggaagcatctgagcaggctctaccccggctctgctagaggtcacattctccaggtctcctcttcgcccttgggtgcgggttggggggcggggcgggggtgacgtagccgggaagagaggttttgtagccggcggctctgcaccgggcagaatcgagggctcccacgaggggagtccagggttggggaggggcggggcagggcggtgggcggcccggggcagaggcagggtctcccgtgagggcgccgcggccccggcgctgcaggcaccctgcggttgccccaccagcttcctggctggaaggacacgtggccccggggccccacagcggttt

SEQ ID NO: 31050 - DNA, 1032 bp, Bovine  19866880507114
  misc_feature (1)..(1): n is a, c, g, or t
ntcttgcctggagaatccctggcagaggaacctggtaggctgcagtccatggggtcgctaagggttggacacgacggagcgacttcactttcacttttcactttcatgcattggagaaggaaatggcaacccactccagtgttcttgcctggagaatcccaggggcagggaagcctcatgggctgccatctatggggtcgcacagagttggacatgactgaagcgacttagcagcagcagcagcagcatgctggccttttcatcatgaagcacagggaagccagcaactccatggggtggcaaaagagttgcacatgacttggccactggacaacaacaacaaagctggccttacttcaagtaaggagagaaaggtccagcggtcacgcgcagggctgcctctgagtccagggtacaagaagaagaggtccagaccatcaaagccatgtgtcctcaggagggggatcactgaactgacaaacctttcccggttggaaaatgtggacagcatcatggtgaacctgcagggggaccagggccgaggccaggagtgctttctgcataaccgtgctccccccaaccactcccctgcaaggctctttggttcatatgtgactgaggaaaggaaggtggaactttaaaactctcaaaccttcttaagtcccttcccagccctggacttcaggctccagggaggatttgcaaaccacacctgcccctgccagatggaagcaacactcagcctggggtggagacagtggctcagaacagctctgcctttgaaatgttcacccctggccaggcactgactctttgtctaaacagataaggggagggaacatgagaaaaaggccagcatttccagaaagatctctgagctaatgggcctcataacatggcacaagagggccaggctctgaccaggggttctagagtctttgctattctgtttattagctgtttgttctccattttttctagtattttctcttccataggaagacattatggaaaatctttagaatagtaaag

SEQ ID NO: 31051 - DNA, 1774 bp, Bovine  19866880528949
  misc_feature (1)..(1): n is a, c, g, or t
ntatttactttttaaaagggaagctctcctttcctgtgtacatacttgtctaggcagtattaacattttcccccagggctgtcagcaaacatctgcagccattgtcattaactgtccagcactcacataacacagccctaatggtttaacttagattcctgtcattttgggttgggcagtgataggctttacttatacataccagtactgtacatgtattaccaagttagagtgaattaacactgtaaatagcaaatccataattaggtccagcatgtcattaagatgactttaattacacgtttaagatcctgttgttacataattgagcttagctcttttttttttcccctacccttttcccccacagtacagccaagttcacagtttatcattgctaggggattttaattaggatacttctgtatcttaattagaaattaggatacccattagtcttgaaattaattggattctcttttagggttgtcttttttgtgtttgctttttttttaaaaaaaaaaggaaaataagctggaggtaagcatataccataacacatgaagatactgatttcatttttcataagcattttccttggaacatttcagcagttacctttcccagataagaggtgtagttattgtgctggctgtggaaggaatctgctgaaattatcagtctaggtgcacatccccctaatctgttaggagctgtaggtaggttttaggcagatttacttgagaatgttttgtggtgtagtggaaggagtgtttgtcttagttgactctctgctaccaacttttttaccttgtactagtcatttaacccagagaaggcactggcaccccactccagtactcttgcctagaaaatcccatggacggaggagcctggtagactgcagtccatggggtcgctagagtcggacacgactgagcgacttgactttcacttcactttcatgcattggagaaggaaatggcaacccactccagtgttcttgcctggagaatcccagggacgggaagcctggtgggctgccgtctatggggtcgcacagagtcggccacaactaaagcgacgtagcagcagcagcagcagtcatttaacctctcaaagtccaatagtctcaccagtaaaaggagacagttagaccaaaagatttttagggtcccttccagctctaagatttaactggtacatgactaataagataattttctagagaaaaggaatatctttttatgagtatagagagcctttatacatttacatacatgactactatgaattggtttaatgtctgacttctagaatactaaatccatacatttatatagctgttcaagttagacataaattaggctagcagcattaacatgtagagaagtgtttgggaaacctgttgctttggatgattctgacttaaagaatataactttgggtaattaaaagtaatctttaaaagtagtgtaaatattgcagtaataattgctaaccttttaaacctaacctaaccttaaaaagggcttccttggtggctcaggccataaagactccctgaagtgtgggagacctgggtttgatccctgggttgagaagttcccctggagaagggaatggcaacccattttagtattcttgccttgagaattcgatggacataggaggctagcaggctacagttcctggggtcacaaagagttggacatcatgactaagctactaacacgatcactaacctaaaaaaaggtttaaaggtaagagccct

SEQ ID NO: 31052 - DNA, 6617 bp, Bovine  19866880586304
  misc_feature (1)..(1): n is a, c, g, or t
nccgctaacacacacacactgttgctgcttagccgagtctgtaattccatggtgcttggtgcagttttgttctgcccactctaggaacataatgtgctgggaatgagactatgctgctgctaagtcgcttcagtcatgtccaactctgtgcaaccccatagacggcagcccaccaggctcccccgtccctgggattctccaggcaagaacactggagtgggttgccatttccttctccaatgcatgaaagtaaaaagtgaaagtgaagtcgctaagtcatgtccgactctttgcgaccccatggactgcagcccaccaggctccttcgtccatggaattttccaggcaagagtactggagtgggctgccattgccttctctggaatgagactatggtagacaggaaaagtctggttgaaattgccaggctttgcatgatcccacttctgccaccaagtagtgctgaagtcctgggcaagtagcttcactatgccttagtttttctcacctatgaaataagtgggtggaatgaaatgacctttcagctcccagtgctataatattgataggataattctaagtacaaaaagggtatgtacacacgtgaacttagcttatgctaagttttcattttaaagcaagatgttgctcaagtccccaaagaaagagggcatctgcagagggcaagtgctggtgttgggctcctgtcctccataactatgggacaagatctgttccatcttttattcttataaataagattggaacacagccatgctcattcatttacctattgtctatggctacttttgtgctacgacagcagagttgagtagcttgaacagaggatgtatgacccacaaagcctaaaatatttatttattttctgtttccttacacaataagtttgccagtttctgctaaggcaagtcagtgagtggggaagagggaaaaaaggactctctcagtggagctcggaatataaacctggggagaccatgggcagaccctgcgtactccccactgtcctgcaaatcagcttatagcaagcaggtcacttgtatttttccacggcacatggataaggacccttgaatccttgggagctctgcccagtgacctggcagtctggtgagaggctgtccccaaaccaccccagcacacataaacacagagacacccatgtgtgtggacgtgcacacatacacacactcacacagctggcgtgggtaggttagggcagggagatactttcatcccaagcatgtgacaaggacagagtcctaatccaccttgtacagaggcatccaacccaaccaggctattctcatccctgccagggtcccacatcaatctgctccagaaacctccccagtccctggcagagccctaagcagagaccagggtaggaaagagcctggggcacaatctgcggtgcccaggagcagagtcggtcccaggaaagagtggggaaagctggtcaccagcaaatagagcagactggatgccccaagagctccacttagcaatgcgatgtgtgaacggagcaatgagctgccagagaactgggtagcaggaagtggctggagctggaggaggggcacagaggtatgtagtagaatcagcagtgatgaaaggaaaacacactgccttttagcctgcactctctgtgctcccccccagattgtccaggcttcggctgctcagtttgggatttgggggcattccccattcttctataccctctggagctggcaggcccctctgtctagctgtgccctaacagccagcactgcaaggcaacccttgatctccaccccagagcctccagcatccatctggcaggctgtggggggctttgatggtctcttcctcaccatgaagctgatctggtttttgagggcgatgagggggaaacaaaacctcccgattaattctcacatggcggccgcctgaggccatatgccgtgttctccagctctgccattatgcatcttgcttgtaattgctttagaatgacactcatcatgctctattttatcaaccaatgacagaccaatagaggagaagggaaacacacttacacactcgcacttacagaggaagccagactacataacagacagagcgattgtgccgaaatttaaaagctggactctgtccacttgtctaaatagactacattgcgttcactgtgactgcttccgagtatcaaaggtaggtgaggttgccagtggtggatgggctgacacaagcttctagaagcactttgccacgcttgccccactccctctaaacttttcacaaaaccctcagccttcttggctttaattactcaaggaatgaagatttctttcctggatcaaaaaactataaacagagagggagagagagacatttctctgtatttaaacactccaccgtgagcaccctaaggtgaacagccctccgtttctgccttcctgggtcttcctgtgactccctttgatctaggaggctcaccccatcccccacgttgccccctcagcagtcagggcctccctcattcctaaaggtcacaagggagggaagctcccaggggcctccatgaatgagctgcagacttgctaacttcactcactgccgcctgcttcctgggaccactggagtaggaatacatatagtctctccctgccctccactgtgaagctgggtaagcccaagaggccagcaactgtgacaaatgaactgcagcatcttcagtgccaacactgtcccagacagatgctctgtggcaggtatggagtagaacactgaacgccctgagggggcagaaatggttgggtgtgagggccccacagtcccagggtcccacagtcccagcaacatcccccttatctatgcatgcatgtgtgctgagttgtttcagttgtgcccaactcctggtgaccccgtgaactgcagcccgccaggctcctctctccatgagattctccaggagtcggttgccatttcctcctttaggaggtctttccaaattagggatcgaatcctcatctcttacatctcctgcattggcaggctccctcatccgccttggaccaacccttccattcccactgctgggaccggcagcctcttcccaagccggcttctcagtagatcctaaacaaattctctagcatcctgcagtccctagctaattagggtttgaaatctgggcccagagaatagagaaaatatccccaagctgaagatccattttgctgaagctgctgatcctcagggcacttgcgaaagctccactcaggaagccagagggggatagttcatggtcctaggttaccttccaaacagagaaacaggaacttcgatgaggtggggacatgataggagcaaaagaccagcccaggcgaggcacccctcccttccctccctacaggaccagtcagagcatggacctcagtcccctccccagcctagagagctttcaggtaaaaacactggaagatgcttgggaaaacctgggcacagaggtggggtgggggagaaatcccacgttgaccccccggctgagccagggggagaggcatccagcaccagcgctatagtcccgcgtgcaaaaccccttagctccaggggagacgcgggctctccaaccccttctcacaggaagacgggaatgagcttacatccctgaggaccgggagagaacagaacactctgtttccagagcactctcccatcagctctcatctctctatttcttaatgaggagcctgaggggagtccgggcctcggctgtggagcaggttagggagtaatagggggaaaccccattcaaactcatgcttcccactctagggaagcttccagctcatgccttgcctcccctcttcccaccagagcagtggggcatcagtctgggagtctgaggagggggccaggatagggcagcctggactctgtgcccttatcctggggaggagggaggtgccatggagggcgatgcttgctcagccctggggacctggacctggacctacagcccgacctactttgcagctcgctggcccacctgccaggggccagcagccaggatcttggctggccgcagaaggcctgtccacctgcactcagcacatgtgcagtgggtgtcctcagtcagccctccgacagcaaacactgacaccagggagcccactgtactccgagccgcccagtcacccccggcagactcagctggtgcgatgtttcctggtctttgttgaatgtgtccaatttcctgaccagctccctggtaaataatcatttcctcgttcactccaggcagctccaagctagagaagggcggaggctgccttgctggggatgctctttctttggtttcgttggtgtctgagagccagggttgacctctgctcagagcagggggcacaggctgcttggtaaagacccatcttgtcctcagcagcagccagcagtcactgagctccctccttgctgccacgttggatgctgtctctgcgtcttctctccccaacccttaaggctgaaactctgcattaaggcaaggagacgggatgagaatccagtgggatgctgatctagggaggtgggtattttaagggaagtcagagggagacattaaagacctctcagcatgaaggcaagggcataggccaggaaagaaattgatggggttccaggccgcctttggttgctgcttggccgacactggggctgtgatctcaccttcatggtgtctaaggcacaggggtccacagagccctcctcgcctgcgtgggtgtgcacacagagccgagcccttgggcagctccagccccacttctgttctccctgaagctcccgccctgagttttcctggcccgagctgctggcacaccatctggtactcctgggcgagccaagcgttatttaccagcgacagctctgttcatctggccgtccctgcccaggagcaagggcagaaagagaccctccaagtgccggtggtggttcacgctggccactcacacgtgctgggcactggcccaggcactgcataaacgtcattagttttcaacctcacaggaatcctcgtttgcctaaaggagaaactgaggctcacagggggacttctgtttggtcgtgccctaagaaagtggccgagcattcaacaaagaccgggaaacattgtgtcatctgagcctgaggagggagacaggactgctcagagctcaaagggcttgctggcattaggagcagctggcattaggaccccgacagcctcaggtgggtagaggtgagactaaggaggctagacgttcctagccagggggccatggcacacaggtgggcaagaatggattacaggtatgcaggcaggtgcagatctccgcagcctccagggcagccaggtgaggctgggagagcagagccgctggtgagcagctccgcctgcctccagcagcctggccagctccagaggagcaagatcaaaggcatggccaggtgaccccactgggaggcacagatctaaaggaaaagactctaaaatctggagtgagtaaggaggcacaaattaagagaggcttttctgagacagaactgatgttcatactgtcaaaattcttgctctgactaggaggtagacacaaaggtcgggtggagaacgggacagattcttgctcttgcaaagtcaggaaaaggaggggctctgatactccgggatggaccgggtgggcctacactgctgagagaggaggccctcgtgctgggtcctagagagggccacttccttcacctttctccccatcacccaaagagcatgggcctgagctctgccaaggagcataattacaggtgtcatggcaatttatctgattcatttcatgtgcccggtgactacatgtggtgagattttcatcacctcaagaacaggcacacacagtcagcacaacaggaatatttgttgaatgaataaaggaaatgggcaatagtggattcaaattagcatctgcagtggaaagcctgtgctccccacaaaccccaccccaacacattttttgtgtaaacaggactacaaatccaaggactgctgacttgctctggttcaggtttaattttaaacaattaacacaaagaaaaaaaagatatttaactcattttttacaatgtagtcacaacccccccacccattaaaataaaggtacccttataagttccattaaataacgctgccatactaatgagaggcattcatatttataggcataagggagttttatggatgctgcctgaaagatgacaagatgttttttctttgcatgtttgatgtattttataattttttaaagtaatgatctaacatcttcacttatatgaggtccccggagtacacaaattcagagagataagagccccatcaattctctgtggattctccaggtatagagttgcttttcaggggaaatctgtaggtgcttgggggcctcatctaagaaccagaagacccagccctggtccaggatgatgcttctggtgagaggaagggtcacctttcagcaggccaacctgagaacaaggacctggagattttctcctgcccacaatggcccagggttacactgggaaac

SEQ ID NO: 31053 - DNA, 960 bp, Bovine  19866880602891
  misc_feature (1)..(1): n is a, c, g, or t
ntttaataagggtttcatagaaaaataaatgctaatattgaaggtcagcctaatttcttgaggtttttccacacctttaagacttagcagacctggaaaaccctcacagcagacctggtttctcattagagcatacaatttcttttttttttttttacccgcgcgctcggcgccccccccccccccaacttcggccgaggaggccgctgccgccgagccccgaggtgctggcttctccagagcatataatttctaacaaggaaagaatgtaagtgcctctctctcagccaggcaacagcaatgatgagacttctgggggcaaagggcgtgggaagatgttaggctgtcttgagttggaaaaggagcatctatacaccctgggcattcccctactgtcacttacttgcactcttcaggccaagagcatccttcaaggtatttatcagggggaacttgccctggttgcagaaagtgcctgtgaaatcatccaggtcaatggcccagaccatggcacctccaaagttgttctccttaagccactgagcctatttaagaatcgaggacaccaggagtcattttatttcttgagactctgggctgagctgaaagcacattggaggggctgaccttaccttgattctgaagctgttaacattgtcataaccaacccactcagtgcccttgtaggcatagggcacattctgagagtcatcccatgcctcagtggctccatctttcaggaaggcacagatctttaaaaagtcaagagattcaaatcctttaaatatgactcccatgaaaaataaaacatacaccttcctctttgatttttttttttttctgtcatgtctccaattggggttttccacaggtttctaattatggccttttatctacagtaaatagcaacaagttgtttttgaaatactcagatgttaaccttattcttagtgcttgatt

SEQ ID NO: 31054 - DNA, 3252 bp, Bovine  19866880623735
  misc_feature (1)..(1): n is a, c, g, or t
ntggcgcgctcctgctcggggcttctagcctgagtggccgctgctgggctggctctctctggcttttcaaggacccttgtgccgcccccaacgaaggtttctgctctgctggagtccagacggaggccggagtggctgacctcacttgggtaggggaccgaggtatcctagtggcttctgattcaggtgagtcacttgctcctcagctgtacaggtggaatggaggcttggggtataggtcgggctgggctcaacttttaatgtcccatactcggtggaggaattccagatgagctgcttcagatcctaaaagatgatgtagttaaagtgctgcactcaatatgctggcaaatttggaaaactcagcagtggccacaggactgaaaaggtcaattttcattccagtcccaaagaagggcaatgccaaagaatgttcagattcacacgattgcactcatttcacatgctggcaaggtaatgctcaaaatccttcaagctaggcttcaacagtatgtgaactgagaacttccagacgttcaagctggatctagaaaagacagaggaaccagagatcaaattgtcaacatctgctggatcatagaaaaagctagagaatttcagaagaacatctactgcttcattgactatgctaatgcctttgactatgtggatcacagtaaactgtggaaaattctaaagagacgggaataccagaccattttacctgataaacctgtatacagatcaagaagcgacagttagaactggatgtggaaaattagaactggacaggttccaaattgggaaaggagtatgtcaaggctgtttattgttaccctgcttatttaacttatatgcagagtacatcatgggaaataccaggctggatgaagcacaaactggaatcaggattgccaggagagatatcaataacctcagatacacagatgacaccactcttatggcagaaagtgaagagtaactaaagagcctcttgatgaaggtgaaagaggagagtaaaaaagctggcttaaaattcaacattcagaaaacgaagatcatggcatccggtcccatcacttcatggcaaatagatggggaaacagtgaaaacagtggcagactttattttcttgggctccaaaatcactgtggatggtgcctgcagccatgaaattaaaagacgcttgctccttggaagaaaagctacaataaacctagacagagtattaaaaagcagagatatcactttgcccacaaaggtccaatatagtcaaaacgacgtttttttctagtcatgtgtggatgtgagggttgaaccgtaaagcaggctgagcaccaaagaattaatctttagtaactgcagtgctggagaagacttttgagagatcaaaccagttaatgcaaaaggaaatcaaccctgaatgttctttggaagtgctaatgctgaagctgaagctccagtacattggccaactgatgcaaagagccaactcattcgaaaagacccagatgctgggaaaaactgaaggcaggaggaaaaggggacaacagaagattagatggttggatggcatcacttactcatcaatggacatgagtttgaacaaactcaaggagttagtgaaggacagggaagcctggtatgctgtagcccttggggtcacagagagttcgatgtgacttagagactgaacggtagcaacaacatacttcgtgcttgggggagcttgaaggttttggtcccaaaggagaataactgtgtgggtaggatatacctgtcccaagattctaaattggtggacattttagcaaaattcataacaaaattaagacatgaatgaaactgtttttctctgtatccacccaagatcaagaatgatgttgatcttaaagatgatgctgaaaccaatctatgctctttccatctcttcccagtttcttacatgtctttattctgctttctttgttttgaatgtcagacttagtggacaaaccagtggagggtttcatgttttaaaaaaaaagaatagaggtgttggcaggtattgcatggaaggataaaggtgggacaattaatgtccaaataactgggactatttaatcatactaaactgtctgctatccatatcattatgggagatgtcatccttgtctttcgagaacttagcatccctagaagtgaaatgctgtcttgatgtaaccccagcttgtttccttcaccgtcttcccccaccctcaataggtgctgttgaattgtgggagctggatgagaatgagacgcttattgtcagcaagttctgcaagtatgagcatgatgacatcgtgtctacagtcagtgtcctgagctctggcacacatgctgtcagtggtagcaaagacttctggtgggtccccgctctcattgctcctgtttctgggccttctttgggtgtcttagatgtcacattagcctcattaagtaatgttttgggctcattataagaacccagtgactaattacggcatacctataaggtttcttggacttccctggtggctcagatggtaaagcatcttgtttacaatgcgggagacctgggttcaatccctgggtcgggaagatcctctggagaaggaaatgacaccccactccagtactcttgcctggaaaatcccatggacggaggagtgtggtgggctacagtccatggggtctcaaagagtcggacacgactgagcaacttcactttcactttcataaggtttcttacaaggttttcttagagattttgcagtccattgtaaaagtagactgtaccagaagtccagtagatgacaaagatgtaggaatatacatttgaatacatgtttttatatatatagtgtaggtcaaattaagtctctgtttcctttgcttcttagcatcaaggtttgggaccttgctcagcagatggttctgaattcataccgaggtgagtgcatcttctttcctttttagttcctgttgtagctattttgtttttattctctcctttgtgctctttgagctttccttggatgtcagtgacaccaattctttgctctcctgcctggtagttttcttccaaaactatggtcaagtcccagtgttgactctagctcttaatctccctatatctttttaattgacaggctcatcaccttcttgatcacctgaggctcaaactcccagtcctcttccactcctcctttttccatctatcagtggtccccaagttcttggaattttttt

SEQ ID NO: 31055 - DNA, 1684 bp, Bovine  19866880649400
  misc_feature (1)..(1): n is a, c, g, or t
nctgctcccggagagaaatactggcgggtcctccctgtgctgtgaaacacgcccatctgtcttttttgaactctgtttctaaatggatgatggtggacaaattcttcattctgagtctgccttttccccttgataacttgaacaagggcggaggaagcaatgtgggcatggcagctggcacagaactgggcccacagcctggcttaccaccccctgtgccagtgtgtgagcgctactggggagggtctgtgttgccccattaaggctactccagacccagcccagtgctccccttaagaggtgcttgatgaatattgaacagaaggaaaatcattccatacctaccaccctccgcaactgtgagatacaggcctgctgggaagcactgaggacacgctccccagacactggtctcttcagggctgactctcccagtctcacaggagcagctctactcacacccagctcccctgtcggtgctcctggcttctgaaacaggaagctcccaagggagatttgcaggaggcagtgccctctttttctctcttctccgtgcttgccagggtaaccttgcttaccctgttccaaggggtgtgtcatcactgggaatggtgcccacccacccagggaagcagaagcaagggaccttgttgggctcacagaagtcccacccatgactcttcggagtgcctcagatctaaaaatgctcagttccagacatgcagcctgctggtcactagcccctaagagccactcaggccccccacttgccacaggtgatgctctcccagtgccggtctcagattaccccaggcactaatcacagtttccatttctcatgtgtcgttcattctggaggaccatgcacatcactcgacgctgttcaccactatgaggggcccctccctcgcaggctgtgagggttgctgaatgttacagccaccttctgtcaaaacagctgcacggcacaggaggcacatgaggttcatcatttaacttgaattacatttattcatatttgttcttgaccctaaacaccaaacatcatcgactctttcattacccctggaatatttcttaatttcaaaggaacaaagaaataaatttcttttaggtcatgggtttagactcagagccaggctgtggagccagttccaatcactccagtctcccaagataacatctcgttctgtccctgtccctccaagatgagtcaatttgctctggccattcccaggggaaggctagaccttgctttaatgaccatgacttcagctggggcaacagaactctaggtcactgcaagatggcccagcccgtgttcccccctccccctactcccaccccgcgctgagtgcccatgactagggctttttgtgtgatttggcagttggcaccctctccctttcctgccaataatggtggctgttgtttctgagcaaatggaacaaatgaccaatgtgaactccatgcaatctatgaactgaaaacatctgcagggaggcgagggcagccactggctggggtgggacttggagaggcagaggaggggcgggggagggagattcaagaacccctgtaccacctgccctgggccgctccttcagtcccactgcaaacttgagagctgggtgttgccagtctctgcacatgagagacagaggtgagcagctcaaatcctgaa

SEQ ID NO: 31056 - DNA, 992 bp, Bovine  19866880652972
  misc_feature (1)..(1): n is a, c, g, or t
natgatgatttgttaaaattataaagcaatgaattttggcctgcaaatattctacattagaaatctccaccactggggatctgttccccatgacgattttactctgaatccaggataattacaaacacatggtattttttcttgcatgctttcttgggccaaccctgcatgacaacacgtacatttacaggatggaacttgaaattcccattctcacacagggatagttaagaagtgttatcaataacaaagaataaaagttatacaacattgattattataaattattcttgtttttaacctccccattcgcctcaatatgttcagattctttcccgcagaaaacatgagcttcctatgtaacatcgttacatcattaatgatgattagaatgagctgtggagaccttgattctgaagacatgtatatgcaggtgagacgcaatctgattgcaaacactgacacagtagcgaatcaaatcaaagaaagagaagacctggaaaatacaaaaaaaaagagagattattagattctcagcacctgctcaggccatccctaaagctggagaggcttctgactttctcttctcctgaaattcatcttcaattccatacaatttagtaactcaatttccccacagatctcctttataccaaggagcaacaaactcagtgaatattttatgttttgtggaccatactttgtcacactgttcaactctgcctctgaagcataaaagcaaccacagacaagacataaatgacaggccataactatgtttcaagaaaactttatttacaaaacctggccactggcccacacagtatagtctgccaactactgaaatacggaatttatgagccaggatgtaggcaggactaataagaatacaaaagaatgactaaagacaaagtcacaaggaactctcatgaagtcccatgttttctggtattctaaatcattacaattaaaaaaaatttttggccacaccc

SEQ ID NO: 31057 - DNA, 1361 bp, Bovine  19866880667472
  misc_feature (1)..(1): n is a, c, g, or t
ncccagtactctcatttctttattgtctatcctacaaaagaatgttccatgatggcaggcactttagttcacctctgtatgcctagaacagtgcctaggatagggcaggcattcaataaatttggtgtatcaacaaatagagacaatgctataaaatcaagttaaaatcccccaacaaaattactccaaagacaagttaaagcaatcaaatcaattgttacactgaatcactcccacactctacttttgaaaacagctgacttgatttttctggtgtatgtggaaaaggtaagaagccactaaaattctagattaacataaaccagagcatccaaacatactatcaaacactgggcaaatgctcacctgttacaccagttttaggataaaggaactggaagaattcctcagggatcagcccaaagcgaacttttcctccatgttcaggaagaggtggtacaggggcaagacttggctgccctgtgtgaaagatcctcgttgcctgcaataccctataggtaggaattatacaaatttaaagcttattctttaaagagaacacaacatatgaacaattgtagaaagaatggatagggatgaggattaaggtagtttccccctgtcctgatggagagagaacaaaccaagaacaggaaggccagggtccaataattagctgtgacaaggggaaacaacttacttaaagctttatgtaatcttctacctaatactagaattcctctgttaaatctcatagataatctgtctagcaccttacacatctattaccagcactaaaatatgtaagaacacagactctgcagccaggctatttgggttcaaattctaatttacacttttgtaatctgtgatttctctaagtaaagtaaaacaaagaatatgaccttagaaggttgttatgaggattaactgagttaaaaaagtaaagtatattgaatggtgctcagcatatgttgttttatgtaaatggttagttattacatagctaccgtgttgtgagctccctgatggcaagaactttgaccattctgaatattctgtgacggggtgctaaacaaccactaagtgaaacaggcttttgcagtgttggatatctctatgttcatcctttgaactgctaacgtacatccttaaaacttctattgattagttctaattttattcatttattttgtaagataacacccatgtatctgggttaaataaacatctcagttccttcacaaacctgattgtccattacaagcagcaatctgattttgtttaaaaaaatgaagtatacagaactgaacatgatactctaagtacagcttgaccaatccattcattctacaaacaca

SEQ ID NO: 31058 - DNA, 969 bp, Bovine  19866880684508
  misc_feature (1)..(1): n is a, c, g, or t
nttgggttgtttagtcctgatgaagatgctatttttagcactcaggcaatttgggcttctctaatcagggagcagggaataggcctactgaggggccagcagatttagaattccagactgagcctgttaggactagaccagaaaagatgacattcttgggcagagattggctggaggagaatccgatattttctagccccacaaaggaaaagatgagaggaaaaggtgctgagattgagcaggaaggaacctggtgggatgaccagtgaggtagcaggctctctggtaggttccctaggaaagctgactctcgtttgctttcaaaaaggcaagtgcagtcatccaggaggttctggcaactgtgaggaaggtctgatgagagagagaaaggctcaggatgcggagacaggcagggtcaggcttcctgtaagaggagcctgggggcttccccagtggtgctagtggtaaagaacccacctgccaatgcaggagacctaacagacatgggttcagtccctgggttgggaagatcccctggaggagggcacagcaacccactccagtattcttgcctagagaatcccacagacagaggagcctggcaggctacagttggggtcagagagttggacatgactgaagggactgagcatacacacaggcagcgtggaggctggagcaccagacagggaatctggtccccaaaagattggacagagggacccaaaaaagcgcttagtcacagaggaagtaagtccaagccaggaagtagtcaccatgctgtgagagcctctgggttgagcagtgcccagccaggccaaatggcatcatcttgtgaattagaaaaagtccctcctcctgctccccacccccgcagatgcagcacacagatggcggcctctcagacaggaccggcacaggagaagacacgcccttgaggccaagctcctcgacagtaacctcggattc

SEQ ID NO: 31059 - DNA, 1674 bp, Bovine  19866880691277
  misc_feature (1)..(1): n is a, c, g, or t
ntggcttttctgcagatggggaagtaccaggactcactccttcagtggctcatcatcccagtaatccccttgtctcctgctttctgcagaggagggcagtaggaaacggttaccttggaaatagggagactttattatatcaccataaagatgaatctctttgggcctcagttgctctgtctgtaggcagggagaatgatactctatgtttgaagacactaaatgctaaggagctccttatgactagagtctttgattctgccacccagtcaaaagagtttttacttaaatctcaaagtgaatctttcttttggaacctagagagctcccaacatacaggccacttcgtctctctgctgtctcccctggtgttggaattgaagaggcttctgtctagggtggacagaggaagatgtcatgaaaactgagaggttcattttacgaagagttaggcctctgtccagttcctcccccaccatccaagcattcacaccagacacacagtctctgctcagcacctccgggcctgcctgccaggagaggtcctctgcctggacagaaacagttccgcagtgatatctgaacacattccaacagcacatttatctctagggtcagcctttcctgttgatgctcaggaggcatggggggactggggaggaggattgggatactggtgctggcaagccacaaggggcggaggcttgaacgcaatggggacacagaccccacccttgggagggtgacgtcataatgaggtttgtagactgcgtgtggcccttcttcacattaggatgagctccctagctcttctgttgccagtggagatgagataggcacagcctcactcagcagtgcctcatccagagcaggctaggacttggtgggtggagacgtccaggtggggaccataggatctggagccagaagaatggcagtgtttccattgtttagtttaggatctgagctctgttgggacacaacaggttctacctatccctttgagttcagtcatcagtgccaggaccttcaggctctggcagtggggcagaggagacccccttccctgaaaggctgggcaaacacaggagttttttacacccttaggaactgtctccaggagctgcaactcgctccctcaagaaaagtacttatccccaccagcagggggcaaaactgagataccttctgagggttccaccccagctctggacggctttgagaaagtgccttcacatccaatctcaacacctttgatttattctttattttcaaatgaggtaatctcaccttccccccaggctgagttttggggggcaggagggaggaggctgaaccatttgattcctcttcaacaaaaatgaaatcatgtcccctatcccccaccccccagcctcagcccaggaatatttatctctgtttacacaaccatggcaacaggctttattctctactacttaggaggaaaaagaaaaagaaaagtggagggcagtgctttttcctactcctgtctcctgctctgctcaggtgacagatctatcatttcagaaatcaggtaagacagagatagccctgcactctggtgtaatgctgttcttctcagggacaggggagcaagaaggctgcaatgtaccaggatcataaaagcactccagagctttgacagtgattgtc

SEQ ID NO: 31060 - DNA, 1349 bp, Bovine  19866880696933
  misc_feature (1)..(1): n is a, c, g, or t
ncctatccttccacgtggactcagtacctagaccccaaagtccggacttgggagcgtgaactctcaacccgagtccgcccggtccctcgatccctctccggagcccaaggatcccaactgcccggtggctcggcccaggatggggagcgtgcagtcggcaagtgcccaagaggtcgggcggatggagccccagagcatcccaagagagtggtatatggcccagactcccacactctcggcctgcgttcgcagagggttcagtacgctcgaacggtgtcaacccaagcggctccagctgtccccgcgtccagaattccgagatctcggcctggatgcccggaatcgcctggcgctccggaggcgaggcagctccgtgcctcagcagggaccgaaacgtagagcttgagcgaccacagttttgggtgtgaaacagagaccgagggaaaagcagagtgcggtgaaggggcgggcgtgcttgaagggggctgggaaagaacctctctgagtccgaacgaggcttctggcttttatgagaacccttagccctgttctagattaagaggtggggtgagtcatggtggcctgagccccagcgggctcctggctggctcggaagccctcattcacgcattcgttccactccccgcaaagcccccttcagcttgtctgtctgaaaggtgtacagttggcccttgaagagctgggcgtaggctctattagcatttgccaggagccccaggagcggtgtgggatttgcatagtgatttgcatacagtaataatgattaacaacagtgccactccctggcagacggggggaagaattcggggaaggccctggctctactcccacctccctcctcccatccctggataagagctaattttctcacaactgctgtgacccctgagagttctcaaactctgggtgagcaggtctggggaggggcagtttccttcagccttgtccaatttgggagagtttaaactcagtgctttttttcttagggcttcccaggtggcgctagtggtaaagacccctcctgccaatgtgagagacgtaagagattggggtttaattcctgggtcagaaagatccccggtattcagtcctggagaatcccatagacagaggagcctggtaggctacagtccagggttgggaagagtcggacaggattgaagcaacttagcacaaacacattttatttctgcccgggtttgaactcttgtgcattcccatctttgttttgcatcttgcaggtagcttaggggctgggtctgccccaaagctttggaggtttccaagaacagttagctgggagcatcttcctcctccagagagatata

SEQ ID NO: 31061 - DNA, 1883 bp, Bovine  19866880771119
  misc_feature (1)..(1): n is a, c, g, or t
ncatggcttgactgcagggagacggctgagttgactgtagagcccacagctttagcttttggattatttgtgcaaccacctgtttcccttactcccaggtaattgaattgcctgttttcactcatttatgtagcaagatacctacataaacgaaatcattttaatatcttctctttatttggttgtaattgcttggagagagaaaaaaaacacgtcctttcctcctgggagatgtgagtctttagtatgatggatacaacgagtggaggattttagagatacaattggtggtaataataatgaaatactaaataataattatatcggcaacaatactaatgatgataatgatgaagctgggaggactgctgtcttttgctggacacttacatgtgccaggcaccggactctgacctttgttggcactagctcatctaattagggcacaggagcagaactgcctctttgctgcacactgatgggcaaactttgcccatccaggtgtgcggaagaggtgtgtccagaaggcctggctgaagaaccagagagcacgtgcacgtcctcctggaaccccaacctcatcccaatccacagggagaacagcgagcctgcccttggcacagaacacccccaatccacttttcaaattacccagacacacacatgccccctatgtaattatcccaacaaatgtgctaaaggaaaataaactctgcaagactgccttacaaaaatagcaaaatgcacagcacaggcctgctctgtataattcatgcaggaaacatggaaacatcttatcctgataaattgtgctttctgtgaatttgctgattatacacacacacacacagacacacacatgcttgcacgcaagcacagactgcctctgcaaagcttgtatttgataagaagatgaggacagcccaagactgaagactggctgtgccctggggaagctgtcagttgagggcccagaacctgagtggctagatgggtgaccactttctggcagcctgggcatatcttccagttcaggcttttcaggtccacgactttagcaagtccttgttacatgcccatactgggggagcaaagggatcacagagaggagtaggagtctggtggaggaagcaggcccctgaacagatgaaaacaggaccagatatgcatgatcatggtgctgaactggaggatgaggtgggcttcttgaaggacggataagagtcttgaaggatgagggtggcgcccaggggaggagaatgggtgtggcattctaggtagagagaacagctggagcaaaggccctggacaccaggaagtggagggtggaccatgagcttggcatcatggagtcatgcaatgggacagacaggagctggagctggagtgctaaggggcaggcagaaaggaagagaaggccccagccatcatgccaggtgacctccccacttggccactgcataaggcctgctcggatgccccctactcaaggagatcccccctacgccacacctcgactaggttacagctctcgccaaaacccttggccctccttccctttccatcatagtgcttctagttccacctggagccatagaaattatcctgtgatatttgggtcactgtctccccaactagacactgtgggctttctcttcacccaatgccttgtgcagttgctggtacttatgagtcactcaataaatgcttattaaatgaatgaacgggtaatgaatggttattgcaacccatcgtgggatggctgggtgggggtgagattggggaccagctgggagactaatggaataactttgcctgaaagatgataagggtctgaagcagagagcagggagtgaacaagtcaacctggtggcaaggcagga

SEQ ID NO: 31062 - DNA, 1207 bp, Bovine  19866880772502
  misc_feature (1)..(1): n is a, c, g, or t
nttgccagtattttctgctcgttctgatgtcacatactgctatatgacttaatgccaaattcatatcttatggaaatgattactgtttaaaataaaaatacttaagctttcttatgttactgagacagatgaagggtccatttttttcccttttgtttgtgtctgaaatttggagattacaaatggtagttttttgtgcttttcactttcatatacagagaaagtattggccattttacatgttgaatttttgtaatagtggttatgagtatgcaatgaaggttcacacatgctctctccaatcctgtttgcattcaattttgagatgactgattaagaaagtagtttgtttcagagttaaaagatccagattagtattgaacctataaatttagtttatcacagtgttctgatccattaagcagttcagcagagaactgtgccctgctctcatttccacttgaaaataggccttttagaggtaaaaggtgcaaaggaagttgtgtatgatggttaaggtggagttgagatagtgtacttttgttaaatggtctaaaaaccatccttttattataatttttcagaagtacatgatatacacatggaggattaaatatgttctatgaaattattttcaattattagactaatagcttttttttaaagttctaatgacttatttaggctgtataaatttagattagataaatctggaaaagaagatttctttgcatatccagtttttccagggatagagatagtttcctatctccaccctatttatttagttcacattgatagagagtggttcaaagtgtggaatggtaaaattaaccaaatttaggattaaatgcataattctttgtttggtttcagaatatatttaaattaggctatatctcataaggataggaatgtactaaactacactaagtccattctaaaggagatcagccctgggtgttctttggaaggaatgatgctaaagctgaaactccagtactttggccacctcatgtgaagagttgactcactggaaaagactctgatgctgggagggattgggggcaggaggagaaggggacgacagaggatgagatggctggatggcatcactgactcgatggacactgtgtgtgttcactcacacagtctgagtgaactctgggagatggtgatggacagggaggcctggcgtgctgtgatt

SEQ ID NO: 31063 - DNA, 777 bp, Bovine  19866880831123
  misc_feature (1)..(1): n is a, c, g, or t
nacaggccttcaagaatttcaacagatttggggtctggaagaagaaatgggaggcacatgtccaggcagagacaatttacgcaaatgagttagctgctttgtaaaaagttggtaggaaatatagcaagcagttcagttttgcttgagaaccagcactccattatgtaaaggggcagtgcagggtaaggctggaaaagggacattcaactggacaaatgtcagattaagcagttttacctaatttgacaggaaactactgataatttttaaaatagggtggagctgtgatctggccactgctttagggagatggttctggcaagaacaccaaatggattgaagggaaagcaactaagcggaagaccaaataggaaactacagcaaaagtctagatgagaggtaaccagtagctgaccgagggcagtggcaatggggacacagaggcaggggcggatggaaaagacactgggtaggaaaggtctataactctgtctaattcggtaccccccagccccatgtggctatctaaattgaatttatgtacactaaagttataaactttgttactggcgtgctgtagtcaatggggtcacaaagagtcagacatgactgagcgactgaacaagttataaaatccagttcctcagtcaatgctcgatagccacatgactactgtattagatatgcggataaagaacattctcatcacagcagaatgttttattggatggggggtggatcactgcactttggggggtcagtttgggtgcagggatg

SEQ ID NO: 31064 - DNA, 731 bp, Bovine  19866880832653
  misc_feature (1)..(1): n is a, c, g, or t
nttacaggatcacacgtaaacgagacgttaagcgttccaatataaccaaaacaaaggtaattactggcctaaagctaaaggcagattaacccagaagtgaaatgaggtgataaagcaaggaccaaaggagatattacatccctcacacttaccctggaccgaggagggctgcgttcttcagagagggggctacaaaattacaaagcgtaggttagcaaggtcacgatgaaatctggtttgtctcttcctcggccccaagtctcactgcgcttttcttcacgccctttcctcccacccgctccaagcaaccacagacgcctcgttttacgatcactctgctatccaggaccagggtgtgtacctctcacctgctgcggcggcggcagaaagtaccacccgggacagcattgtcaggtagcgttcacacagcaatcttcccgccccagtgaccccgacagaagaatctgtcagggacagaagcaagatggacgctcagaagtctcgcgagaagagaacttcgtgccctttccgtcaacttccggtcttttctccccctcgcgataagaagcagagagccggttgcgggagggtgctggcgggaaagccggctgggctcttagaagcagatctcgcgagatgtagggaggctgtagcttgtctagaggggcggaggcccgagaggaaccacgtggggactcctggagctgaatctcaggcgggcatccaatttg

SEQ ID NO: 31065 - DNA, 1899 bp, Bovine  19866880847404
  misc_feature (1)..(1): n is a, c, g, or t
nctcagattagacggtgacaattactccttcttccctggttatggcctcccccttcctttctctccctggggagaacaaggaggcagatcagtctcctgggacctaagaatagatgtgggaagatcaaaggagggaagcggactggcctcagagagcccctctcgtgccttacatggccttgtttaaggctgagcaacagcccgagggatggggggagcagagaatgtgagcagagctgcttggaaaggctcagggctgtctgaggacgcagctgagccatcctcgctgccatcaagggtggcctcggagataaaaccaagctcccttattgtcagggaactggatggagggcgggcgaagaggtaaggtactctctgcacgctccagaccacgagaatttctttccagtttctcagccgggattctggggtctccagagctgggaaacaacagtaaaaaaggtgaggcaccatccattgagtttttgtgactttgcccttggtgtgaaagcagcagtgacagaaggaggctgtgtggatgtggggtaccagtggtgtgtgggggtgtgttgtgtacctgagtgtctgtggctggggagtcaggcaggggggccctggtgcaaatagttcaggtttagggagtttggaattctggaacaaatctctcttgccacttaactcttgcctttccctccttctccaggaagcaggtgctcggcacctcttgctctcttgagcagctcattgaagagaaacaaaggtgcctcgaaggggacctctcttgggggtgatgaaaatcttttttcccttctgctcatttgtgtcacattcttccattgggccgggcgactgacaggtgcacccttccccaggcccctttcagagtcccctccctgctgtttgtgtctcacccagatatccagcagacaccgcctttacaggagctaaatatgattagtagaaacccttcctgacagctccaaagagaagccctcaaatgcatattctattgagtgcatctcatcgctgctgacagtcactttatcaattaaattccaccttcccagtcttcagagacgccaccaacctccctacctaataaatcatagaccccagttatcgttaaatgtcccatcagtctctaataaaccccttgccaacaggggcaggttatttattatgctgcctggacaaaaatgaattgggccccgttctcagaagagcaaacgtgatgcctttctccctaaagactgaggctgtggtattaaatggggcaattcatcaatgtgggccttgagcagaggggagtctggtcgagagagagagagagagaggatgcctggggtcctttactgaaagccagggaggcaggcccccgtggtgggaggtggctgtgaagagagtgggaacccgggcctttgctgcttctcccctgctcctcatacctgtctgaaaacactaaggatttggtcaccccacaggccaaggggcacatgtgaaaatagttattctccacatcaaaagttcgctacgtaggatccaacaaggtcatgaaacaaaaattctgtccagaaggccagatgctgttacttaataaacttgacataacttaaagttatggatggtactagtccactgagtagatgaactgaagaatacaggaggaagggttccctttgcctggaagagagaaccagaaaacacgtgctcagtcactgtttgtgggctaagcagcacataggtaagcactgactctcaaaaaggggcgtttaacacctaaaagaccctgttaggtgtgagaaacagtgtgtagagtgggccttgtagttactgcctcatgttagatcccaaactgagaggatgctcgatggtctgcaagtgacaatccaaactcctcag

SEQ ID NO: 31066 - DNA, 1944 bp, Bovine  19866880870888
  misc_feature (1)..(1): n is a, c, g, or t
natactttactatacttgattattctataggaaacacgtgaagcttttgaacaggaagccaagcaaaccaacaagcccaggctgctggtcaccgctgcagtagctgctggcatctctaatatccaggctggctatgagattccccagctatcccagtgagtgactcaccttatcctcaaaactcctgtaggcatcactcttgcaaggtagacttgtgctttgtcttactacccagggactttgtttagggtgttttggaggtggtatcttttgctcgcttaagtgtgggacatacctactattgttatttagtcactaagtcatgtccagctctcttgggaccctatggactgtagcccaccaggctcctaggtccatgggaattcccaggcaagaatactggagtgagttgccatttccatctctaggggatctttcctacccaggttcagaagccgtgtctcctgcattagcaggtggattcttaatcactgattctttaatgttgagctaccagggatgcccacataagtatgggaaacagccatgggaaatgctttacaaccctgtattctacctcaggtacctggacttcatccatgtcatgacctatgacttccatggctcctgggaaggctacacaggagagaacagccctctctacaaatacccaactgacactggcagcaatacttacctcaatgtggtgagtctccacacagatgcagatgcagaccagagatgatgtaaattacatgcagattcagggacaaaacaaacaaattttgcaaaagtctcatttggataaatcttctaagtgaccgattttatctcattaactataacctcaccaaaatatttttgaaaaagtacaaactaatctatgtcatgagcatcattaaattttgcctgttaggtcagtggactagcataactaagcgtggggtcttcagctgggtaggcctctaactcacctgctaccttttcaggaatacgccatgaactactggaagaaaaatggggccccggctgagaagctcatcattggattccctgcctacggacacaatttcatcctaagagacgcttccaacaatggtatcggtgcccccacttctggagctggtcctgccaggccctacaccagggaggctgggttctgggcctactatgaggtaggtaggctgggctgtacattggaactctgggaatgccatgtcctgggctgcacactagccttagggctagaacctgcaagaagcttgaatgttcattctgtccactatttacatactttaacacaaatattactccagatgcttcagatgtataagtaacctattcatttacctaatccagtatgaagatttatagcgtgcaatatcccttcaaactacaattgttgtttgttgtttagtcgctaagtcatgtctgactcttttgcaactccatggactgtagcctgcaaggctcctctgtccatgggattctctaggcaagaatactgaagtgggtcgccattcccttctctaggggatcttctcaggaatcaaacccatttctcctgcatctcctgcattggcaagcagattctttaccactgagccacctggaaaaaatcctcccaaacactttttcttttctttctttctttcttttttggggtgggaggagtggggtgacagtaatgcaaagcacataggatcttagctccccaaacagggatcagatccacatcccttcattggaaggtgaagttttaatcactggaccttcagggaagtccccacttttctttctaaggtccattgttagacatggcaaatgataacttgctgttttacacataaattcacagcatatcccaactcagaccagccagatttaagatgttctatgactgccatgttgaactcaacatttacacctcaaggttggctcttg

SEQ ID NO: 31067 - DNA, 1871 bp, Bovine  19866880881831
  misc_feature (1)..(1): n is a, c, g, or t
nattccactccaagttggggcacatcctctgggcttctctggtggctcagatggtaaagaatcttcccgcaatgcaggagactcggctttgatccctgggtcagaaagatcccctgaagcagggaatagcaacccgctccagcgttcttgcctggagaatccaatggacagaggagcctgtgggctagtccatagggccgcaaagagtcagccacgactgacaactactatactgtccctcgcttcatgctgtgaaacacacagaccttgcacctgattcagtgtctagtcctgcttggtttaaagttatttaaacaacacacacaggttgtttgagccacccatgttcaggtgcttctcactctgagtaaactggcagggcatgacagggcagcgacatgccagaatctgagcactgagccccttctttttccaggtgctctgctggaagctggggcggggaccatggtgcctgactctaaggagcaagggctggctgtgctttcagaaggtggtgacgggagggagagagcctcctgagatgactcactaacccggcccatttccactgaatttcctttccgcgcccataccctgctaccggaccttcagtcctcatcctctccgcactttggaaagccagtggtgagatgcccagagccagagacaacccacacgctcaccctctccccagtcctctgtgatcatttaatggttggtttcattcaaataactcaaagtaatgtaagccacgctgcccacacagatgctaatagcaatgttgagattctcctgcgttcctctggggagctcatgttcttaaataatgggagtggagaagagaagggccatttactgaccaaagggataacagcgggaaagaagatggggatggggtggggcatggagaaaccctgggtggggtgtcagtagagatggggagtgggggaccagggacaggatggggactccatgcaccccagaacttgcccattcatgctgtgcaggctccccaagggcctaaagagcaactggttcatctgggaacctccactcttccccagggcttggatttgccagagccgcacttgagccatcccaagtccatgccaggacacatgtcccagggtcttcttgcctccaagtcccctaatgacttccctgatcataattatacttgccttccacaactgtttcctaacaggaccttttgggttctcaaaagccctcatccttctaaggtgtagaggaaataggcttgaattgaatacatgagaggaaggttgtgatcactgaccctctccaaaatggaatcactgcagcccaaagggtaaattcccatccctgaatgttcaggcagattcgttgccatctgctggggaggttgctgaagggagtccagctctgaagggtgatagcaaagtaggattcatggggcttacgtagctctctgcagatcccacggttaacatctatctttccctcatccagctaatctggcctatccaaggagctgaattcacaattccctggtctctccaaacatagtgctgtgtggctgagagctgctgacccgaatctgagccatgctggcttaccatcaggaaccctggagccctctgggggagtctctgagcagaacctcccaggtccctctgcagacttgcagttctgatggtcactttggccaaggactcttttcacttggacctctttagagatgaagaaatggaaatgggatggttcccagtgccccaccatctagaggctagttccccaggctgtgatcatccaggctactgggctaatgatcagatttcctctgaagagggagagactgacagcttgtgaaactgacttggaagtgagaa

SEQ ID NO: 31068 - DNA, 680 bp, Bovine  19866880895414
  misc_feature (1)..(1): n is a, c, g, or t
nccttggggcctagctgagtgtccccagcctcttcctaaatgactctgaactggactgactttcgggccagtgactcagcacagcacactcccttcagctgtgctccctcctggtgcagattcaagatgtgctcccagaacaggagatggtcccttcctgaagtgctcccgggaccaggaattgagccctgaaaagtaactccattcgctgcccaagttccctgccagctttcccccttccctgctgaaggagaagctgtgtgcttccaaggaaagccagcctccctccttttggactggatcctctaggaactgggaggccggaaccgtgagagcggaaagaaggtggatgagggctaaaacagacatgcctgtcaccaagtcttgccatcagaatcagccctgcagcactcatctggtatctgggagcagaggggaaagacggctacagtctattctccatgaaaatgaagcctgttttttccctccctgattagcatttttattgtgtccctcctatttgctctgcctgctcataattaaatactgcccatggtgtctcgtctatcttggtaatgttctcctggacaccgatgaatggattttttttttatagacttgctccactgattgaaaataagactcaggttctgtgtgtccgctgatgggataagtcagcc

SEQ ID NO: 31069 - DNA, 1923 bp, Bovine  19866880909733
  misc_feature (1)..(1): n is a, c, g, or t
ntatggactctagttcgcttgcatcagattagtgaagagatgattattctaaggagtactcccacaagagccaggtgcttccaaagtccatcccataagaccattactggcacaggaatctggtgaccaaagcaatagaaaagtcaggtgattctcaggagtggaaaccatggcagcaaaactaagagagactcaaagaaggcatggtaagactctagtgatcccaatacctgtagtaaaatcaatgtagaaagtcatcttgaaaaattaatggagcagttccaaagttccagtagccaagagccaggagagtttccatttgtctatttctgagggaaaagaagcaaagagttgcatcagaacaaatggaaagaaagattgactgatcatttcaacatcagctgttggagggactgggaaaccaggagtctcacacagcctctcatgctgattttctttgttctcatccttatttcctaaattgtgagagtggttggagtaggtgacctcaagttgctatgtttcaatgtctctactgttctaattactccccttggagtgaagtccttgagtaaagacactgagtgcttcatcaatgccagctttggatggattctgagtggaagattgtttccatctagtccacaggaacgtggactttcctgaatttcccttggctatggagctatatttcaattgccaacctcttcctgtgaggcagcaatttcccttatgttagagtcgtcactgtgctggaaatattaaaaatccgtgtgcttcttgttggcctgtttggaatttctgcttgggggctgctgtggaaggttttgttcaacctattcttgaaggtaaaaagattttgattcacagtcctttcctcatttacgtgtctttcaggccaatgagaacttggtagagagtctcatcctttcttttgatggtgtgatctcatttcccacattccagcaaaggcatagatcagatgagtatgaaggcagaggtggggccaggcttgaagtgccccagacctggcaggtacttgggctatttggtgaagtagtaggtcagttggtgggcagaacctactacccagaggaatagagtgggaaactctcactgagaaagctccctggggagttgcagattgcttaagaaaccacagatttccaaataacttttctgtttaaatctgaagagggaaggggaggatctgaatgagatccttgtgtattgcagcaaacctgtaatttacaggcaactcagggctgacagtatctcttagaggtacctctgttcttccaggatataattaaaaaccttataaatcagttcagttcagttcagtcgctcagtcgtgtccgactctgtaaccacatgaactgcagcatgccaggcctccctgtccatcatcaactgctgtagtccacccaaacccacgtccattgagtcggtaatgccatccaaccatcttatcctgctgtcgtccccttctcttcctgccctcaatctttcccagcatcagggtcttttcaaatgagtcagctcttcgcatcaggtggccaaagtactgaagtttcagcttcaacatcagtctttccaatgaatacccaggactgatctccgttaggatggactggttggatctccttgcagtccaagggactctcaagagtcttctccaacaccacagttcaaaagcatcagttcttcagcactcagctttctttatagtccaactctcccatccatacatgactactggaaaaaccatagccttgactagacagatctttgttgacaaagtaatgtctttgctttttaatatgctgtctaggttggtcacagctttccttccaaggagtaagcgtcttttaatttcatggctgcactcatcatctgcagtgattttggagccccccaaaa

SEQ ID NO: 31070 - DNA, 1480 bp, Bovine  19866880943308
  misc_feature (1)..(1): n is a, c, g, or t
nccccatagaccgcagcccaccaggctccgccgtccctgggattctccaggcaagaacactggagtgggttgccatttccttctcccagtgtgtgaaagtgaaaagtgaaagtgaagatgctcagtcatgtccaactcttagcgaccccatggactgcagcctaccaggctcctccgtccatgggattttccaggcaagagtactggagtggggtgccattgccttctccgtcaaatgctcagaggcaggaccaaaatccagactgcagaaccaagagttgagagttgggaagagagaacatcagaggaagagccatgcctgacacgctcctggcccagaggaagttcaatctgtgttttttgaatgaattagtgaaacaatgaagaggaggattcagaataatttaaattcgtccctaaaaactatgggagcatctcccctaatgaagctgtgagtgtggtcagtgggttcacaggagtggacaggccaattttctgaagtgcagttagtcataatatgctctctttgtggtctcttttccaagaatcccagctcaaagctctatgaatgtgttgttgatttattgtccggcactacaattccttgtttcccattatctctcaccctcacttcctttagctcaccctaaaattttgctcccctatcacaaaaaaacaaacacccatccctctcaaaaaagaaaaacaggatgccccaacctcctcaaatttctgtccatgacatcatataataagagtcttcagtctagcattccccaaagtgtagaacattattctatagaatgataatggtaaaagaattgtggatgcgtgctaagttgcttctgactctttgtgaccacatagactgcagcccaccaggtcctctgtccatggaattctccagtcaagaatacgggagtgggttgccatttccttctccaaaaggtttgtaggtcagataaatctagaaaacattggatttcacaaaaccaaacaagtatcttcagtgaagggcttctcagactttaataaactcgtctgcattcctaaagaggaaacgccaaatttacttaacctcagagcccttttatgtggtgcttcctgcaggactggggttctgcactttggaaatctacagttttttccttttttcttgttttcttcagtgccctggttcccttatctgtaaagagggagttaataatattagtgacctcatagagtagctgtgaagattaaattaattcattcaggtaaagtgtttagagggcttcccttgtcgctcagctggtaaagaacctgcctgcaatgtgggagacctgggtttgatctgtgggttgggaagatcccctggagaaggaaaaggctacccactccagtattctggcctggagaattccatgaactacatagtccatgaggttgcaaagagtcataaatgactgatcgagcttcactttcacttcacttttcaaag

SEQ ID NO: 31071 - DNA, 914 bp, Bovine  19866880952590
  misc_feature (1)..(1): n is a, c, g, or t
ncccctatgacagagtttgccctttttgctgcagtaaacacccagtcagaggtaggcaataaatctcaattcaattctccttttctatttccaacaaagtagacaatttgaagtcccttccacgtgtcctgactccaaaggcgatggctcatactgaacagatggggctgcagatttcttttattaagttcataaataaaatgatgctacaatagaatcaccatgacaactggcccacaagttgcggactgattctgatctcaggtgttctggaggccgctttaacctcgccaatgatcatttgcagataggtaagaacagaggcagtcaaggggttgtgctcggccactcctgagcaatgccacagtcagataacatttcaagatcttagttctcacgcaaccagctagtcaaaagtgaagaagagggccagatctcgattagggggccaggagatcacttctgctgtattccttagccaataaatctctgacccagtgttgaatgaactccaaggtatgactaacttctctcaggataccactgggaaagtatttgcagaaaagtttaaagcataatattccagtttacttctgaattagtattccatgctgttctacccaaagaaagggagagaggctacatcagaggttctcagagtctcttgactcaaagatttggaaactgccacccgtttgggggaagtgtatgggaaactgccaccagactgaatggacactgcttcttatcagtaagaaaccaaagtgtgataagttaagagacatattcattcacatcaggaaacaaattgagacgagggcatcagcagctgtgggtgcaagtgaagtggtgctgtcacgaatgccaggatacctacactcttagcttccacctgcacgtctacacctctctcc

SEQ ID NO: 31072 - DNA, 1107 bp, Bovine  19866880953481
  misc_feature (1)..(1): n is a, c, g, or t
nccactgctgtacccgatgtatccaatctggattaaacaacgtgccacaaaatgattatgactgtttaatacctgtattctcctgctctacattagaaaataagggtaatttgaacagagactttctccctcgccagaaagtcacagaatctcagaagggtgcttaagctctggtctcatcttcccttccccatcctccctcaatgtgagcaactcctttatgacatccgagatggttcttgcctgcttgtatactttagtcatggatgttcactaacagggaaagcatttgattgcatttgtcaacagctctattttgagactcagccctgcattactgaaagaaaaataggcttttatgtatccgtactggttctgctgagaatacactgaatatctaccatctaaaccaacgtctcaaactaaaaggaaaactcaaaattaaacgctatatagagtatagcaaaaagctcggatattagaggacagagcacatgttcaggttctatcatttatatgacttcacattagtgtttgtgtgtgtgcatgtggtcacaccccgcagcttacaggattcttagttccctgaccagggattgaacccttgttcctggcagtggaagcacggatgtctttaaccactggactgccagggaagctcccagtctcttctctcttggcttcagtttgtttcctcatcttaaaaatgaggggactgggttagatatcttgaagatctcttcttagtaattctggtttaggtagtgagaactggcattttcacatttcaccataatgtggcaagaacaatgggagttcttttgatttccccacaacagccatcgatgaaaattgtaaggttaaagcaaatataaggtttgctgtgtgtaaatgtaaagcaaatgtgtgatgccggaaggccctgagttggctgtgaaattcttttctatcactaatgttcatagctttatcatccactaggtgtcactacagatccacagttcaaacaatctggagcagaataatgaaatcaaatgcatggtgagcaatatgtgctttttcatgaaaaaagcacatgttaactggggtatacatgcttgttcacag

SEQ ID NO: 31073 - DNA, 1031 bp, Bovine  19866880954530
  misc_feature (1)..(1): n is a, c, g, or t
ncttgttgtcagcaagttctgcaagtgtgagcacgatgacactgtgtctacagtcagtgacctgagttctagcacacagcagaaaagtccgcagtagaagacttctgcatcaaagttttgaattcattccgagctcactctgggcaggtcacctgcgctgctgcctctccccacaaggattcttccaggtggtgaggacaatggaattttactgcaggataccggctgtctcaagccagcaccacagaaggactgcagtgcctctggctaccttcctacctcgctggctgggcctcctcagcagaacgaagttgtcttcggtgctgagaatgggactgtctcccttgcagacaccaagagtgcgagctgtgccctcagctagctgcgcactcccagggtgtcactgggctggtgttctccccactcggttctccttcctagcttttgtcagtgagcactgctcactcgctatggactgaggcctttccagagtgtttagaagccaagtccacagagactttgtgagagatgctacttggtacccaatcacagtgggctgggaccatcaggtcatccaccatctcacacccacagaacctctcccagaccctggagtgttgctgagcagactggatttcagacaaaaagcaaatcccccagaagtagccactctctttgcccctgccctctcagttgtgaggagccacatacagtacgttagtttatcggatctgtgcagttaataggcagtgtctctcggcctgggggaggccagattctggagtcctgaactcatggaagaaaaccttccttaaatatggatatgtatgtgtctgagtgtgtgtgtggatacataatttttgttggttgggggaataaaaaatccttcctatagggacttcccgggtggtccagtggtgaggtctccatgcttccaatgccgggggcctggggttcgacccctggtcagggaactagattccacatgctgcaactaaagataaaagatcccatatgccgaaactaagacc

SEQ ID NO: 31074 - DNA, 902 bp, Bovine  19866881006983
  misc_feature (1)..(1): n is a, c, g, or t
ncggcatcaggggggctgagcggggacaggagggcccaagggagctgctgatggatcccgagagtaatcataacaccagtcagtttatgtaaagtgcttactggtgtcaagctctaaatgcatcatctcatttaattctcaaaacaactctttgaggaaggttcaattactaagcctccttcaaagatgaagaaactgaaactctaagggagtatttcttatccaaggtcactcaactcaaggtggtaaagccaaaattttagctcaggcagtcacattccaggactcacggcataaagggctttgccatgtaaggatctcattagtggccaaaggacttctttagtgtctgtcttctgccagaggcagtcaaagcacagtgacaatgtttctaggacaggaaggagaacctcaccctctctggacagaagggactggttaatctgtttagttaacatctcttgcctcgagagaccccaggcaagatattcaaaaacaaatcaactccagtccctccccaacaggaaggaagctggtgagaaatccagatgaagggggcacaggaatttcgtggttcacaccgttcccttctccagtctcagccccctgtcccagagccaagccattacctgggacactcagtgagtggggcccgctcgttcccatctgggaagcaaaacaaggggatggctccgagcagccggtcctcctcctcttgttgaccccgaagcaagttctctcgctacaaagaataggaaaagagacaggtgggtgtggaggtaggagcaggtggagagggcttagggtctggcgagcttctttggaggctcctaagcagtctgagaagcttttccactggtgtgggacttaaagcttgcctctgtgcccatcactgcacacag

SEQ ID NO: 31075 - DNA, 1567 bp, Bovine  19866881037449
  misc_feature (1)..(1): n is a, c, g, or t
ngacttctttgctaatgctatagaaatcccgtgtaggagcacaatgtcttaagcaataaaggaggaggagaaaaaataatccggagagaaatcagcttgcggttcatttaaaccttattgaaatttctactgtggaaacatttaaatatcatagttactgccgtgtgtcttcgctcctgctattcccgggtgtatgtttcgttgcacatttggttggtgagcagaacaataaagctgcttggaaattgctttcccactgctaggtaattacaacaggtttttattccaaatgtaaagaatgaactgttatttttttaataaagggagtgctcggttggtcccggccccctccgccctcctgcctccagctgtactggccctttgctcccacatcctccactgcatccttctctctctccctccttgctcctaagaggcagctggaagcagctccccagctgctggctcctctgtctccccgcccaggagcctcgcgtgtcactgtttagagaaagaaatggccccctccaggtgtctgtcaagaacattaaatatttagcctgactccatccagaccagcaaacatactcctgtctcccttccctacccgccgtgacacatctccccacctccatcccatctctctttttttaatcccaagcaagtgagccgggattaactcggcatttgtcagttctgtctgagcacaggcgtgagctcatcgactctcccaccagaccgagcagagaaagtgtcttttttgctttcagaggcaccgtgtggcctggcagccaagtgagcacccggccaaggctgtggcgtctccagttcctaccacctgcccacacgtagcttctctccttcgctctctcaagtgtattgcaggtcggcctccccagtcacctgacgcgtttctttctttcctaaccccctctgactctggctacttgtcctgggaaaacaaattctctttctgctgtcacctctgatgtcaccaggagggaggaatcgtgggggcagcctctatagctcacgtgacccagcggcagtccagggtggcctccgcagctggcagaggaggtcagctttgtggctccaagtgccccttcccctctctgggcctcagttaccctctctggaagatgagagacatggaggagatatctttgcatccctttgaactatgataccccaggacttgacactttgatcatatgcattttgatccactgtctgctgttttgccctatccatccccacgtgtcctgccctgagcctgaacctctttggctggaaccagacagaagccctgcactagcctcaagctgcctggctccaaggggcaaatgtctgttagatgaaggtttattctagtgagtggaaggtggtgaggctgtcactggtgccctggtggactgataggactggagacccactagcttcagagggaggcaggctggtgggtgggctcatcaggacgaacaaggtactgctttggagctgactctgacctttggggaagccacttagtctctccaagctttggtttctacatcattttaatggg

SEQ ID NO: 31076 - DNA, 4133 bp, Bovine  19866881042046
  misc_feature (1)..(1): n is a, c, g, or t
natcagtgtaagaagcatcccagtggatttcagagatattaaaaaactgggaggagggcaggagatgtgtgttttggaactgatgatttgagatataccctgtacatcccagtgatggggatctgaaacatagtaaatgttcaataaatattgtttggttgttgaaggattggagtaaaaggagtgaatagacagtagctaattgggaatgctgaaaaggcacctcactccatgcctcctttgagattgttttttatgtgctggcaaattactaccaaatatattattctttgtacttaaaatatgtttgcttgaaatctgtcattaaaagttatatattatatttaagaagctgaaaccttgttactgtgttaaatcaacaaaaactttaagatcaaagcaaatatgataatttataataatgtttctctgaatcactggctggaatcatgaatctcccaaccttcgcctgttgttgcttttcagttgctaagtcgtgtccaactctttgcgacccatggactgcggcatgccaagcttgcctgtccttcactatctcgcagagtttactcaaattcatgtccaatgagttggtgatgctatgacaccttctcatcctctgctgcccccttctccttttggcttcaatctttcccagcatcggggtcttctccaatgagtcagctcttcacatcaggtgaccaaagtactgaagcttcacctaggacttggaatctggttcacattcttattttctctccaccacctcttatgccataaaactgtgaaactctgattttcatgtggaagacttgtgtcacatgatcttacatgcccttgactcctcagtaccagtggccttgccttatcttctccagcattctcctcccagatctcttcttcttggtctgtgaatatcagccattctctaacattctacctatttaatctgccattcttctcttttaccctttccttattttctcccaaatcctcaggatttcagcaaatcatcttcatttccaccctaccagaaaatcaaaagccatcaggttggaactccctgagctccctccccagcacctaaaagctaaaaactctaattctatctgttcctcctctttcagaatgactctttctccagctcaaggctaatcccttcatctgatctctgcctcctcctcaggaaactcttactctattaatcatcccctctatctcccttactctaagcttccctttcacttggtctttcctgacagcatgtaaatattttcatctcttctctttaaaaacaatttttactcgtccacacactgctcctttctcctagtgctagccctttctcttcccttcaaagccaaatttgtacagtctacttattattgtctccactttcatctcctattcatttgaaaggctactgtaatctgaaatctggaaatcatccttcttataccaataaaattgttctttagggtcgccagtgactgccatgtggccaacagtatctgaccttacctctcattagtccttattagcacggaacctccctccttgacatttcttctcttttggttttcatgacaccattttctcctcctttttcatactttagtcttactctgctttattctttgatcagacagaaggaggctctgtcttcagccttttgctctcctggtctacttatgacatttcttgggtggtcttccatcaaatacactgcttcagcttccacataggaccctcagtcccaaatctgtgctaaatgcattcaactcaaacttctccccacattggtgataacagatttcagttaaacgcatcattttctcccataaacctgtttttcctcctgcctcagtgacaagcatcaccaaccagccccagagttgtcaagccagaagtgaggccatgcccttggactcgtccctccttcagctgcacatctgatcagttacttaggcttctagagtctgcctcctaccatctgttgatccatttccaaagcatctactttaatgacacctttgtcatctgtcacttgtttccctatagtagtctgctaattgcttcttcttcagtctgctagaataatcttcccaaaatacaaaacagatcatgttatttccctgcttaaattaattagatggttcctcagtagctttcaagataaaattaaaataccctggtacttccctggaagtctagtggttaagactccatgctttcactgaaggggcacaggttcgatccctggtcagggcactaagatcttgcatgctgtgaggtgtggcaaaccaaaataaaaacaaaactctaactcctaatcccttatggtgtgcctctgactcttattcaaccatgtactctactactttctttttctgatcacacttaacaatacacgcaggatgatttatacccccagcctcctcctcagtgctctcctagcctctcctctttggtccagctaactgctgcacatccttcttgagcatctcttcctcaactaagccttccttaactccctgattagctgctgctcctctattctacaagagatcctatgcacacctctatcacctctatttcattgctggtgtctatatatatatatgtcttgtcctagaatgtacactccaagaaagtaagaaccatgtattatttggcttaggctgttatatatattagtagaatgaatgaatgaacaaatcagctcatatctttgttcacttgaagactgagccttcaagtctaaaaataagtgaatgaaaagttgttttacggtatagaggttcctcaaaaaattaaaaatagtggccatatgatccaacaatctctctcctgggcacatacccaaacaaaactgtaattcagaaagatacatgcagccctatgttcacagtagcaccacacacaacagccaaaacatagagacaagctgtacatccactgacggatgaatggataaagaaggtgagatacgtatagacaatggaatactcttcagccataaaaaagaacaaaataattccatttgccgcagtatggatggacctagagaggatcatactaagtgaagtaagtcagaaagagaaagacaaataccatagattacttatatgtagaatctaaaatacgacacaaatggacttttatgaaacggaaacagactcacagacacagagaagagacttggggttgtgaaggggcaggggatactggagagggatggagtggaagtttggggtccgcagatgcaaactactgtatatggaatggataaataacaaggtccctctgtataccacagggaactatcttcagtattttataataaatcataatggaaaagaatatttttaaaagaaagtttatatgtatgtgtaacttaattactttgctgtgtagcagaaattaacaaattattacaaatcaactatatttcaattttaaaaactgttttacactctagacagagggaaaattgtaggtaaactaagtaatgataacagtgaaagaaatatgaaaaaaaaagcacttctttaaattagataactttgtttacttaatccttctctaaactgtattattctcttaaaagagtatgttaatatattattaatattttggtgtcttgctgatattctagtttttatgtggaaaaaagcttaattcattaggaatacatcttaagctgatctcccaaggaaaattcaagtgcagcctaagtacttgaaacacagatccaggttctacaatacacctaacatggtttgggttttctcaaccaggactctcacttggcatttaaatttctccaagactttatcccaaatcatctttcaccattcttctgtacttatcttataatattctagtcaaattgaacatccaaacactctctgaaatgtcctacatttctcccaatgctttatttcttctctttaggcctttatttcctccaccaagaatctctctgctccacttccaacaattaagtattaagtgtgacttcatacataaacatctctctgatttttttctgaagagattctcttcatatcattttgtacctcttactatacaagttttatttttttaacttgtatagcaaaaagactata

SEQ ID NO: 31077 - DNA, 1411 bp, Bovine  19866881059308
  misc_feature (1)..(1): n is a, c, g, or t
nctccccccaaattcccactgcatccaggggctccaataaagtcttgcctgaattccttgtctggcctttggtcaatttcacttgattggggaaggccaagaactctgatcagtatcagttattcccccaaggagtctttttgcaagacttgcacttactccagcaaagttaccattgctcaaaatatttttggatcttctttccttttgtggagggaatgaagaggatggaatctggaactctggtctcactggggtttgaatccacctcctctaccaagtagctggatgtggccttcagtggatcagtctgctttctcatctataaaatggggatgtcaatattacctacctgacaaatatacaaaacattaaaaatgtatttaatagtagaaactgttgactctcagacagatataaaatgaacacatgccaatgatttcatttaacttactatttaatgagagaatcaggaaaatgttaaaaccagttcaaataaggatttggctttattctctacagaacaaaattcaattgcattgccatggataggaatcacttgcatagcaatcgttaggaaatattcacattactgtcggttttctatgaattaacttctacctctacagagttgtaaaatagcctattcaaaaacacggacataccctacaaagatcaagccatcccactgaaaggatatccagtaatctcttttgttcactccaaaaatctaagtttttccttgcataggttgttgtaaagatttacagggttatctacttaaagcatatgagaggctgattcatagtaaataagtgataaacattggatattactatcattattgccttcatgtctatagtgtattactttgaaaatcttggtagctgtttttctgctgtggaagggagattcaatttttttttttaaagggcaaagttatttgaagtcaagtctgctaaatattaattaaagaacagcaattttgtttttgaagtaactgaagtttcttatttttttgacaagatgagtgttctttcaggtctccttgactagatacgtcaaaaaatcagttctcagaggattctgtgagatggcagagcaggaagcaccgggaatctgtctctccacccagacagcaatagcaacagcagaaatgctcaagggagctctctggggtgaaatgaaaggacaccagacagtaatttaaagtcccacgaagaaatacagatctcaataaaggcaaacacacgggcgatggtaaaagctagtatcattgtaacaatggtttgtaactgtactttttgttttctacatgatttaagagactatacatttttaaggaaaaaaaagtcacatcaattacaagtgtaaaactaataccactgtaactttagtttgtaactctaaa

SEQ ID NO: 31078 - DNA, 1010 bp, Bovine  19866881111031
  misc_feature (1)..(1): n is a, c, g, or t
ntttaattttattttatattggagtatatacaatgttgtgttagtttcaggtatccagcaaaagtgattagttatacatttacaatatcccttctttttcagatttcttccccctctaggttattacagaatattgagtagagttccctgtgctatacaaaaggtccttgttggttatctatcttataaatagtagtgtgtatatgttaatcccaaactccgaattaatccctcctctctacctttctcctttggtaaccataagtccttatctttaaaacaggcataatgaaggtacatactgcctcttgtgctttcagccataatagagtgacagcgactggatttaccttcctatcttaaacagctagaaaatcatataaaatatacgaatcaaataatttcagacattgggcaacaggcagtacaggattctctgagagaaaagaaccaaacaggggtggggttagggctataatttccccacctcactgcctgaatgcaattcttaggttgcagtccagggaatgggaacccagacagaggccagtctctcagagtctaaggagactgaggcagctagagctttccaagcagaaagagctctagaaatatgaaaaggatcctcttaaatcttgggctaaatactgacttgcacatgcagggactcaaactccatgaggctagggaaagaatcatcacaaaaaaatcaggccaaacaatttccagctgaatggggctggatagtgtttgtgtttccacgagttagagtgaacagaccatttaataaatgcacaaggtgttggatagggtcctcagaaagtggtgagctctggactcatcctaagtgaagtacaagggaaagtcgctcattcgtgtccgactctttgtgaccccatggactatataaacagtccgtggaattctccagaccagaatactggagtgggttgcttttcccttctccaggggatcttcccagtccagggatgaaaccaggtctcctgcat

SEQ ID NO: 31079 - DNA, 782 bp, Bovine  19866881203942
  misc_feature (1)..(1): n is a, c, g, or t
ncacctatgggcgattcccaggggcaggactgagggtgaacaagaagtcagggacccccaggtgtcgtgggacatggagtgggggacatttccatggggcaaggcctctgcaatgcccctggtgatggcctgtccactgtctcttcagaacgatgactactgcacgctggggattgaggccactttcctgtcctcctccagcagggagcccctgtggattctgggtgatgtcttcctcaaggagttttactgtctttgacatgacccacaactaggtgggctttgccctctccacctagaggagtgtgaggcagccatctccactctccctgaggactctgcggttgccctgatgcctctggggtgagggcaacgcttcaaacaatcctgattccttcagctcacaagaacctttcttcgtgaaactaataaactcaaaaatcttcaaacatctttgaggttccttccaataaacaacttagtatttaattctaatttgaaagttagcaacagctgttgggggatctgttaattgatggacgagaacatgcatgtagcatgggtgtcaaggacacggtggtttctgcaggagggtccctggttagaggttttcacgactcctagcactctcttctccatcactatttttctctccattcttaaaaaagaaagtgaaccagagcaattgatgactcaagaatttttaagtaaacagaaacctaagatagctttttaaacaggggctctgatggccaaatatgaccagaaaacagtttttgtgt

SEQ ID NO: 31080 - DNA, 2097 bp, Bovine  19866881218394
  misc_feature (1)..(1): n is a, c, g, or t
natgaggcctgcatgacttcctttttatgcaacatcttgagatgacagaggtgcccacaccggtctagcacagaggaaacatgaagttcttagcccctgaggatagagcagaaccggacgcctctgtcttcagtcctgtacagccggcagaagcctcaaaactgccttactttttctttttctaaattaaaaaaaaattttttattgaagtatagttgatctggggcccccctggtggctcagcagtaaagaatctgcatgcaattcaggagctgcaggttccatccctgggttgggaagatcgcctggaagagggcatggcaacccactccagtattcttgcctggagaatcccatggacagagaagcctggcaggctacagtccatggggttgcaaagagctggacacaactgagcaactaagtgaacacacacacacacatatatatatttttcagatcctttttcattataggttattacaagatactgaatataattccttgtaccatgcaataggtctttgttgtttagctgtttatatatagtagtgtgtatctgttagttccaaactcctaattttcttctccccctgtcctttcccctttggtaactgtagtgtttcctatgtctgtgggtttgtttctgtctcaaacctccttactttcctttcaagggtgccaaggtgaagcggggcagggagtgggagctaggggcagagaatctactaacagtaggcctcaggctcttccaccctccctgcaaaccacaggagaggcctcctgaagtctttcagaggggcataggtattctccctgctcttagagcagggaaaatccttctccaggcttgctgtgttagtctgctaggcctcctgtaacaaactcagactgtgtggctgcaacaacagacgtttgtttccttacggtggtggaggctggaagtccaagatcaagctgtcagcaggtttgcttcctcctgagatctctctccttggcctgcaggggaccaccttctcactgtgctcatagtcatccctctgttgtctgtgtcctgatctccttttctattaggacaccagtcagattggactggggcctattctaatgaccctactttaacttcattacctctttaaaggttctaagtccaaatacagtcacattctaaagtcccgagtggggcttccatggtggctcagtggtcaagaatccacccgtgaatgcaggagacatgggttcaatcccccatctgggaaggtcccaaacgctgtgaagcaatgaagcccgtgggccacagctattgagcctgtgctctagagcctgggagctgaaactactgaagcctgcgtgccctagagcccgtgctccacgacaagagaagccgccacagtgagaagcccgagtaccgcagctagagagtagtccccgctccctgcagctagagaaagtccacgtgccacagtgaagacccagcacagccaaaaataaataaataagattatttttaaaaagcactgggtggttaccacttcaacacataaattttaggggaacactgttcaacctctaatagctggttgccaaccccaaaacaggcaaaaatctgcctccaatgctttcattaattttcctccagggtacaggggcttgagatgtgtttaaaagaacgatggtgttttgtccgtgtgttttcacagatgccatggtcatggacgagaaggtcaaggaaagctttgtgctggacacagcttccgccatctgcaactacgacacccactataaggaccaccccaagtactggtgtcgaggctatttccggtactactgcaacatcatcgccttcacacccaacagcaccgaccgcgtggccctgagggacacaggaaaccaactcattgtcactgtgtcctgcctgaccaaggaggatacgggctggtactggtgtggcatccagcgtgactttgccagagatgacatggactttacagagctggttgtgaccgatgacagaagagccatcaccaacaatttctggtctgggcaaggtaaggaagctattgtgggtctagctgggggtgacccatggcggtgggt

SEQ ID NO: 31081 - DNA, 1241 bp, Bovine  19866881220318
  misc_feature (1)..(1): n is a, c, g, or t
ntgaatactggggtgggttgcaatgccctcttccggggatcctgctgctccagggatcgaacccacgttttcggtatctccagcattggcaagtgggttctttaccacttgtgccacctgggaagccccgctaacaggagggggagctctaaatgcccaggcctgggaaggccatccaaggggtccaaagcagcactggaagtccttggattgtatcaggcttaacatatcagccttaagttgaggagccaacatgttctggactccttgcaaggtctgtgccatagatattactgcctgtgtccccttcttatgaggaggacacagggactggatggaaaaaaaaaatactactcatctgttcagtttttgctggtgaccatttgaaggagggtgggtagaggctgaaggtacagattataggtgcagggactgtttcttcttccctggtgattccttctgcttctgtgctgatgtttcccagggctctgtcctttgtcttctctgcttcttcatttgcccttttccctggagggttgatgggagtccctgatttcaagctcattcaggtgctgactgttccttcctgaactgtccctgaccactaattatgtaccacggatctctatccttgtacacaggcactcctctgtgtcatctcgccactccccttcaatcttctccaaaagatcatttcctctaaaacgccccgttcaattgtgtcatatcctgcacttcatttctggccttaccttcttccactcacacatgtttttctttccatcataaagccctgttctctcctacttgaccaaatcacatcttttcacactctgatgcctttgtacatgctgtcctgtcttccagaaatgccatatttcctattttctactgttttcctagcaaacttccactcagtcccagaccttcaatacccagcccaaaggtcacataaggcatattgattcatttcagatccacacctcaggaggaactaaccattccccacttgggctcccacagtccttcctgaatacctcggatatagttattaccttggttgtttgcataacagcctccttctctgactttaagctgtttaaggaaggaccacatcttagccatctctaaacatgctagctcaatgctcagcacattacaaatgctcaagaactttgcattaggaatttattttaactttctttctcatagctcccttgattttacataactgagaatat

SEQ ID NO: 31082 - DNA, 958 bp, Bovine  19866881369635
  misc_feature (1)..(1): n is a, c, g, or t
ntgcctcttgggaaccgaatgtctctgggacctttggctcactctctaaaggctgttgccatggtttcatcctgctgattaccttagacattgacatttacacaaatttgcctttcctggcacaggttgttgaatggccctgggaggttggtaagatgttggttgcctggcgagggaagctggtctgcagcaagatgtttgaagctgatgtttcagcagctcacgaaggagaggccctgggggctatttaaaaagtggtggtgtgccatatggctgtcagcgagtgcctgactgagagctctgtgctcaggagaaggaaagaaaggtccctgtgtcatcgctggggtgtagggtttctcgtgctcattttgttcagggagcactgttgcactcaccccttgcttaggcaatgctcacaaatgcagagtttaccttaaactactttcctggggggaaaaaaaaaggaaaatgggaaaacaaatgtttatgagtaagaactagaagattgtacttgactccctacattttgctccagaatgcttcctgctgtcactaaaatcaatcctgccctcccaagatggagatctgcccccttgggagaagacagcatgttaaagaatgggcaagaagctgcaaaggcgattcccctcccacaaaagaacttccataagtgtcttaaaccaggcagtggttcagtctccaggtgatgattctgaaagaacaacacactcgaacgtgtgtgttctcagatgtttgttcaaacatctgagaaaaaaaaaagcctcgtgggctgcggctcctcctcactggttcatgctgatggagtggggagagcagcggggtgattaactccaagcaatggataactgaaaactcaggatgcttgacttcagatgtatggtataatatatggaaagcgtacatatcttactgtgtgtttgccttcttaattatgttt

SEQ ID NO: 31083 - DNA, 1039 bp, Bovine  19866881370245
  misc_feature (1)..(1): n is a, c, g, or t
naaggcatgtgtggataaatgaattcccctggagccggggcggcccttcccctgaaaaggggggcaagctctgggtaccctgaatggagcagagcagagaaggcagttggagtgccctggagcccggggggtccaagcagctgtcagaggtagaggtttgctgaggaggcaacaattgccacactgttcctcaatggaggattgccacatgtccccagccccctgcagtaagggatgggtatttacttttccctgctgcactgttggcaaaggaaccccccagagctcagccaggagaagggaggatgatgggcccgcatcagtccacaggaacactttgtctcgcatccacactacctgggtcagcaaaaccagcccaggcgcccagtgaggtgaggaatagtgccatcggctctcttctcctcctgggtgcccgcagagaccccgtggaggcccagggctgcgccagcagacagcctcccctctctgctgggggcgtggagccccgggcagagtggaacatctgtaaaatggggatactgataataatagaaactgcgcagggcggctgtgagacttacacggagtaatggatgtggaaagtgcttggtaaactgtaagacattatacagatgtgcatttacaatttgtaaatgaattgatgggagatggcacaggatgcttgcccaggaactacttggaggcagaggaagttaaagaagggggagtggccgcaaagcgccccgggaactgtgaccgacacagaaagacagtgtgtggaaggtacatgaataaacatgagacatcctccgactcctaactgcctaattgtgttccagttaacaaggtagacaggcagctgctggtttctcccaggcagggagggccacctcattcctgccctgcttagctgcccacccagagtaataggaaccagaccctgggcgggggggcctcccctccctcctctgccacagcctggccccctgccccttcatgcttgcctccatgcacagcagtccctcgggggcaggagcca

SEQ ID NO: 31084 - DNA, 716 bp, Bovine  19866881371975
  misc_feature (1)..(1): n is a, c, g, or t
naccctgagagctgagacccgcccacccccccagctccatgcccacggcccattatatgcccgcgtagaatgattgctatctggtctgccaagtaactcttggcttttcagtaactaatactgcagtgtggagccaaaagagcggtggtgacacagtgtggggggaaacgcagcggctgattcgaggggcctcggctttttgcaaccatagttctagtttctcagtaggattcgttttgtccccatcattaccttcttccttgcctcccagcctggcaccaatggcttgatcagagaaccctcaaatgctgggcataaggtgccttactgactccccagggccaaacaaagcgagatgtcccccgggcaaggaggaccgcagctcatccatccccagtggccgcccagacccccaccgagggagcagagacagactggctgtatttttagctcccttgtgggcccctgagccctgccccactttctgaaaacagagggcttggggcccaacaccatctggacttagtagtggggacggtgccttctcctgccgctcatgagcagaagccagggggacacacagccctttcctcgtccacattttccaggccaggaaatccacgcagtgggggctccaatgggactggggtctcctggaaccacaggtcctgcgtccagggctctggcagggcctccaaaggctttgctatgggaac

SEQ ID NO: 31085 - DNA, 1404 bp, Bovine  19866881406362
  misc_feature (1)..(1): n is a, c, g, or t
ncccagctctaccccttgcagccgacttaagaaagctgaggccagagccttgtttctgcatctagaaagatggagatgctgatgatcttttctgacttaaaatggaatctcccctcccttccctgcttcgtttcctccctactatatattatcttgtctaaacttgggtcccctgaaaacacagcctaagacctgggtaccacagcatgtgggcagcaactgcagagggcaggtgtgatcgagaaaggaagggagaagggacggtgatggaggtttgtgagctggttttcctggggtcaatttgggctcaatcccatggggatcctggagggactatttaggcacatccagagctgtcccgcaaggacatgtacagagcctggagctcttgaacctgtctccctgatgactgtgcctctgtgagtacagagagccttccccagatttcagagaaagcccctgatttacctttcccttattcatcttcctcccctgagcccacacagatgtaaactccccaggtgcagggatttgtccactgctgtgcctagaacagcgcctttcacatagtagacagtaaatacatgtgaatgaatgaaccgattaaaaagaataacgtacgcaacattctaagcctaggacccagcttggggtaagcatccaatcagcagccattgtttccatggtcaaattaaatgagcctgacttgtgccctttgtggtgcaggtgagcagagggcagaggcacttttctcccacacctttgagccccctgggcaggcgagccgacagatgctggggtcgtgaagagcagcgggccaatgccaggcaaagtgaactgatgattcctggcagcaggtctaggctctggtccggatagccccccatccacatgacccctgatgggctgactaatggggctctcgggtcccgccccagggaacacttgtccttgctaattgtgtgtcagaggaaatctgtttccaatgtcaaaggcagtttttaatctgctgtcagagctcaaagactgtattccagccacaagcagggaggtggtgtgcgctagaagtccccgctcccggagctggggctggggtccctcaggctggtccctgtggctcgaggccatcggagctagcctgcccctggctgcccgtcatctgctggggattaccatgccatttgttctaattcttgttgacatttcatttcacacgctattaaatgaacctctccagaagggatgggagagaagtttgctctagcgagagaggaaaataatgtgtactctggggtcaaacaaggtcctgatttgtttccatatagaaacctgagtggatctggagccatgacccagcccttgggaggtgggtcaagggtttgggcccaggggctcccaagtcat

SEQ ID NO: 31086 - DNA, 1250 bp, Bovine  19866881473410
  misc_feature (1)..(1): n is a, c, g, or t
ntcccctgccggtgctgccacaagctggtgtgttatttcaccaactgggcattcagtcggcccggccctgcctcaatcctgccccgggatctggacccgtttctctgcacccacctggtatttgcctttgcctctatgagtaacaatcagattgttcctaaggatcccctggatgagaaaatcctctacccagagttcaacaagctcaaggagaggtgtgttcactgtgtctgtggggctgtattttacaggtaaagaggagtaagtcttttcttctgttagtcgtcacctttcctctgatccttgggtccctccttctgtcaagggctctctgtagtgtccctgctctgggagttccccgttgatcagcactttgagctcgtccttgcctccctgcccctgtggctgctgtgcccctgcctaggatatgctcctctctcttctctgccttgcaccccaactcacccttcaagcccagtgctcaggattctattttcaaatgcttcggagagagctgcatctcacaaaagcttcacaagtgctagtgtttcattatcatttgtcacctgcaaatgaaccccaagggaagggctggtgtctatggtctttgtacaccagtggctgggtcagcgcccagcagagagctggtgctcagtgttctctctccaggcttcctgggctgtcctctgtggggagtggtctgtcgctgtgtgcatggttgtagaagggcagagaaaatccatgtcactagagcacagcctccagagaggagagcagggagcttgtccatctgttcactgctgtgtttcaagcacctaaagcagtcagaggcacatattaattgctcagtaaatgtttgttgaccaaaaaagtgagtgaagagaaaatttaggctgccttttcttttcctgggaatgtcatgggagtgggggagtttggggggcttagacagcctgggatcctgggtgtgatgatctatatgtggactggttgctgtctcttttatccttcttccccatcttgggctccacttctttctcccttaggttactccacccgctgcctcctttccctccccctcctcccatctccactacttcccactgttccccaaatgactgaatgagaatccagctcaccgactctgtccctcctcacagtaacagagggctgaaaactctgctgtccactggggggtggaactttggcacctcgaggtgagtctgtgctattgggtcttctctctgggg

SEQ ID NO: 31087 - DNA, 905 bp, Bovine  19866881662156
  misc_feature (1)..(1): n is a, c, g, or t
ngtattgctggttttgtgattttcctgctgcctgagtgttccgggtacaggtttctacatcggtgtatcctgctccatgtctcctcgggtaaagcccccagccccccgcaccacgtggccacagatgcttaatcaaaggacgcggatggggagaatgaaggccccgggccgctctggagtgtgcctgcttcagaaatacactgaaagaacgagaccacgcagtttctaaatcagtcatttgggctagtttagcatgaaaggctctgatgaactgggactgattcatccattctcggtgttctggggaggcacacggcagaggtccctgagaatgccgtgaacttccggcatgaataacgctgcccttctcccctctgtcgccaacagggcagccctctctgcaggtggcccggacacacagctgccggcctgagctgccaaggcagagggacaaggccacaagggtgggctgagtgtgtgtcccaagtctgcctcccacagccaagcccccatcccctccccctatgctgtgtgaggtcaccacggtgacttcctgtcttcggtatgtcagggctccatcagagccaattggcggcgggtgcggataagggtctgtaagcaggggtggctgtcagatgacctgtggccaccaagcacagcatcgattctcgcctgtgctggggcccacagaggatgagggaggctggaggaggagggagccctttctatatttagctcccactctggtacatcccggtggacagctttgaaagaggctgacttccagcccagcatgggaaggtttaacattcctcaattaggcacactctgtgtggggttgtgttttgagagggttttttaaaaaatagataaaaaggaaagcaagagggaagagaacaacaaag

SEQ ID NO: 31088 - DNA, 1161 bp, Bovine  19866881800137
  misc_feature (1)..(1): n is a, c, g, or t
nctctcccctccttcctgtctgcattccacaagtcctccatcatttgaggatgtgctgttattgttttgggtgagtgctgggtgttgagagccgcatatggaaatccaattgtgtcaagctcattatagccttatataatttgattgcaccacttagagccagacctttcttgtatctgggctctgtcttcattactttcttgagatgaaagattctcctgctctcctctgtggcacttcttttaatcttatcttaccctgggctctattaaggcaacagattgtcatatcaaatgcactatatcgtttaatcatttctcacacaggataaagaggtctgcaatgtattcacagaaccctacccagcacatgtaatttggtgaggacttttggcttgactttgagctcctgagggccagagtctgtggtttatgcacattttcatcttaagcacctagcacagagctttgcactgaatgtttgctcaagtgaggcttgtgatggcccaggaaggaagatgatcctacacagttggccagaaatccacgttaaaaaagccactgtgatgcactcagtccttgtgtgggctggttagcctccctctcttctatggccagaagtacagtgtaagagttaaaggaatgtggatatcatctaggctgttttaaagacaaagaaatggaaaaaaaaaaaaagataaagacaaggaaatggaggatgtgaggggaagggactttttcagggcaagacttcagctcagatcttccaaccttcaggccaatgctgcttccataacatccctcttcttccctacatttaagctccattcgggcaagttttaacctgatgaacaaagcccaaaacttgcattttcaacagctgtggagattccaggtttggaggagaggtcaggatggaggattctgccaccctggggacagttcctggtacaggctaataagcccaagaattctgggggcccctaggagcctttcacgatgaagcacttcctggctggctggctgccaggtgtccttggagcgtgagtatcgacatctctgccctgggagaggcagaggaaggagaaagggagagaacggaaaagccgaaagagaccatgggcaattgcactcttaagcattcatctcagagaaaagaaaa

SEQ ID NO: 31089 - DNA, 726 bp, Bovine  19866881930401
  misc_feature (1)..(1): n is a, c, g, or t
nggataaggaggaaaggggatctttctgaccttgcccggttttgttcccactagttctgaggacgttttgtaatatctctaccattcaccctttcatttccttgttcttgtcaccaataggaaatagtattagagccgcagtcataggactacttaacttctactttactttctttttttttcaagccagaagtttacaaaacttggtgtggagaagagtaattcccatgtcctttagtattctcagagtccctagtggggggtcagccaggctgaccacctcttaagactgtccttcatttgttgactacatgaataaaggaattagattaatgccaagaatttgcaaattccttcagaagctgccactagctgacaaaggggccaatgttgtatagggcatatgtgagcagatggtctggaggtggacctgagcaatggtttaaagtctccctgaaaatcttttgttgttcataaaaaggcaagagcacacggtttggtgaatacagatacattttaaatgcacaaagtcagcagttggcagactataacccttgggccaaatccggccctccacctgtttttgtaaataaagttttattggcacacagccacatccattagtttcatattgtcagtggctgctttccagctaccacagcagagctgagtagttgcaacagagaccatatggtccacaaagcccaaaacatttattatccacta

SEQ ID NO: 31090 - DNA, 2651 bp, Bovine  19866880187991
  misc_feature (1)..(1): n is a, c, g, or t
nctttgggatatggtgggaacacagtagattggaattccagaggatgagttctaaatctccaccttgttaccacaggagatagggcccaaggatggtcatcattaatttcttctctgcccatgctcacatccactcctcagactaagtggtaagagtctatttgccctctccctcgagctgaccagagtgactttgtttaatcaatatgatgcggaacttccaagactgcttcctcctgggatgagttgttctgggacagtccttcttagaacccaatgactaagttgtgaaacgcccaggccacataaagcggccaggtggaggcgctctggttaacagctccagctgcacttgtagccacagccagcatcactgccagccatgtgagagccatctccaatgtccagccaagccaaacttttagatgactcctggctgcaaatgcatgatgaatgacccgggtgaacacagtcaactcaaaggaccgtaagagataataacaatttggtgtttcagctcagttcagttcagttgctcagtcgtgtctgactctttgcaaccccatgaatcgcagcacgccaggcctccctgtccatcacctactcccggagttcactcagactcacgtccatcgagtcagtgatgccatccagccatctcatcctctgtcatccccttctcctcctgcccccaatacccccccagcatcagagtcttttccaatgagacaactcttcacatgaggtggccaaagtactggagtttcagctttagcatcattccctccaaagaaatcccagggctgatctccttcagaatggactggttggacctccttgcagtccaagggactctcaagagtcttctccaacaccacagttcaaaagcatcaattcttcagcgctcagccttcttcacagtccaactctcacatccatacatgaccactggaaaaaccatagctttgactatacagacctttgttgttggcaaagtaatgtctctgcttttcaatatgctatctaggttggtcataacttttttaagccactgcattttggagtggtgtattatgcaataatagacaaccagcacaattatcaactagcttttacctttggcaaatcagttcacatcttcgaatctcactctcctcctctgtaagataaggagatgagactagaaaaactcaaaggtcaccttgagctaaaagattttataactgtagttctcatcaacatagcctcaaggataatcaatggtatatccattttttaattaaagtaaccacgggaaagtgaggtcatttcagagtaagccaaatatcattctcctcatgaataatattttcaaggaggaccaggaaaaaaaatacactaatgaagaagaggatacgtaaaaaagaagagtgcaagttcacatttaaaaaaataaaatattactacttactcactattatatttaacacatttaataacataagtcttcttatcaattctgtgtttggctttgaaaacttggccaaatccacctgagccaattggtgttacttctgtgaaatcgttgaacaaccttgagagataaaatgctgctgttattctgagttcaatgtcctctgttcctccactccgacccttctgctttcccttaaaggcactagtgaaatggactctataacaaataggactctccccttctgagtaagaaggatccatttcacagaaactcttgaatcacaaaggataagtcttccctcttcccatcccaacataacagatcactcctggggagtcagtcaccgcctggctgcatgaaagaatggtaaagaatcttctattccaagtataaaactttagagaagagtgccagactgtgttccctgctactaccaagctgtcatacaagaaatgagcctgtttatgtttgcacctctctgggtttcccctctctcctgccccacattccatcattaagacctgccaattttctttccaaaacacatctgcgggtgtctgcccactttcccccattggcgcaagcttccaataagactcccaccaaaccctcttcacaagacacaccacctcctcaccttcctctgctccagtccacgagcctcacagcaatcagtgtgataaatactaagtctgatcacgactattggccaaacgcttcccaagcctgcccctgcattcagcaaaacccagaaaaccctgacataggctaccaggggccacctgtttgtccccgtcccctctccggcttgtctggtgaccccggctccttggccactgccctcctggcacatggctttctctcagttcctcgggtgctcacattacctgtagcactttcgccttcccatgtgctcctctttcacagagtaccaggggctccccaccgccctgtgctaactcatccctcaagcctccccacaactgtggcccagagaaagccctgcctcatccctcaccctaaattcaagggtccccaaccacaccatggcttttcctttagaccgctggtcacagtgtgtaattatcatccccacaaaaactccaaaaggacacgggctgcttctactgttcctgctataaatacgatgcccagcacagtgccagatatatattaggtacttattacatacttg

SEQ ID NO: 31091 - DNA, 1076 bp, Bovine  19866880419625
  misc_feature (1)..(1): n is a, c, g, or t
naggaagagcagcacaatggtgaaggaagggtggatggtccattacaccagcagggacaccctggtcagtaatcacaggcatcttattatggtagtgaaactctgttatgtgctttacttcgtgcgttttttaagtccaaatgagaatgagatatatattaagacatcatagtacaccagaaccatctttatatttaggatgttaggaatatttaaaaggtggactatttaatgtactatttttatagattggtagaacagtacagagtcaaagcaagtctgatggtacaccaccaaatgcacaatctctgaaagaaagaattggtattccctggtggcttacatggttaagaatctgtctgcaatgcaggagacccaggttcaatccgtgggtcaggaagatctcctggaaaagggaatggcaacccactccagtattcttgcctagagaatcccagggacagaggagcctggtgggttacagtccatggagtcgaaaagagtcgaacacaactaagcgactttcacttcacaaacttctgctctgcaaaagacagtattaaaagattgagatgacaagccacagacttggaagaaatatttacaaaaaagatatctgtaaaagactcttctccaaaatatacaaagaactcttaaaattcaacagtaagaaaacttaataatctgattaaacaatgtgctgaagaccttaacatgtacctcaccaaagaagatacctagatagcacataagcatatgaaatgatgcgccacatcttatgtcatagggcaaatgcaaattaaacagtgagatactgctgcccatctgttagaacagccaaaatcataaacactgagaacaccaaattctgacaagatgtagagcaacgagagctttctttgattgctggtaggaatgcaaaatggtattgctaacatttgaagacagtttagtagtttcatgcaaacctaaaatgcttttaccagatgatctagcagtcgtactcttttgctgtttacccaaaggaaataaaaacttacattcacatggaaacctgcatatggatatttataatg

SEQ ID NO: 31092 - DNA, 717 bp, Bovine  19866880442968
  misc_feature (1)..(1): n is a, c, g, or t
nacgcttcttttctatacagtcacagctgcagtaggcagtgaggaagcaggaggcgtggggtagccacgtttctctaaagcgggtgattaaggatctacacagttatactttttgctgctttcttttttcttccgagccaatcaaccagttcctagcagagtcagcagatgatcaggacctgagtcgtttcttgatgtgagcactggagcttttctgccggccacatggcaggaaggaggagagggtgaggtcaccaggcgtttccagggctacacttccttgttgtcgctttcttctgttctgttgttggttgttcatagttttcgttgaagctctagcttaaaaagaaacttttttttaaaaaaaaaagactgtttggggatttttttttttccttcttatatactgaatctacaaaatagaaactacttcattttaattgtatattattcaagcaccttggttgaagctcaaaaaaaaaaaattatgcctctttaaactctagcaattataggaatatttatgtaactcttatgcttcagaaaaacaaaagtatttgtgtgcgtgtgtatataatatatatatgcatatatatttatacacatacaattttatgttttcctgttgaatgtatttttatgagattttaaccagaacaaaaacaaacaggcattccatcacaaatttttgactaacacaaaatctcattctacctg

SEQ ID NO: 31093 - DNA, 1271 bp, Bovine  19866880510015
  misc_feature (1)..(1): n is a, c, g, or t
nctttaactttattgtttatattttcaagagaatgaaacagtttccatcaccaaggattttggcaactcatctccattatgacaaattacctgggtccatcttcaagaacaaagccaaggtgagtgtccctccactggtatttcaatgtgaagttcttcatgtatagatattggctttctgaggtataggatgagtttgctactcatcacagaattttaatgaataaagtgtgcagtttggtgtttcttgttttttcttcagataaattggctatgctgctgctgctgctgctaagtcgcttggctacagttgcattcaaatgaaatgtattttcagccgggatataaaacatatacataaagtagcccaccaggctccactgtccatgggattttccaggcaggaatattggagtgggttgctatttccttctccaggggatcttcctaacccagggatcaaacccaggtcttctgtattgcagacagatcctttactgactgagccaccagggaagcccttaacctccattaggtatttgaattccaccaagtggctgtctggactactcacatctcccattataagggactcctctgtcccctctgccaggtgtggatggctctgtaaaacagtttttctttatactgagaatctcccaaattggaaatactgctttaatccataattttcccagtttaatgcagttcagtagaatcacaaacctcagtgattctttttccccccttaattattccatgagacacagagctaaagtaatatataaagcatttggatttggagcaagcagccttttgaacaaagctttactttcacaagaaagcagggccagagatgaacgacagttaaggtaagaagttgatactgagattttatccatacactccagcaggtgaaagcctgctggccttcaccatgctcacttatgtctttgcaaaattataaattgctatgagccagagagattcctgagtggtaaccagagccccaaatataagaccctcaagtgacaagaatctgctgtatttggattgggggcagagttttagatctcagcaaagacatagactagcacattcatctctattcagttgtaccctactaccgtcagttcatgtctttagattgatgaggcgttctggaatccagactccctctcactttcatgccatctacaaatttgataaatagagcttctatatcttaatctgaaatcctcattaaaatgttgatgatggtctagtcagga

SEQ ID NO: 31094 - DNA, 703 bp, Bovine  19866880547913
  misc_feature (1)..(1): n is a, c, g, or t
ntgaacaagaacaacaacatcataagttgtgtcaacatttggaatatctgcataactcggtgaaccaatattttctaaatggccaatgtttgatataggaaatcatgccattcaaaggacaagctagatcatttgaatgtaacatggtgcaaaaagtccatttcagattccatatggcaactaatcggccttttaagagataattacttgctgagttttggtatagaatcaaagaaggcaattggttgttatctaaaaaagatattaaaattttactcccttttccacctaaatgtatatttaagacaagctttccttcgtatagttcccttaaaagagcacatcacaacagacaaatgcagaagcagatttgagaaccctggtgtcttctattgtcagacactaaagatattagccaaatggtaaaatgatgcccttcttcccactaattgggggaggagttggaaaaaaaatgtttttagaaaacaaatatttcatttatgttaatatgtaatggatttattattttaaatgattaataattaaatgattttttaaatttctaagttttaatttccagtatataaatattgacagctataactcacataaacaaaagctctctgatttcctcaataattttaagaatataaagtggtcctgagagcaaaaaattgagatcttttattacagggaatgagtg

SEQ ID NO: 31095 - DNA, 913 bp, Bovine  19866880622174
  misc_feature (1)..(1): n is a, c, g, or t
ntgtgctgtaaattaggaagacttggcctcttgaacagaagagaaaagcaaggatgtgaatacagttagcagtgggagtgagacggcagcaggagccactatgaggcaccagtacattctgaacagtaggtaacacttgcagaaagatgacgccagatgctggtgttcagatggagagaggcgaggtctgtgtgtgagatggtcaggccatcagactgatccagtgatggggaggaggagaatttgtgagacagactgtagaagaagagtagacatgacttgagggaatagagttaaagagctgggtgaagaagatgcaaaggaaaaaggaaatgactgttccttgtgaatgagatgcaggcaagtgtcatggcactgatggtgtcaagggagtccaagacttggagggaagatcgttgttgtctaactctacaatcccttggactgtagcccagcagcctcctctgtgcatgggaattcccaggcaagaatactggactgggttgccatgcccttcttcaggagatcttcttgacccagggatcaaatcctcatccctgtgtctcctgcatgggcaagtggattctttaccactgcgccacctgggaagcctggagggaagataacaatttgtatttgtttagttttaggtggcatttggacttccaattgtaggaggcttaccaccagcaaggaataaatgacaaaggaaacacaaccaggatgagaattcaacaagacagatttcctaaggttttgagtctaaagggagaaaaagaggctagcggcatgctggcaatcaatgtgttaaggctgaaaaacacaggaaaagagtgaaaaattgttagagcacagagaacccccattgtttcttaagacaaaggttataaccatttactaccctgctattcta

SEQ ID NO: 31096 - DNA, 1123 bp, Bovine  19866880649433
  misc_feature (1)..(1): n is a, c, g, or t
nttaaattgtccttttctgcctataatgaaaatgtacgtatcggctctttaagcttgaatatagtcagctcatgggtagtaaagttacacattgtgagttcgtgtgaaactgtctatgagctggtccaaaccatccccttgttacttcatgtcctgcagctggggggaaatctgggccaggagataacatagataatggtagaattttccatcacagggaacaactgccagtgctaaaattaacacgtattgaacaacagtagcatattgagggcctactaagtagagggagagaaatacagtacatgcaatgtaagttacagcttttttgaaaacatttaagggcacatagtcttgaaaaaacaaaaatacactgaacctcttcaacctcattcatttttcttatgtttctagtacagtgcccagatttgtaccccacatcatgtttataagaaaacaacatatacttgaattctttagagaactgactttattgatgttaatggaatatcagatgggagtttggggtgggaggtgctgtcctgagcagttcaagcctaaatgaagattggctttctgctgagaaaaggctccacctgggagaccagtatgttgaatagccagcaggaatagccagtttataaaaatgttaaaaatgttcttctcttcctaccacacctcgacctgctctgccacagctctttttatagtaatgaagcttacattaattgtttgaaattcagttgctgccttagaaacgggggcaccatagttatttaaaaagaaaaagaaaaaaatctgttgagtagagctgtcatttactggaaaattaaaaagaaaaagggtagagaagagagggatgagttgatgagaaagaataggaatgtgtttgttaaaagtttatctttgcttagagaaatagaatcttaagttgatcaccatctatattccaagagaagttttactacagcttcagatctgtagtatcattttattaccttcctgtgttaaatacttagatttgttaaagcaatccttattttagattttaagtgtttatttctctaaacatcagccacttacaaatttaaaatcaatttaatttaaaaattaatttcattca

SEQ ID NO: 31097 - DNA, 1395 bp, Bovine  19866880656983
  misc_feature (1)..(1): n is a, c, g, or t
ncatggcccttccctcttctctgtcggagcccggctctctagccatctttctattcaacaagtccaagcactttcagtgtgctagacactcttgtaagcccctgacaaatattagcctactaaatcttcaaaacaacccctataaagcagatacagtgcttctaatttgattaattcatcgtattggagaagaaactggcccccagtcacactgatgggaagcagcagagccgggctccacgaccagccgccagccctcccgtgacactcccccgccccctgccccagcgataggaggcatctccaccgtgaacaaacacccaaaggcactaacgatgtggcacagaagctgaggccttgacctgcctggacatggtgacaagattagagggtctagacacagccaactcctgctctgattagtaataaacaattacagaatgcacagtccattctttccctgtgccaggagccctgcacacattattttaatcttcccaacagttctataaaataggaaatattattattccatccgatgcacggctcacagaagaagctataacataaagtccccaaataaaaataccacaaaaatcatttctgaaatatattaacacactaccccatcatcttgattcttttacagacttgtgagtagctgagtgagttgcttgctcctggtgtctccttagaggatggcaatttttacataacacatataatttagcctggggcatatttactttgctacactgggagcttggaaatcctgttacaagttgggcctttgcttgtggaaaacctcaagcaacttgaagcagtggctcccagcctggcaaagcttccttattcctggcttggggacacaagctttgggcagcggcctcgcagcccatcagtttgtgcttcatcccggtccagcacccacgtccgtgctgccccacagcctcctagacaaatacccagggtaagcgctctgtgtagcctgtgccctaattgctatgagaggagccaaactggggagggagacaggaagagaggactttttaaaacgtgaatagtttactcaaaagattttccgtaggaatgaagaagagtgaagattcatgtttgaatgcctatgtcttttttttttttttaataacagccttcttgagatactttttgcctaccgtacaattcactcatttaaaatattcagttcaatgattttcagtgtactcaaagcagtgtgaccatcaccacagtcagttctaaaacattttcttcacctcaaaaagaaaccccacattcactgacagtcactcaccacgtccccctaaagggctcccccactgaccctagataaccaccaatctactctcgtgaatgcctatcctaatgcttggctgt

SEQ ID NO: 31098 - DNA, 2034 bp, Bovine  19866880695877
  misc_feature (1)..(1): n is a, c, g, or t
ntgagggtagagcagattgtaagtttccgcatctctgtaagacttccaatagtgttaatgtttgttaagaaaacttaactgcctgtatgggtatgaattttagaactgtcttaaagacagcttaacacttcagcgtagatcaaaccacctgggaatgtttgttaaacatacaaatctgtaggtttgagtcacagcaacctatgtctttaataaacaggccatgattctgaggtagaggctcaaaatcacatttttaagcagttttaatgaatagttaatagtcattgtattactacatatacctaggaattgtttcttctggttatttttactaagacattttttcttttcagattcttttagataaaacagatgacccatcattgaggcagcagttacttcaggggtataatatgttaatgaatcctatgaagatgggagaaagattcaactttcttgccttggtacctcatcagagacttcatggtagaaatcatcagacgaatgcacgtcagtcaaaaccctctccatcacctgtagctgggtttggtgaacttgcttggcagtgatatttcagtttggacttttcaccccccaagttggcctaagaaaccagaataaagggaacatattttatatatcacaggtaaaattaagtattaaaatattttctctcttcatagccaataaaaataaaccatacagtaccactggaagttgatcttttaaggttgtatttgattcttggtacaaatgtttgttctcaatttaatgaaacaaattattgagtatcctctaattaataaagctggttgttataaagtgtaaacatgaatactgattggtttaataacaactggaaacaactggccattcacagggggctgattaaatagaactagttgctccgtggcatgtgaaaatcttctggaccaggatcgaacccgtcccctgcatcggtaggcagattcttatccactgtaccaccagagaagtccgaaagtgaaagaaaaaggagttgttcagttgtgtctgacattgtgatcccatggactgtattcctccaggcttctctgtccatggaattctccaggcaggagtaccggagtgggtttgcctgttcccttctccagggaatcttcccaacccagggaatcgaacccaggtctcctgcgtggcaggcaaattctttactgtctgagccaccagggagaccccaataatgggcataggttatcctaattttgtatacttatgggtacaaagcacagtccagttaaggtgtaatgttactaataaatctttctgccttcaaactcttctgctaaattcaatttatgcttaaaatgatcagaagggagaagaggcagaatcctttaaggaaaatgctctcatcagaatcctggcttccatcaggaaacaaaacagtagttgggagttgctggagtggtttaatggctaatcttcagtagtctagtcgcagtaactaatgatagttatcatgagcaaatgtttcctgtgtggtacacagtcatgtggcaggtgacggtggggacacaccagcccagtattttagggtctttttatgtgtcagggtctgtgtgagaggagaaagtctatgggaaacaagcaagagagccaccacttgggctgagtagaagcaggagcctggattttccctctcaggcactggctagataattagagccagcagcaggaggcaaattaaagccttactgggaacttctaagtagataggtgtttgtgagctttggatacttctctgaagccctgaagcaagactgcagtgtgggaagaagcgttggcaagccttcccaccaagctggatgtatccttcagcagctcttggagtccttctaacctacaatgctgccacagacaatgagatcagtgagacttctgactttaaaaaaggaataggcacaatgagtaataacagttgaagttgaaattgtgtgaatagtgttcttattttgtatgtggttttgtatttcttttgctcttacttcacat

SEQ ID NO: 31099 - DNA, 1298 bp, Bovine  19866880719994
  misc_feature (1)..(1): n is a, c, g, or t
ngactggacgggatagggtaagggataggggaagcagggagaaagagaaaaagaacggatgtgcacaaactgagggcagggaagaatgagccgtagatcttacgagagatccggaccacacaggatgggaacaatgatgaggcaaagaagattgtgtgagacttcaaatgacatcacctactttgctgaggaaagaacaaaatttggataatagagggactgaagatcttacttaattctaggcaaagctaatacttttgaatgaagttatctctttgaaagtaccagtttttcaggtaacaggttttcagggcagcataggatgcaccctacagtacttggtccaggctggagagcagtcctctcctctggtcacacttttcttctctgggttctcgctcttctccatcaggagttgctaactgaacagaagttttgggatctgtgagatgttcagtaactcagatgggactgttcctcaatcacagcttgatataggaggagctagcacaaaggaatagtacctaagtatcacgggttaacgggggtaggaaagactaaattgacatgatcgtgtttttaagtaagccgtgttttctgatggagggctttctcttcctgttgcattctcaattttctgaaaacaaaagcctgacctctctgtctgcttttgtgttgtgctaccactggcatgaaagctggatcgttctaggtttgttctttatagatgtgaatcaggaatgagatgcacataaagaacatgtcttaagtttcaattggagtgggttgctagggtactgccatgagagccagggatagaaccagcttcccaaacaccatctattttatcatcagacttcatgggagaattgtatgacccagagagcagagtgctcttgggcgggggcggggtgggggagtgatttttgcttttttcccctgaaaacccaggactgtaactgtgaccctgccctgcctcaagcttcccctccgccccactgccccgtcccggtgacccagttgcccgccccacctgccagcccacctctaggtaaagtgtaccagctgctgacaagctgcttgtgtccatgtgttgtggtcttggctttgtattgtaaggactgggtggagaagaagctggggttcagactaaggagtgactcgatagcttaagaaaatgaagaggggagggtaacacactcagaggtgttcacgtgcttgggaaggtgatagaaggcgattcagaatgctcttttccacccactctggaaatccacagccagttagtgatttctctt

SEQ ID NO: 31100 - DNA, 1732 bp, Bovine  19866880738845
  misc_feature (1)..(1): n is a, c, g, or t
ntgctttttatttttaaaaatgcttatcagtcttgacatataaaaacaatggcagtaaatccacatcaccctttaaatgttccttttatctttaaaatggcatgactaaaaatctaaacacaagaatggaaagccaggctggaacatctattctagttttatcactaatcactacctcatgacttaaaaatagtgacacgttttatattatgatttcttcagctgtgaactgatcctaactatgtaacggacaaggggaaaaaaacataagcatggtacatgaataaacaggttacaggtccagatacatttctccaggggagtttcactttagtgttcactcaaacgatcaattttaattttgaaacaaaaaacatctcacattagcttgatactgctccagaatcacatgacctgggaattctggctcaggcacagaggcaaacttcttgataatgtcttcgagggcttggagaccagccatccgcagctggttactatgatcggttgcagccatgaatgccatgcgaattaggtcagagagatgaagtaccaagaggtcatctaaaaataaaaatagaaggcaaaaaggaaaacatttccaaaattaagtgtaataataaaaaaaaatacaaaatgaatttgctttaaaaagcatttataatcaacatgttataccaagtttaaaaataaaaaagatatactttcaagaaagtttccatatcataatctctgaagaattgtggtaaacctttatacaatatgataacatgaatgatattataggatgtatgatgacatttgaagcaaaataactgattaccataactttctccaatggagtctgtaattctttggtcaacaaagaaaggcaatgccaaagaatgttgaaactactgcacaattgcactcatctcacatgctagcaaagtaatggtcaaaattctcctagccaggcttcaacagtatgtgaaccgtgaacctccagatgttcaagttggttttagaaaaggcagaggaaccagagtcatattgccaacatctgctggatcatggaaaaagcaagagagttccagaaaaacatctatttctgctttattgactacgtcaaagcctttgactttgtagatcacaacaggcggtggaaaattcttcaagagatgagaataccagaccacctgacctgcctcctgagaaatctgtatgcaggtcaggaagcaacagttagaactggacatggaacaacagactggttccacattgggaaaggagtacgtcaaggctctatattgtcaccctgattatttaacttatatgcagagtacatcatgagaaacactgggctggatgaagcacaagctagaattaagactgccaggagaaatatcaataacctcagatatgcagatgacaccacccttatggcagaaagtgaagaataactaaagagcctcttgatgaaagtgaaagaggagagtgaaaaagttggcttaaagctcaacactcagaaaactaatcatggcatccggtcccatcacttcatagcaaatagatggagaaacagtggaaacagtgtcagactttattttggagggctccaaaaatcactgcagatggtgactgcagccatgaaataaaaagatgcttactactttgggagaaaagttatgaccaacctagacagcatattaaaaaagcaaagatgttactttgccaacaaatgtccatctag

SEQ ID NO: 31101 - DNA, 2617 bp, Bovine  19866880762925
  misc_feature (1)..(1): n is a, c, g, or t
nctgccacttccttggaagaagggaaggagagaagagacatgggagaagcatctttacgatctccactgctgtgacgggaatggaaaggggaggagaccctgtgaggttgagaattgttttcccacggcccatttagaagggatagacagggatcgctatttaccgaatacttctgtactagccactgttctaggtgcttttctgatgtttccttattgaatcttcacaaccaagttatgtaggtattaatcgcatttaacagatgaggagacaaagcctgaatggaaccttcagagtatttcctttataacagcccatatatcttttctctttttttctcacaaatagttaatgtgccttataggagacaatcatactcccaagctgagaagtatggttgaagtaattgaaataaatgagatctaaaatgttcacaggggccaactcctccagtccatacccctaaaggaaaagctaaatacaatcgtctttactttgtaacatcaaaagatcactgttatccaggtaatcctagaaacaaaacggtatctcaattttaggcagttgagacgtttctagtctaagttgtcgggacagttacttcaccaccctttttttcttccaaactgaggatcagggtgtgggctgccatgagtcatctcctagtaacatatagatcccagaaaaagaatcaaaacaaggacacttaaacagaccctatttcccagagggcgaaggtctgaaggtaatggacagtcagaaggctcacccactctgttttaggcttggctataaacagagtttgaaaagggagaggactgacctgggaatactctgtctgccctcctctgaagtcagggaggaagacaggaaggaaatacccactttcctgatcaaaatgactaatcctgttcatgtctgagagttttgagtaaccatgcaaatcttcaggctcaaacaaaattaaacacttctgatcatcagacaacctcagaactttctactggtatatattcacatctcctcttttgctgcttaggccaaccttgaaattgtgggtttcctgagtgtctgggtaagaaacagcataattgtttttcttaccttactacctttttatctttccacaataagatttcttcaagaaaggggaggtggaaatatgaaaacaaatgttaaagataatatgctgagtataagcaattcaaaataaatgcttgtgttaaaaggttaacacataattttgatgattagtttccattgcctagggttctcaagtcttctccaattttggttatatttaagtcagtaagatgcagttccagtttgggatctacaggatgtagactgagacagagctaggcattcaggatgtattagggagtgcccatgggacaaacccctgtgggagggagagggcggaactccactgggtggaggcaagagtcagcaggggagtggccctgtcttccacagcttcacccagagtgaagatttgtcccaccgtgacccagaatggctgaagctttataacctcacctcgtcttcttcctacaagaaacagttctctgcagccaaaggagctgacagctagaggctgtctgccagaaacacgccagcaactggagcagagtctttcgataaagggaatgtgaacagtacatctctgtattcactactcatgcatccttatgatgtacctgtacccctaaaacatttgcatagtaagtgaaactgattttagtaaattattcttttacacaggtcagattttttgataagcaatgaatccagtacaactctatttatgtctcttccttctttatttttatcttttcttgatatgcagatgataccaccctaatgtcagaaagtgaagaaaaactaaagagcctcttgatgacagtgaaagaggaaagtgaaaaagctagtttaaaactcaacattcaaaaaatgaatatcatgacatccagtcccatcagttcagctcaggtcatcagttcagtcattcagtcatgtccaactctttgcaactccatggactgcagcacgccaggcctctgttcatcaccaactcccagagtttactcaaactcatgtcaactgaatcagtgatgccatccaaccatctcatcctctgtcatccacttctcttcccgccttcaagctttcccagcatcagggtcttttccaaggagtcagatcttcccatcaggtggccaaagtattggagtttcagcttcagcatcagtccttccaatgaacacccaggactgatctcctttaggatggactggtttgatctcctttcagtccaagggactctcaagagtcttctccaacaccacagttcaaaagcatcagttcttcagctctcagcttgctttatagtccaactctcacatccatacatgactactggaaaaaccatggccttgactaaacagacctttgttgacaaagtgatgtctctgctttttaatatgctgtctaggttggtcataactttccttccaaggagtaagcatcttttaatttcatggctgcagtcatcatctgcagtgattttggagccccagaaaataaagtctgtcactgtttccactgtttccccat

SEQ ID NO: 31102 - DNA, 1827 bp, Bovine  19866880867857
  misc_feature (1)..(1): n is a, c, g, or t
nttttatgtgtctgaaaaaagaacgttgagtgatttatctaattactttgatgtataaggatgtttggggattttgtatttatgtgcttatcaacaacctcagaaaactctttcacagtagccttggttaactacgtcccacagcctcagttgctgcttgaccactcagctcaggtggagaaaaagctgtgtaggtccacggcgttccctccagggcacaagcagtgccctgtatttagacaaggtctatctgccctgtcctgaataagcccctcaggggcctgcctatgcctcagtgttatctcagggacctccaggctccatgaggtagactccagttagccctagaaatagcaggctcactgtaagttagatggggcattattctttctactttacagggagctgaaattgagttataataaacttgtaaattgacaactcggaaggcatccgcagagcctaaaatggatctgcattttttgttttttctgattaccaccccacagctctatccatgaagttttgcacctttaagaaacagtaacacctgcacactggcttgtatgcctcaggtcccctgccctgtgagccatgtcaggatgggtgaacataaattctacgtgatggctgcctttgcatgtccccctagagacacctcctgcagccccgagcttctgctgagcacagctggaaaagaactgctgatgaggagaacctggggggaaagaatgtctctgggtgcaggcagaaataacatgtagaatgccctcagtcttacttggaattcacgttttaatttagatcctgtgtatcctttgaacaaccccgctggctgctatgccaatggccagatccacgcccacggggaccgatggcgggaagacgactgcacattctgccagtgcatcaatggggagccccactgcgtggcgacggcctgtggacaaagctgcatgagccccgtcaaagtgcctggggagtgctgccctgtatgcgaaggtaaaccttgtggatcctagtgagcccctggtgaatgtcgtgtcagagcaacttccaccagtgtgtgcctgcttgcgttttgtttcctcaggtgtaatgtctgcttcctgctgttagttgcagatgattttatgatacagcccagactaatcatttgggggagatgctgcagatttacagtgagagcagtgtggtctttattttaccactgcagataatgcttaactgaatactttacactcgaagaatatatgcattcaaattcagttcaccacaagcctaattaacatctaaaggtcaaaacagggaaatgaaattggaaataagacccatactcaaagcatggtttgttcaatttataatgcttctataagcccaagagtcctggcagctagaagaaagacctggaaccatcaaaggcagttgtcactgcccagagtcctccctctgagtgtccattgtttaatatcgtgatggctgtggctttgcaattcctctcaggctttcacttatgtcttggttacctacattcatgacctcttttcctttttagtgaagagatgcctgagatatcctggactcgtctttccatctcaacccctaagccaggccattttcaccatcctgggaagattctttgcacatttattcaagtcagtcttaatccccggtccatatatgttaataaaagagactgaatatgtatgctgatagatctaatagagagtatccatcactaagaaacacgtttgcatagtgaaatgaaccaaagtgggtcagaaattaatccttgtagaagatggatccttctagaatttttaaaaa

SEQ ID NO: 31103 - DNA, 971 bp, Bovine  19866880953058
  misc_feature (1)..(1): n is a, c, g, or t
nctttcatcgtctacattaatagagttttcccctctaacttcatttgtaaatatttcacctttattatacctcttcccaggctgcaattatgttgacattttgctgatttatttgaatggttttctgactagttatggtcacatttgaaaagcaactgtggtaacagaatgacatatgacgacacagtaaaacagattagctgttgtaaacagctccttcggttctgacttggccagctttatctccagttttatgagcccagacaggctaccagtaattggtggactataaggagggctgatatatatggccatataaaccaagtgaagctttggaattttcacatttattagatgttcacatggcttaaccaagtcaagccaccaccaccaacccccaccacaccctggcaaaaaatcttaaggaacaaaatgcctgaattaggtctgaaaagacaacatcattagtcatctttgtctcccataatcaaataagcaggcttgtgtattgatatggaagagctccataaggtaagcaaatcattagtaaatcctcagaggagaagtaatgagacagataagaattagctttgtgttatcttatcacttctatatgaaggttaactcataaaagaaatataggaacatatctgccatagagaactaccctacctatagtgagatttttccccggaagacttttcttggtatgtgtctgtctgtgtatgcatgtgtgcacttgtatggatttgtaggaatctaggatgctggtaattggagaaggaaatggcagcccactccagtgttcttgcctggaaaatcccagggacgggggagcctggtgggctgccatctatggggtcacacagagtctgaccgactgaagcgacttagcagcagcagcaggatgctgttaggcagctgcttcccatgccaggcctttccaggcctgccgctcgcccggagcacac

SEQ ID NO: 31104 - DNA, 1948 bp, Bovine  19866881007774
  misc_feature (1)..(1): n is a, c, g, or t
ntgatgtccctgcctggagatttggaaagagagaaacacaatctggtactagctaagtctagagcaagcatataattaatatgtagatacacttctgtgcagagtttattaacaaaaagcaattattagattatagctagggtagtaatacaaacacttgatactatcaacttaaaactgatagttgaaaggctttattacaaacaaattaggcagcaagagtaacctcaagcagaactgtccctttgctaatttccagcaacagctgtaatgtgttaaatttcccaattaaggtagttgaccactagctaagtaaaaggaaaatgttttttttccttcaaaatagaaataatcatacactgtatatgattggcaatttgatacttaattagctgggtcatattttggaaataatgtgataacaagtcaaatttttttttttttttgtcttttactagtttgagaaacggcagatcagctcacatgtttcctgttgggataaatgcagtatattaatctgcttcctgacccacctaattagcttcaccaattggctgttgtcatctggcactggactttaaaaattttttttatttattttttcattgaaggataattgctttacaatattgtgttggttactgccatacatccacatgaatcagccaagatatacatatgtccccttcccctcgcacttgaatctccctcccacctcccaccccatgccgctcctccaggttgtcacagagcacactggtctgagcgccctgagtcatgcagcaaatccccactgtatctgtttgacaaatggtcatttctatgtttccacgccgccctctccatccgtcccaccctctccctcccacagtgtgctcacaggtctgttttctgtctgcctctccactgccgctctgcaaatgggttcgtcagtaccctagattccatatatatgtattcatatactatatttgcttttctctttttcacttcactttgtataataggctctaggttcattcacctcattagaactgattcaagtgtcttcctttttatagctgagtgatattccttgtgtgtatgtaccacaactttgtccagtcatctgtcaatgtacctctaggttcctttgtctgtgagtcattccagatttctctttctcttgtcctgcacatcttttccatcaaccaagactgttggctctacattcataatttgtccagactctaaccgcttcatcctatatttaccattgccatctggtccaggccatgccccctttcacctggattaaagcaattagcctcctaactagggtgtttccttcttcctctgcaaactgaagtccacacagccgccatggtgatcctcttcaaagcaaatcaggtcacggcattcctcagatcaaaacttctgtggttctctatcttagaagaaaagcgaaaatccaggcaaatggctcaggaccccatgaaatttggctgcctttggccctctgacctctcttccctccattctccttctcacttactaagctctgggcacatctcacccttcagggtctctgcacttactgttaactctatctggatgctcttcccccagatcagaacagggtttactcccttatttctttcaggtctttgctaaatgttatcttctcctgagattttccctgatcactcaccttaaaattgcaatccctctcccacccaccatcaagtggtacaccctaccaagtggtgccagtggtaaagaattcaccagccaatgcaagacacacaagttcagtccgtgagttggaaaaatcccctggagaaggaaatggcgacccactccagaatccttggctggaaaactcccatggacagaggagcctggcaggccatagtccatggggtcccaagagtggacagactgagtaccaccaagcatcatcctttcc

SEQ ID NO: 31105 - DNA, 1043 bp, Bovine  19866881050464
  misc_feature (1)..(1): n is a, c, g, or t
naataccttattatcagaggaaatgtcagctgagccaggcgcattgtttctcaaatggacccgactgttgtaggatttaattggcgtgaatagttgaagcaggacaaaaatggtttttccttggggacccatgtactcagttaaaaggccaaaacagaaatgcttatgcagtgactttcttcctaaaaattcagaacacttcaaaaattcccacaaattgtattcacagcacaaccctgaaggttagtacacttatgatgcaaatatgtttttagggcagttcatgtgttcccataattccttttataggcatgcatattcattagaaacactgaaaatttattaagaaatcaccaaatgttttcaagggctgcaaaatgcaaaccatatgctgggagaagagagtatttagagagattctgagaacttaaagaatgatcagctcattaggtcttcctgcagtgtgtgtatttcagtttcaatgcttaagctctagatattttcacttgtttgtcttgaatggagaaatttgattttaaagtcttttcttgtagtggatatgcgtcttttcatcatttctgctgttttaaagtagatgctatgttatttggtatgtagatatttataactgtcatctcctcattgaacttggagtctttaatattataaagcagttctacccaacagaactttcttgtgatgatggaaatggtttgtgcactatataaattaatgaacgaactaaaattaaagattcatttctcggtcacattactatgtgttgctcatggctcctgaaatggacagcatggttatatagtatcttctttgtcttgattaatatttttggcttgaattctaccttgtctgatatcagagccttgactcctgctttctttctgtttgcttttgactggcacaactttgcagagccttttatttctagcctttctgaatcacttttgttttaggcaagtcttttatatacagcacagagctgaattctacttttatcctaggatagataactttatcggtataac

SEQ ID NO: 31106 - DNA, 1212 bp, Bovine  19866881068271
  misc_feature (1)..(1): n is a, c, g, or t
nttggctgttatccctgtttttctattttatattaaacatagaagaatctaaagtttcaaaagattaaataatttgcctaaagttagccgattagatacagaactggaaaattaaatccagaagtttatctcttcaaaacccatgtgttttctccacgagtgaggctctctctccctttaatcaaatagattaggacagtgctaaaagtgctataacagttactaaagaattttgtttcttgaagtcacagaaatacatgattgctgttaagtaagctttattgtgtcctggggttgagaattgtatattaccatagtgttgatatttctaggcgtgtttttatgacacattcagtcatactgtttactactgacttttagaatgataaaaaatcctcctttctctctgatttaggagcacgtctcttgatgtggagcctatctatacattcagagctcataagtaagtatgtgctttttctttgtgttaatcaacatcattgtaaatcagcctgattagtatattttattttctttcacgtatgtatttgtcatatgtgtttttttttgtatttggtagcgtttttttttttgtaaatgtaaaagaaagtggcagataatgtaatgttagcaacaagtatatcgctaccaaatagggatccttgctgaaattaggtattatttgcatgatatttaaatgatgtgtatatctgtctcttaaaatgaagttgaggcagttaaaattaactattagaaatcctgatctttttttccttaaagataacccggtaaaaatacctgagacatttaaaaaattgtggtcacatttcatgcttttcctttttccatttaagtttaagaaatgtacctgttcactcgatttagcacagaggttggcatacattaagggtcagattgtaaatgcttttcaggctgcatatttaatgttgcatattcttgcttttagtttagttttgtattacaacattttaaaaaggtaaaaactgtaagtgctttaggattgtacaaaaacagttcactggttggatttgatccgtaggccatagatcacactaaccactggtttagcagaggaagaaaaatgaatagtgctttgataattttttttatttgttgtacaaaatagaaaaagacaaagccacttgaaaaactaagcattcttatttctaactcattctaatatcaaataga

SEQ ID NO: 31107 - DNA, 761 bp, Bovine  19866881083969
  misc_feature (1)..(1): n is a, c, g, or t
naatacctgtgtgcccatgaatttagttattcgttctggaagtcgacttttctcactagataaaatcatttccagcatatctccatgtagcttttccatcactacaaaaactctttccggggtttcgaacatacattccaggtttacaatcccaggatggtgcaaattctgaagagttgcagaatattaggtgaccaacttgagtaaagttttactatgcaagtatctaacaatgtactgcagttaactgtatggaataatggcacaaaagatagctcagaaaaataaaagcaaacaaaaaggatcatggagtttgattttcaaagttctgtactgaagagaagatgcacgggaagggaaagaatgtctccccactttgattatataactgcccttgtccattactgcttttccttttttgtcatctttttaatcttctgatggtactctaactttatgctatccacaaataggcaccaactaccaaagttttagccaattacacagctttggttcttcagggctgtttgtaaaggtcttggctcaacaggtggctttgtcttgaaggtagtcatttaagtcctgatctcatattatatcttgatttggtcttccctctttcaggttcagcatctctaccaccatcaccccatttttcttaagcactattaggcgcacaggttggggcttccctgatagctcagttggtaaagaatccacctgcaatgtaggagagcccagttgattccgggttaggaaga

SEQ ID NO: 31108 - DNA, 1178 bp, Bovine  19866881104571
  misc_feature (1)..(1): n is a, c, g, or t
ncccaaaatagcaggctgtctttacagcgcacccaagctggatggctcttacttggagcactcatgactttaggtcacagctataactgagtaggattttgtcttattctgtaactgtcagtagactgtaaagaaagtttaaaagtattcaacttcacatcctagactttgaatgaggctataaaaggataatgatgtttttctcatcatttgctatgagatttttcggtaatatctgtttatgtacacttagcgactgaactgaactgaatgagaaagcgaaagtcactctgttgtgtctgactttgcaaccccatatacagtcgtatattccatggaattccctaggacataatactggagctggggttggtatcctttctcttctccaggggatcttcccaacccagggatcgaacccaggtctcacacattgcagatggattctttaccaactgagccactttcacctttactatcagaatagccatggtctaactgattagcctattaaaagaaacgagatattccgtgcccaaagtgaaggctagtgacgtgattttagtaggatgataaagtcacacagtaaacaatatctcttgttggcgttacatccttgggatattcttttgcacttcactgtcctaattgttcagagaaggcgatggcaccccactctagaactcttgcctggaaaatcccatggatggaggagcctggtgggctgcagtccatggggtcgctaagagtcgggcacgactgagcggcttcactttcacttttcactttcctgcactggagaaggaaatggcaacccactccagtgttcttgcctggagaatcccagggacggggagcctggtaggctgccgtctatggggtcgcacagagtcggacacgactgaagcgacttagcagcagcagcagcagcagtcctaattgttatgacagatctaagatgcagataaagtttagcattatacatagaacagaagtacctgttatcattgtgataatatatggtatcaatatgttatcattgtaataaggtgtgtccacgttttacttcatattttcgacttctactataaaaagtatgtgtgtgtactaactacaaagttgctaactgcttgattcatctaccttttagaattaacctgatctcgttttctaaagaa

SEQ ID NO: 31109 - DNA, 1747 bp, Bovine  19866881320622
  misc_feature (1)..(1): n is a, c, g, or t
ncatagatgtacccttctccttttaaatgaatcgatagtatacagcaggccattgtatgaatatgccttaattaagtgaatgaatcacttgctgatgaatagtcaatttgttcccagttttttgtactataaatggcactgtggtaaatattctttttcatatatttatctaccaggagaaattctattttttttagatgtgaaattttaagatgaaaaggaaagactattttaaattttgatgcataatgctaaactgtactacgtgtttgttatggttacttggaagacaaccaataagagtagtagaaatttaagatattgagcccatgttaaaatcgatatccgttaacaacagaccaaacttgagcaaaccccgagaaatagtgaagaacagggaagcctggtatctgcatccatgggatcacaaagagtggaacatgacttagcgactgaacaacaatagcaaatctattattaagtcataatttttgttatgagagatacattaagactggggagagggaattccctggtgatccagtgtataggaccatgttcttaaagcaggggacccagctttgatccctggtcagagagctagatcccacactccacaacttcaagatccctcatgctacaactaaggccagtgcagccaaataaaaaaataaatattttttaaaaagactagtgagagacttcaaggtactgatcagctattttacaacatggagcagtaatgaaatagaaggtatactcttcacctttttataaagtggcaatcagaggacttacctcatagggctgttgtgttggtttagtgagctaatggctgtaaaattccttagattagtacctggcagctagtaggtactcagcaaagtattactgatatttttataaagagaatttgttctcataaaagagtcctctcttagctttcatgatcttatttaaataactccttttggcttctgctttcatcaagttggagaccattggtagtgaacaatttatttagtgtgaacaagagacagtttgtatttaaaaatgagtgatcacattttatgctacaagatgtgggaggcggggggtgattagtcaaggcaaatgttggggccagcagggtctgccatatgccaagggtcagtgcctgaaaggtgagtggtaccagcaccagctctggtgtcaggaagtgaaagcaggccaagagtctatgagcgagatgactcacaggtaacgggacacccagaatcgggagttagaggaagccaggagcctggctcccgacacaggaaggctcaggccaaggcaagctctgaagctgtgaaattcaaggtggccagctaggggcccagggagaccaaagtgcacctctgtgtcagagggacctggctaatagctgtttctgagctgctccagggcagaagccaatcacagaagagcttgtctagatcctgcaggtacaagtaggtgaatgaggccatggaaagtcaggtctgatatagggagaaagaagaaatacgctttctgtgctagttgctagttgcaaaaacaccatgatggaaccctcctacagcaaggcgttgggagagctatacacgcttttattagcgaccctgcatctgctgtcatcccttgggaaatgaaatgttgctgtgttcttttcttggcatttctaaagtaatcaaacatctaaaattcatacagctttgctgagatgcaagcagttatggcactaaag

SEQ ID NO: 31110 - DNA, 638 bp, Bovine  19866881434534
  misc_feature (1)..(1): n is a, c, g, or t
ngaatagagctggctcactagtgtataaaccttctggctgccgtttcgttttctgaaaattaaagatttggacaaggagaacttttggacattttaagacttgttaattccaacattctattttggggaaaaagtggaaatttcaagctgacttttggggtaagacaatgatataaatctttaaaaacataaagtggagaagggtgtgggggtgggtctttaatttcctggattttcgtggactcaaagagtcaactcttgtcacagccacctacggggtataacccattataggtttctaagctgaatccacatagaatactcttcagacttgtgtggtagttgtacaaagctgaccatttataacctgctggggcttacttatgtgtcttaaacactcttaagacaaataaattgtcctagtggtctatatttggtgcctatttttttttttttgcatcccagtgtacagagctggactgagctggctgcttgttcttgatgcaaataaatataatggcccaattgtctcctcatgccagggggcggactttgagcacacccagagccctgtgggagcccacagaagggaggtggctatttggacatttagtctgtaatggagacaagttaacgat

SEQ ID NO: 31111 - DNA, 1584 bp, Bovine  19866881454650
  misc_feature (1)..(1): n is a, c, g, or t
ntgtatcttctagtttccttggactctctcagtacctttatgatttgtgcttttcccctgcattcttgctgttgtcgtagatccttctgtcttaagaggccctctcctgggccacacggacgcagtctggggcttggcctacagtgcagcacaccagcgtttgttgtcctgttcagcagatggcactctccggttgtggaatacaacggaggttgctccagccctgagtgtgtttaatgataatcaaggtacatacctttttctcctttttcttacagagtcttttgtaaaatgtcttattctaaaagaaacaaatagatgattctacagactcttactgttctaaatttaatttgaaggtttttttttttttaagcactgaaaatatatttggttgagtttccaacttagtatgtataattttaaaaagcatactatttggtgaagtagcaggcatttgttttgaatttttaaaaattgaaataatttatatacaatcaaaaacagatattaaggatacattttcatgagtttgacaaatacatgaaacttttgcttctatcaagatagagaatgtttccttcagtgcccaaaagtttctctgtgttattcacagtcatctcctcccctcattcccaaccagaggtacccactgttgtggtttctttcattataaattagtttttgtctattctaaaatttcatataaatgaagtcatacaatgtatactctttttatatctgacattttactcttactgtaatgttcttgttgcttatccatgtggtaataaatgttaataatttaattttattgtttgtagttatttctttaaaccactgtgtttataatttacctcttgatgagcatttggcttgtttctagatttttcctattatgaacaaaactcctatgaacatttgtatttttttttttaatcacaggcaggtaaagaccctgtaaatagaattttgggtcttcagaagtagatttatgtatttaactgtttaactttatgtggcatcgccaaactttctttgaaagcggttgtgccatgttgtaccacttattgcgatgtgtgagaattccaggagccctacatccttaattacaaacatttgttgttgatagtgtaattaattttagccattttgatgggtgtgtgcaatagtatttcattgtctttttaagctgtatttctttggtggctattttgagcactttttttgtatgctcattgtccattaatgtatcttcttctggaagatacacgtttttgaactgctgggtttacttagattttgaaccagattttaaaaatcagattatgatcacgtatacatagaatttcacttttaatatttataaataagttccagattttaaccaagttttaccctattctaaatgataaataaaattgtcttctttattcatgagctgccataatttgtgcctaggttttgacgagttgcctgcatttgatatttgtatgactctaccaataaataacaatttgaaattttacttcttgaattccatatttttaggaattagaattcctagtaactcactaaagttag

SEQ ID NO: 31112 - DNA, 1541 bp, Bovine  19866881468252
  misc_feature (1)..(1): n is a, c, g, or t
ngaagacttccggagtattcgtttgtcccttaaaacccaacagtgtttacacagaaatctattagccctccaactgagcttttggagaaatggagattttgcgatgggaaagtttcacgtaatatcctactttccaaagtatgattaacagcagtcctattttcaaatctgtattaagtccttctacatagtttgcttagcttttagttcagttttgaattatcatgagctcaatttaccccttcagtatgggaagacacggcacacacccccggcccaggtctcaggagttcttcccttacccagctcaaaactccatacacaggcattcagagaggctgttgaccctaaaaacccagtctcccacttttctagcacacggcagcatacagtctacctactgacccaggtccttgcttctctggcccgcgggttgtggtcggaggccgctggcggtggagcctgcagatggggagggctttggcaaggtggtgtgggcggcctcgatggcagtggtccccggcgcctgtgtcacagtgaccggctgtgctgctgtccctggaactggtgggctctgatctgctcttgctgtctcccctgtaagaaagtggaattgcactggggctcacagaatagctggtaggctgttcaggacagaaataagtagttcttgaacactagccatgagcaaagtcctatgctagctgctgtggaggcacgtacaatctgggtggaggaataagccgatgaatgaaccaaagatgaagtaatgataaaatatttaaaaggcagctcaaaacaatagcaacctaaacgaggctgaacacgattaatcatgaaattaatttgccgcacaccagaagcaatggttcatggatatatacgctgtttcagtgagtgttggcctagaggtagggggtgcttccagggctttcattgttttagagactgtgtcttagacgttttggttttggttcatggctaggcgactaactgctttaggtcccagtttcctcatctataaaatggggtaacagaactaatcagatggtaaagaccatctcgtttcttcttctaaacattactcctcatccacatgtgatgatttagattgcttccacgattttcgataatctgaatttattatgaattatttatgaatttataatttattatgaattatttatctgaattatttatgttgagggcatggggggcaagcggcccactgggccttggggttgtatagagaaccacgtgtctgcgtcagaaggaaacatcacatggtccccaaagtgaacagcacccgagtcctgggagggaacagcagccaccctcatggcctgctggaccccatggcaggtgtgccgttctacatctgtgcgtctgtattagtttcctggggatgctataactaattaccttaaactcggtggcctaaaacaacaggaatgtagtccctcagagttctggaggcagaaagctggaatcagcatcactgggctgacctccgtccagaagctcaaaggtagaatctgctt

SEQ ID NO: 31113 - DNA, 1211 bp, Bovine  19866881676811
  misc_feature (1)..(1): n is a, c, g, or t
nctggtttctgtcctcagagcacactgtcaaacagaagcatttaaacattattctttggtcagctcaccagaggttagcatctggcctctttaacagcactggttaaggaaaccctagatcagagtctgctgccttactccactcttttcctcactcattcattcatcatccattaactaactacttttcagcacctactttacaagccaggtgccattttaaggattcaaaaacatatggtaaaatcctagctcatgggggatgtagcctctttcaggttactggtcaacccagaggatgcagagcattctgtctcagaggccgcattcccgtggggtccacagtcaaggctttagagatactgctctgcaactttcaagctgtaggaacttggacaagtcatacaacttttgaattttggattctgcaatcacaagttgggatggcagaacctgccacagagggaagttgtgagtatcaaattggctgatgctcttaaagcactggtagtagctactctcattaagggctatacaataagacaatgcagagtgctagaggctgaggaagacaattctactgcccttctttttcattttttgtttgtttttaagacaatatggacatatctcccacatggacgcttaaactgcaaactttacatgttgttctgtgtatttccactctaggtttttacaagggccaaaaaaatagaaataatgtgattgatgaataagaggagaaacagagagccaacagaacaaaacataagaagaatgaggtggcttatctgtatacctgaattggctgttgacactaatttgctaagacttaatcatgacagtacttaagtgccaatttaaaaaccacttaggtacttgtgaattgaggtagctgtcaagttaacagcatagtctttaagggtccccaagttcacatccccagtcctccaggagtaaccaagcacattatgctgtcatttggaaggtatgtatctctaataacagcagcagtcacaacaaggctttttcctccctacaggacctaacacatcatatttgttgatgcagtaatttatttaggaagcatttaaacccacaatccttgtgtgggatctgtttcatcaaatttcagaccctgactatggaccttgggattgcagctaagaagggtgagagccaaccttgttacacaattgcgtgccgagaaa

SEQ ID NO: 31114 - DNA, 1137 bp, Bovine  19866881803709
  misc_feature (1)..(1): n is a, c, g, or t
ncatatgtgttactcctattatgaaatacattcctattaaaaatacctaataattttatttttagtaaagtaaagtagaaaatgaattgttacatttaaggagaggtcaataaacaattataaggcagagaattattctgagaaagacattgcatcagttagacatttagttgtaaattctaaattcttttgaaagaatttattaaacatacttactgtgttgttacctctactatttgttatcctttttgctgagaatttcacttttcttttacccaagatgaggatgatatggaaaaagagtcctgtcctgtattaggagaaggaggtgacagtggtggtctcattcctggaaaatctcttgtgtttgcaactctggagctgttgatgttcattttagtacgtcatatgccacatctcagtaccaagatgtcggactctccaagtcacatagccactaaaactcgactgtcggaagaaagtgctcgtttggtggcagccacagttaccatactctccgacttaccgtctctctgttcacctgctggtatggtgttgctcactatttgtaaatgtattatacagtattagacagagatgagcttgcctttgattttaagtgctatgatgatttattttcctattaagtcttaaaggaaaagtaggacttatttttaagggtttgtttgctttaggagcctataaagacttaagatttaaaaaaccaaaactctagatgcctttttcaggtacatttcaaagaaacttcagcaaagagacagacccacagcttgagagaagacattgaatgttagcaaatagacataaagtgaaattactaagcactttattttctgatctggttgctactcttgagccacactgacaaacatgtcagagaagagtgacaaccaactttaaggagcaactgttaattaaaaaattaaacctgaaaaatataatagctgtctgcagatacttgaagaactagtggatagaaaagtaggcacttgatacttccctggtggtctagtggctaaggccctggtctcagtacagggggtccgggtttgatttgcggtcagggaactagatccctcatgctgcaactgagagtttacatgctaaactaaaaga

SEQ ID NO: 31115 - DNA, 706 bp, Bovine  19866881904257
  misc_feature (1)..(1): n is a, c, g, or t
ntcgtaatatctgaaagactgttaggcatgttctttcatcctttaactctaagtgtcctggaaactagttccataaatggagattaaaatatagcacagtgtgttttttggcttgtccaaataaggtcatatgcggggtaacaaatgcatagcagatgaccttgtgtcaacctcggtggccttgaacctaaattattcatgaatgaatatcatagtattttgatttttctctgggaatttaaaaaagctttaggtatttcaagtaactttagaatgttatggttcagagctgattctgaaacacttgactagaaacccctgtctctgattgtccagccttcagcagtcctcgctcttaagtatttccctgtagcaatggtcttggaaggggctggttcctctctgcttcctctgctattcacttcccatccctaaaagggcattattgccaggagtctcataattttcctactaagataatcatcgaatctaatagttcaaacttgggcctgctaattttcatctaatcaacggaggcaggaaaacatagtctggaatgccagctatgtgaatgaaaaatatttagtcattcttgaaatgataggaatgtttttccaacaagcttaaataaacacaatctctactgagactgtgttaaactttttttggaaaagagacaactcttaggccaaacagaagttaatgg

SEQ ID NO: 31116 - DNA, 940 bp, Bovine  19866881923028
  misc_feature (1)..(1): n is a, c, g, or t
nctgcaagtgcagaggtaagtgttagtgcatgcccttgccccagaaaccaagaaaaagacagcctgtcagtgaaacagttttgctggtcattgtccgctttgacagcaccatcactctctaggggaccatctcttgcaactccgtggactgtagcccccactgcccaccccacttggttttagaaaatcctgtgaatggaggagcctggcgggctacagtccatggggtctcaaagagttggacagactgagcacataagagaatgtagagtgaaaggaggaaaattcagttataagccttccagaaggtgagacatggatttgtaagggttttttcctcccatttttcaaaattgagggcatatttacatgaattcttttcatgatcctttcccatatcacgaactgtgctctgtaaacgggattttttggtgactgggtagcgctgcctgtgaagacactgcaggctgtttctcctgtgcagtagctgctgctttaccaggctgccttctgtctgtccagaggtctctgcctccgccgggccacccgtcctgtcaggcacgtgtctatccatggatggccatcatcataaaaatggggagagctggcatgatgggtgtcgggaatgctactgtcacagtggacgggagatgtgcgctctgatcacctgccccgtgcctgcctgtggcaaccccaccattcacccgggacggtgctgcccatcatgttcaggtaaaggctggctgacgtctcgttctctccctaagcaagcgacttctgcctcctagggcctcatcacatctctaactctggggggagcgcaggggacgacccctggaacacacttccaactctctggttttcatcagcagtagccacaagcatcaacagggcatgataaagattagccagaaaccactagactattctagagctctaa

SEQ ID NO: 31117 - DNA, 931 bp, Bovine  19866880634228
  misc_feature (1)..(1): n is a, c, g, or t
ntttgtaccaagagtgaggtaacgtttgtggagataccttatacagtgataggtgcttaactgatactcagtaatatataaactgttatttcctttccatgttgtttttctctgttctcaatagcaggagaatagaagtagaaaaaagttgaatagagaaggtatgtaggtaagtcacttcagtcgtgtctgactcttcgagaccccgtggactgcagccttccaggctcctcgtccatgggatgctccaggcaaagagtactagagtgggatgccattgccttctccatatgtgtgtgtaattatacatgtggagagagagagacgggggtttggccataggaatatggtagaatatatataaaaaagaattgagaatgaaagggtggtcaatgaaattgttaaagggatattgatgaaatggtggctctaggctggtttggataagtaaggaaaagggctgataaattggaagagtttattctttcattaattattcatttattcaacaaattttgttcaaagtcctaaaaatacagtgatgagcaagaaagtcaggcaaaaccccttccctcatggagctcaatggacagaaaataaacaataaaaactaagttcagttagtaataagtgctatgaagaaaaaaagctgtgtaacagaatagagtgatgtggaagcaggacaatctttcagaaagattgttcacaaactgcctttctcttcataaagcttttcctcctgcactttgagaatgacgtacattcttgcatggaagcccagggaggcagctcccactgctccatctccagccagccttgttcctgcagccccgtgccaggacagcctcccaagtcttgtcaagtcttgctagttgtaaagcttccactaccgccgtcttccgatttgctctctgccccatctccagactgt

SEQ ID NO: 31118 - DNA, 4445 bp, Bovine  19866880649500
  misc_feature (1)..(1): n is a, c, g, or t
ngctttgtgaaactgtactagataaaaatgaataagaatgccaataacaaactgattacttgccagaaggcgagtaaaataattttataatgaacaccatgcactatccaactttctttgatgaaacaattttgtcaaaatgaagacggatgagaaatcacattcctagtctacaggacagagaaataaaagagttcaagtttcatgaagtctgggctttgaagtactttgactataaaagataaaagaaggcaacacctaacatactaacttcttttctttagttccaaacattcctggtcttatggaccatgccaccccttcagaatagatgtaggaaggtggcacgtttgaatttggaaagagtcaaagtaacagcaactatatttctacaaaagagtatattgctaagttgtagggtttgttcagttccttccacaataaaaccagtatataaaaacatgttttaataagcagaattggataattatgtggacaggaccaaggaaaagcaatgggagttcaagattatgtaacagaatcttagtaataacatttactatgaatgatgttttgccttcctggatggaagtttcctagacagttagtatgtctttgtgtgtgtgcatgtgtgcttagttgctcagtcatgtctactctttgcagtcccacggactataacctgccaggttcctctgtccacagaatttcccaggcaagaatactggagcaggttgccatttcattctccaggggatcttcccaacccgaggatcgaacccaagtctcttgtgtctcctgcactggcaggtggattctttacttgtagtgctgcctgggaagcccatatatgtctttatttcttcagaatgatttttctaatctacaaagaaattctgttccgttacttcttttaaatgtggtttcatggcctaatcactttcaaaatcaagctagtactcaagattggactcaagaacttagcaggatctcaagggtgttgtgatggagaaatttttcctttgaattttctaactgatttcagtagaggcctccagtcaaaaaacctctgagcagtaaccaaaatcattgtggaataatattgagcaaggactagaaagttagaaaacaaaacgaaagacgcctacaatgaacaaatttgaaattacagctgtccctctctttctctggttctgatatgcatcaatttcagttaccatcatttagttaaattacacaagtcctcccaaaacacagtttaaatttccaccatcccaatataataactgagtaattgaataaagtgtaaacttcactgttatctcttcaatccacaagtcactatataaataagagatgtgcatcaccatcagtgaccactcatgtcatccttttcaaagactgttggtgactgctcactgcacatctgttattcaattcacacacagacagcaaaacatatgttgtgctacctcctgtctcccagtcataaaccatggtgacattttacaatggataatcaaaaaaggaaaccgggcaataaagatgaaggagcaaagaaacgagatgtgataatgctggaagcgaaattccaatagacagtaactggcattatagaatagctaactgtggaatgtaaatactattgccattcaagactctctagatatacagttagaagaactcagtaaaagtgaacttattggcatacatgaggacaatgaggtggctgtgacaaaaacaaagatgtcccagaagtgactggcaaaaaaaacttcatatgaaagcaactcttggagacagttcatggcaatatatgcataaaggatagttcaagacatgaaagtgctgggagctgattagagcttagaaaggagtatgacaattcaccaaggtgtagacaagatgcatgctctgtattcaaagttatataacaagaaaaggcaagcattttcaacctgctcttgataaaattcaccaattctcaatgttttatcatgtactaaatattaaatttactcttttttcacttcctaatacatttattattgacaataagaggttttaatgttttgacaaaaatttaaaggtcatggaacaacagtagttttggcatttattattagattgctttgcagagtttcagcttacatggtcatgtttatagtcctgcagttctgtgtaaagcagggattcactgaatataacaaaagttctaaaaaagaaaaaataagaacaagcaatcatatcacaaagaatttcaacatgttatccagttctcaacatggagttaaacattaatcctataaaaactggatatcctagtgagaagcacttgaaatcattcattacacagctaaatgatggaaaatacctgtcatattgacaacgagtaaggaagaacaatcctgaaaatcagtcaggaacataattgccagtgcggtgggaaactgagttggtacagttttcagaacaaaaacaaaatacctgaaacaaaatcctattagagattcgttatttcggccagcaaatccataatttgttagccaaagtaactcggttagcagaaggctcggtgtttgattctaggattctctgagcagttggtttaccataagattctgttcagacgtttgtaagttaaagctaaaggcaaaggtatttccctgtgagggacctttgtggtcgaaacatgggctagggctcaccatatttgggagtccttggcttggcttccagagtttagaggtctcaaagcttttttctcagtgagatcaatggcatcctgagacagagttcaaaatacagttctggtataaagaaactttctcctcaaagtgaaagtgtaatctgatgtctttactggatgtttagctgatgaaaagtgtaggttttattttgggtgaccaaaagaatgacacacagagccaaataaatcagagagaaattccctgtgtataaatgatataaatgaaagactataaatgataatcaggaaaagttaaaaggaactgaaaatctagaaagggagagacatgggtctgagttaccattaatactgtagaggctgtaagattctgcactctaaaaaatgcataaccaagcagcgagtgcaaaacaaaggggttttccttgggtggaatccccaggccagaaacagaatgtctcccacaaagagaaccgagagaaaagtggattttagattcatgtctatcatgaagatgtgacagaaggcacagagcatgtacacttacatatcacaacagaaacgggaatgctataaagccaggggcaatgaacatttcatttccacatctcgagcacacagcccagtgcctaagaatcagtatgtaccctgtcaaaagacatttatttaaaaaagtgggtccacattctattctatcaataacggcttcacttactcagtgtgtatacccagatacaggttcaccctttgtggggaaaaaaaagcacactcttaaaataatttcaagacaaggaagcagtataatgtagtggtaaacagcactgtatcaaatcccagtaccatcaagaaatggctgggtgactgtaggaaaattgcctagtccatctgtgcctctatttctcatctacaaaatgagaatgagaaccccagtatctatccctacagagttcccgaaagaagcagatgtgatttcagatgtagagtactttgcatagtgctgtcacacaaagcttaggggctattatcacaaacattttaaatgtgagtgcaggctgggtgaatcaagtatattggttcctcctaaacacacacacacacacaagcacgcacgcacacaaatgggcttccatggtgggtcagacagtaaagcattctcctgcaatacaggagacctgggtttgatccctgagttgggaagattcccctggggtcgcaaagagctggacatgaccaagcaactaacactacacacacacacatttacctgttctaagatgagtctaaataaacattgccacaatttttttttttaggtttatgatcacatttgttaaaatatgaccaacaaaagggaattccctggtagtccagtggttaagactctgtgctttgactgccgggggcaggggttcggtccctggttaggtaactaagatcccacaaggcatggtcaaaaaaaaaaaaaaatatgaccaacagaataagtataaaaaagaattaccctcactaacacaaaaatgaaaattaagatgattttttttcaatcattgaattgccaaagattttagaattataatgatgtcaagtttgtgaggtggaagatgggtgttctcacctgcagtaataattgataaaatggtgctagaaaacatgttggcaatatgtattaatatcatgagccttaaaataccttctctgccatttcaagtgttacatatctttagcacacttactttcg

SEQ ID NO: 31119 - DNA, 1802 bp, Bovine  19866880843688
  misc_feature (1)..(1): n is a, c, g, or t
nggactctgaaacattttatgagtaccattaattacatttatattttcttctttatgtgtaacagttaataaaatctatgtctaagaagtctgatagctctttcaatcagtataacattaaagttctacatcatatagcattgtgatatcattattttgccactctttttatttcttagcaatccatgaaataaagattcatcttacagtcaaatggagtcttaggtttattaaattagtatattttactaggcatgatatttttattagtgttcagtggatctcaaccaaaggtcattgtatccctggagctgccacagcaatttctaagtgctttgaacatagatcttttatctataaaaaggcagcatgggttaaattctacttcctgtgctttggctgctttagatcagatcagttccattggttatctcattctaatcagaaggtctgtcagacagatatacctctttgttagatgtataacttgtccatggagaacaatgaaataataatttaaaaaagacactgagataatattttctaagaagaggggtatgtccaatatggagtattttgcaatttcttattttataccaagtaatatttccctttgggtcttaattcactaagtcttctaacagctacccatcaactaggaatattgagctttataatttataattataagatctgactcaaagttcatttatttaaaaaaaaaaaaaagaaagaaagaaagccagggaattccctgacagtccagtggttaggactctgcactttcattgccaagggctcaggttcagtccctggtcagagaactaagatctcacaagacatgtgacccagtcaaaaaaataatgaaatttaattaaaaaaattttttttcttaaagccagattgcagttatcagcttccaagtaccacctccttatacacacaatccatacactgtcagatgtttaaaaactcaaaaaagttaaatccattttcaggctatataccaggagatccaaatatggtaaacaaaaagacgtccatcctgttcacaagagtgagaggaggagaattgggtaatgcagtaatgtttttagatgtgtacataagaagctctttataaaatatgttttttaaattacttgacattagcatgtataagctaaacagggtttggctcatagtattttcttccttcagaactggctttccaagagcatgataaagtgaagtataaacattacaggagatgtgaactgatttctaaacatttcactgatttttaaaaaaaataaacaacagatcattgttactttagagaggctaacatatcccccatcattacataatgaaaagtagattttaaatgtttttatatatttgatagagtccaaatgcttcagtaatggttctgacttagatattgtttaaacgtgaacttttttgttagattatataacctctgtaagtgctttccagaatgatactgtgatataatatagtagatataaatcaaccttgcatttttttaaaaaagatagtttaatggacagttttgctgtataggttcttttttttttatttttagagatgtatctgaggtttttaattttgtttgagtagtactgctgatggaaacgtgttctggagctcagatgatgaatagtgggtttttctgaaggtaggcactgacctagggacattgtgctttctctctccttgagaagcgagaagaaagaattgggatcttagaggaataggcagcacagagtactgtgaaaatctggaacctcgcagatttg

SEQ ID NO: 31120 - DNA, 2299 bp, Bovine  19866880870998
  misc_feature (1)..(1): n is a, c, g, or t
natttggtcctggtggcttcagtgtatggttgacttagatgtgaagtagcctacagagtgctgcctattctggaatgaatctctgaaaatatcacatagtagttgacctttttgttaacaatggaataattccctagctatcttcacttaaactactcccttcaagtatttcttaatcatattttcttttctttgctcaaatcataatgttgacaaactgaactatcttggggtttgtttggctcaggctttcattttttaacatgatatctggcatttgcctgtgtgcgtatgttcattcgcttcagtcctgtccgactctttgctgctctatggactgtagccctccaggcttctctgtccatgggattgcctaggcaaaaatactggagtgggttgccattcccttttctaggagattttcctgactcaggggttgaatccgtgtctcctgcattgcaggtggattctttacctctgagccactggagaagcctggcatttgcctgtagtattttataaatgaatcttgtttctaacataatttattttttccatatcagtgtttaggtaaaagaagtactttccttttagcaatatacagaaactaacttcctacagattggccaaaatcttttaagtgtacaatccttagaggtaatataatcctctcattttgcaggtgggaggacagttagacccagcaaagtcaagtgagttagttgcccaagactgataagagactctgccaaagatgatgcttttgtctggtttttgatttgtttcccaatcttatgcctattcatatgtataaacatattcatatatattatattacttgtctgaaagggattttgcatctgcaaattttggtatccgtgggggtcctggaaccttgcccctttccccccaccccctcatgatagcaggagacgactgtacttttattcccaattcccttctcacagtctagaatggggattctccagggcacaggctatcaagctgattcagcctttgatctcagtagcctagtgttctgtacaaaccgagagatatttgattatttatgcatttgcataaacactgtatcatttaggttgcttgtggtattaggaacagaaaacccagttcgtactggacttcagtgaatgaacaggagcttataggttcttgtaaaaaatcttaaaaaaaaaagtctcacagaaagtttaatttaaaggtaggctggtttttggttgatccacaagttcatgattccattcagagtaagctagtttgtaattcgcatacctccgctccctgtgggtattgtcctcctcctcaggcttgcttctcttctggcacagaaagagctctcctggaaccattacttcctcttttacactccaagagaaaggaatgaactatctaactaaactgaccttttaactaacaagtttacattaatcattatttttttaaattttaaacaattaggtagtatagcatcttaaacatgataccacaagtatctgaattccaaaagaaaagaaacaagcatcgtggaaactagtggttgtgttgtatctgattattgctaaagaatcctaaatttgttttggcaaaattgatgtctaagaaagtacttttcaaactttaatttagaaatcacctggagatctcattaaaatccaagttttgatttagttggtgtggagtgggacctataattctgcacttttaataagttcctaggttattctagtgctagtggtccattttgcatagccaaggtttaaaagaccacgctgtttctggcattttctaaaggtgttgagaactagctcagtttactactgcaaaccaccagcatctcttttctggacctgtgcagtagcctgattaccagtctccctcaagcctcttgttcctctgtaattcattctctaaatgaagctgtgttgatcattttcatatgtaaatcagtcgcatcattcccttgattaacctactggtaacccattgggttagaatagaatctaagctccttatcataactgcacagttactaaatgatgcaacccctgcctgcctccctctccagtctcttttcataccattcttctctttgttcactttgctttagttctttgtaacctcccttcatgctgcttgtaatgtggaccccgcattttctggcttcttctctttattcaggtctctgcttagatattaaccgtttctgagtgtaccttatgaatgactacagagaaataagttcttgagggattgtcataatgagacagtagatcaccaa

SEQ ID NO: 31121 - DNA, 2180 bp, Bovine  19866880941846
  misc_feature (1)..(1): n is a, c, g, or t
ntgattagtctctatgcagatgaaacccaatgtctttctctaagttccaaatgccttctatacttcagcatctctttttgatatattgtatgccttgctagcacagtaaaatcatcatctttctctagatcaaagtttttccttctttttcctttaatagcaccacggtttcccccatgatttagaacagaagcctggaagtcttttctgacactttcttctcatttactctcagcattcagtcctctggatggcagatggtttgtaccttgtaaattcttgtgttatctaatcctttgttttaattcctactgtcacctctctaatgcaggccctcattactttttatgtgcaactgcctcctaacttttgctctctaccgagactccctgcacccttctttatccttcatacggcttccaacttttcatacagctctgatattgctcatttgttcagaaactgtcaaaaacttccctgtgaattgactgctaattcctcaaattgagagaaaatctttcataatgaatgtctccacacaatctttttagttttcattttcatcatacctttatgaatatatgtacacacacagtatactaataatcattctttagctatatttcattttttcctcatctttgtatgttgcttatgctttcagctttacatagaatgactccattcatatgcatactccaaataatctaatagcacaattaataacttataacatatgggcttaaattacctgctattgtgttgagaaacatcaagtactcaaagtttgaaatctccctgtgctgccatcgctgggtcatattagaagctttaaaaagttgacgtggactagctaatgagatacgcctgcaagaaaaagaatttgatgtggaatcaatttaaacttaagattagttatatcaataataaatcatgacttctgggctcattcgaattgatgtatttatattaatgaacactagaggcgtttcaatctacaattaatgcttaaacaaatgatttggatgagccacaggtctattatccatgttctattcattaaggtaagctgtcattacaaaatcattataatagctagctctataaattgattaataacagtatgattaataattcactgctttactggtataagagctattatagttactaaaaaatacatataaaagtgtatacacatctttatcagtttttatagtcatctcttaaagaaaacatatttgtacattattaatttaaacatcatgtttttcatacctattgtaacagaggaaagaggattcactcttcaggtgtctattcatcggttgagataaaggtaagagaaactatttttttatataccctaacaatataccaagttttctattttcttaatgtaatataaatacaaaaggacataactgaccaacactaagtagcagtgggaaataggtggcaggattaaatacatttggagcccagaatctcagagaagtatgctgtcctagttcttcctaccactaaggacaagatacctattttttttcaagcttaatttacaaaggtgtaatttacataccataaaatttatgcatgtaagtgtactattcaatgcgtttaaagtaaatgtctagagttgtgcgattatcactacaatgtattttggaacgttttaatcaccacaaaaagtcgccttgtgcctatctagaactaacgcttaattctaccccttgctctaggcaactatcaatctgcttccatctgtatgaacttgccttttctgaacatttcagacaaatggaatcagacatcatgttaccttttgcattaggcttctttcactaaccataatgtatttcagattcatcactgtggcagcatgtataagcagttcatttcttttgattgctaagtagtattccactgtatgaatacagaacacaccacattttaaaaattcattcaccaactgatggacatttaaattatttcactttttagcttttatgaaaaatgctactaggaacattcatgtatatgtctttgataaacatatggttgtatttctttggggtagattactaggagtgaaactgctgggctgtacgctgactttaactttatgagaaactgccaaatgggtttccattatacattccaacaaacaatgcatgatg

SEQ ID NO: 31122 - DNA, 877 bp, Bovine  19866880967465
  misc_feature (1)..(1): n is a, c, g, or t
naattgattggttaggtttgagagcagcatgggaagaatgttactatcccctagctgcaaaccgtatttaactccagtcttaatgaggactgtctgtctttaaaggctttgaaaaatctcagatgcttagcattccactggcatatttttatattttttgtgatgcaaaatgtatatataaacaagtatttaaagagtatcttaaaaatcttatgaaagggaaattaaataaattttaatttaatggttttgaatctcaaaaacagaagttataaaatgtattcccagggttttccattttgaattatttgcatttttttacccttaataccttcctcctgcttgtccttacctcttctgtcaggtctgcagtaactgcacttgtttattatcatatactattggttaggcagttgtcactcactggtatcaaaagaatgttaaagtcctgaactgactttgtactaaagtgatttttaaacttttgggaattcccatatatccatggtagttgtccttgtgtgttcctgtaaaagctctgttgtgacaaagagctgaagactgctttagctttttaaaatgtgtttaaaatttattcataaaagtaacgtgtgtatcaacctctggaagagattttgccaataatgtgatgaattacggattggccagtgtaacagggtgaggggaggcccgaaccgtgacactgtggccatttctgcacgcacgtttgtgacatgatgtgaacatactgcctgtcatttcagcacttttgctgaacattttgatgtggtgtcagatgtaaaggtttgagcatctgaatctaaccaacttcaccattttgaatgtgcgtaaaaaagtaatcaacattagaaagact

SEQ ID NO: 31123 - DNA, 1836 bp, Bovine  19866881067529
  misc_feature (1)..(1): n is a, c, g, or t
ncggattgtgttttcctgtggtttttcaatattattgtatttaaaattaaagatcagatgtttttatcctggactgtgttgtctcttctcccttggccccagcccccagcatgacaaattacaggatttctttgcgcatgtgggtttataggcttttttttctccctctgttctcatagccagcaatacaggaatgcacaggaggcagatcactgacctcttagaccaaagcattcaagtccattcccagtgttttgtcatcacgtcggacaaccgctacatcctcctctgtggcttctgggataagagtttccgcgtctattctacagacacaggtaacctcataatttctttatcagtgaactcaagtttacaacaagtggcggtaagaggctgaaaaggctttctcatctcccctgtaaaagttacagaattctaaaaggtgtaaaatatagttttccccttcaagtaataatctactctataatccattaataagttaacttcagaatgtttttaaaggggcaggttttgataggtttgtcgcccaagcttcatacttacaagtgaatactttattttgaaagcataccttggtgtaaatgccatatgtacatgtccatgcataatcatatgacaagtgcacatacttacaggtgtatttccccactttaatattatttaaaggttatttttttttccctggaaattctaagtgtgtttcctgtgagtggctatcttgcctccacccagttccactgaatcttgctgaaaactacaccatggtgaagaaaggtagctgactccgtgttcatttgcatgcaactccctaagggacaaaccaaactcaaatcactactattataggatatccagtccaatgaatgggtgtatatttttgcatataggcaattatgaacattgaaaaatttaatagagtctctttaaagtattttagaaactggaagaggagggcataaacttatactgaatatgtagttgtatatttaaaataattaaaattagatagtaatgcattagaacttaaataccatggaggtagatagttcaactaaaacaaggatctacaaataattatattgattaaaggttctggggataggaaattttttaaattgaaatttctaattaattaactgttttacagcaaatcctttttcagtcatgttagtcatctctatacaatgtatgagtccatactcctactttagtaagtatagtatattaacgaattaattcttgggtattcagggactttgtcctagctacgttttgatgattgtattataacctaacaatgagagagtagggaaatatagttgaatatgtactgtgtatagaataaaccctagaagttagacatgatctcgtttaatttttatttcagggaatcaatgacctaatatttttataatttacttctttattctggaggtaggttcagaaagaagacatcattcaggtcttcctgattacttgggcttttctagatgtttaggtctatgatgttaattactattgaacctaaaactcctctggaattctttaaaaacgcattggagattgacaagttttcctaaaattatttattattataataaatcttctctggcttaatattcaggtttaaattttaaccttttctttcactattacggtaatgacaaccttagtgttatttgacctcaaactatgctcccttcttcacaaactttcagattaaaattgttgcatcctatcacaggggttttcttgaacattcttttaggttcatactggttttttatacattgaaaattatctttcaatttgcat

SEQ ID NO: 31124 - DNA, 1581 bp, Bovine  19866881103377
  misc_feature (1)..(1): n is a, c, g, or t
ncagaccagcaattgctgagcggagctgctttgatgggtaggctgaggcgccgttcctgggccctcctgatccacagttctgttcccctttggacagtgccgtttgatcacttttcagcgtccacttacaagcgtgtgacgtttgttttcttaccgtcttctgccttcagggaatgtgttttctttctgttaggaaaataaatacccctggtgtgtgaagcatgatgtgtcatggggttggcgttctgacctctgaggaggagtggggacagtggcgaagcaggcctcgggcacatgaggccccgccgtcctgctgctgcaccgggaggctcggggcgtggtagcgtccccccaaccccgccaccgccggctgagcagaggtgacagggctccccggtgttcccgaggacaccctgccctccacggcccccatccctcagcctttgctctcattactcgtcagggaagagaccgtggtagggactgaccgccccagcctgccgcgtctcgggcggcggccaggagaccagagtcagggcctcatctgcctcccctgccctggccccacccgccccagccccgctctgccgcccaaaggggaggaggaggaggaggaggaggatggtcaacctggatgagacctgcatgaggctcccctgtgacatgcgaggcccctggggtcaggctgtggacactcttcatcgcacgtctcagtaagatacgtgtctgccactgccgacccaaggggacccccggcagacctacagacagttagcacgctggcgtcagcccgggatgagagtgccatcgcggcgctagaagccagtccacagaggggctgccagcccctgctactctgagagaatcctatctgtgagcaccagggcattcagacgtctcatttgcatcccctcgtctggcagctgtgtcgtaatttaaaccctgccagcagagatgtatgggtcgccatgtcagggagcacaggggtggccattaatgccatgagttacagccggtggtgcccggtcagagttaactgtgagagaccagtgataaattccgcctttccaggggttctggggacaggggagaggagagggctggtttctcatatttgaggtccttctaaatcacggtgctgacattttatttagagaacttgcagcatgcagtttgtatgtgggatgttttgcatctgagagcagcttgagacagggcctctcggctggtggcggagcatctgcgcacagcagagccggcgttcccacgcgggtgctgggctacgtcctccccagggtctgtacgccctgtagcctttcagactacaggggagtgcagcggatgggagtggacttgtttggaatcccacttggccacccgctcgaaacttgattttgccgggcctcggtttcctcgtctgtaaagtagaataacagctcccttcctagttgcccagcagggtgactacagaagtgcgatgagacggtgtttgggagactgtgggaatcttccaggcctgtgaggagaactgaactctgccagaatgaggccttggagtcgctctgcgtttatcacctcttc

SEQ ID NO: 31125 - DNA, 1415 bp, Bovine  19866881144711
  misc_feature (1)..(1): n is a, c, g, or t
ncttggtgaccgcatggactggagcccgccaggctcctctgtccatggaatgttccaggcaagaatactggagtggctagccatttctgtctccaggggatcttcccagcccagggattgaacctatgtgtctttcctctcctgcattgtcaggcaaattcttttcactgcactatctgggaaaccccccctggtaaaaaaccctctccaaaggtacatgaagaggaccaacagtcaaagcttcagatgaagaaacctaggggtggagctgcagggtctagggtgcaagcatgccaagggtatgaggggcagtggagtctgagtccctggccgcagctgtgttcagagactgcagtgtactggctatacaccaagtctggtttgagtgggggagggcagctttccctgaaagtgccccgagggttaaagcctttgtaattgtttatagttaatatggaaaaaaaaattcacgcatattccaggagtcagactcctcagatcattctccgtgatctgacttctgcctgtttctatagtctcttcgttggccacttcttgccttagactctccaaaggttctggaaatgcttaacttgggcatatatccaattgtttcttacttatttggctttgctagtgccattccttcagaatgaatgcttttccttttcttcttctggttagcatctgttaactcttagtcccaatttacatgttatggccttccaggttgccttctattactttggaaaatgcctctccattgtgttctcaaaggactttttgtatatattaaaattgtctcttcatatatccatttcttccattggactgtgaggtccttgaggacaatgactctgtcaccaaatgactccttcttaagtctccagtgcctgtatagatccttgagcatcattggtgcttaataagtgtttgttgattaaatagatgaatgaatgagtgaaatacgagctggttagtttttcatctctcatcctttacaaccaggcgagaacctttcttctttacttcatttcctactgggaccaaccaaatgaaattacttaattttctgacctctatactttgcttatgttctcttaaaagcctacaatgccatcttcttcctagtatatcaactgaaacttgaccccttcttaaaggtcttcctcaaaaatctcttgctccttcaagtgtttcctaatccctttaaaacatgtgtgatcacttactcctttttctgaatttccaaagctctggatttttacttttcttactgcattaatcttatgccatgtaattctttgctgcttttatcccatttattagattgtaaaggccttgagattagagattctgtgttcctcatatgagtgtcccgtatagcacctcagtcagtgctttctaaatagtag

SEQ ID NO: 31126 - DNA, 1257 bp, Bovine  19866881321644
  misc_feature (1)..(1): n is a, c, g, or t
natggttggatggcatcactatctcaatggacatgaatttgtgtaagctctgggagttggtgatgaacagggaaagcctggagtgcggcagttcttggggtcacaaagagttttacacggctaagctactgaactgagaaattgaaaatgaagggaaagaactatactgtttgaagtagcttgtaaagagtcccacctgccaatgcaggaggtgcaagagacacagggttccctctcttgtttggtaagttcccctggaaaaggaaatggctacccatgccagtattcttggttgcgaatcccatggatagaggagcctggtgtgctacagtccatggggttgcaaagagtcggacatgactgagcacatacgcacacagactgaattttaaaacattttaacatagtaggagttactctgagatacagtcagtctgaggatttaaaataaagtgatactacgattatcctttaaatttattttgtaaaatgttttgtggagtcaaaatttccttttttttctaaagtttccttctgcttattttttatgtaatcaaattgtaggctatttataaatatctagttcactatgtattctgaaacctcttttagaaattttaattttccgctagattttatattttctgtgtttgggatatgtacctgtcatgtgttcagtattatgataacttttaacagctaattgggaaagcatgtttatgtgtaataatgaaataagtatttcagtaggatttttttcttgtaggattgtcattataatcgaaatgttttaaatgctcatttgaaagaacaatccagagatagaaaggatttatgtctttcatatacctttttaagaaagtatggctttttgagaataaggtcaagataggtctctgatcagtatcagaagaaagggggaatctattttcaaacttttttagaattcaattgtttttgcgagcacactatctgtggagtatcgatcgtcagggtcccgtagttagtcaaaggctatctcctctgactcaccccttcgtgtggtgtcatcctcctccatgtgatagattgttacaatctcaggcagtgtaattacacacgagccaagtgggtcatttatttctttaccttcaccatttaccaaaaatctcctttatctttgggagccagatctttcttttgcagtaaaagcaaaataatggcacataaaacattacatgtaagaactaagcaccataaaattattaagagaataac

SEQ ID NO: 31127 - DNA, 1499 bp, Bovine  19866881575948
  misc_feature (1)..(1): n is a, c, g, or t
natggtatgacattttgtaaatatattcctgccctgattataacttcttataaagaaaagacaaaaagaaaatattcttgtctctttcaaggaggctgtcaaaatataaaactaaactcagtgtgcatttgtaaaatatggattaatgtcactccaaagtttatgcatggttagatctgtcttctcatcagtcagaattttagactggtgatgaaacaacagggaaactggaagaaaaaaacaacttcaaaactgatttctactttttttcagctttaaaagattaaagcattatgttaaatgaggagtttctcaatagaagaaaataataaaatttcctcacattttcaaactaaaatagatttgatcttaacagattgacaatattatattgcaattattataaggaaataccatatataaaattgaattccttcaaaaggacattttttacattctctgtcttagaacttttctttctaaagataatgatcagaaaaatgatacagaagaaagactgttaattatattaattcagcttcagaaagagaattcctgtaaaacatggacaagattaccaaataaaattgtagtttcatatcaaaactttggggacattaaatggatataaatatgcataaataattcaattcatttaaaaaagataggctatattatccacttaagaatgaggataagacctgtttatgatttaatttaagctttgcacacaatgttttcttcgatttcacaagtttatttaaacatatagtagtatttgctaaggagaaggaaatggcaaccccctctagtactcttgcctggagaattccatagactgaggagcctggtgggctacagcccattggggtcaccaaagagtgggacacagctgagcgacttcactttcaccttggggagaagggaaatggcaccccactccagtactttttgcttggaaaatcccatggattggaggagcctggtaggctgcagtccatgggaattgctaagagtcggatacgactgaacgacttcactttcatgcattggagaaggaaatggcaacccaccccagtgttcttgcctggagaattccagggacaggggagcctggtgggctgccgtctatggggttgcacagagttggacataactgaagcaacttagcagcagcagcggtagtatttgctaaacgtatactatgggaaaacttccatataattctaatattttttgtcttaatatatgcattttattgatgtatagttgactaacaatgtttcaagtgcacaacaaggtgattcagttgcatatgtgcatatatgttatatatctactttttaaatagaaatctggcattctattcatactaagtggatgacaccttcaaagcagctctgaatgcagaactcaaaggcacgcctatggtgtctcctcataatgcagaaagagaaagagagagcgcgcatgtgtgtgtgtgacagtgtatgtgtgtg

SEQ ID NO: 31128 - DNA, 1793 bp, Bovine  19866881821989
  misc_feature (1)..(1): n is a, c, g, or t
ntataggttgaaagagtggagatgatttcagaactgataaaattggaagtttatatttctaactcacaactgtgttttgctatggaatttttacttgggaatcttaaaaactgaagcctgctttaccaaagtgaactaggcactagagctctgaggagcttccttgttttcatcagctatcctgctgctcatccctcctttaccctgccacccccacttctgcttcttcctctgatctttaaaatcgctttgtagaacatttttctttgtatctctcattcatggattttctcagtaagttaaaaaatgggctaattcaaagaataaattttaaatattaaagggcaaaatctgacatgtattcagtacctgtgccttgtattagcatgtctagtggagtatacagtaacctccagcataaagaagaaccttggggatgctttcagttttactaattatttaattttgtaatcagttatttccttgaattaaaaagaaacctttgttaaagttgaaatgttgagatgaatacattagaaaggcagaaagaggaggaacctacttatatgtaatttttctttggtcataaaaatagtatgaaacagtttttaaaatttaaattgcctataagctacttctgaataattctgggatttggattctaaaaagatgatcatagttacagcatttatcactaaggcatttaaaaacttgaagtaatttataaatctggattgttcatttcaccatttgctggggaaaaggaaaattactatatccattttattctcttttactgttgctgatttaattgttaagtttgtattatttaaaacttgaagagaacaaatgattggaggctaagtattaactcattgtgttaactattcagaaaggatccataaatgtttcttttctaattcaggcttgggatttttttttaattatagcgtaagagagcaagtctcttaatttttaatgtgaaaaaactttttcttttaaaattaggatcagaattagttcttccatacaaaatctgttcttttttcaagtgtgaaataagatactacttttaatatgaaaatctacagaacaaacatatagttgtataaaattaatattttccttgttctaaatatctttgtggaaacttgaatggttaaatctacaaaatgttctacatttgtaaattttgcagactggagttaaaatggaagcttcttgcatttagttcctcaagttcacatctttatattataaactataaactgtgctctcacctgccttcatttaagaacaatccacagtcaattacaatgtaaagtcatatttttattactgttttcaacaagactgctgcttagggtgagggaagaggtgtgggagaaggaggggcacatttgacattggcactgagatacagttaacatcagcaaaactttgtttttaaaagaagaattttacatataattaaatactttttttttttttttttcacttggtgacaacattcaggcaacccaaaacaaagtggggagggtgggaaaggggagaaagagaagagtgggagagaaggaaaagggagaaacgactatattttgatttgaaaatgtaccttgggtttcattttgtggtggcaaagcccgattgcttcttttgtgtgaccttttaaattcacattgtttggaagaaaacgatcacttttgtgcaagaatgtgattttggtggggtggtgggtttgctctcctttttgtttgcttgtgaattaaggaagtcttctgccgggttcggtt

SEQ ID NO: 31129 - DNA, 884 bp, Bovine  19866882227896
  misc_feature (1)..(1): n is a, c, g, or t
ntgacgttaaaagaatgaaatttagtcaacaacatactgaagtgcagactgagaggcagatagagaaatcactaaaggagttctgtgcttctaaactgcccttgaactgctgggcaaagagagattgtgcagccaaatagcacactgctcactgctacatttataccattactaaagaaaagtgagttagtatcatatcctgatataaccatcaagcacttgtgcatcttttggcaggagaatcattctgtctacgattgttattgtgtagttttaaatggagtagtcaaccagctgttatatattttatacactgaaggccatgtttcctttgaaattcatagttttaatctcaactgaagtctgtattgctgtgcgccaagatcaaaaggattaggcaaacttgtacaattacccttctttgcagagagatgatttttttctaatgtttaaaatagtcctatacgctgacattttatccaactattttctttagagctacagaacattaaaacatttaattaacatttcaaccttaggtcactcttaatctaaaatctaggaattcgcaatgtacagatatgttaaactagctatagtgcaacacacttagggagatggagctttttaaaaaaatccaataaggaatgctagagaacaattaaaattagaatatacccatctaatttatcatttgcttacactttgcatgccctggttcagaacgcagttcacaatacttatagtaatgaataggtatcaatataaaataaatttaacataagtatggcgatgcgaaactaagggtaagaagtacgtaaaaaccgtgccagaagttctgtagactcgtgagaggtatgccatgcattgacgttaagctttct

SEQ ID NO: 31130 - DNA, 4140 bp, Bovine  19866880418065
  misc_feature (1)..(1): n is a, c, g, or t
ncattttaaaaaatcttgtttaaagaaatgaaatgatacaaatgaacttatttacaaaacagaaacagattcacagacttagagaatgaacttttggttaccagctgggaaagatgaggagaagggatagttagggagttcggatccacacgtacacactgctatatctaaaatggataaccaacaaggacctactgtatagcacagataactctcctcaatgttatgtggcaacctggattggaggggagtttgagggagaatggatacatgtaaatatatgactaagtccctttgctggtcacctgaaactactacaacattattaatcggctatggtctaatataaaataaaaagtttaaaaaaagaaaaaaactttttagtcatctatttctcaaaagtttattgtttcttttgtactgtaatatttagtccctaaagcccttttatgccaacttgaatatggaatagaatattcaaattaatgtttgtaattttaggaggtgtataataaactaacattttgctagtcaaaagtaccttgaaatgttacttctttccattcataaagataacacaagatcaatgcatcagggagattaattatattaaaacaacatgtatgagtgattgatacattcccatataatgagcaaacagaaacactccagttagtaggggagaaagctattcaagcagctctacatgattttaatttgtagatatatgtattatatggtggcactagtggtaaagaatctgcctgccagtgcaggagacacaagagacgggttccatctctgggaagattccctggagtaggaaatggcaacacactgcagttattcttgcctgggaaattccatggatagaggagcctggcagactacattctatgggatcacaggagtcagacacaactgagcaactgagcacacacatgtacatattatatgtgtagattttctctgatttacctttctaattcatgaagtgtattttcacttaggggatgcagcttacatgcgtgcaaaataatggcagggaggtaattcttgaaatgtaaaactaattttccacgagaaagctgccaaattgatactcacatgtaagcatttgagaattagaacattacactgtatttgctcagtaagatcactagcaaaagtttatcagaaaaaaagaaataacctttatcagaaataaggcaagaacaaataaataaaccttcacttgtatggttcggtctaacaaatagaacaaatatttttcaagggcacagaaagatgcaaacagaaaaagaacgttgtttgctgtaactttaggacgcattaatacacattcctttctcatcttagaaaaatgcatatgattcattgtagaacaaacatgtcatatttatgtaaatttgttacttaaatattttcaaactctgtagtcttcttttcttctaattgttcttttttcccatgtgatcagatcaagtttcagagtttttaatgtcatctgtggtgaccaggctgacctctctcctgaactctagactcgttatgcacttgacccttggtcatacttggctacccaataggtctctcaaattcaacacgtccaaagcagaattactcatttttcctctaaaactattcctcagccagtctctcccatttcagtaaatggtgccattctctgcctaacagtgcacccaagaccttggttttcactttttggtcccgcagtctccttaagtgatttgttacatctaatttatcagcaagtcctgataattttatctcaaaaatgtatcctgaaactattctcgtctctccatctctgctatcacccctttcaccatcatcttccacctgctttatcgaaagggctcctaaaaatgtataatgagatttgaaatagaagtgaaatatctttcccaaagtttaaattgctcaaattatatttaaacatctcagaagaaggatttaaattctaattccttctttctgatagagattctaggtgagattttacaggtgaggaaattgaagcttagaaaaatgaactaactcaagccacacagaagtcaaataatttgcccaggtcccacaactagcttgggcagaagttgtgacacaaatccactagtgactgactccaaaatccatgttctttccatgacacctggatgttgtgtctacttgtctgggttttgtgtatacttacatcatcactttagcctcttcaatgaaatcctcttcagacatgaagccttcgttgatggccttgatagctacctggacatgtgctcgccattggcctaaatagaccacccccaaactgaccacttccaatctgcttcacaaaagccaattcagatggatctatctcccacttttctggaaaagtaaaatatccatgttacaagtaaggaaaaatgttaaattttagagctagaaaagatctaggaattatctcgacctattttcttttatttttcagagaggtcgaaaacatttataaatgagtagtaaggacctgttaccatttttaatactatcattgtggcttaaaagtgtaattccagaattcaagtttaaatgcaataagttctaaaggaattttatatgttgagtcgtgccatataaacacattattttaaataaataaaagcaaacaaagatacaaatctcacttacttggagagaaattatggcttatcaaaacaggctttttctttcccgagagacccagaaggaaacacagttctgtgtctttctaaactaaacctgccaaaaccagatgtggtcctaaatacgtacatccccacactggttttgttctgataagtaaacttgtgaggtagataaaacctgggctcccccccacccccatcccagtttcttttactgttcctctgccactcccactccaaagggcttttttgccctttctcttttgcaaaaagcctaatcaattcatctaataaatattttcaatattaagattctaacctatatctaagtgtacgtttgaaatgagaattacattactgaatatgtctcatcctatagaagcaaatcagtggttggggggggggactatttttaaaataatgctttggaaaactcagaatcaaatcttaactttttagtatccccttttatatagcaatgccaccatctgctggaactttaagataatgcatttaaaagaattgaagggaattccctggctctccagtggttaggacttcatgctttcactgtccagtgcccaggttcaatttctggtcagggaactaagatctcacaagctgtgaagcacattctcctctactccccccaaaaaagaattataaggactaatggacccttgtatcgggctttgcaaggtactctcctttccaatagtaggtgtgtttttaaagtaacataggagaatatagtcatgaccttgggattggcatagatttattcaacagaatataaccatagaagaaaatattaataaattatacttcataaaatcttatttatcaaatatagcccattaagaaaatgaaaaagtaagccacagactggggaaagatatttcttaaaatacataaccaacctaagacttccttttcaaaataagaataaatcaactaggaaaaggcatataatcctattgttaagtgttaaataaaaacttgaatagagttttctctcacaaaagagaatacccaaagtggcaactgaacctatgaaaagttgatcagggaaattgcatatttaaaccaaaatgagatatgcacacatacactgctaagtcgcgtcagtcgtgtctgactctgtgtgaccccatagacggcaacccaccaggctcccccgtccctgggattctccaggcaagaacactggagtgggttgccatttccttctccaattcaggaaagtgaaaagtgaaagtgaagtcgctgagtcttgtctgactcttagcgaccccatggactgcagcctaccaggctcctccatccatgggattttccaggcaagagtactggagtggggtatgaacaaaaaccaagccagaacaaacaaaaccacaagaatacgaaacacggcaaggacaaagatgggaacagctaaactcacatatgtcat

SEQ ID NO: 31131 - DNA, 1783 bp, Bovine  19866880454967
  misc_feature (1)..(1): n is a, c, g, or t
ncataattttaaaaatttctggctaaataaaaaaattttgaatacgtttgaaatatgtgtagattcatggtgacacagcacaaataactgattttgtgagttgtacctggtcttcaaagtcttctgtttatagtatttttatatacttattttttttttggcatgatcatttctcttcacttggcattgggcttttccttttttgctaaaatttgtcccttcgttaagagaggcatcagtctccaaatcctaggatgtatatttgtaactgagtcctgtattgcattgtgaaagtcttctacagtgttgtatgttcttggcatagtgtcacatgtttgttgatagactttctgaagttctatggaaaatgtgggttcaactctgcgccactgaggtcctcagcctcctctcctccagtgtagtgtgtttcaaaataagaaaccatcttgaagcaaatcattgtcatctctcagctcagtaaagctatcaatatcatctctagctgaaagaaatgctaacacatttcacttcgttgaaagcatattgtcaggccccgaattgtcaaccattcgtttatctttcattgcaaaactggcatacagtcagtcagttacatgtgaaaatgtctgcgacagagatgcttatagtgagaataccaggcacacggttctgtaattgaatgccgaggaatttgaggcttatcccctcattcgttttccaggtgtctatatgttctttcttgtttccctgttttctcagctgtgacatttattttacttattgactgacgaataatcataccttgaggaaaatggcatgtgcaaaacttctatttgaggacagacggaggtatttgtcagttattccagaaaaagagctgggagggagagagggaagacagaaagtgtggagttgggtctgagatggtggcaggtgatatgctctggaatgtaactctgtccctctctagttctttcaggaaagttcctaaccttctagaatgctagtgggagtggattagtatggaaatgacccagtcagtactcatacatcataatcggagctcagtcactggtaaaaggtttctctgcaatggtcttgatttttactttctgcctcctaaaacagtgttgtgtgattgacaaaacccgttcatccctgatcacgttcctgtttgttgctacctctttcatcaaaacctccaggggagaatcacatcttgggtctaggaaagagtatttactttcattctgagccaggaagggaaggattaagctgactgttaagctatcacagtataagtttgccagcatctgaagaaaagcaggattattctgtttctctaaccccaaagagtcagaatgtttggattctacggggtaccaatagatgttaactgtttcctatgctttgtgttcagcagtgattcctacagattcatattcattacctgacagtaatactgcaaacccaaattatgccaggtaaattgtatttttcttatgagtttaattttgaaatttttaatattttggtcatgtcttaaacacctcattattcttagtactgtgtttttcaacagaaggacagaagtaatttaagcaaaaattcagtccagttaatgtggttacaatgatagtaattggtattttgaaagttccatcattgttaagattcaaattgaggtgacaaacatatcctgaagagtaaagaaacatatggtcttatccttgtcgctcagtttggaagtttgatgggagtctgtttgactcattttctcttc

SEQ ID NO: 31132 - DNA, 3357 bp, Bovine  19866880480838
  misc_feature (1)..(1): n is a, c, g, or t
naaatgggcagaagacctaaacagacatttctccaaagacatacagatgacaaatgagcacatgaaaagatgctcaacatcactcattagagaaatgcaaatcaaaactacagtgaggtatcacctcacaccaatcagaatagccatcatcaaaaaatctacaaacaataatgatggaaaggtgtgaagaaaagtgaaccctcttgcactactagtgggaatacaaatttatacagccactacagagaacaatatggagattccttaaaaaactagggatacaactacagtgtgacccaacaatcccactactgggcatttaccttgagaaaaccataattgaaagagacacacgtatcccaatgttcattacagcatatttacaatagttagaacatggaagcaacctagatgtccactgacagatgaatggataaagaaagttgtggtacatatatacagtggaatattactcagccatataaaagaacacatttgggtcagtcctaatgaggtgaatgaacctagaacctgttatacagagtgaagtaagtcagaaagagaaaagcaaatattgtatattaacggatgtatatggaatctagaaagatggtactggtaaatttatttgcagggcagcagtggagatgcagacatagagaacagatttgtggacatgccggggatggagagggtgggacaaattgagagaatagcatggaaacatatacattaccatatgtacaatagatagcctggggaaatggctgggactcagggtgctcaaatcaagtgctctgtgacaatctagaggggatgagatgaggtgggtgaggaagggaggttcaacagtgagagaatatatgtataccgactgagcgacttcactttcacttttcactttcacgcattggagaaggaaatggcaacccactccagtgttcttgcctggagaatcccagggatgctgccgtctctggggtcgcacagagtcggacacgactgaagcgacttagcagcagcagcagcataacaaatatcaacacaatattgcaaagcaattattctccaattaaaaaaataaacaaacaaacctgaatctaaaccaagcctctaaatataacctcaagtttatgggaaagtttatgggcttccctcgtggcttagttggtaaagaatatgcctgcaatgcaggagacctgggttcaatccctgggttgggaagatcccctggagaagggaaaggccacccactccagtattctggcctagagaattccatggactgtatagtccttggggtcgcaatgagtcagacatgactgagcaactttcactttcacttatgggaaagaccattccatacttaccaaatgataaaactggacaagggtgaccttagcaagcctgctgaagatcgggaagatgtgaaacttaggaaactctcacactccgctggtagacatgcaaattgacctgtacaatttgaatttgacaattcttaaactgtggggaaagtcatcttcttgccactagatggtgcttattggcttttaaggagtttattgtattgtgttctattattttgttacattctctcattactctcccctgatcttcggaggaagggactagcctctagcactagagaagttgtgatccagacccaagcagccatatctgctttcgtcctgtctcgccatattggtactaaggacatatctctgaggcttgctgtttccccaagccatttattttattcatttctttagtaatatctttctcttaacactgtatcaaagatattttttctgaagaatgttttttgatattcagtagctccattctctagttttaacttttgttttagtttgagaccagagttatagaaaacggtacaaagaaattctatacagcctttacccaagacctggattccctacttattaacattttcaccattctccttttttctctttctctccctccctccccttctcattatctcacccgtacaaatacatgagacagcaatgatgtttaattttttaaaccatttaaaagtaagttggcagacatgatgccccattggccttgtaaagaagggcactgtttacaaaaccacagcatccctatcaacatcaggaccatttctcaaactctctttgtcttttataattttggtatttttgaggcccaggctcataatcttcagtttgggtttgttgtgtcctcatgatcggatacaagttataatttgaggggcaggaatatacagatgttctcagtgcatcatatcagtaggcaatgatgtcactggtaatactgtgtgtgtgtgctcagttgctcagccgtgtccaactctttgcgatcccatagactatatagcccaccaggctcctttgtccatgggattctccagcaagaatattggagtgggttatcatttcctcttccaggatctttcccacccagagatcgaacctgcatctcctgtgcctcccgcattgggaggcagattctttaccactgagccacctgagtagctggcattctaccataaagtaactgggcttccctgatggcacaggccctggagcctgtgctctgcaacaggagatgccactgcaaagagaagctgcacacaccacgactagagggtggccccagctcaccccaactggcgaaaagccctagcagcagtgaagacccagcacagccaagaataagtaaataaataaaaattattaaaagaaaaaagagagcgttcctttctcattgttatactacaccttgaaggataggctaagatgtgagaatcgaatgattaaaaagggagataagtggaaaagagagatcaggtagtcacttgaagaagtatgctcattttaaacttctttttacactagtatgtgaggtgatgtttagccatttttattttcctgggaacttttagccttttccaatgtatacatctacggaaacagaaaattttaagttctaagatattttggtgatgttggacattcagctttgtcacttagtaggaaggtgaaggaaattgaattgtgcagaatgagtacttttgagcaccctcccagtctctttttctctcacccttcacatctaatcaatcaacaaatgcagccattctgccttctctctgcctgtcaccacctcttcacccctattagcttctccagttcaagctgtcatccttcacttaaataaatacaagagcttccgaacagacctctttcaaatcatcctttgcatagagtaatctgcctaaagcacaaatgtagtcatctcatattcttgtttaaaaacccacaaggatcctcattgcctacagaa

SEQ ID NO: 31133 - DNA, 3099 bp, Bovine  19866880650056
  misc_feature (1)..(1): n is a, c, g, or t
ngaaaatacagtttataccctgggtgccttgtttagtaggtaaggaagacttgcaggctaaacttttactcttatctgagagctaaaaaagtgcctgatcctggaatagcaccaattcatgatgttaaatggggagcctagaatgtaccctttattctgattaaagtcagccgagcatttccctcctttttgcttgtgtttctgctgttcggttccctttttacaaaagaaaattggggcttaagctggggtttacattgtagaagagagcagaataaggtttgttactatatagtacctacccattttagatacttttgaattgaaatataacccacagaaactgttggcagacatacaccatttgatttctcagataattgtcagtctgatgtttattcatgctatatttcttaacattacaaacaggctgaaactttgtggtaaacctatgatgtaatgtgtaatagccactgtgttctgatgtaaaattctgaaattgagagctttaactacattactactcttagagcattgacaagtattagattgagttagataatattgttgatttgtataggtaaaatattgccaaacattgaccttttcatatggcttaacatagtaagatgagaattttaacaacctttgatcactctgcttctttctgtaaggagttcatcctttctctaccctgacaagtaggctgtttgtttcttttttactatattccttaccatcctcatgtttggtaattcacaatcacctctggacccgtgattaaaaatattgtgaaaggatgtataaagtaggctgggtaaccttagagccattaaaaaaaacatatttttcttcagcagaatttttatgataaaaaagagttcttagatcttttggctaaaattggtagaccatgaaaccaagaaccattagtctggtatttagatttgtaacactagacagagaatacaacttcatggtggtttgggtttctcattggtgaaacggtgaacagtgtctacttcagaatattggtattcagataagcaacaaggatatactgtatagcacagggaactatattcatatcttgtaaaaacttacaatggaaaataatctgaaaaacataactgaattactttgctgtacaccttaaactaacacagtattgtaaatccactaatactttaataaaaaaagaatattgatgttcaaagactaatgcgttacttttcaagcttttaacaattagcagtcagagtaaaggaaagaatgttcttgtgttcactgttaaggagacacagagaaaagggtcttaagttatagctcttcgttttattttaaaaagatacttgtaacccagagttggttcatttgtgattcttttgtctgaatggctcagtcctttttggtgtggaaaaagggagaatcagctggaggagtctgaaattttgtttcatcttcattttttactttggagcatcaaacggattctttcattcagagtgattgtctccaggttttaaaaattaattaatgtatgtatgtatgtattcttattgaagtcctgttgatttacaatgttgtgttagtttcaggtgtatagcaaaatgatccaggtttacatatatatatgtatttttcagattcttttcccatgtaagttattataaaatattgagtatagttccctatgctatacagtaggtccttggtagttatctattttatttatagtagtgtatgtatgttaatcccaaactcccaatttatcccttccctacccctttcccctttggtaaccataggtttgtgttctatggtctctttcttttctttttaaaaaaaatctcttagatctgttattgaaacttgcagtgatcaaatgactttgacatgcatattacatttacatttcttatcatcagtcccctatcccaagggagaactcagtttcataaaagttgagggactttcccaaattcacaaagctgaagaagcctaacttgacctggtacccggatttggctggttccagagctcatacttttcctgccattccctgttcctctggtagaatgtgtgggtctgtttctgtttgattataaattcatttgttctctttagtttttggtattgagagattggtgtccttcttaatgatgccttgggagtcagttttatctgttgaaatttggaggttgtgtcgaattgcctttagccatctgcctaaatagaaggccgataatgacgcatcatatgcttttccctttagttctcttttcctttccactggagaggttgtgtgtgtagcggttaatagtgcaggctgtgtggtgagaatgcctgaattaaaatctggctcttattcttaccatatgactagggaatattaccttcagtaggtttgttgaattaaatgagttgttacatctgaagtgcttagtgtttagtgcttagtgcttagtgcttagtgctatgtgtttgctatgccaacacgtagcaaaatagtggaagcttgattatattttttattatttttctgtgtaaatagtaactctacatggatactccctgattctcttatagtctgcttattcctccggctttcattgatcttatcaaaaggtcattagattgacctttcaggacaatgaggttaatttcaggtgtatagcaaaatgattcagctatacacataactataagggaaatctactcagcctcctctcctcttttcatgtacttttcacagtatttggcagatatgtgtttcatagtttgcagctcatagccatctttttgttcactggaggtaggaattatcttcctctccgatttgagtattttattgcttgcatagaattttagggaaggagagtagagaacatattaatactctttccactgccatcttctaataactttttgatcccagaagcaaccacttttacttttaaaacaacatgttagtaacgtaaatctctaagtgatgtacttacgctgccacttcttgctttttcaattttaggtatgatgcactgacttcctcctagtactatggaggacatagttctctttcacaacataccttgagat

SEQ ID NO: 31134 - DNA, 1594 bp, Bovine  19866880693730
  misc_feature (1)..(1): n is a, c, g, or t
ncatgtagaatgaactcaaagagatccacactgaagcacatcatgctcaaactgtcaaaaggcaaagacaaaattaagtattttgaaagcatcaagagaaaagggactcagcacatacaaggagcccttaataagattatcagcggatttcttattggaaacttcagaggacagaaagaagtgagctgaggtaatcaaagtgctttaaaaaaaaataaaactgtcaaccaagaatactttatattttgtacttatattctcatttgaagaacaggcaaaactgttgttcttcaaaaataagaaagaaattaagacttttccaaataagcaaaatcttagggagctcattaccactagatttgccctgcaagaaacactacagggagtcatgtagtttgaaatgaaagaacaacttaaaactatgtgaagaaataaagatttcaatagggcttccctggtggctcaagggtaaagaatctgcctgccaatgccagagacacgggttcaatccctagtctggtaagttcccacatgctgtggagcaactaagcccacagtcacaattactgagactgtgctctagaacctgggaacaccaagtaccgagcgcatgagcagcaactactgaagctcctgtgccctggagcctgtgttccacaagagaagccaccacaatgagaagcccacccacagcagcaaagagtagccccagctagccacaactcaagaaaagcccacaaagcagcaaaagcacagtcaaaataaataaagaaaaattttttaaagttctcagaaaaggtaaataaatgagcaattataaaagctagtattattgtgacaaaggtgtgacactccgctttttgttttccacattatttaagagactagtatattttaaagaaactattagtttaaaagagagtgtaattgtaacttggatttgtaactccaaattctttttttacataatttgactaatgcagttaaaaaatatttttctaccttttgggcacacaatctacctagatatgactttaccatcaacaaccaaaagggatggggacagaaaccattaaaggaacagagtttttgtttgttgttgaagttgaactggtataaattcaaagtagagtgttaaaacttcagattaaatataatccctgtggaaactatgaagaaaatacctaaagaatatatacaaagtaaatgagaaaataacacatttcaatacaaaaaatcaactaaacacagaaaaaacaataatatggaaaactgcaaaaaaatgtaaagtatatggtaaataaacagcagttcagttcagttcagtctctcagtcgtgtccgactctttgctaccccatgaatcgcagcacgccaggcctccctgtccatcaccaactcctagagttcactcagactcatgtccatcgagtcagtgatgccatccagccatgtcaaccactgctgtccacttctcctcctgcccccaatccctcccagcatcagagtcttttccaatgagttaactcttcacatgaggtggccaaagtgctggagtttcagctttagcatcattccttccaaagaaatcccag

SEQ ID NO: 31135 - DNA, 2624 bp, Bovine  19866880795539
  misc_feature (1)..(1): n is a, c, g, or t
nacagtttcagggataatgagccagccaatagaccaaataaataagtagaaatatgtgatttttttgtatagtgttaagagctatagataaaaaattatatggaaaaaggagacggggaatgtccatggtggggttattattttaaataggatgattcaagaaagcgtaacagagagggtgactttttagcaacagtcttgagatgaggaggcaagccatgttgctatcaaggagaagcactcctggcaaaaggcaggcagatgcaaaagccctgaggtgaggaggtgcctggaatgttcgagggacagtgtgtgttaacaggggaggagcaggagatgagtcaataagtggatgcgcacaagtgccagaaggaaaccactctgcttcagtccaagccgattcacctgcattttcagctttcccagacagcttatcacacaggaagtcaccaaacccaccactaccggcactaaaagaaggcacctataaaggactttcagctttttcttaagatcctcatttactgcgatagctttctcgttagttgtgagaaaaattaccccagattacttcaaaacattaaagtgctggagaaaaacaaacctggccaactggcacttaatactgacaaagtcccccaatttatcaatcatgctttaaggaaatagggatcatagctgaagagctccaagtaattactagtgaggatgctggaccaagtgttaaatggccaagaaagcaagagagtcactgggaagagaagaatggtggatgttttccgcttatctttcctgcatctattactcctccgctgccctccccagagctctcagtttctatttccaagtgcgagtgtgctcagttgtgtccagctctttttgtgaccctatgggttgtagcctgccaagttcctctgtccaggggattctccaggcaagaatactggagtgggttgccatgaccccgcctccaggggatcttcccgacccagagatcaaactcatgtctcttatgtttcctgcattggcaggcaggcgggttctttaccactaggtgccacctagaaagcccctcccattgttaaacttcatggtaatgactcccactttctgcagcaccctttcccctatgcagcttcccctttctgaagcactgaggatgacgaagatcaatttccagtcattcctgcaaatggtacgtgaaaaattaaggtttaatggtgattactggttgtttcattttgaatctaaaaccctggacttcagaaataatggaactttgatgtaacatttgaatatcttgcttttgccacctttttattcttatggaaaaagcaagtcatcttctagaaggtgccagaggtactctctatgataaaatgaggcttcctcaattattcaatttcacaggtaccaagggtgaaatctcagaactgagatgcaggttctgaattgccctggacaatggatctcactagaaacagaaacttcaccaggtcctgttcaaaggactttctcctgtaacagtgttcaatactggagcacaggaaactgctgaaataattaaatctgtgcaaaaatagtttattaaataacataaggaagattatgaaggacagttccagaatgcccactcatgtggcttgtaaaggtgcatttttcataaagatctgtacagctcaaaagcacaacatcctgcaggggaggctcctttattccaggatttggcagaatttattttcatcttctacacatgagccaccaaagtaaaaaacaaaagtcactcctcttcagtaaagcagtgtcctcagttaaggataaggttttcatgtaaccttagggctctcagggcgcttctcgtgaagagcagccactataaagacgactatggagcaattttttcattcttcatgcatgagacataaagaatattatagaatagtccaagtttagaagtcactctcaaacatatatgtagaaaagttattgtcagaatactctcaagctttaacaaattggaaaagcctgtaatctttgcactgtttcttagagtcagtggctctaaagggtgatattcaccatcagtgacttcacccagggtttcctttcatgacagtcctgcaggatgatcctctgggttggcagtccctttaggtcaccaggtttctgcaatctctgtaagaacctgtagcagctcagcaaacgtcgggcggcctttaggtttctggaaaagggaattggaggcagtcaacttagcttaagactcacacggagaccagccttggacccggatccagcctagctcaccacgaacagaagagacagatatcttggctgatacacagggcatgaatggcagttgagcgaggcaggggtgtgaaaatataagggaagagatcgctgcaaaaatggctagagctgcaaacactagccgcacgtggctatttaaattaactgaaattagatacatcttaaaattcagttctcagtcaccctaaccacttttcaattctttgatagccaggtatggcctgacctattggacaatgcagatagcatatttccatcaccacagagcgttccacagatctgcccccagagatctatttggatgacttgatatg

SEQ ID NO: 31136 - DNA, 1541 bp, Bovine  19866880799010
  misc_feature (1)..(1): n is a, c, g, or t
ncatttgtggcctgtagctttcccttctttggtgtccctgatgtctctctactggatcatcccctttggtacagaagcatcacatacattcccaaaaataaacctctgccttgacccacagtcacctccaaactaccgtatcacctgagtccctttacagcaaaagctcttgaaagacaggattggggttgctatccctgctcctcaactcatgtgctggcctcaaactgctccaggtgcgtttctgtctcatcaggccactaagatttcatgtgtcaaaatcaccaagaacagccttgttgccagaacccgtgatcacttcccagttctagtctctctcccctgctgccctaacagtgttaacacagctgaccattctctccttgaaatgcttcgcttctgttggttctctgtgacaccaaagtctccttgatttttctccaatcttagaggctgaaccttctcagtctcctttgctgacctctgttttcctcctttacttctgaacactggtgtgcaccagcactctaccctgggcttgttttgcttcttcatctatgaatcctcctcggaggcagcctcatccagttccacggcttgacataccacctgtgtggtaataaccctgacatctccatctttagccctgttgccaagaacctcagatttatatatccaactgcaatcctgatatctttatttaaatatttagcaagtatctcaaatgtaacatggctacaatggagtgctatatagtccccgaaaatttgctctttatctagtctttgatgtctgaataaatggcctcaccatctccccagctgctcagccaaaaatctaagagctatcattgattcattcctctctttcatacctcaactctaatccatcagcatgttcttttgtctgtggaagtggaagtgttagtcactcagtcgtgtccaactctttgcaaccccatggactgcagcatgccaagctcttctgttcatggaattctctaggcaagaatcctggagtggtagccattcccttctcccggggatcttcccaaaacaggcatcgaacccacatctcctgcattgcaagtggactccttcccactgagccaccaggctccaaaatattccaatatcctatgaatattcaagactccttcatacttttccctttagtgcaacagactgatcgcactaatggctcttattgtaatgcctccctgaatcttttcatacctctctgtatacctgctctttggcaatgcccctcatagtagctgtcgatgtactcaaataacctgccttgaccaatgtgacagtagtaaatggaacaccagctaaggcttaaaaatctgcctgcccatttctacttcctttcttgcttctttattatgaccatgagagaataagaatagagtcatgtaacaacaccacacagaggagagcagagttgtcccagccatatgagttgaggccatcctagacaatcagcaaccagctggccctcccaaacatatcaggaaaagcaggcaatatggcaga

SEQ ID NO: 31137 - DNA, 4069 bp, Bovine  19866880816554
  misc_feature (1)..(1): n is a, c, g, or t
ncatattttgctctaaatactagtttttcttttattattactttgagaaaaacacataaaagttttacagaacatgccaacttcagataggagcttcttacatgagaaataaccacatgtaaggaatctagcctagcatttttttaaaacaattacattttcttctgaggaatatactacataaaattgtaataactgataaaaattcctcattaataaaccaacttctatagtctaattatatagcttcatgttataatttaagaggccctttagagaatatatattttttaaaaagtacaaagttacatgatcaggaaaagtaccttttaataagtaaccacaacattgtgaaatattcctctaattacacatatggctcagtttcatcttaattttgccaaaaaagaaaaagatggcttgaaacagtaaatgaaataggtatgttaatacaaggaagcacaacaaacaactgacatgttgccttgccactatccacatcttatgaaatattttacaatttcagtcatgcttttactattaaatactgttatagtgccacttttaggatgttacttaaggtaaagcttaacattctatccttctaacaagagttcaaagagaatacagagatgaatgtgaatatatattgtgttctacagcatctgctttctaatattccaaatttaacaacttatctaaatctaatctgaggtatattaacaagtcaaacattttttaatccacagcattggctatgtaccatgcaaacactactaccacaattgcacacagtggaaagaggtaatatttatatttctgccatagggttagctcaactgccacttcatctctcttcctgttcttcttccgacgacccttcagtctgttttcaaaagcttccagttcagcctaaatcaaaacagtatcatttttattaaattcaatacacacactgacttgaatttttccactcagacaaaaataaattggggaaatgttttaatagtaatggtatataattaatatacagatttgatttttttaaaatactatctttccactactgaccttattcaacaaattcagagttgaggtaagaagaactggaactagagagtggtgaaagagactatttcagactgatggcctgcttttgatactaaatacagaaacatctgatttaaaatatagacattagttttatatagcaccattaatctgtagttaatggggctctataatacagagcttccagctagtgcaaacagacaacccattaggataaagatacctctaattctagttttacacaatgctggtaacaaatattaacgacttgtatggaagacattcaagtgagtgaatagaaaaagctgctagaaattgattcctctcaatcaaatacatttaaaaacagagtaaaaattcttcaggggaaaaatgtttcatactttaaaccaaaatgactcctttagaaagtagaattacataaaattcattctaaaaaataactttaaaaaaaggatacctagatgacactcattataaagtgcagatttttagtctattgtaaagaacttacttattaagctttaatgcatgacaatataatattatacactgcactgttattaactaaagcctggtacttattaacatatatgtaatattcatgaaaatctatatatgttcatttaaaagaaggaaatagaaacttcagttaacatattcataacttttctcataaactgcatctgaagacctaacatatattcaatacttaatttaacacaaagtgacattcttcaatgaaccaaaatatcaaaatattctcaagtagttgtgatatacagcaaaaggtcaaaatatattaaaagcagtcaaacttgagaagcactgacacagtaaaataactgatgcataaatgatgactcgcagttttcaaaagtggtttaaattatgttctatacactgtttaaaaggcagtaaatagagactatatttaagatttctctccataatggcttataaaaaggagaagaagggacactccggactattaataataatctccaggattccagtcaacccatgttttattgcattagctctgataatttattttttgatattaggcaaatcaactttacagaacataaaacacgagaggttattttatcccaccttgctacatgagttatttttaatgccctctctcaagacatggaaatttcagtttcttcattcataatggtggtagtttacatacaatgtatactacttgctaagcactgaagtatctcaaaatgcaaactgacaaaaaattgtatgtcactattagaaagttaagccactctttggaatatatgatcaataaatatagtatttgagcaaacaggaggtacaagaatatacttgttatctaggtaacacattttatcttgaatgcagataaaaatttaagaattcttaaaggcattcaagagtctaatggggaaataagaaggtgtattattaaaacaaatgcattggttagtaaacagcacttgtctgtcacagacaacctacaactcagtaacatgagtgaagacgtgcactccaggggatgccttaaaacggatgctgccatgtcctgaccccccgtcactcaaaccaaaagaggcattatctctggagaatggatgaaatcaacaaggaagtaattgggaatacacaaaatacacagaatatctgggcacatacaaggtcccatgcttccttcagaggttcaggatacctggactgaaacaaacggataatttttgttttacaaggaactatagtttcagtccagaattgagctgacctagtttatatgttatgtttatatgtttccacgtatcttgtatttgcataaaaactaacaattatgcaaaaagacctaagtttgggtgttttctgttacctgttgtcttcgtttttcctcttcaagggcagctttggcttctgcttcttttaactgtttatagacatttaaaactaaattaacattgcaatcaccaagttttatacagaattttaacatctttccttccaggctccactaacctataacaacttctgagagcttcatactgaaaattatttaaagaaccataaatgttatacactgagaagtgttactagggtactatctaacagggtgtgagcggaagtagagtgttatatcttattcagctgaacaactataagatactagatcataatacacagagttacatcactgtaaactgaaacacttttaaaactggacttttactcttaagttaccacattaagattatgatcaattattaaatattactgtttgcctagggatgaaattgaccattttcctaaaacgccctctctggaggggaatccttcgtttcaaacaaaaccaaaagtttatgcactgattgggttaatggagggaaatagtgacacttaaaagtaacccaaacagcaaagaatcctaaaattttatttttgtattactttaacataattttcaggaagcttaaactaacattaagatgagtaactatgttccagagtacatccactcactggtacagagtatgggaaaatctagtacatcccagacaataaagattatatctagcacacaccagcacatctgagagttttaaaaaggcctacacactaggcttttatcacaaaaacaaaaaaggatgagatttcaagttcttcataataagcatctaaatttaatgtacaaaataaataaggaaagggtcactaacacattaaaaatgacatttaacgtgacattacctcagatgctttctgcttcatttctttgcatgttgtgtcacattctatggaaatctgatttttcacgtactttgttgcactgcacttcctacaaataaaatttttaaaatttttacttcaaaagatgtccctcaaagttgtagtaactgcatgccataaaaaagcaaaatttatctagcagcttaagattatgcctattatttcatttttattcttcatttctctttatcgcttcctattactcttctga

SEQ ID NO: 31138 - DNA, 1413 bp, Bovine  19866880843336
  misc_feature (1)..(1): n is a, c, g, or t
nttgggatcctaggacttctgccttcagttctctacactaaatattctaacacaaatacttttcaaactgatcacatttctacacacagcaattttggggttttttgtgtgttcttaaggctgaacattttctaaaatgacatcatcaccatgcttattcaaataacaaacaaaaccctgtcacaacacctggggaaactatcttccaaacatcataatttctggctttcaagagtgagaatcaagcccagaacaagccctgaagataaaggcccgagccatcttacttacaggtggaaagaatcatgctgccttatgtggggagcatacaaacagccttctggtctccagagatgctcctgtcacaaaaacacatcttttaactgaaatcatagctcactgaagacgtttctcacggacaaagttaaccccacctattttcctgttctaaaaacctcagcgaagtgtgtgaatgacaacctgatggcctatataagagaaagctgaataatctccatccggatctgagggtagctgctgttcactcctccttcccgactgtgtgggtgaccccaccaaacaccatttcaagaagtcacaaggtttgggcaaaagggaccttaaaaagagcatgaatgcaaactgctatctctgaactgaggaggaaacggaggcacagatgggataaggggcacagttcatggtagaaacagaactagattgtcagttttaaagtaccgtgtctagaatgttctgtcctccggctcagtactaacactttttggcaccatcagaagaaaatttattccgtggggagaagggaaaaccaacccatccccaggtaactggggtgtggtaacattatcaatgataaaaatgcacttgggagtttcactttatcccattgaaaaataaacaaaaagtaagtaaactaaagggaacaagtgcactgaagacacagcaaattcacatggcccttcctagttcctgctttatagattaagatctctttacacactctgggtggattcttctatttttaattcttttgctgcagctatatatatataaagctatatatatatagctttaaaaaaacgttccagtgaatgatttaaagattttttaagatgttcccaaatgtagccaaagcttgctttcccatcaaaagtattcatcaactgttagggcaagggctatagcttctcctttttcatcaaagccccctagcactttcagtgcagctcctcaaggtcaaaagggaaacacgggatgtggctgggaggcgcagggaggagtcaaggcgaaggaaggaaggaaggaggaaagcgtgaagatgaccgtaaggtaggctacaccttgtgcacagccaactccctgaaggagctacagttaacagatgcatatgttgtt

SEQ ID NO: 31139 - DNA, 1466 bp, Bovine  19866880874325
  misc_feature (1)..(1): n is a, c, g, or t
nagacttagcagcagcagcagcagcagcatatagttgtaaagaggatcagcttcagtgaccctctcaattggtcactgtcaacttacaatggctggccactccgcccctcatcttcaaggctctcatctcctttgcaaaatttctcgaatcaccactgccctgtatgttcgttagcaattcctgggccaaatgcgttgctgatgttacaagttgtttctgctgccttacaaccccttttgaacttgaataagaaaactgcttgaatttgctttttgtcaatcatcatttccatagtctaaaataaatataaaatacagcaagtaataagtaattagccaaaaaaaataaagtgagaaatgtgcattaaaatgatgtacaacataaccacatttatttagaatctattccaataccaaacggcaaagttcaacaatgtaaaaccacaattacttttgcaccaacctaataccttctaaggaaatgctttctcatctgatcaacttccaatgaagaactgaaaaattccaacactgttactaatatttctaatacagatgtatttgaaattcttgttttctgaatttttcaccgtaagagtcagctctaacatgaatggcacataaaaagaacaagaagaatacaaaacatagttaatatttatttcatcaaaaagagtatagtgtacctaataggaaatgtactacaaggtcagtctcaaatagtacctgcataaaaatttttaatattttttaaaaatattaatcaaatatggtagatcaaacgttttagtacaacagtcatgggtgatataagtaacaactaacaacctatgtaaagagcaaagagcgggatcagtaagtgatgaaactggcaagtacagaggtcaaaagtttgaggtgattaatactttttaagggagctataataattaatcataacaacagcagtaataagagtaactgaacgggtgaaatctagagaacagtaagctatacagtaacagtcgcagtcatagaaccacgcagaacattctttcctcaattatagcaatctatccttttcctatacccttgatggctctaaacacctccttggcacattcatatatggtctaatactattattaaagtacaatatcaaagctcattaaaactcctatttaactgtagcttttacaacccaagcaagcatttgttaagagaatcaaacttatgaccctatttaatcaagccacattaaaaaaattttacatatgtgctaaagaaaactggatgtatcctggcttatctgtatccctggtgcctagtacagcaccacctggtgctaagtagctccttgacaatatcctctctaatcagttgggaggtttcataaataagaaaacttgagctactgatgaataaattattttctgaggcagggcaataagttaaaaactatttcttaattacttcaattcatttct

SEQ ID NO: 31140 - DNA, 623 bp, Bovine  19866880901526
  misc_feature (1)..(1): n is a, c, g, or t
ncatctttatgttcagcagaaaaaggaacttttcctcaagaaagcctaggaaactggttcaagtgtgcctttgtagtaactactgtcaatagtatactttgaagaaagagcagttttgggccaaagatgctctctgctgtgctgtgtaaaggctgtgagctaccagagatcaactgtttctaacgtaaaaaggaagtgctaatatagtagtttgcagattcagtattggtttcatactgtaagacagagctaaaatagcctcacagggcaaaaatagtacagtcacgtgaagcatcaatagtcctttttaaaaaacagaattatcatacttgtgaattagaggttaatctctttttccagatgaaaagagtggatgttggtagatactggtcatttctattctatccttctgtaatgttagggaactgatatttgtcctgacccagggaagaatctcattcatgccattttattttctaagatacaatcaaatttgatatcagttctcagaagacctttcctggcatctagaaggtaggtgtgagagtctttcttttagtagaactagaaacttttcctttattttccctaaggactagtgtgttttaaaataacattaatag

SEQ ID NO: 31141 - DNA, 1926 bp, Bovine  19866881063019
  misc_feature (1)..(1): n is a, c, g, or t
nttctccttacctgctccaagtaacaaatcctttcttcttcttatctttggtttggttgtgtcttttgacacccaccaagaggcgaaaccaagttttgacgtaacaagccttttagataccaccatttgtttaaagaaaaagttatccaattctttaagagaatctcaaaaatactgaaatgttttacgtggtacaggaaaaccgatggaagttttaaggcttctggctgcagagggagatggctggcaagtatgtgaaactacaatttatgaggtcctttctctggaagtttaaggcttggaatttgagaaagttcagaggaattagcagggatatataaatctgcaaaagtgcttgagagataacaccgccttctctctggacatcacattaacgaaagtggtttcacttcatacagagtctcatttaatcctctgggcaagtctaggaggagggagatgctgacaatcttcatctcctctctgtttgttcagaaccaagcaacctgaggggactttcatttatccacgttttggcccttgctaggaaatttacccactctatgcagctagaatagtcacatatagaattaggagccagggaaatataggagggaagcattttcatcaattattatggggaataaaatacaaaagaaggagaagttagtgataaaacttaaagatttcagatggtaagttttttcttggctatccaagacagtattgagaacatgagggtgggaggaagacagaataaaaattaattctaaattcataggacttactttatatatgagacattatgcccacacaaaaacttccaagactgatatgccagccttaccagttggataaactgatcagtttgaacaactgcatgtaatttattcatcattttgcaagcaaacaccattcttggcattatggactcacttgagagtaatcctgcccaccagagccattccttgaggtaagaatgtccaccttgtcctaggaaaatgatgaaaatagaaattaagttctaaagtggaagaagagggtttggggaattaacttctataaaaggtaccggaatatggttggaaaaagcaagacttaaggcctactcagtatatctgatcttttagcttacttactcagtcatttctagagatctcctttacattgcctttgatttctacagaaaataagttttcttcatttgcaggaaaattagtcatgaggtttattattttcaactcaaaaaaaaatgcaaacctaaaaactgaaaaattatgttttatttggtggatttgctgagggcttaagtctgggaggcagcctctcagataattctgagggcctgctctgaatagaaaagggaggagccaggatatataggagttttgcaaaaaaaataaacaaacaggtagttggaacatcaacagattactgttaattttaaacaatgaatttagcacttctatttgtatgggaagatgtaggagtctggctcactggaatcattcctttggtatgcaccttaactgtttagggccaatatcgagtgctctccatctcaaatcccctcaggctgcactgactgctggtgggggcagtcactactgtcttgatgtcagcagtatcctttgtttactgatatggaaggtaaactatttatgccattcagaggtgtagatagagtattataagccctaaatgctttattttggccacagttaaagacagaaccccgtaaatattaaattagattagtacctaatgaagacattaaaggaaagatggttgacataagagcttttgaaattttggatagtcaatgagagaataaccagcattagccagctggactctacttattctctaccttttggcaccatgaaactgaatttgtgtcagctgtcattcagtcgctcagttgtg

SEQ ID NO: 31142 - DNA, 4054 bp, Bovine  19866881146800
  misc_feature (1)..(1): n is a, c, g, or t
ncaggtcatcaccctccaaaactgctgtcactcccacaatttaaaaaacatagaaagttgtaggaaacaggaaaaacctacacaattaggcaagaaagtgtgattggttcaagagacctgctgccctacctcacaggcataagccagttctaaagtcttttgcagttatttgcttttttcagttcagaatttagaagctctgaaggtaggctcttgacatttttataatggtcaggttctttcatttgcctttttttttttttaaagatcattataattgctttcaagtttgtctggcactctgaaatgttcctaggaataaatatggcttttgagtagaaccctagaatgaattaaagatgcttttgtcttttattcaagtcacagtaatttgagctggtattaacttaggtctcataattaggccaaatcaaatgataagagattttctaaaaacctagtcttgctttgaacatggtaatagtaaatactttgctacaaaataaacttaactgctaatgaaacttctaaaatattccccagccttgaaagcccacagcgtgtattcattcattccgtaaatgcatattgagggctgttgccacaaccctggttttgttatcgcttttgcacagttgatttccactgtatgtttcatgtgaaatgagtattcctctgctttatttaagaaaaaaaagatctgaaaacctctatcctggacaatccctcttgataaaggaatacacataagtcagattttgttagccaactcactgtaatttgtcatttgagcttaagaaagagtataagaattatatccttatcaaaggaggatcagcttggaataacagaaacgtaacttagataaatccgtaagtggggcaaagcagaaacttgcttgtttcctattgaccttttgaagttgacctaggttatgttttgataactgtgatcttgattttaaactcctctttagccaaaaattaccactggatttagctagaaccatgctacagtctaaaataattgttgaacctgtatgttgtcaactgaatgtgggtattttaagtcggttttgcattgtatccagtattaaatctatgtaaattttaaagatttcctgaagtttgtgttgccagagtgtatcatagaaatgttgttttaagtgtctgtctttttttccacgatatattctacataaaaaaataatgtgaatcacgtgttgacttcctgcacaaagcttcatccagagcttgaatcagtctttgggtttgagaatcaccgagcattttttccccacaagtgtagtgtatatttacacgtgtgtcttcgttctttctaattctgtgtgttttcctttttgctatccaggagctgcaggtaagttgcagcctggcgttctggattatttatttgttgtcatctgtgaacgtatttgtcttctttgtggtctcatttgtgtttgtgtattagagtagaaatggcctaggtagtcgatttagttggtcgcccctagatagaaagtcaagagaatcctattcagttaaaacaggtcatcgaccacatactttgatctctttaaacattataaatattgagtgatgttttaaaagtttcaaaaaactgaagggctgattgaatctctgcttatgacaatacactgagtatttttcatctgggtgtatgttctcccagtgtattaccttccctatatttataagcttgtgttcgaggtcttagaaatgacgccttgcttttccagggtgaaagtatggacaacttcaactggggagtccgcaggcgctcactggacagcatcgacaaaggggacacgccgtcgctccaggagtaccagtgctccagcagcacgcccagcctgaacctgacaaaccaggaggacacagacgagtcctcggaagaggaggcggcgctcacagcaagccagatactctcacgcacgcagatggtacacttagctttctgtacagtgacagctggtctcctctttgtcttcacttccaacttagtaattaccattgctcgatattcggattttcatttccttctgggtaaaatgcatgtgctgaaatgaaaacacaaggctgtagcagcaatggagtgttccatgattcatggtggaactaagcatttcatctgtgcaccccttgggctttccaggtggcacagtggtaaaagaatccacctgccaatgcaggagatgcaagagactcgggtttgacccctaggttgggagcaaggggagcactgaaggggcagtggcaacccacttcagtattctagcctggaacattccatggaagaggagcctggtgggctatagactatgggatcacagagtcacatgattgagcacagacagcacctctgagctgatgagacgtattttctgttgcttctctcctagtcacagtgagctacgctgggcacttttagaggccttcgccctgaatgatacgttttggtatcagtgcaaacaccagcactggttaattctccatctgcttttctttccttgtcagtgtggaaagagagagcacaactttgctccctttgcaagatcaagtcagttatatggaagttctgacttacattccaagggtgagtggcagagattcagagagagagagagagagagacgagaaaatgaaggctataagcatcatctgtgtgttccaaatactgagtgaggggaaggctgaacttgcagtggcagtaggttagaacttgaagatggcagaacaaggagagagcaggggtgtggattagccatcaaggcccatgcgatgaggaatcagctggtgaagaccaggtggcagccacattacagccctcttatatgagggccttttttcacacctctgtttaatttggcccatccgcatcacactcagtctgctggtaaagtgctggcagtgctattgaatggccaggctgagctggcctttagacaacatgtacagttgtcggtttgtggccggcttcttgtcacctgccctgttttggcatctcaccattatgccgatgtgtctttccctaactccctgtcacgtattaagtgataagctgttgctgacacagtagcagcagttaccacttgctgagtgtctgagacacaccaggccctggtcacagtgttctacatggattagtcactatacctctcccctcaagtacacgaggtaagcacagtgattgcagctctgtagactaagtgacttgtcccaggacacacagcctgtaagtgcatttgagcagggcagtctggatgccacctaaggcttgctcctccccaggactgtgtgcatttaaaggaacggtgagttgctggcagcagtgactcactgaatgaggctcagaccctcccggggccagaccggaggctcagagactagcatcgtgccaccaaaccactgtggaactatggtcattacctatctaccctctcctttaaaacaggactcctggcagcacctgcctcgggggaatttcatggggaagtcagtatagtaagtgctgaacaaaggttagcttccatgagagccttggagcagaactgtctcttcataaggccaaccctagtcatagcggtatgcatgcatgctaagtcacttcagtcatgtccgactctttgcgatcacatggactgtcgcccgcctggctcctctgtccatgggattctccaggcaagaatactggattgggttgccatgccccttcctccagggggtctttctgacccagggacagaacctgcatctcttatgtctcctgcattggcaggcgtgttccttgctagcagcacctgggaagcccagttatagtggtagtgagtttggaagagaatctgatgctacttcctcctcatagagggagaaaattagcttctgcttttatctactcaaaatcatgaacttgattttccttatgttaaatactgacccatgaaaaatgtatagccctgcttaaaagaagaaaaatggtagtgttttctttgttctaattgattactgctagttttcaaagaacataaacc

SEQ ID NO: 31143 - DNA, 1564 bp, Bovine  19866881351935
  misc_feature (1)..(1): n is a, c, g, or t
ncttgcctggaaaatcccatggactgggaaagcctggtaggccacagtccgtggggtcacaaagagtcagacacgactgagtgacttcactttcattttcagacttattttgtttctgtattagcagttgagaaatttaaaagtatttgtttagtaattcatttaaagataataataacaaatcctagtatattttagcataaataacatgtgctatgctatgttcagttgcttcagtcatgtcttgactctttgtgaccttatggactatagcttgccaggttcccttgtccatggaattctccaggcaaggatgctggagtggttgccatgccctcttccaggggatctttcctacccagggactgaactcgcatctcctgcatctcctgcattgcaagtggattctttacccactgggaattctttacctgggaaaagtcatgttctttacctgggaaaggcatcaataacatacttattacaaaaaccaattctattttccagaacaaaacaaagtttaatgagaagaatggcattgttttacatttttgcaaatctctttaacatctggtttcatggaaggaatctggattatctgatctgttcagtactcaaatctgttgtaatatgtttttttttttaattgaagtgtgtgaataaaatctcacccaaaggtgtaattgaaaaagggagaggtatataatactctcctcacgtcactgtatatacttttctttgatcctattcaaaaacttgatatatgatagttttccaagggttaattgcaatatgggaattgaaaccacatcagtatacttttcatgctctgtaatattaaatcaatttatttaaatctgtaactttgactaggtcagcattcaagtctgattttgtaacattgtgaatttgatatgtgaaaaatatcggttctctgagttaggcaggaacttttaaatgttcacacattttattaaacaacagctaaaaaatcacttctgttagtatcaccaataggcttgtcaggcgagtgtatgctccttggttctgtctcgtcacaacaaagatttggagtgacggacattaaagccctcgacgtgtcacagctctcgggtcttggacagactgtgttatagctctcaggtctcgaatggaccgtgttatagctcttagacaaatcagtgttacagctccatgttacagctctattttatttagataatagcaggaaaatccatccttgaggcgtgagggcatgtcaacccaaagacacgaagaggagagctccgcagcgcacaggagagagacccccagccctttggctcctttttttgtatgttttttctcccccccccgcgggcctgccctatgtaaattgggctagccaggagtgttgtttgttctacctgaggtcctcactccggtcctcggaccttcctttgttctattttcgcaggcttttctcttccttgtcttttagccaccgccattctggactcctgtttcctattctaagtacctaacaggctcatcagaaatatttatgttttgggaaattgtcaaa

SEQ ID NO: 31144 - DNA, 1383 bp, Bovine  19866881388440
  misc_feature (1)..(1): n is a, c, g, or t
ngtttgacaggtttatgaaaggcttgaaagataaatttgtcataggtaaaatactgcattatccataggatttatgtaactaagtaaatgaaagtgaaaaaacctggtgaggtgggagaaatgactcagttcctcactttgcactctccacatcttatttcctctcatttaaaattttgcatgaatattacagcttcaaatataatcataacattaattcagaggtctgatatattaaaggataagcttttattttataatactccatttttaccatattggaactttctggaacactctccttctaggacagtttaggagtggtcgtgttgttgttgcttagttgtggccgactctttgcaaccccttggactgcagcacgccaggcttccctgtccttcacatctcccagatcttgctcaaactaatgtctgttgagtcagtgacaccatccaaccatctcatcctctgtcattcccttctcctcctgctttcaatctttcccagcatcagggtcttttctaatgagtcaggtaagtctaatgagtcttttcatcaggtggtgaaagtattggagcttcagcttcagtatcagttcttccaattaatatttaggactgatttcctttaggattgactggtttgatctccttgcagtccaagggaccctcaagagtcttctccaacaccacagttcaaaagcatcaattcttcagtgctcagctttctttatagtccaactctcactcagctgggtttatttgcctaccttccaacccatcacaagtcaggtgactttgcggctgtgataggtcaaaccaggtcatgtgacccgcccgagaccagaaatgcctggcacaaaatcactggcagagggaggtctgatgaacaagcctgtagaaggatgaaggtttctgggtggctgaataacccactccatcccactcgattccagtgaagatacactcattagcaagaagtgaaaaaggaagacattgggatccttcagttgcactgtgtagaacactaattaaggcattgaattgcgctaacacagttctctctggaagacactttgttaaaatgaatacttaactgatgtcagaacaattttgattaaacgtgtttatccataaacgttctctggattccgaatgtgacatctaaacatccagtctctgtggcgtttcacttggaaaaatggagtcccacagtcaaggcaattgaaaccgattccagtctttattatttctaagaatattagatgaggtctcatttgtaactcccaagatctctctttaaaccctttctacagtttccctagtgttctgtgtattttataccctacctgcatctgcttgtgtgctcagttgtatccagttg

SEQ ID NO: 31145 - DNA, 755 bp, Bovine  19866882017355
  misc_feature (1)..(1): n is a, c, g, or t
nggataatgattcctcctgtgaatcttaaaagataattagggattttctaggtttgagccaagcatttatggggaaacaatttcctgcattaaggaatagagaactttttagatagagcaaggggatatgcaaaagctgagcagcaagtaactaaacacggctagcacacagggagctgacaagagcaaaggaaatggagccagactgtgaagcgtattcctgttaaagctttggagttatcttgtcatgatagagaacttctgaagggtcttaaatggggtagaatgttaaaatgaccactcagacaacagtgatgcttgaaaggggctaagtctagcagacagttagaaggctactgcaatagtccaagggaaaaaagatggactgagccaaggcaaaagcagtgagagcaaggggaacatttgagagagaactttcagaggcataattataagaacttaacaaaaagtatcagaggtcccttaaatgtttccagtttgagttatgggtaaagatatttaccgaggtgggatgactgtcatttgagttattcatcaaatatttccaactctctcccattctactaggacacatgctggtttacattctctgccctcattctctgtctcttgacatctttgacgctgatcaaagtgtacagacttccagttataagatgagtatattctgggggtttaatgtactgcattggatttagttaaggagtgccacattacatactttaaaaaagaac

SEQ ID NO: 31146 - DNA, 1362 bp, Bovine  19866882076682
  misc_feature (1)..(1): n is a, c, g, or t
nttatactgagcaagtgatatttaagctgaaaccggaagaagttagccagtcaagggaagggagggatggattctagacagaggacacagctaaagcacatgctctaaggtggaaaggagtcaggtgcctaaaaggaacacaaagactggtgacctggaaggtcagaagtgaggaagagaaagaagtgcagataatgcaggcagatgggcaagctgctggcccaaaggcctgttgaggacttttgagatttaaattggagataatgattagtttctgaaagattttaagcagaggaggaacaagactgtgtttttaaaagatcactgtggccaagatgtacacagactgcagagggcaagagcaggaaaaggagctattaggacgcagcagaaatccctacttgtctagtcataatatccatttctcagcaataacggaaccctaactcttagttgggtatactgatattaaaaatagaagactactttccggctccctttgcagctaacttgaccatgcggctaatttatagtcaatgagatacaggtggaagtcttacacagaacataaggaaaggctgttacaggaaatcaactcgggtgagagaagtaccttcttttctttcttccttcttacaacctgcagttcagaaaaaatggctggagcaccagcaaccaccgtgggccaaagtaaaagatataagctaggacgataaaagaaaaagacaggattcaaaatccctaggttggatctactgtaccagttcagggcagcttgcttccagtctttgtctttttccacactgaaagaaaaaaaaaatttctagtacatttaagctgctattagttagaggttttgtgtgatatatagcctaactcaatcctatatgatacagaggccactatatttacccaagaacaggcaggggtggtttggatcatggtggtggtagagataagaaaaagtggcaggactgaggttatatttagaagataggatcaacataatctgttgagagtccagacatgacagagggtgaagggtaaggtcagactgactttcaggttcctggcacaagcagttggagagaccatggtacaattactgaggcagagatggtgggcacaacctgagtttcttttcagacagtttgaatttaaggtggcgatgaaaattcttagatctcagaatagacatcaggctgggaaccacagtagagacattattcgcaaatacatgccaacccaaagccacagaaatgaatgatgtcccctcaggcaagtgtggagtgagaaaagagaccttaaagagcaaccttaaggaacactgactacttgaaggagacaagaacaagcagccag

SEQ ID NO: 31147 - DNA, 1919 bp, Bovine  19866880364784
  misc_feature (1)..(1): n is a, c, g, or t
nccaacctagacagcatattaaaaagcagagacattactttgccaacaaaggtccatctagtcaaagctgtggtttttccagtagtcatgtatggatgtgagagttggactataaggaaagctgagcgccaaagaattgatgcttttgaactgtggtgttggagaagactcttgagagtcccttagactccaaggagatccaactagtccatcctaaaggaaattggtcctgaatattgattggaaggacagatgttgaagctgaaactccaatcctttggccacctgatatgaagaactgactcattggaaaagaccctggtgctgggaaacattgaaggcagggaggagaaggggacaacagaggatgagattgttggatggcatcaccaacttgatggacatgagtttgagtaggctccaggagttggtgatgaacagggaagcctggcgtactgcgatccatagggtcacaaagagtcggacatgactgacgatggaacagacctgaacagcctctgcaagttctcctcctctctagcattgtgaaatagtttctcatcatcactggtgtttttttttatttttgttttttaattttagtctaaagactgcagaaacacgggtttccatacttagaatcttgatgccttagacttattttagtttttttttttttttcagattgaggcccaaataatctatattttttaaaataaagaaaaaagagttgatctttttgcatattacaatttgacatcgttgatatatttttctagtacttaagaccagaaattacttttatataattactatctgaataagtcctataaaacagaagtatctggaaaagtcctgtaaatcagaaatatgtagaataaatgtaaacattgtcttctattaatgattagttctttgcagataaagaatattattggtgtttgtttgtcttccctgatggctcagtggcaaacaatttgcctgcaacgcaggagactcaggagatacgaattcactccatgggtcgagaaaaccctttggagaagaaaatggcaacccacttcagtatacttgcctggagaattctgtggacagaggagtctggcaggctacagtccatggggtcacaaagaatctgatacaactgagctaatgaacacgtttgctttgagttattcagaatatgtttctaccactgtgaaattttgattgtcttccaaattgggactgcatgactttttagaccaagaattaattttcaaagttatgtaataatttcttattttaatagagaaatctaacaaaacattgaaatatgagttcttctgtacaattcagaattcccctagcaataatatagataatgcatcatcatagtatgttcaaaagctagtttggatatttacatacacttatataaacattcccccttaacttatataaactttttaatgctggttactttatactatttacaaattccaaaagaaatattacaaattattcattataacatgagcttaacatagtagaaagctattcatattttattttctgtcatgccaagaaagagtataaactgttatagagtataaattgctttaaaaaattctggtcttgtgcagtttgatcttgctgataaaaatttcagaagacattgagtgttctcagaagtggcagttttacatcaagtgcaaaaatacatgttaatcttggatgacagtttgtcttttttcatgttttcccatgtatcattaaacttgattttgaggatgagcagaatatcttactcaactgtttaaccatggaggaatttacagttgttagatactgagccatgaattttttctttaaagctgaaggtaggcttttgtagaacccatttagtaaatattaattttactattttaattggattt

SEQ ID NO: 31148 - DNA, 1813 bp, Bovine  19866880516533
  misc_feature (1)..(1): n is a, c, g, or t
nttgtggttgatgcaatgaggaggtacatttaattttatatgatgtgatatgctatttcgttgttccaagatttttcttaagatgtttggaaatagaatttttgtgtttgaagaaagtaagaattattttattatttaaccaaaattatgttttggtcctgttaattttaagttttactacactaaaatggcctgtgaaattgactaattcatcctttaaaatttttaagctgatcagaggaatcgttcaaaagttttaagcacttcttaatctgtgatgtcagtttttagcagaactagaaagtctatctttgatgtcattttgggtgtttttaaggtaataatttgagaagtgctacatttaaagaaacatgtcaataatattaccaagttctctgttgtgaacataatcatgaaaacatactgagatgaaagtataagagccatgatatactatttatagtaagcttttgacatacttcaattttcatggacttttcattcaaaacccaaagatttttttgttgtgttaaatcctccctaatcctgtcaaggacagtcaatctctaccttaacatccatatacttggctttataaaatatgtctcatagttctttaggaggcttcaaggtccttaaggatccatgtattactgctttgttcccaaagcttaacacagtaccctctaaaaaatgtttctagaactgaaaggaattttcacagggaatgatccagatgcatggaagtatagataccatagtttgccttgtacctttgcttttgatgaagatgtgtggaatggtcttgaatttcagcttttgtgatggataatagaatgattatcttagtgtcttgtgtcttcttcttgtctgcttttctttatagggtattcaagcccaaacggtagcgaacttctttcttgcctttgaagcacagctatcaataattccagttataaacaaggtaatttgttagcgcaacagtgctattattttactttctaagggtaaatttactgtatgagtatcacttgtactactttttatatgagaatcttcaggtatttattaaatggaattgactattgaacatcatggaggttaaggatgcaaaacccctgtgcagtcaaaaatctgcatgtaacttttgatttcacacagttaactactaatatcctcttattgactacaatcttaccaataacttaaacagtctgttaacacatactttgtatattatatgtattgtatatagtgttcttacaataagagaaaatgctaatcaaatcataaagaggagaaaatacatttacagtactctgtttatcaataccctgagtttacatcatcttttataaggtgaatcatctctcggtacttacatcagtattgtcttatgtgatgacaaaacaccatagatgttatatgtattactgacactaaacgtcaacaattaaaagataacgtgaaaaggaacttcatatttatttacaggtaaatgattgatgcattgataacaatgaagcagaaatattgctttatgctatgacattatgtgattgcttcatggtaacctagtgtatacactaaggaaagattcattaaagtttttatagcgtacaatattatagtcatattcataacagtattggaaacattgttacagtaaaaaatgtttatttgtaattataggctgatatgcagtttctctaattatgagagtcatactgtacggtaatgtaattctttgaaagcaaagttataaaacagaaagccaatacattattaatttttatgttaaatatcacttatg

SEQ ID NO: 31149 - DNA, 1888 bp, Bovine  19866880521978
  misc_feature (1)..(1): n is a, c, g, or t
nttaatttttttcatggatgaatagtcataaaacccaggagaaattataaaaggaaaattatagtttccttccccgctttatcatgatatccctttcttagatgtatcagtatcaatattttcctttttctagacaacaagccagtgaacagcctcagcctgcctttgtcccagcagagatgctcgcatcatcaggttactcaggacagttttttcagccagcatccaaccaggattattattcaccatcttcttacattgacagctttgaagaagagcctcctttactagaagataagttaaggaagtgctattaatgtgtgtacagcttgaatagtaatagcaatcatcagcacttaatgcatactatcagcatgctgcatatagcgttttatatgattgttccacatataaacgagagtctgccagacagatacatttaaaccaatgggagttcgtctcctgtttgtgtggggaaaatctgaagtagataggtgctaacactatgttggtcttgcagtttttaaatgtttcttcactgtttcttacatgtggactccctggccatctctagacaacagtgagcatcttcaggcaaagtaattatatcaaagtaaccactcttcccacctagttaatgaagctactttatagcagcatgttttactattttctgctatgcttgcctgggggcaacaggggtagtttctcaatatacttttttttgttatcatggagaagcgagtttttttttgttttttcctccttcctggctcatgtgagccccctcatctcatctaggtatgactaagtaaggaggaatatgactccagtaagtagcactgctggtggcaaggaaacctggggacccttgcagatggacgtttcctccaaagatttcagggatctcccatccattggttcttttttttttatttaaaaaatttttgagattcagccaatttatgtctgctacttttgttcctatggcatgtcaacatgatgctgctgctgctactgctgctaagtcacttcagtcgtgtccaactctgtgcgaccccatagacagcagcccactaggctcctctgtccctgggattctccaggcaagaatactggagtgggttgccatttccttctccacagtatgatgctacaaaactaaaattcaaggaggttttaaatttgggagccaaggagaaatattcacaggctaactgctctcttttctatgttgtccaatgaaaacagataggttaacgttcccagtattttacattaaaagatcattgtttggacacagccagctacctgatattaaaacattcttctctgtttgccttcaaaattaagaagaggataaagatgtaaactattcagaaaagtacggatagaattatataatcaatttgttggaacttcagaggccagttaaatttttgcatcttttatgcttaaccatgcattctaagttgcctctacctctgatacctaacccctgaaagttataagctattttcattaggcatttgccatgaccctgccaacatctctacttaaaaaataaaaaaacttatcaattgtctaattataaaagtaatctatattcaaaaatagaaatttggaaaatatagaaacatatgaataaaaatataaagtccctgaaaattttgtttctgagacatgactatcattaatgatttgataatatttattccagcctttattctattttctatgaatatatatatatatacatacacacttaaaaatgaaatactgcctctctttgaatatatatatttgtaaatacttaaaaattggatcatactatggatatgaagttttgggtttttttaaagttaccttatatcataagcatttttat

SEQ ID NO: 31150 - DNA, 1030 bp, Bovine  19866880524104
  misc_feature (1)..(1): n is a, c, g, or t
ncattcatgaattcccaggatgtcatcttcaagttacaaaatgcctggtttttattttatcaagagtcacattggccactgttgtcaggtgtctttttgataccagagaatacttgtgaatagtgcctgacctagtgataaagttgaattccatgaattgtcatgaatccctgccttttattatacagagaaataagcaaagggttataagtatcatggaatattataagaaactttctagcaaagcaatgtttatgcttcagttgtctgttagtatttccttatcaagatacaatacgaatgaaaaacattttatattataaattaaaaacaaaactttggtttcttgtctcggtctttcatttagccagccttgagcaaataatataacctctagggattatctttctattcttaaaaatgggaagaataagctctgtttaccattgtttactgtggaaaccagttatttaactgggcttgtgaagcactctttttaccaaaaaggagataataaggatataatctgaaataatgtaaactttattcaaagataatgttactgctaatttccttctatgtagtctgctctttttaagggtgatctatgcatggtaataatataattctactaatatattttttacctacaaatgatatttggcaagaagtcaaagattttatgtaccacagagaatgtttattgcaattaagtaaaccagctgttgacttctgatcagtacttcaatgtttaagatgttttagcttttattttggctacagtctgccagtcaagtctcttcatataaggaaggaaaatgaacaactagtaagacatttgatgtgtcattctgatgaactttagaatgcttaatatcatcttggttgatttcatgtttcataaaagctttctcagttgcaggatcaattactctcaatttccacatcaatcagtccagatggttctcattatttgctaaggatagctgcaaattgaaattcttgaacccatgatgcatattgggttaat

SEQ ID NO: 31151 - DNA, 1084 bp, Bovine  19866880542852
  misc_feature (1)..(1): n is a, c, g, or t
ntttctgtatttccttttgcattctggagtggtaggtgagacagaattttaacaaagaaaatagtaatggaatttagatactagatatggagaatttatatctatatatttgactttatatgctaatatattaaatcagtgatatgacaagaaataaaaaggaaacattctatcaaggaaaatccttcaatctcagaaccttgagtacctaacatggaaaaaaatggtatattacctgttggcaaacccagtgtaaaatatctgtcttgtccaggtctgaattgaatgatgcgattacagatgtatttggctgcccattcactagccaagtcatagttatcaagaattacaagcctcattatggtgacgcacagcttccaggacaagttcaaacctgagaaaatttcattgtatgagtactttaagtaactagcagatagtcaaacagaagcataatacagtgatggctttaaaaaggatattacttaagaaagacatgcatgtatacaaatacaatgtgtacttttaaaacagcagtaatagctgctctctactgaacagacttcaggtgctgggcagtgggctaggtcaattaagtacaaatatgaatccttacgacaagcttctaaggtaaacacaatgtccagtttcagaacacaatttgagttcacatagttgttaagtgacaaagtcaaaatttttatcaaggcaaatttactataaagacatcacactgcattgtctccacagggatactatataaagcaacataaaacaaatctaaaggcaaacaaagcagcactcatttattgattgcaagttaatgacagtagttattactcagcactttatgggttacttactaaaatccagaactctccctacgaatgatgtaataaccaaacctctcttctggtaaataatgtttttataaaagtaacacctgcactttaaaaaatttcaatcaatacagaaaggtacaaagaattaaaaaaaaaaaaaaaaagacccaaatcctgccacctcaaaataaagttcattactattaggtatacatgattccatacatctatataatgcacat

SEQ ID NO: 31152 - DNA, 2876 bp, Bovine  19866880568737
  misc_feature (1)..(1): n is a, c, g, or t
nagagcacacccctgactccttgacagaaatctacccagaaagatagagaagatctagatccacttagcaataatactcaaagtggtccaatcctacctccattgtaatcaattcaacaacttttttaaaaatttcatttcactttttaagacgacaaactcaacctgtggatttatcttctcctgtctttctctctaaaatgaaaagaaaggaaaaaatattttcttcttgcacataatgaagatagaaatgagggaagctgccaatcaataagagatctaaacagaaaagcaggtggaacacagctaccactgactgatactcataaagcttgagagggtaatgcaaggaatactaccttccaccagggaagatagtctgtcttccatggaaaatttcagatgttccagtttcaatacaggcttggagtgagttgtagtttattagaagcacactttatttgaaagtctttttgcaacagtagactgtctccacccctctcttctatcccaaagtccccaaaacttggcaagcgggtgctttcaccccaagcaataaaattacattcttctctaaagaaattgaacaaatcgctttgacataatagagtcagtttgtatgagcattggtggggggcccctgagtatggtggaacacagcaaaaaagagctaagattttgtcttttctttgcttttcatacattgtcatccaccacataaagggcacccaggaagaaggttcagtgaatctacccaaagtccttttctatttttattagtctagagaagtcttctttttctgttttacttgtccagagatggtacctttttttatcccgtcttttcagagagcatgacttttctagtttcaacaatgatgcagtgcaggttaacaagttcaacaatgatgggattagcaagtagagacctcccacatgctggcatctaagggaccactaatacctccttctctgctcacacaaaagcaaggcatgcctttatttagctaaaagcattacccatttaccaagacctccgtatccaagagaggtagatgagcagaagccattctacctctacattgaatgtgccaattaagaagggtcagcactctgtgttcttggacaaaagctacttatttttgtatagcctgtgagcaaaaaatttaatactttttaatgcttgaataaagttaaaagaagattaatattatttgcctatgtatatggcatgaaattcaaatttcagtgtccataaatgttttttttttttggaacatagtcatgctcatttatctattattgatgacagctttggcaaaacagtggtagagttcagtagttgtgatagaaaacatagggtttataaatcccaagattttactctctggtgctttacagagaaaagtgttttcaatctctatcctaaagcatagttattgaaaaattgttctttttcttgctcattggagagaatgggttggagggttgacatattgttatagactctacactttctttcacctctttttttaacttgctttcttttgggctggtctatgcatagcatcttatatttcacattatctgtgaaatataagataacaatagtgctttcactattgttagaaagctgaaaatggaaccacataagcaagatccatgtccaccctcttggtggtgggaacagatgcaaagggcagattttgaaaaggtcaggctgaatttgggctatgtgtgaaagagaggggaagtcaagccaaatctttcaccctcatctttgggacctaaaatttcaagaggttctctgtaaacagccccagaggaccaatgtttaagaactggctgttgtctttttataaaaatcttcttttgctattttgaacctatgcaataatattttatgcatctcttttctctggaaacaaatttaaaccaaattttcaaccactgcctaacgccgtgttcctatagaatggccttttaatagctcttctccttgatacatgtgcctagatgttcttttataggtgcaagaaatcagctgtcaggttctgaagagaagacaggagctgaacctgaatggagaagagaactattagagaaatcctcagagctgacatgaggttagctaaaggacaacaggtacgccttcattttcagctcctgacatgctattgagctgcccttaaagaagtaccacaaatcacctgacgttctgagaggtaggcagaatttttgcagtggtataatgctttcattttatgccctagaaatacctgaaataatgtgaatttccatttgggaatttaaatgttctttcagtgttttgacataagtgcatgaaggagcccagaggtacttaaaacattgaaagtgaaacccaaagaaacagaatgaagaacaaacaaaggacatgtctgtggatttcttattacagaattccccaaccccatggctcctagactatttagaaatgaggccacctcagagggctttggggttggaaacagaagatttaagtgtgcaagtctaattggggatctggttatgcttatggtataattctaaagctaaaggaaaattaatattttattatctaaatttgtgcccaatatcaatcactgatataatgctgttctttaaaagagaagtaatcttatttatattcagacaaagcacatactggagaaacatgaagaaaatctacttagaatggttgacatttgtcttttggacattactaggaaggctgccagtctatttaccttcaaaaagacaaagataaaactctcgaaagcaaattggtccttgtaatgcattggatttattacctaagctccagtaaagaagataatatacatgctgtgcaagaa

SEQ ID NO: 31153 - DNA, 1582 bp, Bovine  19866880631036
  misc_feature (1)..(1): n is a, c, g, or t
nagggaaatctttcccccttccctgggaagggaagccaacaatgtgagctagaggtatatttattgagatatatttaataccctgtactaccccatatgggaaaagaatgcaaaaaatagtggatatatgtacaacagattcactttgctgtacaactgaaactaacacaacattgtaagtcaactatcctagaataattttttttaaaaaagtgttattttcaaaatgaacaccatattaaaacagaaaaagcacttctatctatgcaattctcaataatgttatgaagaaaatatttgagattatatctaaacaaaaatattagtctttctaaaatgtttatctggcattgacaaagtctgtataataacctatccaatatagtgttagtaacctaaaacttggatcatccgagaaaaaaatgtgaattgtgtctatatggaaaaatgagcactggtagcaaatgatatatttctaattgggtttggagcttgggaggtgataaagaactatggaattacttgctctccccagcccaaagtggtagtgctctgtatttgccctaggaaagtgcccaacagaagtgtattcactgaatccttatgtatatttttgaattacaaatactaactgcccaggaagtaaaaaagaaaaaaaatattgattgagtgtatatgctatgaagttttctagcatcaatattctcaccagggtttcctgggagttctgcactacaaggagcccagctgagaaagaacagttgcttccctcctagaaggcagagtgcctgggagctgaagcaatttgtcaggattcaccaggcacttactcttcctaattcaaacaagtgaattttctgtagttggttatattacccatggcaatagttcatattgaagaatgtgaccacgaacgaagtaccaattttaaagataacttggtttaatttattttttaaatcattgaaataggaatagcacctgagccaaaaccgacctactttcctgaaactgtatgtagcttttaatagccagtttccccaatcttcctactaaaatgatcagaaagaggttaactgttgcactgatgcggcaagcttcagcgatgtttgtacatgtggggtcaattactaactcagacacttactgcagtgagaagaagatggcgcagctggagaggatgaccatggggagcaggcagtatcccagcacgctcgccacgcagccataggacactcctgaagagctcatcaagttcagtaaggcatgaatacctaggcagccaatggcactcatgccatacacataaccaaattggacttttcctgcctgaaacaatgggaagaaaaccgtttggatacacaatgaacatcaagaagaaaccagattgtcaacaaagcagagaatactttcgaatcattcagctcaatgttattcatgtctttggagtataagcatcaggagattgggagctctaaagaaaaactgattgtaatatagattcaggtcatgaaaaaaataccctctatacatgggatggcacaagcatgcttatatccccagactgatatttttattatag

SEQ ID NO: 31154 - DNA, 1478 bp, Bovine  19866880651817
  misc_feature (1)..(1): n is a, c, g, or t
nattgaggcaaagcacaaagcaattagctgaatagaaccaaaaaaatatagctaatatcattgacataatggtcctgggcagaatcaacattatttttgaaatgtgaacccttctgcgaagatcattgacatagttgtcatagaaactgctgtcttgtcattactgctgtctccagacatctgttctaggttcaaacactcattgacatatgcattcatttggttagatggggtgtcttatcttaagcacctttatcatctatgaatatgttgactccttttaaataatgaaaaaccaataataaattagtaactacagatgtatcagcacttagagttttggttgcaatggctaataacatcactgagacttaattatggctagtattatatgaattttatagtcagttttgaattatatataataatataagccctggtatttaagaaatacaaatagttttttaaatctaaatgcaagaatttttgaaactgagtttatacagatatgtttgagttattctatttgttggaaaaaaagtcacaacacttcacataaggaaattacaccatgaagacctagttacagagaactggtaaagatatttaatttccccctaatttatttgcctacatttcctgtttcagtcattgctaggaaaagacagcattaaccttcaccttaacatattgagcagaataattcttaattttgcatcactgtatgtagcatttataataggaaatttagcatccatgtcctccaaatgctaaatgctagtgttaatagcagctcttggccctggtcatagtagcaaccaaatatgaatccacacatttccaaatgtccctgtgtacagtatggggttgagtgaaagaagtaataccactcatgaatggaaaccactgtaaatatctttgcaaagacgtcttttcttgttatgtcattttctcagcagattcttaccttgttacatttaaatttatctggtgtgctgctgctgctgctgttcagtcgcatcagtcatgtccaactctgtgcgaccccatagacagcagcccaccaggctctgccgtccctgggattctccaggcaagaacactggagtgggttgccatttccttctccaatgcatgaaagggaaaagtgaaagtgaagtcgctcagtcatgtccgaccctcagcgaacccatggactgcagccttccaggcccctccatccatgggattttccaggcaagagtactggagtggggtgtcattgccttctccgtatctggtgtgagtttcatactaattgaagtctggaaggttgaaattgcttcaagctgtcaacaatactacaagaatgtcaggaaaaaaacaaaaaagcaaaatttaaaagatttggtaccctaaaaagaaactgaaagggaaaaatgtaccaagttactaaacatttaattgtttagaatagaatagttaagggttgcctttcc

SEQ ID NO: 31155 - DNA, 2222 bp, Bovine  19866880739562
  misc_feature (1)..(1): n is a, c, g, or t
ntggtaaatttaactgatttctctgacctccaaataaaatctttagttgattaattgggaccatttatttccccaaagacatgagtaactggaagatttccccaagaagctttaataattaaggagagtttacaagcatgccaattataagatgaaatttaaatttacttggaaattaatatttaatgtaggttattgttttagtaaatttgtctgagtgacttgtcatcaacccctattgtaaacacccatgtaaaaaagtgaaaaataatttgccagatgagtgaatagggtaatacattggagaactaaagtaacaacagttctgagctcctcagtagagtgtgactagagtttgactctaagcttctcagagagtcaaactcaatagactttagatgtaattagtattcaaatcttttattttgtcgtactgaaattctaaagccaaaactgctcttacttttggttacttacaaagaacctataccccattctagatctacgacttcataaccataaattgatacttgctaggtagtttaaacattccaaaacatttctatttgcatctttccaataaatacaaccattttgtactgggggcttccctgatgtctcagacggtaaagaatctgcctacaatatgggagacccaggtttgatgcctggtcaagaagatcctctggagaagggaaaactaaacagtctgaaacatttttgtttgcatatttccaatacaactattttgtattaggtggtagctaatatacattgtattttattaaatctttctttttctaaagtaaatgagatacagttcaaattagaaataaagctagaaatgtgctttttttctttaaggtttaatgcatgtgcacaataaacttgtggatccactctacagtatgaaagaaggaaattgaaggagattggatcaaaattctgcttgaatgaacagaacacttttatacatatatgaattttcagctatgcaatatgattaaaacttgggggatttttgaatattgtcatttttgaagtctaatatctatgttaaacattccatatttacaatgtgtccattttatactagggtttaggagaaataattggctctcacggttaatcagctacttgttacagaagccacactgtcaatgtaacaccacaaaaatgtctgcctatttacaaattgtaaatcattttaaaggtgacttctgtacatcaagtatcattcatatgactccagtggcattattagactttaactttttaataacaggacactccaagcctttcaggtatcatacaactatcattgcaagcctttacttccaaatgctatctttattttctctgcattacacacaagctttctgcacgtgattgccttggtcatctttctacagtagcatctggacatcaaaagtcctgttagatattgttggtacagaaaatttgaagagatggcagtgcctaaaactacagtttatgtccttttggaacgtatgtattaagtgcatgttttttgtgcaccgtcttctttagcacttttttttctctttttataaatgtgaccttagttttatttaatgacttgggttcgtgcacttaatatacgtattttggcaattatgagctttatacctagaaacacactgaaggaaattttttttaagaaaaattattaaacctcttaaacgattagctttattccttacctatatatactgtataaaaggatatgatgaaatataaaaggaattactgtaaactatttgattgcataacaatttgcatcattaaattacaaataaaagtatattgttttctataactcaaataaagcttgtaataaacaaatattaagttatctaaattttatttccagaagtaaaattgaacacatgcatctgaaatattctaacaattaatagtagctgtgagattgcatttattaatactttttatttgttgtcataattcaattagatttaagagacaatgcctctgcctatacagcttcttaattctgcttcttagacagtaaaaaatacttccttttcactcttcatattttgctttttataagcccacctagtagaagcatcacttatatatacctgcttaatcgcctatgtgattgaaatatagtcttaaaaatatttaaatagaaaattaaaaaataaaaaataggactgttaggataaaatatgctg

SEQ ID NO: 31156 - DNA, 2674 bp, Bovine  19866880850115
  misc_feature (1)..(1): n is a, c, g, or t
ntgggccggtaagatccccttgaggagggcatggcaacccactccagtattcttgcctggagaatcccgtggacagaggagcctggtgggctacagttcatagggtcccaaagagtcagacatgactgaagtgacttagcacacatgcacatactatttgatgaggttatctcattgctttgttatgagtatcaaataggaaataagtgggactcaataaataattgttagctttttcttggtctaaccttaattaagcctaaaagatatgaaaatttgtagtcaactttagctcttcttcactcttacctctttcatcttcttcccctcttttttaccctcaaggacagctttgacaattggctctggctttccattctcaacaaagaaaaaaattaacaaagaagagatactgtgcagttcaaatctttgttgagagcaatgtaaaagaaagtttaataaagagcaataatactaaactctcaaaaactaaatatgaccagagggaacattaatgctgattaatggaatttttagaatgcctaatttttacataaagatcaaagtagttttgcttattcagcaaaattcatctaaattcttcccttaattagtggggctccttaaaaccaaaaagaataaatggtaattaaatgctaatcttgcacagtaaaaatgacttgaaattacatgcaaattggaaaacataatcagtaaaatatctttctatgtgaaattcctggtgcctttgtttgagtttattttatgttgtatttaggaagtatagtcaggactctgggcagatagcagcctgtcatttcagggagttggagttcactgctgttaaggcaatagtagcttggctgataaaaacctgaactgtacctgtatgaaaagaaaatagatataaggatgtttaggtgtagaattaataatttttgctggtcaaatgaacaaagtcttctctttggtaggtttttgtagatggactaagtctcaaactttttttaaaaaagattagtagtatgagagggacttgagcctagtaaaagtgacacaaattttgaatttaaaaatcttcacatgagatctctgcaaagtccatgttgatatagctgattttagaatttatataacttttccagaaaagtcttcattcagccaaaaacactgtctattgctatccatttcctgcttttctctgaggtgaggaagtaccaggtactgtcttttgagcttataattgagtgtcagttattctccatttattagtccttccaggtcagcaactgatacttctcatcctgctctgggtggcacgagtctgactgctgtggactatatcacataaactctctcactctctgttcaaccagtggagatcctagcaggagactggtggatgggagataatgaggtcacagtatgtattttcccaaccattccttgggccgtggcttggcagtgtctgtgttctacccagagatatagttcctaccagaccctctcccaccattacagctcttgtcagtctcggtgacagcaacatcactttgctccttccgattagagatggcaatgtgaaagggtgttagttgctcagtcgtgtccgactctttgtgaccccatggactgtagtttgccaggatcctctgtccatggaattctccaggcaagaatactggagtgggttgccatgctctccttcagtggattttcctgacccaaggatccaagtcaagtctcctgtattgcaggcagatatttacagtctgagccactagggaagacctagagatggcaaaggcttctggctatcggagttcctcaggcttctccttctcttgctggtgcctttaaccctccccacaattttgtaaataattcgttcattaagttgtcacagttatcacttttatgtgtcttgtaaggatcctgacaataaaatgattcatattcttgtagcattattgttttccttgaggtaaaaataaagggaataggttctgctttttattttttaattcattgttattattacttttttggcagagacatttattttcttctctacaaatatctctcttcctttctctccttcctccagtgagggcatctagacgaagtatagtcattttatgctctggcagtcctttctatatactctatgctggcattttagcttccttttataagtaatcatttatatgccttcctcttttccttaaaactttctctgccttatttatcattgtattctcatacatggatggttaggaaaactagtactcaataaatgcttagtaaatgaggaatttaggtgctgaagaagactcttgagacacgcctgggcaacttgctcaaggaaatcaaatcaatcaatcttaaaggaaatcaaccctgaatattcattggaaagactgatgctgaagctgaagctccaatacttgctcacctaatgcgaagagatgactcattggaaaagtccctgatgctgagaaaagaagtccctgatgcttttcttcctgccctgaattgagggaaagaagaaaagggattgacaagaggatgagatggttggatggcatcactaactcaatgtacctgagtttgagcaaactctgggagatagtgaaggacagggaagcctggtgtgctgcagtccacgggctca

SEQ ID NO: 31157 - DNA, 773 bp, Bovine  19866880864098
  misc_feature (1)..(1): n is a, c, g, or t
ntgacttaataatgagggatttatgataaggaaacatttagggcaattagagagacagagatggaatagggttccaagaatggaaaccatagcacagctgaacattatacaaatggaacttgatccaaggaagcactaatcatttcagcagcagaagttcatgaattgtcagtagcttgatatcagtgctgtgttctttgtattgacttgtttagtctttccgctactctaccttctaactttgctcctcaaaacttcagcttgctttatgatcctttatgcctgcaaacctaaatacttcttagccctatctaatcctcctggcttcttcttatttttcttaacatgcttattgttttaattgatttttgaatatttgaatgtatcatagttaactgtgacttttatttttaaatagttttaataatttttttttttgaccagtgtttcttacatactttaactttaaatttttatttgtcagatctatctatcttttctccctagatttcacttttgctaatggatcacttcaagaaaattagagataccaagggaacatttcatgcaaagatgggtacagtaaaggacagaaatggtatggacctaacagaagcagaagatattaagaaggggtggcaagaatacacagaagaaccatgcaaaaagatcttcactatccagataactgtgatggggggtgatcactcacctagagccagacatcctggaatgcaaactcaagtggggccttggggaagcatcactacaaa

SEQ ID NO: 31158 - DNA, 928 bp, Bovine  19866880970711
  misc_feature (1)..(1): n is a, c, g, or t
ncttttctttaattgtccttgccctttcctttctgaattctgtcaagtgaaagtgaaagtctctcagttgtgtctgactctttgtgaccccgtggactatataacctgcaaggctcctctgtccatggaattctccaggccagaatagtggaatgggtagctgtttccttctccaggggatcttcccaaccgagggactgaacccgggtctcctgcattgcaggtggattctttacgatctgagccaccagaaagctgaagagtactggagtgcctagcttatcccttttccagaggattttcttgacccaggaattgagctggggtcttctgcactgcaggcagattctttaccaactgagctaccagggaagcccaaattctgtcaacagttatttgatttttgccaacttatattctatttcatttttttaatttttatgttattgcctgtgttttgtgtgtgttttcactaatggttcattaaaaaattgaatacaaatcaacctcataaaacagtaacattatgtaaatgtgatgagtattatgcataaacaatattaaaaacaaataaattctatttcagtcaaagtactataatgggacccattgaaaagcagatgtaatcctatataattgaaactgccacacaaaagacaatattccaagttcttagcactcaaaatcatattatattttagtgttcaatatatagcctatgaggttcttattcagctttttgttctctgaagagtttctaattgtgtttcttattacaggcagcaaaacatccccgtaagttcaatcacattgataaaatctttcaagatcttaatacagattattgcatggaatctatcttcttaaggaaattttttacagaatcctcttcctgttttcatttgaactgattacatagagattgtgt

SEQ ID NO: 31159 - DNA, 1133 bp, Bovine  19866880998518
  misc_feature (1)..(1): n is a, c, g, or t
nataacttaattaaaatttgagaaggattaaaatacaccaataggtttataaatctgtgattgagatatctcaaatgggggcactgagatcaaatcctcgaggtgagtctagacagagctcatataaccctcagggtctgtttatgaaccctagtcagccaaggaagagtcaatcatgaagactcttcacatttttctccaggttaggtgttattaatattgataatgtggcaactctaacagttaaggctacaatttgcatttaattaaaaatataaatcgagataaagtttctctctatgaagtttgggaggagaatccattactagtaggaaagagaatacatacgactatcacccattctctctggtatttggcatggttttcctctatacccttataagaaagggagcattagaaataaaggcaagaaatcagcctccaaattctattactttacagcccaccctaatatgctccagttatcattattatttatttaatatgtagctggattctagagtttaggataaacgaatcttgtctgacttggtttaataactttcctaaacgagttcttccaacaatttgtaaaaatgagtatgtcaagttctttgagctcttgaatgtcttttcacaaagtcaaaactaggatttgttgagctccttactggaggagaaaataaaacaaaggcaaagttctataatctgcagccagcaaactgtgtgtcagcaagtcttttattgagtgaccatatatttactggctccataagccatgaaactccaatattttggccacctgatgtgaaaaacagactcatttgaaaagaccctgatgctgggaaatattgagggcaggaggaaaaggggatgacacaggatgagatggttggatggcatcaccgacgtgatggacatgagtttgagcaggctctgggagttggtgatggacaaggaagcctggtgtgctgcagtccatgaggtcgcaaagagtcagacactactgagcgattgaactgacctgaaataagccatgtaactagcactatgcccagaatactgtagtaaacaacacaggcacttatcctcagggaacttatagacagaaaagttgtatccagaactcctca

SEQ ID NO: 31160 - DNA, 628 bp, Bovine  19866881160659
  misc_feature (1)..(1): n is a, c, g, or t
natttatgtgagaaaccttatttacttatgtgtatatgtgtgtatgtatgtatttcttttgaaaggaattggtccagatggtcatattgctttcaatgagccaggatccagtttagtatcaaggacaagattaaagactctagcaatggacaccattttggcaaatgctaaatattttgacggagatttatcaaaagtgccaactatggctctaacagttggtgtggggacagtgatggatgctagagaagtaagaattaaatgttctttgatatttttcctttgatgtttgtagattttggagaaattatgttgtcaaataagtgatgttttgatttaatcatatttgcaatataaattgttgtttagctttcagtaattgctgtcaggctcattgccatatttagaattcaagtaaattaagtctttggagctggaaattaaaaattaggcactacctcttttgaggtactgcttcacttgcctcttcctgtttcacaatttgatgtcctaacatcacactttatataaaaggacttgttacaggaaagatgcagttctaattaacattaaactgcttttggagcctgaaagtaatttagtgtcatgtgcttcttgactgtagaag

SEQ ID NO: 31161 - DNA, 2198 bp, Bovine  19866881210773
  misc_feature (1)..(1): n is a, c, g, or t
ntcatccagcctcagaactttatttcagcttcatgccaatgactccccaaattttccaggcaattaaggactgagtaatcaatgctatatccccctagatagagtgaaggatgccactgagaatactctctgggagtactgctgaagaggcagaagctttccatgggaatttctaaatgaaaagtaaatgtaaagcttctagggttcttttgccatcttgtaggaagaagtgactgagaatgaaatcaacacaggaaaaaatcatcgctaagaggtagctaaagatgaatttttgattaattcctatgagcacagaagcccaagcagcttactcctggccttttcagcaacttttttatttgtacaagttaaaatttacctttatttgtttaagccatttttaattggatctcaattctctgcaaataaatcaatgacacagaaaatacttaaactctaatatcaaatggtaaaaacccacatactttttaattctaaatattacttcagatagtaaaagaaggaaatggcaacccactccagtattcttgactgggaaatcccatgaacagaggagcctggtgagctacagtccatggagtcacaagagtcggacaggacttagtgactaaaccaacaaccaaccaaagcatatgcgaagaaaaacttgaaggtatcattctgtattatacctgtatcgagatagaattatgcatgtttttatttagtgacttcattcacatgtcttacctcttgtcctagtcctggagccctttctacaataagggtctattattttatagttggaaaggttttaaatcaaattttataaaatccagcttttccattattaccattatttccccaatactatttctgaaaaatgttctctgtgattgaatagagtttcacttgcaaattcaatccagcagatttagttttattggatgcaggcttttgaattcattttaagagaagaacaaatacctggctaagaacttcgtaaagattttttatttcctattttaatcattttttttaaaacatgtaattctcacctctaaaatttaaaattttttctttcttgggttgcctataggttatctttctactgcttgttttgagatgttttagtgcacatacttttctatttctcttggccttttagaagtgacatgaatgtactttttaaaaactgttgcttaaagtgcatggaaagcagtatcttgtgagtatccacatgaatagttgtgatgaaagtagatagtaactgttactttaagtactgctactactactgtctctgtttaaaaaaagaaagatttttaaggctttttgttttgaaaagtttgcagaagacccaaccatgatgtgagctgacttttgttttagctaatttctgaaatttgtcccaacttatcatattaaaatataatccaatattgaataaattttatatctaaatagagacttacgattcattgtaaataagttttatacactatgtaagtactggaaatagcaatatgtaagtagctaatacataaatgtacttggaaaaatgccatgtaacaatagaatttttcttctctctaattctgggagaagagttttatttagcttagaagttattttcttctctcagatatcaaagtggccttcagaagtacaaagagaaactgtctctgggaatttttaggcagctgcttaaaaatatttgcagaaatggaattagaaaagaacaacatttatggaaaatttgccaacatacaaatgtattaggattataggactatagttgagaaagttactacattaaaatcagcttggatcagttagagaagagacagaattctctgagatttgtatagaagttcttatttaaaaaggaaataattagcctgacatgaaccaatttgggaacagaacaaggttagtgggtggttttaaaaaaaagaaggtaaaaatagcagaagcagatctgggtcagatctgggacagagagatttccttgaggacacttactaagagttttagtgtcttagagtggagggttgatcatgcatataagaattggacactagtcttaactgcttttaaatgatttgctggtattgtttgggcttcccttgtggctcagatggtaaagaaactgcctgtaatgcaggagacccaggtttgatccctgggtcagggaa

SEQ ID NO: 31162 - DNA, 730 bp, Bovine  19866881226379
  misc_feature (1)..(1): n is a, c, g, or t
natacatcatctttattttaagaaacaaaagtgcaagatatcccacaaccacaaagaaaaatcccattagcagataaataacaggaagaaataaaaacaaaaactgattcatccgtttctctttcacatcaaacccaagtcctcaccacttaagtccttcaaactctaaatgactgactgactttgtcttaataggggcattaatattaattacaaattaatatttgtaattcccaatgagatacaaaagggagaaaacaatgactggatacccagcacagagtaatctgataaccttcaatcaggtcttcctttttcaaatatctgtaatatcacacagaagtaacaggttctggagttatatatacatgaggtgacactcttctctgctatgtcgacactagtacaatagtacagtattaaagaaaggccagctaaagggaaggcattcagtaaatgtccactgataattagtaatgaaaacaccctatgtagaaagagtatttcaaatataatgacctactccctagtgaaacaagaaggaaatgcatattactgtgctcctctaatttatcagagggcttgtttcaagaggctatttttttaagaagtccttaaatttaggaggaaatgatctcccatataaagttgtatcatccatatataattaactggtatataaatatcatacaaaaattttttttaaacagtagctgttatttaaacagga

SEQ ID NO: 31163 - DNA, 989 bp, Bovine  19866881365683
  misc_feature (1)..(1): n is a, c, g, or t
ncccgggttgagggcccgagcggccagcccgctcctgaggtcattcagtgtgagtatagtagaagtagaatttgaacccaagtattgttcattggaaggactgacgctgaagctgaaactccaatactttggccacctcatgcgaagagttgactcaatggaaaagtccctgatgctgggagggattgtgggcaggaggagaaggggaccacagaggatgagatggctggatggcatcactgacttgatggacatgaatttgggtaaacttcaggagttggtgatggacagggaggcctggcgtgctgcgattgatggtgtcacagagtcagacacaactgagcgactgaactgaactgaactgaactgactttgacttcatcactcatatctatgccctgttccatactgtctctctttgaatggcctgaactaggtaatgaagaaaaattgttctgttttgcatgttaattgacagtacacagagagaagataaataagaagctacaaattattctaaaagacactatgtaaaaagagagtaacagacccctaaacttgttataacaaagagaggccaagaaatcatatttctacagcaaaagttgtagttataggattttccctgttactagtacagaaacattcaaagatgtgcaggggtacgatggccataaatcagcactgaataatcaaaccaagccgggaaaaaaatgccagcaagtcctaaacacatttgtctgcaaagccttaataaatgcagtttcataaatactatgcaatataaggtataaattatgctgcttttctcaaaaattagttcaagtgcaagctggaagaattccctgtgcttaggctgatataaaattcagtaaatacagaaactttgaagggaaagaaaataataataaagacttttaaaggttatgtgaatactgtaattatctgtgcataaatgagagcattttctctttctagcctaacaggaa

SEQ ID NO: 31164 - DNA, 1506 bp, Bovine  19866881423499
  misc_feature (1)..(1): n is a, c, g, or t
ntgagcaacttatgaatgagtatcctgaaggagatgaaatgtcttttttactctgcccccaaattgttctcctatcatcctttctcaattcctagaaatactttgacgctttttgcaaggagttcagtgagaaagttacctgttacctggaggaatatcttataagcttttgtttcttattcacacaaaagtaagggttagtttatctgattaattcactgtcacagtaaatggtagataacagtgctgtaataggataggacatggatcaaacatgtttgatgaagatactgtgaagagggtaggtggaggatggagtcaccctagaggattctactgggacgagagaaggggtgagtcagatgtggcacccatttcatatttttccagatctgctttttttttttaatataaatttatttattttaattggaggttaattactttacagtactgtattgattttgccatacatcaacatgaagatctgctttgtttcttgcttatgctgaaaccgatttgcctaaattctacttacaactttgtttttctttgtgataaattattcctcaagaaccagagaaccacagcagactattttaccaggcctggcacccacatagccatactcaataagtgccttgagtcttgttaaataagtcatttgaatgtttggttcatttgtttcagtaggtgccagataaacacttttttttttggtgaggattaattgagatgttgtctgtacagttatcatggtgctggttctcaataaatagtagttattcttagtactgtaatactttttctattcaaatgccttcttatattgaatttcccatcaggcttctaaatgaacccccataattctgtatgtattaagaaggacatgaaagattgccctttttccttctggtttttggcttctctttgcttttttgttttattatagactcagaggaaattaaactctgtcatgatcatgataagcacatgagactcaaagaacaaaagtaaaggacagttcagccttgttcttctaagaccacaccaaaggtcaattattatagacagggggaacctccttcctttaaatactttagagttagtgccacaagttcttcagtgttcacagggtagctgtccaaaaaaaatattttagaaacacactaagcaaaaatacttcaataagatcaatctctattatttctaagtcttattctaaaggaaattttcacttttttaaaatcaaatagatatgtacttatgaaagtctagattttggatctcaaaaaattccatgtgagatagttaaaaatttctttggtaataaaattatcaagaaaaatgtccagtataaagattattgaaaatttcattttaattatacctagtatatgacaaattggttgtttagtttatgaagaattttatttgtaaatcaaagactttataattaagaaaatatattattgatagaagattatatttaaatatatactccgt

SEQ ID NO: 31165 - DNA, 776 bp, Bovine  19866881677062
  misc_feature (1)..(1): n is a, c, g, or t
natatatgggcaaagatacagtgaatgctctaccatagatgttgagagttttttaaaaaaaaaggtataagggaagtgtatatcatgatttgtctacatatgccacatattaatacatattgccacatagcaattacatatgccaatattaataaaattaaacacaatcaaactacatttctgccatctcatattctgaacttaaaattttagattacttgccctcaaacaactatcacttttaaattaagattgaatgcatgaaatagtcaaaaagattgaacttgggaagatgaaaataaataaataagaatctagtcaatatagtgataactagaacccattttaaggcagtggccagttcaaaatatctactgtgcaacatctaaataccactctaagtttctggtcctggccagaatataaattagaagtagtctcctccatagcctgtgttaataaatagggcagattagggcatacaatgagaagcctgcctgcattttcaaatatttcaatttcagttttcggagcaaactcagtcatttttaacctagctccaatatcatcttactcaaaatacagataaagtttgaattttaaattaacatataaatgactttgggttgatttagaaaaactaagctgaccctcaggtcctttaaccatcagtgaagactaaggaaataaatagcattgtaagttatggggacagtatcaccaaattttcattgattcattcaataagtattcatagggcagaagaatataaaact

SEQ ID NO: 31166 - DNA, 900 bp, Bovine  19866881905215
  misc_feature (1)..(1): n is a, c, g, or t
nctgaataatttcctacctctgcttctctactttctctgtgcaagtttttcccctgcctcctgttgaaagagcactcctgaccacttgggtttggtggtacccaatttgaattgatctttgctaaaatgaactaaaaaaatttaacatatctcagtttatcttttagttccatgctggcttatatgtttggttttgccaataaatgttttaagatgtttatttcacagaattttagactgttttctattggatcacaggaggattttgcaacactgaactggaattcctatgtgccatcagttggattaaaccaataagtgactctcagtttataccaagccccccattttccttctctatcttctaactgacactccttactcctttatgttttgttccaggcttctgtaggcatttgagtttgttatctgatttcttcatctgatactcattttggaatcttattgtttaacattttctgcaatttatatcagtcaaaataaatgtcgtatccttcatattttgcaaggaaggaagtatcaagtcaagataaatcctttgtagacttctcaaaaacttgtaaggactatccacatctttgtccctacatggtgcttagctgatcttcctctcaaacttctcacatggtggcaaggaaatgtgagaggccagatcttcaagactacatatgtatctgctgcttgtattcagctgaaaagagagagcacatgtcacatttcattcaatttcataacaccactgaggggtgaaagatcctccaatgaaaaccaatgttttatttttttgctttgaataaaaaaaaataaagaaaaaacaaaaagacacataaaaatcccaatcttcttatttttccctttaaaaaaattcctttcattatt

SEQ ID NO: 31167 - DNA, 3041 bp, Bovine  19866880466359
  misc_feature (1)..(1): n is a, c, g, or t
nttccctaaatgggcagaagatcctgtaagcccgagagaccctcctcttagcgtcttaaacatcttatcacagcctcaagctccagggttctgtgcttcaggacatagaggggccatccaccaaccaaaatggctgactttacgctgagtggggacctccagctctcaggaacaggaagcgtgttcagaggccccaccccaaagggtagggacttcctaacttcagagctttctgattggctgagctttaggtttctttgtaaacatctgaggaatacagagtgaaggaattcattcattcaccactgaagtcagcactctttgatatgtgtataaaacatgtgtatgtatctccaatgtctgactcaaaatcacacttgaaccttcaataccttggttttctcatctgcagaatgggggtaatagcaatacctacttcgtatggttgttgtgaagattaacagaaagcacttagaacaccatctggcacttaatacgtaccatctaagggttacacccaacccattcatgaatgactcatcccatgattccctcatcaagaggagtttctccaggcttctgtcctagactctcacttggcttaactaggttctcagtgcctcccagatccccttcgcaaggatccctcaaccccacactgagcactggcaccagagcaattatcagggttctggcaatcaggggccggtgaggggagcatgctaaaaatatacccattccccacaatcccataagccttcaatttacctgcttttataaaaagatgcttccttaggtgtcacccgtggaagatataattacagcttgggaatgttaattcctctgctcctgatacgtggatcactgctctgcagggctcctgccctccccagagccttgggtgggggcgggggagatgggcaggcggcctggagagaatcaggtaatgccaggcctggagagctgcagggatgtggccataaaccagagcaccttggcgggacctagggtgatggatgaggattgcagagggtgtcttctcatcctaggttatcctcaggaagcccctggggagcttgggcaggtgggggaggacaccctggacagagcccctgccagccttgtgaggaagagggaatcctgctccatcgccctccacccaaccctctcttcagccctttctcaacacaacagccagagggattgccataaaacctgagaactagtccctcgtctcactcagaatcatcacagtggcctctagctccgaccctccccttccccactgtattttccccccagcactcggcagcacccactcttgtacgtattggccttctttgttttgttgtagtgcagatccttcactgagatatacattccacgaggacaaggattgctgttttcttcactgttttgttcccaaggctcaggacagcaccaggcacacataggtgctcattgagagtttgtggatgaaggtgactcttcagaaaggatttccaagcaggaggaagcatgagggcaaagcacaaaggcacaggagggacccatgcatttggcaagcatgagtgtttctccacgtttggtgcacaagcacgaatgcttacggaaaagaggaagcaatgacagcaaagctggcatggcctctgtctgtctggagctggcaagtaggagagtggcaacatggggagatctgggtttctggggacttccctggtggtctggcagttaagaatctgccttccagtgcagagaactcgggttccatccctgtttggggaactaagatcccagatgctgcggggcaacgaagccttggggccataactactgagcccacacgctctgcagcccaagtgccacaactagagaccatgtgctgcaacaaagacccagcacaaccgaaaaaaaaaaaaaaaaaaaagatttgtgtttctggaagatcttgggggctggtggagagtggattacagctgagcaagactggaggcaagaagaccaggaaggaagctgcttagatttgcaggagggagaggatgaggtcctggcccaaagcagggtggtgtggtgggggttgaagtttctaagagatgcataggggtctggagtgaaaagcaaggtggcaggcttcctcccgcctctccaaagcaggtcttcctggtcccccaccctagccagactgtccccagctccgcccctgggagatccctcccttgccatctggcttcgatctaaattctgttcagcttgcaaagctcaacccgatggcttcctctggccccgagccctctgtgtcacaccgatgttctctgaatgaatgtctggtgctcctcattgaccacgcggatcactgcctgtccacaatgacatggacatatttcaagaaaactttccttgcgaatttcttgagggtagggattgtggcttttctactgagagcctgacagaattacacagtgatttagagcctgggacttttgcctctggctgtcttgggcttaaatcctgagtttcccacttagaagctaattgactttaggtaaagtaacttcccccatttgtaaaatgagaataaaaatattatcccctcacaggattgttctgaggacgaactgaattaaaacatgtaagagggatgagcacctttacacactcccacaacacctatacgtctcctgtgttgcacgtcacacccctacaaatatttagcggagtgcatcacgatggtgactgatgctctgtcctccccactggactgtaagcaccttgagggcgggagcgagcagagcccagcacaatctcttgacacatcattactgtcagataagttcatgctgaatgaatggatggttatagtattaaacatgtaacattgaattcgactgaaactaagatgccaaacaagagagatgcctagggacgtctcttgtggtccagtggctaagactccgtgctcccagtgtggggggccccggttcgatccttgattggggatctggatcccacacgccacaactaagatctgatgcagctaaaga

SEQ ID NO: 31168 - DNA, 2711 bp, Bovine  19866880469770
  misc_feature (1)..(1): n is a, c, g, or t
naactgggaacgtttccaggctccttcctacagaggggcagggtatgccctgcttcgagttcggcggggtcggggggtggagcaagaaccagaatctaggaaatagtaataataacagtgtctacctcagagtgttgtctggagggtggaatgagttagcatatggaaagccccggaaatgcagctggcacatggcaaaagttgcataagctttcagtaaagtcagaccagagaggaccctgaggttgccaaagctgtgcgtcctttctagccgctggacttgcattgtcagtcagttcagtcactcagtcatgtccaactctttgccaccccatggactgcagcacaccaggcttccctgtccatcaccatctcctggagcttcctcaaagtgatgtccattgagtcagtgatgtcatccaaccatctcatcctctgttgtctccttctgcttccaccttcaatctttcccagcatcagggtcttttccaatgagtcggttcttcacatcaggtcaccaaagtattggagcttcagcttcagcatcagtccttccaatgaatattcaggactgatttcctttagggttagtgatggttttggatttctccagtttctctgctcgcccatgctggtgattctgtgatgtgtgtgtatgcatgcgtgtgtgcaggcatgcatgcgcatgtgtgggaaggggatgtaaatgcaggtgtctttccgggccactccctgacgcacgcacacacattccctccctcatttctctgttgctggtttgctcccagctgtcccaccctccagagcccctgacttccttcctacccccgctccaagcccacaactcaccccagcctcctccctcgcctctcccagagcccatggccctcccactcaccataaatctgtaactctggagtgtgtatgtgttggggtggtagagagggtgctgtggtggaaaggcagcaaaccaaaccaaccccagctaatgaaaacggcgataaatctctgtccatcaggtttgttgtgagcacaaacattgccaaacaagggcccagatggcctgcgggccctcctccccgtggtctgtagagctttaaatggaaatggttgctttacacatctattcactacttggcaatgggggtggggaaatgacagtatccagggggtgggccacaaaataggatcgggccaggtgggagccctttatgccccacccctaagcaggcttcctcaggccagtccttaactcccctgccctgctcctggagagaacccgggatgagccctgtctgacatgtgccaactgggggaggagggggaaggaagaggctgcctccacagcctggactcaatctgttccaatccccagacacatcctggggcagccagacccagctcctctctgttgtttccaaagttcttcatcccttgcccagaactttccttcctttccatctggtcagtttgaagcctactctatctttcaagctcaagccaagccccacctcctccaggaagtctccctgcccccagtcctcctggacctgtcctggctcattcctaccgcctggcccactgggagcccaactcggtcattaccggaggtggaaaggcctaggtgcacagctgggctttcccgctgagcagagggacctggagcaggttaatatgtcagcctcagtttcttactctgtaaaataggtataatcacggcacagttgggcttcccaggaggcttggtgggaactaatccgcctgcaatgcagtagacgcggaagacgtggggtcaatccctgggttgggaagatcccctggagtagtgcatggcaacccactccggtattcttgcctggagaatcccaaggacagaggagcatgagggccatgatccatggagttgcagagtcagatacgactaaaacggcttagtatgcaggtacaccgtaattatttaaggaccacaaaggatgtttgggctaagggatgggaaaacctggactctccctactgttcggtttattattagtatttatgtatttattttgtggtctcattccccataattcttttttttaatttatttttaaattgcactgttcagtttttaagtcagtgtgcaaggctgggcaagacacatgacctctctgggccccgtctgctccttctgtaatatcaggacactgccaccttctctgtctatcctatcgtcctgctgggatgacatggaatggtctttggaggctgctcagaacagggaaggtgtgacttatgatgcttatgatgatgctgatgtcagggatggagttggggggaggttccccaagtcaagtcagaggcacccagtggcacataattcatacacgctgtatggtcaaaacacacgggcatgttcccctacccctaatggggtgcctcctgtctcttcctatcccgtgacaactccagatgtaaaggaccaagaaagaaaatgccagaaggctttgaattcctgatcccctgtgggaaaacccccaaagggacccaaggaggtccaaagggatgctctgtggttccttatttctaggtcaccaggtgggtttaccaatggctggtgaatgtagaaaccatttaggataaaagtacttcacttgagagtcttggaatccctaagacgcccatggataggctttgctgctgctgctgctgctaagtcgcttcagtcgtgt

SEQ ID NO: 31169 - DNA, 592 bp, Bovine  19866880584733
  misc_feature (1)..(1): n is a, c, g, or t
ntgaaggaattatttagtccttacaacatcccaaaccgctaagcactacgttataccatttgagaactagggaaactgagtcacaaagacggctaactcaaggtcacggagctaaaaaaaaaaaaaaaaaaatgaaggaagcggaactgaaacccaaggcggcgggaccccaaagccagaaagcttaaccacttcgcccgccccgcctggtgcaaggtcaaagcgaaggtaattgcgacaggagaaagcaggttttcctacacagaagaaagtctttctcggctcctccgcgacccttccccccagtcggccgggaggggacccgggcgcattcccctggctgaggcttgcgcctcccctcttgtcgggccgcccccccggtcctgacccccttcccagcgagggctcggccgggtccggccgcagtgctttcggggtcgtctgtcggcgctggctagttaagaaaaataaacaacgttccaaatggaggcagattcctttcaacccaagccccgccgcctgccagagaaatgcaaacagcgggggacggcccgagtccgcccggggccccgcgcccgagctgcgggtggga

SEQ ID NO: 31170 - DNA, 2040 bp, Bovine  19866880590359
  misc_feature (1)..(1): n is a, c, g, or t
ncccctctaccccatggagggatcatcgtgatctcatgcacagtctggtgaggcctacaaatgtgccttccctgaagtctcgggagcttgcagctgtctagacgtgaaggggaggtacagctggatgaaatgggggaaagaccaaaaagagaatctccccgggaggaaagtgggctcagttccccctccctgcaggccggagatacccagatacagcttttggtggaaagaggcaattagggtcccatcagggttggaaattccctggaggtccaatgattaagactctatgtttccactgcaggggggcaagggtttgattccgggactgggaactaagatctcacaagccacgtggtacagccagaaaaaaaaaaaaaaaatcccaccagggagaaggcatggagggctcaggaagcaacaggaaattgggaaccagttggccttttcaagcttattttccctctccctccaccgctcagactgaaaaccgaatgcccagctctgtggtttgggaagtgggatctagttttcctctcaaggaggcagcactggtcctttcagttcctgaactgaacaggtccctggtcaaagggatctggacctaaatcctggctcccccatctactgaatgaccttggctaaatcctgctctgagcctcagtttcttcctctgtaaaatgggaataaccctgtagtcagctcagaggtttgttgtgaagaatacacgagacagtgtacatggagtactcagcagtgtggcacccagcaggtcctggatggacgttaactcctgtgatggtgattcatctttcaccttcccaggcagctcctgatcatttgcccactgccaccagaaggacttgtgagccaacccctcttccatctacacccacccccactcctcctcaagcctaagaactcagtctcgctaatgaagctgaactctcctccccccactgcccattcagaagtcattagcaggatctccacaattaggaacaaatggtttataacggatggcacccagggagggctgcgcggatggaggggaatgaagctagtgcttggaaggcaacagggagctgctaggaaaagaaaaacaagtcctggggcagaagggtctctcctctacggaatgagaccacaccctcatttctgtctgggagaattcagggaaggaccagtgacctctgtgcggaggtcaggtgcagggatgtttaccagttctttctccaagctaaaggattccaggtctgtgttggggtcgcagccttgctgtgtgcgtgtgcatgtgtgtgtgaggacgtggtgctcaggaagacaagcttgaaggactgaactttgagaacagagcagcagaatcgcacagatcacagacctggtgagccggagggttaaagggttatctagtctggtgttttccaaattgctggcctggccatgatctaatggtgggtcatagagtatcaattgagaaggtcaaaaaaaaaaggaaaaaatacacacacacatgaaaatatcagagttaatacataagcataagcattgtttcatgaaactgtgctgctgctccaaacaaaaggtatttcttacgacagattccagcaaaaatatctgccaaacactgatgtagttcactttatcgataaggaaatggaaattcagagaggggcagtgaagtgcccagagtcatacagcagctgaagcagaacctgaatcccctgggcctgacgtgggctctgaacagggaagagcggccaggaggtgggcaggcaggatggaggacccccaggaattaaaactctggtttaattccaatggtggcgaagggcagccaaaataaacaaaactgaaacttttgtttgcatctagctaattttggcaaaattgggatctcaactgtctggatagtttcaactgagagctggctagatttagaggaaggggccctagaagggtgtttaggggggccagcccaccccaaacctgaaaagccctcccaggaaggtctatcacctgatcacctgtccccctgga

SEQ ID NO: 31171 - DNA, 1388 bp, Bovine  19866880633241
  misc_feature (1)..(1): n is a, c, g, or t
ntgcaggatcttagttccccgaccagggagtgaatgtaagccacagcagtgaaagcaccagacccaccactggactgccaagtgaactcccaaggactgatcttcatcttgacggtgcaggttttttgtaaagggcaggcagcaggcagactttagtggaaagaagattaagtcggagccaagagatttgagaattaattcttgctgggcttgtcactaactttttgattctagtccaggcttcagatttatctgcaaaatgagtagattaaagtaaataaaatccaatgtcctttccagccctgccaagggctcagtatttaaataataaaaatatacaatatcacttggtttctctaggtcttttagccacctagggatccttaatccttaagtgtgtagagcacagcacaggtgttaaaaaagtgagatactcttcaactctggagtgttctgtcatggagtgccaggccagacttgaaatctttttctaagaataagtatgcagacatagtgtttgtgtacttccccttggtgataagtagtgagagccatgaattcccagttgcttttgcaaaggacttttttactgtgctttcttttgtaggatccaaatcaagccgatgaagaagctatgacacagatcatccgcgtgtcctaaccccaggccatgtgatggagctgatcaaggccatattcctcacagtttcccactgttccagggaaaatgatcaactcgccgatgggacactgacgatcacattctgcccttttctacaggacagaaaccacttagtttttaataagtggctcagtattataattgcaaggatgtctggcaaactgaagttgcaagccttgtctcaccctttcagtcaggacttatctcagactgttgctgacattgacatttcatggattgggatgatgcaagggactcatgccagcccagcagcacacacacagcacttgtgttgactggtgacgccagccagccatctgagcagaggagagcaaccttctcaacctaactgcaactggggaagctgcagcccattacttcccacagattctgaacagtacccatccctctaatgggggatctcaagctgactgatggaccttttctattcagagatggtttccaggcaaggaagctccatctcatgatatggaaacaataaattctgagataattcatctaatctgtggtaataataagaatctcttctacccagatgatagattggggatttttggactcccgccaagaaaaagctaactctggggatagattgataaaagattcaagcactaaaaacataaattgctggatctcttagctttcacaaggtgtggcctaccttgtctgtctggtgacaggtcat

SEQ ID NO: 31172 - DNA, 1962 bp, Bovine  19866880638987
  misc_feature (1)..(1): n is a, c, g, or t
ntttgggggggcactggggtgggttggggtccgcgccgcagcctcacctgtactggggtggggagaggcgaggcgggctgctgctgccgttgctaggcagcggctccacgggggcacccgcgtcgtcgtggccgaggggcaggaggctgctggcggagccagggttcagcatgccggggctgttgaggaggggaaaactgctctcggccagggcagcctggagggtacagaagtggaggcccgtcagtgggctccacctggtcaggtgatgtcccttccccagcccttgggagatctgcgccctggcagatctccggtgctcctacctctgaccctgacctgcctctcagctttgcggagaacccgggcttgacgtattaccctccagggagacagaggaccccccccgcaacacagggacaagccagggcaggagactccattgcctatctatgccaacctccctgccctgtgccccatgtctctgccagagaggatgggggaggctctcttctgaggccagcgagctggagggaaggtgaccagtccactacctggtagctggcgttaagtgttccgtaactgaggcccgagatcatgttcttcaccaaggtagggctcctggaggagagagaaggcatgtctgcttcattcattggcttactcctcactcaggccttgaccctaactgagggcctgctctgtgccaggggaggtcccgttcactatcctggaggtcatagtcggccgtgcccatcttgttcagccctcctgctgacctgaagcagcaggaaccaagagccgccttcacaggagagctgcccgggctcctagggaccctggaacacgcccagagcctccgagctgatgagtgggacagagattcttccctgtctttctccatgccaggcagcccagtagcttttctcctcagtttagatttcctgctgtccgacaaggtctgagtgatagcctccacagacccctttctgtaaaatccactttcctgccatcctgaatttggggacatctagtatgctgtgtgctcagcctgtccccacatgctctacaccacaggcttttctatacaaaaaagtgctccaagagttgggtcaggaaaagcaatggcttaaagccatccttccacagtgactacccccagtttagagtgtctcagagaggttaagaaactggcccagtgtcacagagctggggagaaatagaggtataattagagcctaggtcttctgattccagggtgaaaatgggacataaagatttcaagtgttgggactggcacgtgagggcactcagaaggggtgtggttcatttttgaatcccaaccctgccccagcccccacttccggcctgaaggtaaagaggctcttgtctgggagaagaaatctttgaggggtacaggcacccacagatatatatctaacttgcttcacacctctctctgcctccccataggcctctggcccaagaagcacaggcaggcccacgtgagatgtctggggtggaaggtggcggtgctggaagggaagctgaaagagcaggctctgaccctctcccaggctcctcagtctccactcagagcgctacgtgggagagatcagagacccagctctgccagggatctgctgggcgactgccttccagccccttgctctctctgggcctcctctccctgtaacaaatgaagaagtggggcccaggatctcacaggtttggctcatcttgtgacaagaggggctctggggatggcagcccctttgtcaatggccacgctggtcgccacctgcccacaccctgatccccggttcctctcagctcctccctcggtcagaagcagaagactgaaatgtcctctccctgaatcacctgtcacttccagactccgggctctcctgggcccctgtggcctcatttctccccgccctcccccacggcaggaaggct

SEQ ID NO: 31173 - DNA, 858 bp, Bovine  19866880651922
  misc_feature (1)..(1): n is a, c, g, or t
nccagaaggccctgctggctcagagagagggcaggactgtggttggcaggaaatgacatcactcacagccaatcagagcagctgtcccagcctcgctgcatctttggcaagcactgggaattgggcatagagatacagaaggtcacgaagcagtctctcctgctgaacttagcactctcaaggaagagaaggctgggctctgtacagaccctacctgtcctgatcactggtggggaggggggtccctgtgacacttgtggaaacctggtgggccaggggaggtaggctgcttaactgtagcttctgctctggccagcagagggactcaagagtcagggatccgattcaggtcctgcgacactgggccctggtatccatcctttcccacagggcgcggacagttccttctttcccctcagccgctcccaccctgctgcacagaatgtaatactttcacccgtcagacagacagacagacagacgcacatgccctcatgctggctctagaaaaataaacagcttagtgtcccagctcacatttctgcaccccatttttctagggtccctcccttgcctctttctggtcccccaggaaaactctacagctgaaggtgttaaaatgactaactgaatgaagacaattatcttcctgccactgatggcggagctggggagagtatgagtgtctgtgtttgtgccccacagtacagcccaggatttcggtctacacacacgtccaggcctgcaatcacccatccccccaacccccatacccattctaggcttcagagtgtgcactttggcaaggaatctgacttcaaggtctcctggaatggacccaggcctccctaccaggtt

SEQ ID NO: 31174 - DNA, 1705 bp, Bovine  19866880656335
  misc_feature (1)..(1): n is a, c, g, or t
natcccctggaggaggaaatggtaacctattccgtattcttgcctggtaaatctcatagaaagaggagcctggtggactacagtccatgaggttgcaaagagtcagacataactgagcactcatgttgatcatcagtatgtgaattatatctcaataaagctgttatttaaaaaattaagggtattaaagaggcctcccattcctataatacccatcaccaatacttagaaaaatcctgtatgaaaaaataaaattttcaacagcaacaaaaccatccagtgcctaggaataaatctaatgaaaactgtataaggcctctacactgaaactataaaatattgttgagagaatttaaagacctaaataaatgaagtgatataacctgttcatgaagattaatgatatcagttctcaccaaacagatctgtagattcaatacaattccaataaaaatcccatcatcgtgtttatggaaattgaaccctggtggacctgactccatggcccaccaaaactggacacaacagaaaaaaatacaagggtcacagtgtcccccatacacagggttacaggcagacataactgaaagaccatcaagaccttcagtcatggacccaccaatcaggaccctagaaagcccaatttggaatagagtgataaaatatattctcagttaaaacagatccttactctgctttcagtagttataagagaaagaccataactggctaaatatatttttatttaaaacagaatggtggagaggactggggtttgtcaccctccacaggtgacatcactggggacagggcttccaggctgaggcagtggctcccttccagtgggatataggtgtgcaggggctcctctggccaggacttggagagcgggttaagaaatctctgaggccacatgcccatgggtaccagcctgcgtggtggtgtggcactgcaggaagctcttgacctgtccccagaggccagctgggacttggcgttcacctggggcttcagagaattctgggaggactgagacttgaatgcagtccccagaaaagacagcggcttccttccggatgacaagttggggagcgcctgagaggctgggcgggagatgggagagggccgagggtgcagcatggccttggtcctcaggctgcacccgcagaggcagggctcagagacgtgggccgcagaggggcagggccgaccccccaggctgcgctctgcctcccatccgaactccctggggtgctggcctttcctaaaagggggaaatgtcagatcagttgagaagagactcagagaaagatttttttttttttaatgcaaggacagtgcttccctgcctcagtacaatacttactcagcctctttctggggcaagttctcttcctgcaggatcgaggacttagagacagactctaccacaggggatctcttcattttctctgaaaagaggaggaattgagagctggcggggagcgggctgagggctcagaatagccatgagtcagaggaggtttcaatgaggtgtgaggatgaaggccccgcagaagcagcgtggggcctccaggctggaggattagaatacccccaaaccctctctccccacgcacacctctgggagggggagcagtcagattcactattgtacagtctagaactggaaaatagaaaggtctaactggggagagagggggat

SEQ ID NO: 31175 - DNA, 2088 bp, Bovine  19866880674125
  misc_feature (1)..(1): n is a, c, g, or t
ntcctgtagtgtaagagggatgcgaagaatgggaatgaaacgtttgctagggtctttcatggcagtccagtggttaacactccacgcttcccactgcaggaagcaccttctactttagggggtacaggttcaatccctgattggggaattagatcctgcatgccttgtggcgcaaccaaaaaaagtttgctgcaaagaggcataaaaccctagaagtacctgttctttcagggcagaaggcaagcagggaaagggctctctgttgggatgcttctcaactttttcaggcttcttgaacttctgaccccagtagcatcaccttaagggattctcttatatttcaaaataaggcacatcatcatcattacttgttagtactttttctgatggagttgagagacagttttagcagcagtaggacactatagcttcatttagttgattttggttgatcataaagtaatgcagtgtcccccaacattcagccacatatgattctacttaagatttttaaatagccatgtagcacttgaactattatttattaatgtcttttaattctctttcttttccttaaaagtattttaacagacaactatatttctggggaagcattctggtagagttaagagcatggacatggagccagcttgcctggctttgactcttggccacaccacaccaagctttgtgaccttgtgcgagttattcaacccctgtgtacttttctttcctcattggtaacaaagagataattgtatatcttatggggctgatgtgaggattcaaagagttagttcattgaaaggtctttgggcaccacctggcacatagctggtccttggtgattgtttcctgccactctgtaaagggggagccagtttccctcaccatagaaggaaatcttggaaatgacctgtttgtttcattgttttggttaaattcatatacatgctgttgcctttcatgtccgaggattagaaacttgaggcttactttctctttggtcccaggatccttaaaactttctgccttgatggaaatgttctgtattagcactgctgccggccacttgtggctgtcaagccttgaaatgtgggttttgcagctgaggagttgaggttttaatttttttgttcgtttaagtgtaaatagtcgcatgtggcttgtggctactgtgctggacagcttgcatgcaaagtgttaaagagagtaataataattggaataataattccaagttgaggctttcttcttgatgtagtcaaaactgaaagaaacgcagaagaaatccctttctcattgtatgactctgtgttactgaacactctgtgtgccacctaaaatcttctcttgaacgttggcatacttgccacactccataaacagaggtgctctagatgggaagtccaaagcactggtatgtgtcctgagacctgctctggttcttagtggagttttcaagagactgtgggcctctgtttcctttttaaaatgagaaggttcgggttgatggtgtctgtgcacatactggccctgatgagctgattctgcaggcaagtgaatgactcattgatgattttcgtccttttccttccagtgtgtctcagatgcccgtggccgagggcaagagcgtccagcagactgtggagctcctcacccggaaattggagatgcttggagcagagaagcaaggaacattttgtgtggactgtgagacctatcacacagctgcctctaccctgggcagccaaggtcagtgagagatgggcctgtgggatggctggaacctggtttggagttaatagacattcatattcattggaatctttctgctcttctgctgagagtggtgctcttggctaggtggtatatgtgtttctgaattcattaattttttccttcatctcttagtctgggcctgtgttgtagtctttttgcacttttaaagcacttttcacttctcaaagtgttggtcactaatttcctcagaatcatctggatcgcttgttagaggggcaggttcctggcccagcttacagactcactggtaatcagtcatagtctacattatagtaagtttcacag

SEQ ID NO: 31176 - DNA, 572 bp, Bovine  19866880728197
  misc_feature (1)..(1): n is a, c, g, or t
nccccctcccccgaccccccctctatttaccgccatcatcagcacgcgcgagctgtcaccagggcgcgagacaaccgaacgcggccccgcccccttcccgcccattggcccacccgccggagccccgcccccgggccccgcattgcgccaacggcgcagcccagggccccgacccggcacagacatcctctcccggggttagcgcggcggccgccaagtttagggttagccaccgacgcgcggccgacttgagcctggcgtaaggggcggtggcgtagaggggcgttgtgaatcgcgggtcgaagtttggttgaagcacaggagggtaaataaggaggtttccagacaaagagactcttaaaggtacagagtcttacggccgtccctcctccttaaaggactagagattcacaagagcccatctccgccccctgctccgcagcccttcagcctgcggaactgtaaaggaatcttgcggtagcttccgcactccttttgaatggattgtctttaacatctcttcccactgccaagcgggaaagccttcctcattataccgtctaggtttttgc

SEQ ID NO: 31177 - DNA, 2596 bp, Bovine  19866880772426
  misc_feature (1)..(1): n is a, c, g, or t
ntttaaaaataaaataaaatttaaaaaaaaaaaaaagaaagaggcatgttttgagaaacatgactcaggtccccccacaacccaccctctgtacagcagcttctacaacttggaggttctgtactcgagtcctcgtgggttacaccagcagtattggtgttgcagcctccagtccaagagcagacttggggctcgggcccaggaccccaggggctgcagtgatggggctggcaggtcctcttagcggggagatgaggcgacccgggcgctgttcctctctgcagtttcctgtggactgtaacaacatccagaacctgcccaccctcaccttcgtcatcaatggtgtgcagttccctctgccacccgcctcctacatcctcaatgtaagtcctggttcctgcaggctgaaccagtgggcagaaggtcagggatggaggtgggtgaggggttgggaaggaagctgtgaggagccagaaacactgggtccccttaactgtgccatctccttgaagcattgatttctcttcccctctcatggattttaaacccccttctctggaaccaggctgtgaaagagcagagcaatcatctattaataataattgttattaattaattaagggggagaggcactggctctctgttgagcacttacaagagtcagccaccaagtgaagcactttgtctacattttcctgatgactcgtcataacatttaatgagggagatatgaatttttattttacaagtaaaaacttggaggttccaagaggttaactcattggcctaaagctacatagtaagggtgaagctaaggtttgaacctaagttgatctggctccaaggctttactaccaggagttgaggagatcctgcagagggagggcccttgcaacctgccctcagccacagttggcctgtgaggcctcaagggtagaaactctggctcatccttttctgtatctgtgctgctggcctggggctctgggctgaacagtgcccggtccacctgtgagctgatgaatgagtgttgcccttgtgtgttgtgcagaatgacgacagctactgcatcctgggggtggagatcacctacgtaccctcccagaacggccagcccctgtggatccttggggacgtctttctcaggtcatactattccgtctatgacctgggcaacaacagggtgggctttgccacggccgtctagactcagtgcctggactcccgggcttccttctccctctggacactccaccctacagggggttctctctgcacttcctctctgcatttagcctcccttctctggactctggactctctctaataataaacagctcttctccacgttggccatcctgttgtttttagagggcggtcgcagcctgtgaggctcagggaacgggacaataagaatcagaggcaactttgtctctatcggaccatgttgtccctgagtttctaggaggttcgtcgtgggtcactgagtttctaagagaaatagggcatgaggtaggcttgggggtgggccatgtacccctcaaagtttggagtctcttcacagcttctctctggagagggaagacaggggtagtggcatgcaggcacggcatgcctttgtaaggggacaatccaaaatgctctgctgacctaatttaccaaactaccaccagagttaccccacacatatcactagcagtgtgactaggggtcccatgtgtcttaaatctaggcttcttcctccttatctgtgatcaagtttgccctaggagctttcagaagaaggctggaggacaatgagcattgtaacagatgtgggtcctttagggagacatcacgtgatgccaccagagcatcttgtgacgtgcatcacgggagggtgacatgaaaaggtcaggaagtttctctgttcagcaacatggtggtggtgtacctgcaagctccaggtaatgaggtctaggtggggagggcccccacctagataaatggagaactcatgatgggagaggaggtgggctcccttttatagtcatatttccttcaccatgctgatcaaccttgttccttatgctcaagacccaggtctggtaccccattccaaaccaggaggatgagggttgacacagaggggtttctatggcaacaacacaccatctgggaccctacctctttcctagactccaggaaagccagagcactgcacgcctctcactggggtcaaataggccacagggcatattgtgatgatctgtggttcgtgacattactttctgaaagagaaaacttgcaaaaggggtagaaaccaagtggatcaaagtttccaaattaaacgccaagtctcagcacaggcctgagccagcagggtgggactacaaatcccgacgtgcctagcagagccgtcgcccagcagggaggactacgtttcccagcgggctctgcagcaggcagacgggcggtagggcggggaggggcggagccgggaggggcggggccgcggggtagggtgctgccctctgccgggcacggcggggaagtgagtgccgagtgacagcaggagccccggcgccgggcgcggggctcggtgacagcggaggcg

SEQ ID NO: 31178 - DNA, 3416 bp, Bovine  19866880782109
  misc_feature (1)..(1): n is a, c, g, or t
ncagtaagaaatggcatgtgtgatcataggcagaggtacgtaaaacagaagtggagaaaacttaacctggatttggttttcatagcaaggtaggggtactcagtgttcacatgtatttcctgtgaacattcagatgttctctgaaaccagaaatctctaaacaagcaatccaggcaatactctttatagtttactttctacccttcttttcacagattatctcatactttattctgaagatggctctatataagcccaagtgaggctattaaattttcaagtacagacacccactgcagcctagctggtttaacagggctgtgagagcagaagccccgtcctggcccccaacatccacttgcctcaccgggcaggtaccatacactccatggaaagcctaaggactccagggagcaggcttctccccccaacaccaaagacatctgccctcaccaaagtctttgaagtagctattgccatagctcaccagccacctgggatgccccagagcaagctcacctgaatcttttaaggtgcagccggaggacctgaggtagtctgtagatcattaactgctttctagcttcactcagaacaaggggttttggattggattttcgtcgtttgcctagatggtttgggaaggtataagacatgggtcatgaggagactcattctttccgagccgtgcagagacaatgacttgccacccaatacgcattctcctagtttctcagtacttcaacctcagtttcatctgggcagcaatgtgaccctctctgagactgcatttcccagcctcacatgcccacatggtatggccacgcaagttctggctgagatgaaagaaacgactgtgtggctctctggggatggccgcttcaagaaggctgatgcagttgtaaggtgcctcctttgtccttcccactttgaaaggaatctcagtttcctttcctgtgaaatgggggataatgcatgtatctcgggtttagggagagggtaagaggacacggggtttcccaggtggttcagtgctaaacgatctgcctgccaaggcaggagatgcaggttcgatccctgggttgggaagataccctgcaagaggacatggcaacccactccagtacttccgcctgggaaatcccatggacagaggagcctggtgggctacagtccatggggtcacaaagagtcagatacgacttagtgtttgagcatgcatgcatgcaagaggcacaggattcccaaaggacagtgtatttagagattttttcccccacatgacttgcttgtggcgtatacaaatatttagaaaataaacttcactgttttgtatttttatgccatacttgttttctgaaacgtgtttcttggtaacagcactgctagacatgcagaacaaggctggccattggctaaatatactccattcaaaacaaaaccaatgctcaggactccaattttgtttcttaagatactgaattgtgggtgaaatgcatttctaaattacagagaaatgaagttctcttaatttccatcagaagccttctctataaccatttactgatgactgctctgttatattaatttagtcaatgaatggacaggaatataaaattcatggtccactgtggtgtctgttaattgtctctgagctgttgatatcatggtctctgtctgaggagcctggcacctgattcgaagcttgtgaaaagtagcaaatcacaggcagatgacgtatcgtggagctttctctgacaataggttgtggagctgttacttctcatgatagactgcagcaactagatggcagcttttactagggctggcagtcatggtatgtgagggcatgagcagaaagagaattcaaagaggggcctggccttattttacattcctgttcaccagcagacttttgaaaattactgcagctctctgcctgggaatcctggcagtgactgctgctctcagcagagggagtatgtgagctaaatgaagacaatatagaatctggctttgtttctctcaaatgaaattcatgaagaaaaatcactgattctgttaagactgatcagttctgtctcccatttgattaagctggctacacaggtgaaagactgatagttttgaaactttcacaagcaacagatcagtgcatctcatcccttcactatagctttccttccttgctatttgaacctgtctacagaaatactgataaatgggcacatctgacaaccagaaaaacaatcctttcttgcaaaaataaataaaagtgtttcttgcctaatctatcaggtccgagaatgacagacttaaggctgttaacatctttctgttccctacaagtataaaacttcatgaatcactattttaaaaagaaaaaaaatacatactgttctaataagacaatttaaatcactgcctttatatatctctatgtaacaggatagataggtgagtttatgcttaatcaagtacaggattcacattttgttttaaaatggcaaaacagtatcagaagtgtgacttttgatttttgacttgattcttcagagaacaggtttcccacaattcactactttaaaaaaccatatgcaaaaatattaaagggctaccataaaattgttattcccaaaccaaaacttatagtctgaactataatatggttgcacattgttctcagatctctgcacaatccattcatcttagtatccaaatctctatatgccaaaacccccaaacatcagtttcaaagtatttgctctgcatttcctatgtacatgctgggttagcaaaagcattgctagtgtgtcaagacacggggttgggggatgcataaggtgctctcagaaccatatggaaaaaattccactttacagttaaagccatgatagagaaatacttcctctgacccttctgagatgtaaacctttcaggcatgtgaaaataatgatgaagctgccatggagcaatgtaccatatgacttcctctcttggtctcactgtacccttagcatcacttctgactgactttaattcagaataaaagcacacttttctgatacatagcccctcaaacaggctatgccacctgaatttagactaaataagaactgtcaaactctattcatgaatttaagcaggacccccataacccatgaagctaaattctcacattcttggagtccccatttcagggtccatactttcaaatgcctcccaagataacaactaacttcagtcacagcaggagtccaaggaggtccaactcctaggtttggttttatttttttaatatataatgtccatatgtttttctcaggaaaataggaaaaaaatctttaaaagatgctttagaaccactcaatattacagtgttattttgactaaaagggcaaattaaatactttaaa

SEQ ID NO: 31179 - DNA, 2717 bp, Bovine  19866880843346
  misc_feature (1)..(1): n is a, c, g, or t
nctggtggacagtggggctgatggaacagggagaggacctttctttgttgctcagtctgttttgtttctgctcccttgttctcttagggctgattcgtttctccacttctccaaagacagtaaaccctctctttgctcttcggttccttttctctgatccctgctcactcccagcccacgtatccatactctgttcttggtcttctgcttagctgccctggcctgttctccctgcctactcttgttcagcatccgcttcctctccctggcccagacccacgttccctgggattggggtcagctggacttgaacttgaggagagtgggatacgaacgtgctgcgatcacacagtgggaatgcgggcgctggtgcccaagccaggaggacaccctctctcctgacctagtccactaccctcttcagggaatgaccccctggtaatgtggctaaggcccattaggaggattgcatttgtcaacctgataaatggaaacagatttctctaacagaaaaattagagagtgataggccttcattttcttgctattaaatttagcctaaaagggtattgaaccaggtggggaccagactgaagaaaactactctcttctgtctccttgtaaacattcagccatctatctgtccatgatctccatccatcacttcatgcactctatccatccatgcatccatctgtccatcatatctatccacccattatatccatccatctgtcccttaatcctttatgtccatctgggcatccattacatctgtacatctaactatgcatctaccaaatatttcctgagcaccaaattagttgctttacatttaatccttacagaaactcttcaagatagacattatcttccttttgcacatgaggacaccaggctcctgtgaagtgaagttgctggaggtcacgcagccaataagcaacagatctggacttcagctctctctgcttcaaaactcatgctcatagtgtggggtcaaatggcctccctggatgtccccagtgcttctttctgaatgcaaaatatgacagccttgcttctgaaggcatggacaggcatgctcaggttctggaatgcccggagttcccggagttctatccgaggagcagccccgggggccagaagtcacgctggacttacaagtcctattggcatttggtaccggtaacaatgtcaccagccccacgcctgcagtggaggcttcctgatcatgtaacttgcaacccagcatgtccttgtttcttctcttcatcaggccaactctgcttctgagggcactcttgtgtgccataggtaggaaagttctaggtacatgcttggccactgcatccgaccccaccagtctctctgcagcaactgagctcttgcacgcctgcctctgcttctccctaggacacccaagcccacattttactctggcacttttaataatagctttctaagctgtagagttagctgcacaatttcaggtcaaaactccctcctcgggcccctttggttgagacagggctgtgagtgcagacagtttacttgggtgatgaccccaggaagtccccttagtgaattaggtggagtgaggcggggaagggaagggagccactgagatgtgtgttcagagcaggtgaccactgtgggctctggagaaactgctttaggttcccagcctcgggacccctcagctggtaaagaatccacctgcaatgcgggagacctgagttcgatccctgcgttgggaagatcccctggagaaggggaaggctctccactctggcctggagaatttcatggactgtatagtccatagggtcgcagagtcggacacaaccaagcgactttcacttcattcgggacaaggggctggtattggcggtttgttaccagttcccctctgtctttggctggggcaaggcggatgctacctctgttggctctggtgcagctgtgtgcaggtgctggctgatggaggtgctcaggtgggcaggtcaggactgggagtggccaggggctgtggccagggccctgacagcctctgccactctcactggacacaggcatggtggccgaccagtccctaggagtgtgcctcctgccaagccctcttgtcaccgctcacgtctctccaggcccacgaagctgccaccaccctctcctgctgcccctggggagacccttcccactgggaccagtcatgggcaccacattcgatgcattcagcagatgcttaaggagcacctgctccgtgccaggtgtcagtgtaagaggagaagctgccagggcccctctagacgctccgagcagagggaagggattgggcggcgtgcagggggtccttaccagaagccacacaaggtggccccttctggacctttctctctttctctgagcttgacatccgctcctagagggtgtgggtgacacactgggcggccacagagcctgagccactctgagtccccttccggcagagctctgcggaggctgtgattgtagcggtttttctgacttccttttcctttctctcgcgcccctgcctcttccccctcctgaggccgccagacccacggctgccacgtggctgccttttcgtcagtggggaactgagccttccagtgccctctcgctgagtctctatggggaacaggatgcaattcacagtgcaataagggtggggggtcagtttattcgtgggtgccctt

SEQ ID NO: 31180 - DNA, 1115 bp, Bovine  19866880902843
  misc_feature (1)..(1): n is a, c, g, or t
ntccctttacctctctgagcttcaggaggaacgcacactgggaccctccatgtggaccttaatagtttcagtgctatccaggatcagggactaggatgaggtaactgggagactctgctggggtgcgaaatttgggaaggtgccaatataaaatacattgtaattcgatattaaaaagcaaatcagcaaattacagccctgccagccagctgcctatttttataaataaagttttattggaaccagggctgagattaaagtgaaacgagtgagatgggatcatgaaaattcaggtttagatcctgtcttcatttaaaatgttggcattttgttcactagagattttttgcattgatttcaatttttagatatattgcaggaaaatattgttttatgttaattacctaggtttttttttttttttttgctgctcccttgaagtttcacacccgagcctcactcactgtaagccttacacacctcacccttgtccttggcctattaccgtctcttcccgaaggacctgagtaaatgagtagaggctgaagatggttccaccacctccagccccccaccccacaacaccaagcgggctctgcagacaagtccagacctagctttcctggggcccaataattagttcagagtcaaatgcaaagtgctcacattggccttcaggctcccagagttaggctctacccaccttcactttcgtctcccctcattcatttctttccagccttgctgcttcccgagtttgttttttcagcttgtctcgtgtgtttgctcagggcctttgcacttgctctcccatctgcccagaatgtgcttcccctagctattcacttggcccccttccttgtcttctctacttaggtcatcttctcagagaggccatcccaaaccccttgctctctgtcccctcccaccactttatttttctacataaacctttcacctcttttcctatttatgtacttgtttgttgactagtagaatgtaagctccaggggtgaggggactttgctctgtctcctaggggactccctagaactgggtctgacacaggtagctcaatatgtattttccagtttcacagatgggaatacaagggg

SEQ ID NO: 31181 - DNA, 5240 bp, Bovine  19866880906721
  misc_feature (1)..(1): n is a, c, g, or t
nccccacgcccatcccaccggcctcagtcacagcccctctcgccttcctactgttccctttccaggacactgccccgagagcccaaggctcaatccttcacctccttcaagacggctcggatgtcacctttcctatgatgtgtaccctgagcaccctacgtaaaacggaaacctccaactttaccctggatctttccctactcagtgcccccgcctgcacccagagcacttttcatctttaacatacgatacagtgacggatttacgtgttacgcttcatggtcaagcccccactgccaacacacgggctgccaagaggcagcggttgtctttgtgctggtcactgatgtgtcccaagcacccagaacaatgtctggcacctacccaggtattaagtaaatacttgttgaattagtgaatggtatattgttcagaaaagagtaaagggtgaggcactgggattgcctgcagacggcagctggttcgaatgtacgagaaaataatcatctgatacaccaatttaaaatgaagagccccttcatgttcctagatagagaaactagaaccaagctcaacaaagtaactacctagcaacagtccgtgagagctttgtcctccacagataaaagaacacgttaaaacaccagttagtgaactccttgttaacaatgtctgtataaagacaggaaataacctaacatcccacaggggactggcttgtaaagtccacacaagagggtagaactatagggaggggcgaaacagctcccgcatacaaggatgtggaatgactgccaaagtagctccacaagggaagaaagcaaggggtaaaaactgcaatttgctgcgtatgttcaaaacaacaattaaaaagcatctctaaggccttccccggcagcccagtggttaagactccacacttccaatgcagggagtataggtttgctccctggtcggagaactgtaagatcccacgtgctgcacagcatggccaaaaaaataaattcaaacaaagtctctagaaggattcacaagagagtggtgatgctggctgctctgtaggagggaaagggagagtgaaagagggtcaccacacatctttttgtacattccggattttaaatgtttgattgttgccagtccaacaaaataacaagcccaattgatcgtccaaaaattgttgctggaatccttctcttgaagatttttatttctctgttctgtacagaagagcacatggccatacaacaggggtggggagggggtgggcaggggtgccttgggctgccgtatgccaagcacccaacatagatgagctgattttatctcaggttcctcacttccccttgaagtaggcattctcatttgtaaggaaacagactcagatgctgggtcaggcaaccaacatcacgtagtggaaagcagcccggtctggatttgcagccaggccagtctgactcccaaggctcaggtctttttactctttgctgtctggcttggcctccagggatcctgaagtcctcaggcagctcctggcatccagtccgcctcgctgcactcactgccatgacctcacctaagtcactccccagggtgttaagtaactcaactgcaagctcttgagcttacttacaaagggattgtgatgcttgtttagaagattcctccttctcataaggtgaacctcatcttagtccatgacccaatcaccagatcttagaccgacttaacagagtccaaaccagaagcgtaggataacaagctcctctgctttacgtaaagccacgggccgccagccctaattctgaaaggaataattcaatattaaagagatatgtgatcaggcaagggagactgtcaataaactagagtcagaactggcactctccacctgcatcccagggctgcgggctaccacctggggcctcacagctcagagaagcctcagtctggttacgaccactgagccatctcttgcttaaaagccagggccagccttaaaggacagatgaatatggcaacctcactcttagggtccaataagccttaaaggcattagagcttctggcaggtctgtgcctctacttggaactttctctcctgatgcataaataagagtggctcttaccctcttacttgcggaggacaatacatcataaccagaaaggaacacccccaagtttccacgcgcacactcccctcctcaacctttgtctctgtccacactttgtctcctatcctggctgggaaaagtccacaatcaggttaacccctcctttggggtactggattcctgccctaccaaagatcatcattccaaaatgattttcctctcctgaatcactttaccagatcactcccatcagcacaggcatcttgtcacacctctctgaccttaattctttccctttagttaccactccatttctctccttcccaccacagcaaaattccttgaaatcacagtctacatttaatggaattttctgtgatgatttaactgttcgtatctgcactgcccagcagggtagcaggagtcacaggtggctacagaaatgtagctggtgtgactaaggaactgaattttttgttatatttaatttacatcaatttagatttagttgcctgtggactacttgccactgtgaagaacaacacaagtctgtactcactaactccagtttctctcctcccattctctttgaattcacttgctctcattcttcctgaaatggcgttgccaaatctaagggacaaagtttcggtcctcacatggctggaaccagccacaggtgcagacaaagcagatcaagcggatcactctcctcctcctgaagctttcttcccttggcgtccaggatgcgccaccttccctgctgtgccttctccacatccttggctggttccttgtctcctcacctgctgaacagtgcagagccccagggctcagtcctggtacttctcttttttatcctcattgctccctaggcactcatctggtctctcgtggttttcaacactatctacatgctgaggactcccagacttgcactttgagcccaaacaccttcctacctgacatcaccatgactttttgtgactccacagactgcagcccatcaggctcctccgggtttatccgggcaggattatccgggcaagaatactggagtaggttgccatttccttctccagggcatcttcctgacccagggatcaaacctgcatctcctgcagctcctacattggcaggaggattctttagcactgagccactagggaggcccctacctgatctcaccacccggatataataagcatctcaaacttacctcatgttcacctcaactcctggttcccccgctacccttgttccacccaaaacctcccctttcttggctgaaggcaactccttctttcctactgttcaggcaaaaaaccttgcatttgtctttgactctctttctctcacattcactctatcagtcggttcttttctgaaaattatctagaatttggctaaataatctacctgaccatgtctctctctctgccaccgtctctcagcttcctgcaccagcctcccgagcgggctctgctctgccctcaccctgcgtagtccacctcgaccgcacaacctcacccatcccgagacccacctctgcttagcaggtcccgcggctcccatctcaccgacaaaaagcccaagtgctggtgtaccgtgaagacctgagccccgggagctccctgaccccgtcccctgctgctcccctcttactcgcgtccccctggtcacccccacggcctctgctcttcttcaacacagcagttcccacctcggggcctttgcatctgccatttcctctgcagggaaggctcccctcccagaaaagtgcaggccttgttccctcaggccttcgcttacctatccacctctcactcaccctgtctaataccacacccccaggcccatacctactcctgtcccctaaggtctcatttttccttagttccgtgagggcaggatgttttgcctattttgccttctgctaatttcgcagcacctgacacatgcctgactctggcaggggctcattcagtatctgctggatgactgaacgaatccccagggagcaagagatcacatcaccacagacccatcatgcaagtccctcacaagaggccagagactgagggggtcctgtccaacccctggggagacaggcagtgagcagcactgcgggggtgggggtgggggggtgcgctgaagcagacggaaggctggacccaccgggctgatgtgaagagggaggttctctgtgtccgtctgctcgtcctgctccgaggaatccgtctcctccatctgctgcatctccagctcggacggaagaagagccgtcaggtaggggatggtgaaaggcctggcagcgatcactgagggattggaagagaggccaggagccttacgacacatcagtgagcagcacccagcggcagggatggctcacacgctggggcactcaccatgggccaggtaacacttacacgttacctttaatcctcatctccaccttactaaacaagtaaattaccagcctcatcttacagatggggaacttgaagaatggagaggttatgagaccccctcaaacacacaggaagtggcagagtgggatatgaacccaggcaatatgacttcagagcttcttttaccaagcaccagagaggactggggctgaatcctagcgaagcatcagcttagtgatcttatacccgaggccagttagcccctcagcttcattactagagcaaagatatggatcccttcagcctgaaggaccaagtcctgacagtggacctgagaactcttggcctggagtatatccatggagctggagggcactccaggtaaaggagcaatccaattcttccaaaaagcaatgaggctgaggagaaattactgtttaaaaaaaactgaaggaaagtctctgtgtatacttctatggtagaattaacaggagacactcaaagattattttcaacatggctcaggtgtgggtcctgcacacagaaagaactaggtctgaataccatctgctcaccatgtgaccttcggcaaattactccactgcttttctctagaagccttggcttcttggaagggcagtggaaatagttcctgactcagaggttcactcaaggagctcacgaggtaacagaagggaaggatcagcatagtt

SEQ ID NO: 31182 - DNA, 1085 bp, Bovine  19866880926529
  misc_feature (1)..(1): n is a, c, g, or t
nggggaggagaggctgaatgtgctggagcctggaaccgggacaagggccagggtgggccactgggagggctaagtcctgggctgtaacttgaggcccagccccagcaagccccctccccagcctgggcagggccagacaatgtggctttcataacacgagaaggcctggctctgccgctttgggagattgagcctgctgcccaggaagcccaaaccgcaggagacccagccaaaaccccacagacgcctgaatccgagaccagaatcccccacgccccttgctgagcactgacagaacagcaaggccacggcgctaccccagggggccctgcctccggcaggaccgccaggaaccaagtcagcccctccctcagccgcccaggatgcaaacggggagcaagggggcccagggcagctctggttgggggcctggtggccaagcccccacacccttggctcccccagtggcctcctcctcctccagccctgagagccccgggagcctggctccctaacccacagcaaatttctgtccagcactggggcgtcacattcctgctcttggttctgaagtgagtttcctggggaattggagcttttagacctaaaataaaaccagctggacccagcctaactggtcagctcaggccctctccagtccttgtcctggtggcctgggcctgtgtcccatgggtcgcagtgtgtatcaagcaagcccacgttcttactgtcgtggtgccaggcaccaaccccaattctcacctggttctctctcctcctcccaacctggggcattctagactccagaactcagtcctcgccatcagacattggctaagtgccactgggggtgcaaagatgacactgacgtcgccccaggcgagagctggggagggctggttgaggacccacgcttcactcccagttacagtttacagcagggagctctgggcgctgaatcctcaggaagtggccactccgaggagggactgttggctcgagggtcagggtagtctttctggaggaagaggtgaacctccggctgggtggtgaagggtgattggatttggggagaggggaggggt

SEQ ID NO: 31183 - DNA, 1182 bp, Bovine  19866880929355
  misc_feature (1)..(1): n is a, c, g, or t
nggggcggggacggcaagaacctatcaatctgcccagggtgagcgttgttattgttattattatgaagcatctcaaggctcacactcgtcctggcctggccaggccccattaatggccccataaatcccagccataaagagtaatggggggagacaaatgagataattaggaataaatctcaccgaggtctctattcagcagcatccctggaacgggccaatcttccgagccattagctaggcccctaattaatgccgctgccggacggtgtggtggctccaggcgtgggagggacccgggacccgggaggggcaccattgcacccacagccctggcgggcgaccttgggcgcagccgagggacgtgcctgcagcctgcctgcctctgtctctagggccttgggaacgctttgtctgcactttcccctctgccttgctgtctcttcccctccttttcagcatcttactccatctctggtttgtctagcttcactctctgcttcgctcctatcagatagtcgctggctgctgagccagtgtgatttagcaggaattgtgggggccacctgtaaccaccctcctccatctgtccttccttctatgggaacccctcaacaacccctcccccagggcagtcctgggaacagggaggacccctctcccccataccgccactgcaatgcagcctgcggggcggctctctctcctgcccagggcaggcatctgcctctgggtcttacctctgctgctggagcctgagacagcctctctctcctcccaggcttcagatatttgaaggcttttgtcctttttcttgtttttctttggtcaagccttgtatcttagtcctccgacccgggatcgaacttggactctcccgacagtgaaagcttggagtcctaaccactggaccgccaaggaattccctgaaggcctttgtccttggctttccttctgcagccagatgccctgtgcagctcaaggtttccagcccggcgtcccccacccaggtgcttcctctagacccacctacagtgacttttcgttgttttaatctgccagtctgtctcccccttttgcagtcatagcactcccatttctttggggagatgtgctcacctggtcctggaggggcagccaggtaacccgtcagaggcctggctctttgggggccctctgtcc

SEQ ID NO: 31184 - DNA, 1959 bp, Bovine  19866880942112
  misc_feature (1)..(1): n is a, c, g, or t
nctcggttggacggggaggcgtctctgcaccccagcctccaactcacttcttcctgcggatcttgggtttcttcacgggccgcagataggggttatcgatgatactctcctccccatttcggctccccgacaaggaggggttctgctgcagaacagaggtgttctccttctcggctccagaatcatcctttgagcaaaagccgaaataaagcaaaacaaccagcagcataaggaaagtgatcatgcctgcggctaagaaccactacaagtacccttctcattgagaaatcagaagctgggctaatgggcctctctctgccccagaggaggccaggcagtggctgcgatcagaggaaggcgggagtgccaggtgacacagtggagcacagaacacaagatcctgagaaggcagggacaggagtcggaaggggacagagagctgggggggcagggagtcaggggcacaagtcagatgcttcagcctgtggggacataaagaaaaagagaagtgggacttccttggtggcccagtggctaagacttctcgctcccaaggcagggggctcaggttcaatctctggtcaaggaactagaatccacatgccacaacaaagataagagatccggagtgccacaaggaagccccagcgcaatcaaataaatactttttaaaacttagagagagagagaaggggccctcggtcccctgcaggactgagaggtaccggaccagaacagatcgtgtgcacggagcccctcctggagctaacttcatgtaaatcatgatctccttccccacaaattctcaagcatctggtacttgcaacgtggtgccaatggtcatatcccagcgaaggccggaaattgctggagccctgagagctcccacgaaggcaccaacatgggaatgtcatccaccacctccacatgtggcccgtggatcaggcctctcactgttcatttttcaagaaaagtgatttttggagaaaagtttatacgtttgagtatattcaatacgatcttgaagatttttttttttaaaagcacaatgggatgcagacatagaaaacagcgatgatgctgaagttttacaaactgcttctggaaatacgggtggctgattttcccttccttttttacactctctattttccaagttctttaaaatgagcagaagctgcaggagaggcgttggggggaatcacacgaaggactcaggcccaagtggcagtaagtgaccagaagctgctggctgggctgcaccccctggtgacaggccaaaggctccgtcactgaggttcctggtctgcgtgtgttagtcactcagttgtgtccgactctttgcaaccccgtggactgtagcccaccaggctcccctgtccatgggattctccagccaagaatactggagtgggttgctttttccttctgtaagggatcttcctgacccagggatgaaaccggggtctcctgcattaaaaacagattttttaccatttgagccaccaggtcagctgttgtataacttgaggcaaaagaggatctgacctcaagcaggagatggcgctgtcagaagacagcagggcagaggacgctgtcatcagggatagaagtagatgaaagaaataaagtaactaaactgagatttgtaaagaaaaggtgggagtaaaaaggactgtcaggagtgacttgggctcagaaaggccagactcaggcaatgtgtatgctctgtgtgaaccccaggcacccaagggtgctgcctccagcctcgggttccaacaccatttccatggcaacacctcccacttgaacctacccagctgtcacctctcccgtgacctccaggcctgcacggccactgtcactctaccacctgccatctccaggcatctcaaattcaatgtgcctgaaacaaccccgagcacaagcagctcctcccactgccataggtgatggcag

SEQ ID NO: 31185 - DNA, 998 bp, Bovine  19866880947624
  misc_feature (1)..(1): n is a, c, g, or t
ncggacgggagcaggggtaggcggctgggggagggcggctggtatttctcccctctcctctttgagaagtggggagacggttcgggggaccctgagtggaggtgggggcgagaaatctgggtatcggggaccgggtccaaggagagtggagggctgggacgatgggggcagggcccgaacggaggcagcggccgcgccaagttggctccaactctctccactcccaacaccagacacacacacaccgcagtgtctgtctgtccgtctgggatttgtgtcccaaccgtttttgcccagtgtgtaaatatttatgggggcctcaggcggaggtgggggtgtctgagtctttctctccttcccttcccccatcctagccggagcctagcgcttcccgaaaacttttgtccacagcaagcggctgcaggatcggcccctcccctccttgccatctcctctcgttcgccttcctccccacccggggcctggccagcccccgccactcctaccctgcttgcacacacagacacacacaggcacacacacgcatacacacatacacagagtttctcccccgccccacccctctccttctctctccccgcttctctatttcaggcactcaccccaaccaagtgcccaccactcaaatgaactgtcccttcccccaaatacaggatctgtaaccttcctggaattattcctgcaggagcctaccccctctcagggtttgtgactccctaagggggcctggtaagaaggcaggggccctggggagtcctggtgatgtggctctctgtccaccttctcaccatacacatgtgcgctgaggttcccagtggacagcagggacagggagaagtcaggaacatctagggtttgttggggaaggcggaagggtggtgggcaggagcacaggcccggatgtcatgcctttaatctcagttctaggttagtctgatcatctgcctccctctcacccagccccattagccctttcg

SEQ ID NO: 31186 - DNA, 1051 bp, Bovine  19866880952491
  misc_feature (1)..(1): n is a, c, g, or t
nctgtctcatcttgtcagcccccttgccattccttcaagttcttggtgtctcaccacgacctttcttgctgtagctccagccacgactgaggaatactctctggttattctcaagggttatttacaaccttggcctagtctccccactcacccatttaaaagaggttgagtttgggtccttgattctggcaccaaattgtatccatttcagcctccaaatgggcctcttctgtgtcaggtgccatctctgctcctcccagcccagcatcccgtatgcatggtggttggagggccccgagcctaagcagggtcgctgagggcggggctggaggcagctggcggcattttgcccggggctcacactgccagggcttttgtaagcatttagctgccctggccgccctccagatggtgactcacgggcctcgccgagctgactcgctgacggtgcccatcctgacacatcccagcctggagaggggggtcactggggacaccaggggagctccagttcagttctcagaacccccaaggggcagggaagggaagggatgggttcaggcggtctaggagatcggcaggcagcagccgcctcactgacctttcttgaccctgctgagccaccttagagacaagtacacacaaggtaatccatccagattgctgcagccacctctccagccagctgctcggccagttggcaggaacagcagaggctggggaggacttccaaggtcatctcttccattcccctgcctccaagtaggaaagccccaaggaaggaaatgccgcatcctttcctgcaggccacttgcagtgactcacagccctggtgcctggaaagacctcccgggtgtctgggctcagtgttcctggccagagctctggccatctgctctaggtcagtccccacagccacgagcatgggagggccagactctggtctcaagtgacccttaccgtgtaatgcccctggggcccaagtgctggggtgcactcgtggaggagtcggggcacagagggaaaatgaatatccagagggttttcaaaa

SEQ ID NO: 31187 - DNA, 1395 bp, Bovine  19866880978853
  misc_feature (1)..(1): n is a, c, g, or t
ncttctccatggccagagcagcagagtggccagccccacagcccacaccacaagcaggggctcgagtctgccctccacacttgcccagaaccacacttgcccagagggccctcagtctgagcccgcctggggcagcagcaaaagtctgcgtggactcagctgccaggtcatcaggggtccctccgtgctttctcaggcaatgaagtctccgggctggcaggcaggtctgagagacaggggcagcctccagggggtgagtgggagggtgcagagagggagagtgcagctcacagcccaggcctggccctcagcctttggcagcaggaggagggggagccccaggcgagggtcaagactcacgtccatgtagtccatgggctcggtggccacaatgaagtcaccaaagcggtacttctgggccgggtcgtgcttgtaggtcctcaggaagtcctccaggaggcccttctccttcatgatctcacggatggacttaaatttcttcaaggggattctgcagaagggctggggtcagggcagggactccctctttcctactgcgcctctaatatcccaatctctctctccatccctaactgcctcaggctccccgtcgctctgtccccggggtccgtcgcttgtatgtgtctgtctccctctttctccatttctgtttcgatctctggctctctctggctctttctccctctgcctctctttttctcttggaaaactcttctcaggacttgctccaagattcagaagacagctaccttcacccaggcctgccccgacctcatcccatgggttgtcatcccaccctggtcctccactctcacataccccataaactctttcccaggaaggggagaggaactttagacattactctttggaggatttgtgcggttggttggtttgttttggctgtgtttgctggatctttgttccctgaccaggaattgaacccacgctctggcagtgaaagcgcagagcccttaaccagtggaccacaaaggaattcccagtttgtgcatttttaaaaaaaggtttcagagggacttcctttggtgggttcagtggttaagactctgcactctcaatgcagagggcacgggttcaatctctgagaaactaagatcccacatgctgcacaacacagaaaaataataaattaaaaagcaatacataattcaaaaaataaaaaggcttcagagacggcaaagttaaccccaaagggagtcccccggattggtggccctcaggcaactggcactggcttggatgtgacagagcacgggccccagggagcagcactagactggggactcagaagacagggtcctagttctgctgctccgggtctggcctggggtcagtcatgctcctcacaggagg

SEQ ID NO: 31188 - DNA, 712 bp, Bovine  19866880988411
  misc_feature (1)..(1): n is a, c, g, or t
ntataaaaagagcactccctgcctaattatgcctacccaattctgagggctttattcttcatctcatcagtcattataaccttatactttgcactctttttgttaaactcctgctaggtccctaacactgtctattcactagcaccatggattttcttaaacctcagcaacattttctcctttgattactgtctcctccagcacagaaatatgcacaaagggaaactcaggtcataatatttattaaataactagaaaacttttccaagtcagcctcaaagagaacagtgggctcagttatgtaaaacataactcaagtagcattacaagtctttaacaactcttcgggcagtgccagaatttatttctgaaaggcaggtttccttttggaagaaatgaagctagtgtgataatgagggttctatactcaatcacccaccaaattactaagtgcaatgacatccgtaattgattcacatgaggtcttcaagggacctgccttttaataacggtggaagaagcactgtatccaagttcacatcatccttgactgtgcagacataaagttcctggtcttcagagctggcaggagaaacactgtacatggtggatttcatggcattggctgtagggaaagaagactatgattgaggaaaatgccatgctcagtcgctgtagttttaaagacacaagattacaagaatgtactcaa

SEQ ID NO: 31189 - DNA, 725 bp, Bovine  19866881010354
  misc_feature (1)..(1): n is a, c, g, or t
nggcatgatgggccgctccctgcgggtctcctgcccctacaactccttgaagcactgggggagacgcaaagcctggtgtcgccagctgggtgaagaaggcctgtgccagcaagtggtcagcacccacccctcgtggctgctgtccttcctgaagaggcgcaacgggagcacggccatcacggacgacgccctggggggcacactcaccatcacgctgcggaatcttcaaacccacgacgctgggctctaccagtgccagagcctccatggcagcgaggctgacaccctcaggaaggtcctggtggaggtgctggctggtgagtgggcggctgactgcaccccgcatctgaggctggggctctgagtataggaccgaccaccctcggggcttttgggggtcctggaagatcccacggtgtggattttgtccccctgctcaactgagggccactgtggctggttgtgcagattgctgactgcaggaggagggtcaccatccagccctgtgccccgctgcaggctgcgccccctggtggaggactgcatcgcttgcaggaagggtacagtccttcctttacacacttaggagctagctgtggtcctgctcccctccaaacagctttatccatctggcatcccgttgggatgtgagcactgaggtggtccttaaggagtaggaggacattcactcattccctcacccaaccacccaatgcacctaccga

SEQ ID NO: 31190 - DNA, 1578 bp, Bovine  19866881106728
  misc_feature (1)..(1): n is a, c, g, or t
naacatattcccagagaactgagaggacagtgcattcatgaaataaaaataatatatgagaaatgcttggagaattaaaaatactgtaaactaaaagcactaagggataaaaatttgaaggacaaggatagaagggatggaagaaaaaatatgaggatatcttccaggaatcagaacacaatggacaaaaaaaaaaaaaaaaaaaaaaggaaagaaacctagacagaaaagctatgaaaatgagatgagtacaggtgattcaatatccaattaattatcaaagcaatagtgcacttcctggacgtggagaacgtggcccacaccggaagtgtctagggagcactcagcacagggcgtgaagacaggtagaccagggtgcaccatcgagagggggcttcctggatgatctccagagagctcgggtagggcactcacatagaatttaaaattaagatggactcaggcccttgggaggacactttacttccctccttcacagctctgcatcatcagattctatatttggaataccctggagatcatcttccccctttctctaatgctccctggttgccataatcctcctccctgacttcactccttaggggtgcccaggatcccaggcttctgtatttccgtgggccttctcattctacctcacccactcatatctggagcactgagccaaccagagcttggaacagctccttctccccacccatggcgaggcccatcagtgcctgcttcccaaccccatggtcactgagagccccacgtgagtgtctgaggccaaatttcctgcccccaggggaatgctgtgtcagtgcccagacgagcctcagagctgacatctccctgcccagccatgggccccaaactgctcctgctgctgctcctgggactagtaggtaaggtttagaaggagctgcactctgggccccatgtaccctgctccatgcccagggataattggcattgccctggaaacaactacatgtgtaggcccagaagtggacctctagacccctgacctcctgggcagtgggtggacccgggaggtgccctgcctgacattccctcaactttccttccctaggccagggctcagccggcagcctcccggagctgctgcaggcgtctgtggggagctccatcctggtgcagtgccactaccgactccaggacgtcaaggcacgaaaggtgtggtgccaggtcctgccagagggatgccagcccttggtaacatcaaccgtgaatcgcggggtcccagctagcagccgcatatttctcacagacctggggggcggcctgctccaggtggagatgcttgccctgcgggaggaggatgctggcgagtatgcctgtgtggtggagggcctctcgggaacccagactgtgcacagggtcactctggatgtgcttcctgcaggtgagctatcccagcctggccagcagccctggcctgccctcctgccccaacctgccgctcttgggtccctggtgggtgggagctcttgtgggtgaggaatatgggccaaatgcccaatattcttttgacagctctgcagggaacggaag

SEQ ID NO: 31191 - DNA, 1842 bp, Bovine  19866881129693
  misc_feature (1)..(1): n is a, c, g, or t
ntactgggtgctcagtatagaactgattgttttggccagcttttggttacatccagaattaattcaaataacttggatttaaaattaattaagttaacttttaatcatttgctgtttctatattaaaagtagggttgaaaatttggacagaaaagagggaaattttatgaggaattccctggtggtccagtggttaggatcctatgctttcaccgccaagggtgtgggttcagtctctggttgggaaactaagatcccacaagtggcacagtgtgcccctccccccagctaaaagtaacaggggaaagcatatagttgtaaaacaccccatccatacaatgtcagcttagcttcctgaataaggttgcctcaaacccctaaccaagaatgtgtgcaagttgtaagctcttctctccctaaaaatatttgcgcatttcctggattttaccatcatgcaattgcttctgcctcctgggcccctgtttttcttgccttgtgcctctgatatgcagcatgatgtcctcagaaaggattctgattctcaggaaggccctgttcatacagggcatttgtgtttttagtacacctaactgaagaaaggaggaaaaacaggtgggtgagccctatattgcattcatgcaacttccctttaaggcattcttgttctggaaatgttccagacctcccttgactggagaacttcacctccccttcagccccagcttcactctgctatactattcctttcttctcttcctgttcctctcatcatcctcctctctgttcctttcagagataaaaacaagttctcctcatctaatgtaaagcaggtcccctttcttgaccagcattctggatcttgacagccattctgcagggaaccatccatcccaaggggactggacctgagtggtgggagaccctattgagggaacatattttcacaaagagtgtcttctaagaggagttcttgtgttagcaaagtcttaacttttcatcttgttacatggtggcagacagtgtattaatctcaagcttattgaatcctgcctcctgaatacagtgtcagaaacctaaaaaatgattgtgcacataatgtgtccaaattctagatagcttagactaatacagtgttcttgtgcatagaatgtatgctgcatgcctaagagtcatgaacccacctaacacaaagatgtcaccacttggcatcttgcatcatcacatgtttcacttacacaaaaagaatttgggcttttgaaacacaattatttttgttgccataaatttgttttgatttttctgacagtttcaagctatgtcaaggcagtgtgtaatctttaaaacctaaaataaacacagaagtgcatcttttcaggaagtaaacctttcacagttccatcagtctgttcataaatgacttaatgtttgattgctcttagctgaaaaaaaaattacagctttttatcctcactcttttacctcaatttagaggacttgtggggagttcactaaactgcattgtaatatactgatcctgttttttgaatttataaataaaattcatgaaattgtttttctcttgctatatagcagcctgaccttacagattttccccccctgtaggtaatagagacgaggaaacctaaccaatgactgtggagtaatatggaagaagatgggaaaaacttgtttaatgggtaagaaataaaattgtaataaagagttgtttatggaaactattcacaatagtattatgtaataatactaggcttcagcaggtggccgagagtggtatcctgttagagtgagcgctcagccactgtctttgtcttatcaccattc

SEQ ID NO: 31192 - DNA, 1446 bp, Bovine  19866881168899
  misc_feature (1)..(1): n is a, c, g, or t
ncaataagtaataataaatttatctatcagcccatttgaactctatcatggcacatgtgaatatattttatgaaataacaccattcttattccataaaaaccctgccattcaggtaggcaaaattacctcccttttacagatgaagaaattgaagctctgggacgttaaatgacttacatatgacctcgcagctactgatgtgtgtgctgtgcttagtcactcagtcatgtccaactcttcgtgaccccatggattgtagccccccagaatcctcgggaattctccaggcaggaatactggagtgggttgccatgccctcctccagggggtcttccaacccagggatcgaacccaggtctctcacattacaggtggcttctttaccatctgagccaccagggaggcccaagaatactggagtggatagcctatcccttctccaggggatcttcccaacccaggaatcgaactagggtctcctccagcgccggcagattctgagcttctaagtaaaaccaaaattagagttcacctttctgaactactagtccagtgcatttttcacaggcaccacaagttcaaaagagctctgatttctctgagacagaatgactgaaaaagtgagaactgagcatggctttggatagtgaacattctgataagtagaaggaggtagacatcactgagtatttttaaaagggagaattgtgtgagcaaagacacattaaggatgggcgtgattaatgtagaatatagatttttgtttgaaaactgtaggaaatcaggctgaataaatgataggaaacttgagagttgctggtgaattcaaggtaggaacttgcaaaattggtaagatacacattagaaagccaggaagtacatggttatgaaatataaaatcattttaatatcatctgggttcaaaagtaattgagcaggcaaatttatagctgaaaaaaatctgttatgtgtataacacatttgagagaaattaaataaagtttttcttaatcactaagaaataatttccctataaacaatcaaacaaaacctttccaattcactgttaacttgcattttgggctgagaacagaagtcactattcctgggtggtcggatgccttccttgtctgtaggtaaggtgagtgtcctagtttaatgatcagctgtgtcttactttctgaccccctccacgtccactctcagcatctccacctacctgcagtattcccttgtgaaggcctcctgacttctggatgattctgtctggaactgaaaagtgtctgtagggaggaaaagatgactgtccttaatcgtctgtgtttgtattaactgagaacatttaaaaattcctgactacctttcatgaaaattgcttcccccattataaaaatggtaaatttaggtttaatagtaaccttacatgcaagattagggtactaatt

SEQ ID NO: 31193 - DNA, 767 bp, Bovine  19866881179300
  misc_feature (1)..(1): n is a, c, g, or t
nccccaagtaggccttggatctgcccttggaaaacacagagctaatcgtgagaagtagctaatgagatgatgaaaatagcactgctttggaaagcagatccacctgggcaggctcttgccccaactgctccccagggaacaaaaccactggctgtcataactcttcagccccagagaccgacctcaggcttgctgctgctcctttgctgaacaactcactctcagggtggccaggtcttggccaggcccggagcttcccccagagtaagctgtaatcactctagtctgcatattgtggggcattgggtgggggtccagggcacatcccaggaattggctcccagcccagtggtggccgccaagcttccctgttccctccccaggtcactgcctgtgacccacgaggctgcggcaggaattttcctctggtgtggcgggtgggctgtgagtggacggctttcccgatggggaggggaggattggagagggagtgatgcccaggagggcgactgcagctcctatgtctgagcctaccctggtagcgtcagggcgtggtgtgcggaccgaatccgtttccattgccatcatcatccaaccatctccactaacatggtgaatgtttgctgactgctcaattctcttctttagaattgggccctacccaccccccgggctgccctcaggaaaagacaggagccagcatcctgtccaggagtgacatttcaggtcagaccaggaggggccctccccaagcccacccctgggta

SEQ ID NO: 31194 - DNA, 1131 bp, Bovine  19866881187339
  misc_feature (1)..(1): n is a, c, g, or t
ntcggagagtaggaaatggggacactttaatgtgggttcccccaggagtggacttggagaccaggatacatgttgtacttggaacacgggacagagcaaggggaagtgagtcagggaagggaaggcagcagacggagcacttgcacaggctggtcatcaccgtgggcagcaagggctcagccccactggggagagtccggaatccagtgtcaggcagccgtgtggagggcgaggaggccggggcctttatgtcccactgttggtggtcgatggggggctgcctgctatgcatggcatggagggcaccagtgacaagagaaagccgtcagaccaaaagtgtttttaacggaggtgctgatgactggtgtagatggaagtgacgtagataagagggatacaggcagggaaagggggacacaggcaggtaaccacagcatgtgttctggaggacagaggtgggaagtgccatcctcggtcaccctggggagagtaagactcttggcctcttctgtcacaaatgggtgtctcttagagtccccgccctcagcagagaggactccccccaatactggagagacgcatgcctttgccgggggctgggggcttcgtccccctgacctttgagcacctcacttccttctcccgcagctcggtccccaaggaagagaggccgtctctccccgtggggactggcgggtcccactcttctcgcgtgggatgtgggaagatgtgggcccgagtggggtgcccagtactcatcttctcctggccctgtcctgtctccccagatacattgaattttatcccatggtgctcgtcggggtgctggcactgctccccatgcttgtgatgctgatcgtggtctacggcttctggaagaagagacacatgggaagtgagtagaacccaaccctcgcagccccccaaggacagagcgctggggagtctgacaccctttccaaagcccgactgcccccagtctccaggcggtcggtcctcacctgcatccactcaggaggaccattcgacacccaggagaggggggaagggtgggcaggcagtgaccgctcagtggaaccttctggggcccagccacttggaagcggaggcagaggcagagcggctggcctg

SEQ ID NO: 31195 - DNA, 1089 bp, Bovine  19866881191940
  misc_feature (1)..(1): n is a, c, g, or t
ncgcggagtatctccctactcattcgatgggaagccaagggtggactctgggccctgctgagaatgggcaagggctggtgctggctctcggctcctcagtacccacctcctcagtgttaggaagtcttggacatcccacagcatctctccttcgaggcctggcctgccatctgcaaaacagggccatctggaagtggagggaagcctggggcaggagggaggggggatcctgagagggggaagaagatggagctcagaatgttctttggaatttctctttccatcacccactggtcctttaaatcagagattcttcactgtttggagccactggcttggatgagagtctgatatacactatggatcttccctgccccaggctcctaaaaaacgaaccctaaaatcaaccctcctgttcccaacccatgccttcctccccatttcaaagcctgggccccctccacaccacctgaagcagatagaaagagccccttcaattcaccccctgcccctcacttcctgagacctttgcctcttggggtccagcccccatccacctcttgggctcctccattctcatcttttttctttgctctctcttttccgaggggggcagtggaatttatacaatatttaagcagccagagccaagtcctggaagatattattaatgtaaaagggacgggctgcaaatgcttttggacctggttacaattagagggtgatttttctaaaggtcaatgaattcagataatatccacagtggggagagaaatttaatacctttttagtgaattaattaattataatattatatcggcttggggttcttttccagagtgattaaggggagcgatccgtcttctgtgaggccggggagcagcgcttgctgccagcgaggaccaagtctctgggctcaggatgggggcccttccctctcctctgtccagggagctggagggctgaaggcagcaggagaggcaggcgggactgggtctgactagggcatgtgggggtatttgggcggtgcccttgtgatctcagcccggctgtattcctgctggcttgtcactgagcctcacgccatgg

SEQ ID NO: 31196 - DNA, 663 bp, Bovine  19866881232271
  misc_feature (1)..(1): n is a, c, g, or t
nttttctctttattatttatactctctaacctctccgctgggtgagtaaacaggcgcattggcccataatgaggaacagactgctgcctggggctgctggaggggcacggggctgagcgtgagagcgtgcgtgcgtgtgtccgtgtgtctgtctgccccagagagggaagagtgggagtccaagatggagaagacttgttggggggctccgggtcccagccggcagggggctctccacatggtgcccggctgcagcggagcagggggaccccccccaaccctgccccggctggctgctgcctccgggaccctgagggttgcttggggatcgagtgtgctggatggaggaggagtcagaaccggagagactgtgtgggtgggagaggatgtgagaggtacaagccaagtgtgggtctcagagcatgacccccgcggggtggcctctgagtgtggccccggggtggggtgaggaatgtgtcagagggaggccgggcatgcaggcgtgtgaaggagcaactgtaaggggtgtgtaacaccaggagactgaagcagagtgtgtgtgtgtgtgatcctggtggcgtatgtgggtatgtgtcatcctgtgactatgagaatgtgtgaacatgtgtctgcgtgactttgagcgtatacatctgtgtgcca

SEQ ID NO: 31197 - DNA, 1207 bp, Bovine  19866881286675
  misc_feature (1)..(1): n is a, c, g, or t
ncttcccggggctgtcagtttaacggacaggtgtttaattccagcctgtcaggtgcctggaaatgccagcatcactgcacatcagttcgtggagcttgctcttacaagaacagtgagaagttgaactctgctctctgtagctcggccctctgtgtcttgtctccatctcatcgggcaaatgtagttgcaccttgcttactggcattttcctctggggcagatgggctcagagagcctggcaaaagaggccaaaagcttttccaagtgcctccagtggagaatgagttcccaagccctaggtgtcatcaattacatccctggcacgcgctgggcctgctttttaactattaaaatcatgtaatagctaaagcacactgctcctgcagccgcggggcagagaggcagctgtcagctgtgctagccagcatataagctgcttctctcctctgtacctgcgctactcaggcatgagtcaggaacaacataaacccaggaaatacatggaggcagccccaggagtctgtccagaagcttagacatgggtgtcagtgcgtaatctgggattcactgtgtcatgctacccccagcaagacttgccatgcagctcatctatcagtcttcgggaaagtctccatgctctgggctagagacagatcagaggtcagaaaggagaacccgtctttgatggttagggatgaagcttaaggaactgggtcagaactgggcacctctgggacatgttaactgtggccagaggacagagctggacagcccagctcaggtgatgaaagcacctgaatggcgtcctggagggttgttgggctaaccctggcacacagcttctcctcttctattccttcccacacatatccactcccttcctcgcttatctatttctttctgctttcacacctcctacctgtccccccaccagacctccacccacccacatacaccaacgaggcatcacggttcctaacgaaacggaaccactgccagatgaaatatattactattaaatacttaattcttctagtgagcagagagcaggcagtatgaatacgattattaaagaaaattactttggctgatcagatatttctgcatactaatttctgacccctcttccctcactcccgcttcacgtccctcagagaccaggacagataaaattccatcacaaatagctgattaccgaggcctgcat

SEQ ID NO: 31198 - DNA, 2349 bp, Bovine  19866881398645
  misc_feature (1)..(1): n is a, c, g, or t
natttaacaatagttttcccatcttggaacaaaagcaatatactcatttaattatgtcagataatgtaacttaacaaggactcaaactttgagtgcaaaatacatagaaaaattagctaaaaagtcaaagacactgaacttgcaaaatgcagctattttctgccatttgaggaggtggaaaggaggtatagggctagagcttacttgtttatgatgaatcttctgtgttcccagtggaaagatccagggttggcatttcatccctgagtggagaaggcgcagactacatcaatgcctcctacatcatggtaagtcagagagctactgggaagaccgactgcaagcttatgttgccagaaccaaaaacagggtggtttgcctgaatcagtgactggcaaataccacgggtggacacgagtcaaatctgatgactgcaggttcgcagcccacagcaacaatggaatcacagcattccttggtgttttcatgtgtgctgggactggaaaaccctcggtcaatgcaactgagtagatgcaggaaccaaactcaccattcagaactgatgttcagttcagttcagttgctcagtcgtgtccgactctttgccaccccatgaactgcagcatgccaggcctccctgtccatcaccaactcccagagtccactcaaactcatgtccatcgagtcggtgatgccatccaaccatttcatccccggttgtccccctccccacctgccttcaatctttcccagcatcagggtcttttcaaatcagtcagttctttgcatcaggtggccaaaggattggagtttcagcttcaacatgatgagtagatacaaaaccacttacctatctaagtggctccatttcattcaccaaagcaaatttcctgcagaaccaggatacaccagcattagcaagtccagtctcactgacatcactccaggtctgcagcacagttctcaccctgcaaactgggctcatttggcgacttagatttctaaagattcaatactttctgtctgcatttagctctactatgagaggagtgagtgctttagctgttttttgaccttcgtttccatttcaggccagtccatcacagagcttgccttcagatgaaagggtcctaactcccatgcccaaatcactattctatttaactagaaaagaaaataccaaggcatatctatacaggaaacaaggagatatatgtcggtggcatctaaaagggcttccctggtggctcagatggtaaagagtctgcttgcaatgcaggagacatgggttcaatccctggagcagaagatcccttggagaatggaatggctacccactccagtattcttgcctaaaaaattccaggacagaggagtctggagggctacagtccctggggtcacaaagagttggacatgacggagtgactaacactttcatttttagggcttcccaggtggcacagtggtaaagaatctgactgccaagcaagaggtgcaggagttatctaaaagcatgccatacttaaacgggcttcttaatactatacgaagcagatgtctttactcaaaaatcgagaatggattgagaacaaatgtaaatattgctttgtgtgttagttagataaaaggctgttcttttcaagaaaataattaaatgctggctacctacaaagcttgccacagtatgtctgaagatttgcaaaatagaatgaatttttatctacttggaatgatacgggatattgactgaagttgcaggatagactggaagtcctttcaaggtcttttcctgggcttccctggtggctcagtggtaaagaatccacttgccaatgcaggagacacaggttcagtctctgatctgggaagattccatgtgctgaggggcagctaagcccatgtgccacagctattgagcgtgtgctgtagagcctgggagccccaaacaactgagtccacgtgccacagctactgaagcccgcgagccctagagctcgtgttccacaggagtggccactgaaatgagaagcccgtgcaccataactagagaggagcccccgctcactgcaggtagaccgaagcccttaaaacagcaaagacccagcagaaccagaaataagttaaattatttttttaaaagatcttttcctacccaaagcatctacaattaaggagaaaaacatttaattatgtacaacctactcattcaaatctgaatatatgaacttaaaagttttctgcttatcaaatgagattgtaaccaaaagaaagtaaattgagtagaattctacttgatgaataaatgaagataaagcttaaaaaaagtaaaaaacattccatacttca

SEQ ID NO: 31199 - DNA, 735 bp, Bovine  19866881534340
  misc_feature (1)..(1): n is a, c, g, or t
ngaggcagaaccttcctctttctaatttcaacttggcaacagcttaggttattaacctactgaaatatcctccagggtctccctctcacaccacgctcctccccccatgttttcccagcattcactctctgagtctctttttctccagggctgtgaaacttaaacttttttccattttcagatctttatgtgcggataaaagacgacatccctctgcccattcctatctgatgctagatggagatgcagggcatcagtggtgagtggaagggctgagaggatgcccctaggacaaaggggaagatggaggtgagatgtggggaggccaagagggaaggaagctttgaacctggagtcgggacaccttggctcaggacctaattctgtcactcactcaacccttgtcacttttctcacattctattggttttacaaatcactaaggccaaccccggttcaaggaaagaggttagactccacctttgaatgagagggttgcaaagagcatgcggccatctttaatctatcgcagcataaaagagaaactgtggtatagcggacatcagaaggttcaagtccaaccccaacctctacttcttaccacatgtgtggtttcagcaattcatttaatgcgcttgaacctctttttctttatgtatgaaacaacaacaaagaaataaggaaagaaagaaaaagaaagaaggaacagagggagggagacaggaacgaaaggaa

SEQ ID NO: 31200 - DNA, 757 bp, Bovine  19866881686033
  misc_feature (1)..(1): n is a, c, g, or t
nttaaccaaaccttggcattcggctcctcttgccctcatctttcccagctccgaatcaatggctttgatatgctaattagggagtaatttaatttcaaaaggccgcaattaacaagggtgttgtggacatgctgtagttaagcggagtaatctaatttgcattagtaacaagcagggactaattagaagcttaattagacacttagatggctcttatgtttactttcttaacgagatggagtgggctctttggttctctttttttctttttctcattgttaattctttcttttggtcacggtactcgaaagaagtgttgagggaggccaccttgctagggcctggtggaagcattttggggcaggagccagtgaaaagtgtgctggggcaggggcatggtgatggtggcgaggcaaggttcggattcctgggaaattccagtgaccgccctccaggctttgccaccttgagatggaatcccagggaagagctctggtttgggagctgtagggtttcagtttggctcaacctcctagcagccgagaaaccttgaaacatcactaaacttcctcaaagtgtggttccttcaaacgtcacagtgagtgcctgtgtgtgacaggacatgggaaagaactttcaaggcctctgtgagtggaatagttgttactaaaatatattcacaaattgtgtgcccaggcttcacttactgaagactcagctcagaagtcacctcctacaggaaaccttcccggagcat

SEQ ID NO: 31201 - DNA, 730 bp, Bovine  19866881740023
  misc_feature (1)..(1): n is a, c, g, or t
ngctagcttaaaagacctatgaaatagctattaatttgtcgagcagtgacttcaatactcatgatggtgatcttgaaaactggaaaattataatgggtcagcttaattctgcaaactattaataagactgctgctgctgctaagttgctttagtcgtgtccgactctgtgcgaccccagagatggcacccaccaggctcccccatccctgggattctccaggcaagaacactggagtggcttgccatttccttctccaatgcatgaaagtgaaaagtgaaagtgaagtctctcaggttgtctacttgaaagttacacagtcgtgtctgactcctagcaaccccatggactgcagtctaccaggctcctccatccatgggattttccaggcaagagtactggagtggggtgccattgccttctccaattaataagactaccctcattcaaatattttccatctaggtcccatttatattgtttatactactgtaatatagttttgaatggggggtggtggaaattcagatatatagaacaaatcactgtaataggaccaaactaaaaatgtagaagacatccctttaaatagttattagtgataaagtcccaaacaagcaaattccaactgtacctattataagtgaaacttgctgaactctcaggctttgtggcatgtgcaaggcaataagagtataggacgtagagtaacagagcccagttatcatcat

SEQ ID NO: 31202 - DNA, 839 bp, Bovine  19866881838164
  misc_feature (1)..(1): n is a, c, g, or t
nccagaacctaatggtctgtccctgtgtgggtgttaaaactcaagactctggtcataactgattgtgataatttcctaaccactgccatggttaaaaatgcatttatttttaattttttttttacacagatgttcatagcagctttatttgtgatagctaaaatctgacaacaatccaattatagatcaaaagtgagtagatattacatcccatacaatacaatactacccagcgatgcaaaggaatgagctacttatacacactacaacatggatgaattacaagttatgctgaattaaagtagcccacaagtatatcctgtatgataccacttatataacattacttaaaaatgaaaaataaggaattctctgatggtccagtggttgggactccatgctttcactgtggaggttggggggagatcaatccttggtgggggaattatctttagctgcagggaactatctttagctctgatatggcagattccaaattacttctgtatctgcagcctccatttggccaccagggtaatgatgtcacccagtggattctcttccactgttcagagtgccaggagcacgttccctgtaatattcaggatattccctccaaaacagagcacacgctccaggatgtcactaatgtaataactccggaagaccagcgggtcaggaagcagcactgccaacggggcctctgctggccacagagtctccccctggtggcagcaattatgaaatatttcatatgtacagaagcatgtgaataacatatacttgcagtttggagaaaactaataagatcaaaccagtcaatactaaaggaaatcaat

SEQ ID NO: 31203 - DNA, 2029 bp, Bovine  19866880451750
  misc_feature (1)..(1): n is a, c, g, or t
nctcagccatacagatacatgagtccattctccaaactcccctcccatccaagcagcagagttccctgtgctatacagtaggtcctggatgggtatccattttaaatatagcattgaaaactcacccatcttaatgaaaaactcaatgatttttaccagtggtacaaccatcactgtaattcaatttccgtattaaacatggtttcatcactccagttagatctcttgggttcattcacaagtaatcctcactcccaacctcagccttaggcaaccactagtcttcttgtctacgtagagttgcctcttctggacatttcacgggaaatggtatcatataaaacgaggtctttcacgtcctgcttcttttactacttagcatactgtttccagtgttcattcatgtaacacataccagcacttcatccctttctattattgagtagtgttccatcgtttgcttatcccatatttcatttatcatcggctgatacacatctgggttgttcctactttggggctattttgaaaaatgctgctatgaacattcatgtacaagttgtgtgggcatgtctgtgtgtgtgttttttaaccatgtgaataggttatctgtttaaaaaaatctttgatatcacaaaagattaaacagcacatgaaacaatcttataaggaaggaagtagcaaagcaatgggcgtgtgtgtgcatgtgcctgtagaatgatttgattctgttaaataattaaataagaacataaaaaagattagaaaggcagaaagctaaaatgttaacagtgttgtctctgagtgatgggatggtggataatttatgtatttgtgtgcttttctgtatttcaacaaattgtctactgtgaatataaattacttttgtaatcagaaaaaaagcacaacgttattggggaaaaaaaaaaatccttcccattcaatttctccaacctctctgttgcagaaagatatcttcgcagtaggccacaaataggggagggagggcatccctctttctctctctctctctctctcgctctgtttaatgctggtcacagcatccagaaaactgcaggatccccaataaatacaaatcaattttggagacctcgagatcagtttccatggcaacctgacaagggcatgatattatatgagttctgccccagcgtggagatggtccactaggaagaacacctgacttgaagagcccgaggtggccaaagggccatagtatttatctgtgtggcaaaggcatcaggcatcctaagactcaaagagatagacatttctccaaataatgggacactggaagcgtgaactgatcatcctgattgtgggttccctgaactgccatttcaatttatacagctgcacacagatgtcatgattcagtattttccagaactatacttaggaactaagtgtccttcctctctgcttacctcatgcacaatttcatcatattgcttcataattactcacttgtctgcacaaggcctgtcccttatatttgcaggacttgggacaagaggataattagaaggccacatctcacatgttcaaaaagttggaagtcataaattgagctaagttaatgctagttgctcagtcatgtttgactcttggcgagcccctggactgtagcccgccaagctcctctatcagtggggttttccaggcaagaatactggagagggttaccattcccttctccaggggatattcctgacccaggcatcgaacccaggtctcctgcattgcaggcagagtctttaccatctgagccaccagggaagtccaaatcaagccaacacactgttaaataagggccatcttatcttcctctaaatacattttcagaatgacctgaagaaccagacacagattcagatgccttggactccctggaattgtgagacgggacatgcagcgtcagaaaacaagaccccagattgttccccctttcaatctcacagcaaaggagggtccaggcacacccaacctgaaccactccacacacata

SEQ ID NO: 31204 - DNA, 2592 bp, Bovine  19866880472839
  misc_feature (1)..(1): n is a, c, g, or t
naatagagatagaagttagatttttaaaaaactaaggccggaattccctggtggttcagtagttaagatttcgccttccaatgcaggtgtgggttcagttcctggtgggggagccaagatcccatatgtcttgtgaccaaaaaaccgaaacataaaactgaagcaatattgtaaaaaaaaaaaaaaaaactcaataaagactttttaaaaatggtccacgtcaaaaaaatcttaaaaaaaaacccaccaagatcaacacactttggatatctggatgactccaggtgacaacaaagtcatctttctttaagtatccttattcttatcacaagaccagaaaacctccagccccaaccctcttgacagcaagaatgggatctgagaaacttaaaatataagccaccaatcttcaccccacaccctgctatggggtccatgccctggccattgggtgggggggaggtttctaatggccacatctgaacactaatattaatagatgcatatgttgccaaggaaggttaagataggatgggtcaacatgggacggttcatagtcaaggcacaacacctatacaacacatgtcaaggcagctcgtgtcaatttctctgtgcagaggttcagggtctttgcaggagtcagacactggcctgttgaaggtacaggggaggtgtggggaacaactcaattaagagcaaaaaggctgcaggttgaaaagagcaaacctaagacttgctgtaaaccccttggctcttagtccccccatcaggggtcaggggcatgagcaagcgggtgggccaggctctgattctgacccagaccctggtgggagacagacacacattttgacaaacactcttcccccaattttgaagcccctgtggattgcaagggaaatttaatccatatgtctccgattcatttatactaaactcatcaacatgttgtttcgtaagagccgttttgtgtccaaaagcctttttaaaaaaaaaaaaaaagctcttaaaacctcaggttttttttctttgaaacaggaaatcatacgctgccaagagaacaggaacttgaacccttagagggtcaaactgggttcaaagccgctgcttccccagagacctccaccaattggaggagtgttcactgcccccttgccccgctcacctctcggggaggcagagtcctaaaagcggccaaattaaaccaggagaagcagaggtgggggtgcgggggtagaagcagttgggctatgtcagggtcacactgttctgttcacagccaaggctgtgctcctcggagcccacagaggcctgcaggagggagagagagctggccaggagttccgttctgcttcattagaagtagcatcttgacaaaacagaatccctacaagcaggttcctctggaaatggcccggggcccctggcgtggagctctgtcgtgggttttggcaaggtctcttgaacggcagtgaacttggaaggtccagaccagatggatgaaggatgacgctctgctctggcttccccttccccctcggatgcacccctcaccttgctgagccttccctaaggtttcatatccacaaagacatctctctgtccctgacccggtaaagctggaggttatcaagggcaaagaaaaagagcgggttgatgtccttaaacctcagagatgcctttcaatgcaggcagggatcctgagaaatacttgctgggccaccctaagctctggccagcctgtggcgaggcacgttctctcctcaacaagaaaaccatagaatcgaagcatgagcaagcaccatttatgggaatgtgcacagtctgtacacacagcacagttggatgatctatatttcagaggttgacaatccctgatggcttccctagagagcaagaagggaattcagcgtgaatgcttatgttaactaattcaggggtcaaaagggtagaaaacaaggtagtcaatgtcagatagagcagaggcaaatttagtgcaacagagaagctacagatgataagaaactccaatcctcttccctccgtcatatctttaaaagtacttatttatgtatttctttatttggctgtgtcaggtctcagttgtggcatgtgagatctgtgtgtcatgtgggatattttcttgggtgcacagattctgattgtggcgtgtgggctttgttgcgccacagcacatgggattttagttccctgaccagggattgaacctgcatccccggcattggaaggtggattcttaaccactggaccacaagggaagtccctcttctcttcttgcattgagaaacaggcttaaaatcaaacatcatcaacataagggatggggcttctggaaagcccccattactcatagtcaaggaagcctattatagtgggtaagatggattactaatattctctttccttgttcccctgactcactgatgctcaacttggtggggtgacctacttttggtggggtgacatgcagagacagtaatagggacagttccaacccaagagagagagaatgtttccttgcacccctgtcatctatcatgagaagaacatgctctaccccttcagctggggctc

SEQ ID NO: 31205 - DNA, 951 bp, Bovine  19866880483863
  misc_feature (1)..(1): n is a, c, g, or t
natcaagaagggaaaaaaaattaaattccatcctcacaaaggcagatgagacacatgtcagatcagtagcaaacattaattaagaaaatattctaaaaaagtgaccatagtcacaatgagtgaattaaaaaatatttagtcagaatttcatccagttatagaaacacaaagaggctattttattaatcaccagtttaaatgttttgtaagtgtttttaatacatttttaaaattctcagtcaagcacttcgtctatctatccagtccattaggatacaatctacttgtttgaaggttttttgttgttttgttttgtaggttgttgttcagtcgcttagaggtgtctgatgttcgcgaccataggaacggcagcactccaggcttttctgtccttcattatctcctgaagcttgttcagacttaccactgagctgatgatgtcatccaaccatctcatcctcagcttcccccttctcctctgccttcaatctttcccaacatcagggtcttttccaatgggtcggctcctcacatcaggtggccaaaatattggagcttcagcttcaacatcagtccttccagtgaatattcagggttgatattttgtacatggacctcacttatattgaagactgctctcatttgctattgtctggcttacatgttaggttttctggccttgtcctgagtgtggaactcagactgctttgcccgccatgactcaagatcaaagatggaaggagatagtgagattgtaagtggaatccgaggctggtggcaggcatggtttggggaacacagtcaaccaattaaccaatgagctcttatgattaagtacttgctgtgtgcatagggatacagaagaagccagaaccagtatatacctgaacctcaactgacttttagagaaggcagtattggtgatcaacccccgaagagcaggaattttgc

SEQ ID NO: 31206 - DNA, 1294 bp, Bovine  19866880515142
  misc_feature (1)..(1): n is a, c, g, or t
natctgtgcttccctccctattcccgataggggtaggcagggagcagggcaagtggtcaggacttcagcctctcctcttgtaccttcctcattcctgctcaggtctgtggctctctgcatccctgccctaacctctgcatttcccaaacaaacccttttcaccatttttgccaaaccagtgtgtaacctccattatcatttacttaatatctttccttaaatggacttctttttaatttaaataaatgtattgaataaggacactttatgtagcttcttgggcttccctggtggctcagtggtaaagaattcacctgcagtgcaggaaccactggagatgtggattcgatccctgggtcaggaagctccctggaggagggcatggccacccactccagtattcttgcctggagaatccccataaacacaggagcctggagggtacagtccatgtggtcacaaggcaggagggaatcccctcttccttgagggatggtcagctcttttgttctgttcatgccttcagctgattggatggggcccacccacagaagggagggcagtctgccttctggagtctattgtttcaaatgctaatctcatctagaaatgctcagaataatgtttgaccaaatgtctggggcccctgctgtggcccagtcaagctgacacataaaatcagccatcacatttgccaaaaacataagaaaaatacaattagaacttcacaattttatcaaagaccagctggaatctacagtccctcttaagctctgagcctgagacttgctattttttcttctaaaagggagactagcaagtattaaaagtgcacggatgccacgctgagactttcacctaaaataatcatacagattgtatgtatgattttacatacaataatcacatgtatatgattatctttcccactgtgtgatctagcccttcatgttctcctgtaagtcatccccagtgcccaccagtgaaatccacacccacccaggggcctctctcccaggcgatggacctctgaaggctaagatcacatccagacgacagtcacatcgcctgcagtgcctcttatacccggagtcacttaataaacagaagatgggagatggcatggccaggagctttctctgacctagttggtggtttctgtcagaagcagcacatcatgacagaggagacagagccggaatggtgaaccacactaacggttccatctaccaaaaagctcctatggcactttggggcaagggctgtgtctacaggaatgaaaacactcgatagc

SEQ ID NO: 31207 - DNA, 2242 bp, Bovine  19866880600703
  misc_feature (1)..(1): n is a, c, g, or t
ngcttaagtgtttgacctgcagtcctagaagaaattattaatggggaacttataaggttttaaacattaatgtcatctcagagcctcatactctgtccaaggaaatctcaaggacagaggagcctggcaggctatagtccgtggggtcgcaaagagtccgacacgactgagcgactgactaaataacaacagagcctccttcacagtcagtctcagcatgtagccgataagctggcaacctgccgagatgctaaatcatctctaagatcaggcagagcaggaaggaatacacttgtaattcctgaatacccaacagtgttacagttttgttttgttaaatatctccaggaaagccagtagacaggatggtgctcagataatagtattctctggatcagagcccaccgtagttcaggtggctgagcaggtacaaacacggatctgatctgtgcacgcgggcagggtgcagcagcaggtttgcttgagtctggaatttaaaaacacaggtggtgagcaaaactctgaaccaaggtaaagccccttagcccaaggcctggcttccctgttcccctatcagtactgtttctcgacctgaaaatgaagagtcctgagcaagagatagccagaggacagagcagactggcgggtggcgggcaggggggttttcaactcagcagtgtctggaccagtgtggtgaacccctgagttcacatctgactcacctgggctacttcagaaatggattcttaggtcccatccagaaatctagggcagagtggaagcatcagagtcacatggtcctgccattcagccagcctgatatccactggtcttggtaggggctggcaagttggcccctacccacccacctgtggccagttgagtgatttttataaatagaactttattggaacatagtcacacctattaactcactgttgtctgggctgtttctgcacctcagtggcaaagttgtgtagttgcaacagaagcatcatggccagcaaagcctaaaatatttactctctggccctttacagaaaaaatgtgcaggcctccactctaggggatactggattttttttttttaaacaacaatgatctttataagtattactgtaagtttattttgtctttgtttttaacaaagatagtcgaggtatctgtggttgatacagcaagaaatagaggtttgacttaattttttaaataattttatttatttattttattacttatttttgactatactgggtctttgttgctacataggcttttctctcgttgcagccagtgggagctactctctaggtgtcgtgtgtaggctgcttgttgcagtggtttctcttgttgtggagcacgggctcgagggtgttcaggcttctgtagttgcggctcctgggctctagagcacaggctcaatagttgtggcgcatgggtttagttgccccgagacatgtgggatcctcccagatcagagatcaaacctgtgtctcctgcattggcaggcagattcttcaccactgaattacagggaagcccatgttttatttaattgcagaaagaatagtatatagaggacagaaaagagtgatctgattataccagaagagataagggaggatggggattatggattaagttctctttccagcagaaagtcattagctgtgtccagagtcagcaactcagggaaacagccactggaggacggtgttcacatatgccgtgttctggcagcaccagaagtgttgggggcagcaacctcagcagcaggtcgggcagagggcggctgtcttttgttaccagtttgtttatgctcttggctttttttcaactacgtggttgttttttggggtttttttgttttttttaattgaaaaacaaatatcagaacaactttacctaaaatttttcttctaattgcagcatttaccctccaattccaggacaggaaagctctctgaggtgggcaggaaagaaattcgaggagatcccaatcgcacatattaaagcatcctacaacaagtaagtgcggaagggactcctgggcagggctgggggggaggcttctttcccctgcaggggggcgagcaagtcacatgggccccggtgcacagcaccccaccaagtattccttcttgtttggggaaatctcctctctttttataaagttgattcagaataaatggaactgtgaactgggtgcccgtatcatattgttaaagattcctttgctatc

SEQ ID NO: 31208 - DNA, 1639 bp, Bovine  19866880612370
  misc_feature (1)..(1): n is a, c, g, or t
nttggcctgtgcccgagcagctgtgcacaccccggcatgacttcagtccctgcagggatgggggagccctggccggtgcagcgggaactggggagcagaactgactcacctcgccaggctggctgcatctcgttttcctgagccgctttgttaacacggctattaagaagttctcacatggcttccccagtcttctctaacttccccggacagcagtgacagccttattaacggcaaacggcttctcgtggcagtgttccatttctaatattaataatcagcatttaataaaaacaaagcagggagagatacaggcggaaaaaaccagactgctttgcccttcgcgtttatcaccctggcaggagttaccagcgatagtctctgagtggttaatcccgcatcaaagacacgccagcgtatgcacacatgtacatacacatgtgaacacatgtgcgtacacacctgttctgggaaccgcacttcatccctctcttggccaaagtcagggttagaccctcctccctccttcctgccatacccaccctccggctccccatctgagcatctcaagtgactttgatggttcagagtcatgtcatgaactgatgtctttcaaggaagggaggtaagggaggcgggcgggctggcgggagctgctggctcttgcattggtacctttctccgtttccttctctctccatcaggccagtcatccgtaagacaaatggccccctcctgccaaggctgaggagactggaggtaaagatgtagttaattacatgtactcaaaaaggtcaactctcaagattaggagctgcgtttatcaccactaaaaataaacagggctggggaggacaggatggaagaaatgggagtggaaaggtggatgggggtgaagagggacttggggctttggatccttggacgccgggctgatatttaaagacctttgacgttgtggaagatctcagcaagcagctgacatctcctggggcctggggaggttttcacgataacaaacaatcccacctggaggctgagagggctagtcccctctctgggtgtgcggaggctgtaagaaaaggagatctttgtttgcggtgagaagtgccattcttttattctctccttcacaccccagctagtagtcctcatcccattctcgtcctctacttctgagttgtgtggacatgaactggaagctttacagagagggcgcacaggcaactgtcccagaaggagagtgctcccagggcttgcctttcccaggatagtaagttccctacatacaagcaagttccattccaagagctaattttttaagtccagtttgttcataagcccaacaaatttagcctaggcacacaactaacacagttatatagtcctggattgtaataggtttatacttttcacacaaataatatgtaaaaaaaccaccgcaagaaataaagcaaatatttttaatcttacagtatggcaagaatcccttagaagaaatggagtagctcttatagtcaacaagagtctgaaatgcagtacctgggtgcaacctcaaaaacaacagcatgatctgggttcattttcaaggcaaaccattcaacactacagtaatccaagtctatgccccagtcactaa

SEQ ID NO: 31209 - DNA, 861 bp, Bovine  19866880652206
  misc_feature (1)..(1): n is a, c, g, or t
ngggggcatggcgatagacctgtaggcgggggttctggaacattctggggtgacctaccacctgctaacttcccactctctaagggaccctccttctttgtctaaaaactcaatgaacagcctggtcaaagggatgccacgggacagaggcccctgggtggagagggcttggggcaggggaaggggaatcaacctggaggcaggaggcccagccccacctggagaggggcttccagtaaggcagggacacaggcacagctggctgtatctgtagacacctggcctgtgtgtgcaggaatctttgcccagactactgcccccaaggtcgtcaggccctccacccacacctccctcagacgggaagggagtgaagggtggcgagtacctttggaatggaaacatctctccagctgcccctccagtgccccgaagtgtacggtctgaggactggatcatgaccctgtgctcggacccctcccctcctcaccgtagatgtctccttgagatcagagggctcagggcacctgcttcctactctctcttacctcctggtggtttgggtcctccctttgcacttctgctgagtctgctagggcctctcctggcccctggagccccggtgcctctgccctccctccggcaggtgttccccttgctgtgtccccaggttcaaatctaggctcagtgaccccattgcacacccctccactgccactgctcctgctcccccagaatggtcagtgatgtccagagagggagccctggagactgccttagagctggaagggacagaagagatgggttaggttaaggcctcatgtgcagacaggaaacccgaggtttggggaggcgggagtcccc

SEQ ID NO: 31210 - DNA, 3562 bp, Bovine  19866880683604
  misc_feature (1)..(1): n is a, c, g, or t
nctggtggccccacagtgaccctttagtcaaactcagctgctgcctgggcagtgaatgtccatccggtcatgccctctccctgggcttcggatttccttgtctgctttttttttttggtatttttatttttgtttatttacttggctgtgttggggtttagttgtggcatgctgggtcttcagttgcagcatgtggaatttagttccctgaacaaggatcgaacctgggccccccgctttgggagcacagagtcttagccactggaccaccagggaagtccctatttttttgttcttgaaaggctgtttcaagggtaagagcacaggctggcacctgcctgagtttgaatcctaggactgcttctggccagcggtgtgacatttccgtgcctcagttttctcatctgtcaagtggggataatagtggtatctgagtcacaggtttgtagtgaggtttgagcaccggctgtgtgccaggctcaaagtcagaccgtgtgttggggggacgtgtagatttggagtgtgtcagagttgggctctggggtcggaacggatgcctgtgtaacaggggaggtctgggtccctgctagctgacacgcagctcctccttcgtatcgcagggccctccctaggctcagaagtttgctttctggctcctgctctgaggccaagagattctggctgcatttaaggtctgcaagaaaccctcgctcaggttgcaatctgtccagtgtcacataagccgtattgatcaattcatcttatatagttgggaccaaacagccctgtaatctttctattgtgcagcctaattggtctctaggcctgtgtcattagctcgcttgtttgtaatctgactccctgggccggcctttgtgagccagcggacaagaagaccccagcctcgcctgccccatttgcccatccccggggtgggggctgaccttggtgccccttcatcctggcctggactccttgaaacggtgtgacaggcacgggcaggtgaactccttgggtcaaggagtgagcatagcagtgggatcactggacctgggtcccggccctgcacttggcatttatcagctgctcaccttgtttatttaccgtgtttgaaatcgctctgttttttcatctttattgatctttcctgtgaatgtgtaatgacattataaaacacttaacataaaatctaagtgaaggaaagctaggattcaagttgtatatccataattatctcatctgcccaagaatgaagatgagtgaggatgcccccaatactgaaggtggctgtctctgggagacgtgattataagtgactttaattttctcagtatcttttcattttttccccaaacttcctgcaaggagtctgtattactttacaaccaggaaacgaatcattgaaattagtcagcattaggttcagcaatgatagattttcttcatttataaaatcaaaacattggactggattcccaagcctggctttcagtgcactagcatccccagaagagcttgcttactaaaaattcagaggactgagccccatgccggggactgtgatgcccggcgtttcggctgtgcatcgaaggtttagaaccttgggatgtgtttctctcttggactctttctaacacgatcattccccatggacgcgttgttttagaccgtgggtgggaacaagggagccctgtggccagccacctcccctggcttcaagaaggtgcttttcgaagctgggaagaagccggttctggagtatgtggcctttggctacaaatgggtggtcccaaaggtgcgtgggcacgtggcttcgcccagaggggggccctttgctcagccagctgcttctcagagccttgcaaggtagagtcatttcccatctgatcacatttcatccccaataattcacactcttggggttcctcttcccatttcccacataggaggcacaggaaagctaagcgacttgccccgtgccacacagctgctccaggcagagcctggatttaaagtcccatctatacctgcacattttaaaaatttccagcaggttccactgggggctggctctcaggtctccagcttgggggtctttgaggtcctagctgtccctgtgggcagcagaagctgggattttatttgtgtggtttttctggtgggctgtcttcccttctccttgcctccagcaggacgcctggctcgaggagtctcccctccccgcccccaaatgcttaagctgttttcttgtttggggcgcttttgcagtgtctctctgtgtggccccgcgccacggtcattctcattgtcatccttgccattggcattctttttctttcttatttcacttattttattttctcttattgtgttttggtcttctgatgacatcagctcttaaacccaagccagctaaattatagccagatttgcttggggattttctgcaggcttttgaagcgcttccctccaggctgtacacaggtgacattttaggttggactagtgggagcatgggagcaggttgagggcagtcctgggtttgaatgcaagtttcccactgagggctgtgttacctcgggggtccctggtttccctgtgtgtgcagttgggtaatgacatccgtctcagtggggtgtgcagtgcagggttgtatttactcagttgcagagcatgggtctggaagtgctcaaagtttgtcagtcaccaccatcagtgctcttctggtcttgattttgggcttccccggtggctcagtgataaagaatctgcctgccaatacaggagatgcaggttcgacccctggattatgaagattccttggagaagggaatggcaacccactgcagtattcttgcctggagaattgcatggacagaggagcctagcaggttacagtttatggagtggcgaagagtcagacacgactgagtgactggacaacaagtcttgattttggaagcctgaacaagtcatcactccaggagctttggttcctgccaggataaactgctctggaaatggaaatgccctcatagttgggctggtagaggcctggccttggtcaaccttgtccaaggagaatgatgactacttctagagttcccagggcaagggggacaggataggttctaactcctaagcttcctctgggctccctgactgcagagcactgaagccaggaggccagccttctgcctcgagggaccagcctccagcggctctggggtccccatgccactgcagtgccccagctgccagcccgggctccccctcccttcccagttatcagggacctgtcagttcagagcagatagcaccattatataccaacagccacacagctggctggagaggattaaacttaatttgctgcaggatttccagcctcccctgtcccttgcccattgattctttctctttgatgttgaaaggggaaggcggacttggctaatgggcctcccgctgtgtccaggcggtgttgtcccgtacgtgtgtgcacctctggccctcagaagcccttcctccatacaggctggggctgtttacttatttcccatca

SEQ ID NO: 31211 - DNA, 1195 bp, Bovine  19866880716593
  misc_feature (1)..(1): n is a, c, g, or t
nctctatatgaccacatacaattgtttcttaaagaatcagacacaggcactgtcatctctccaggaagtttctcagccattgtcagaattcattttcaatgacatgacataatagacttggggtttcattaaccgacagagcactctgagaaatcctttgtttgagcaggagagaactcagacagaaggtaggatttacttggtcaatagaacattatagaggacttccagaatcgaagctttgcatttagctttcttcccactttgggtcctaaagacattcccttaaggcctcagtgttaaagagtcttgggaaaacaagcaggaagggatggactggggacccatgccagctcatgcaagcaggggtctagacttcagtagaaggctctccagtctccctgagaaaagggtcagcatagggtcagtagctaagcatgattaagagaagggcacctcctgtctaacctctgaaagtccatctggccaagaaaggctgagaccttgtaggaccttgtcacatcctctcgaaggcgggaccggtgacaaggtagggaaagtgaggtgcttttgccatgctttcagtggaggtcgtgaacagagggacagcacggtgagaaggtgatacatgtgtacttagaaaaaatgcacgttttctcacaaacagcacctcttccttagagtctggcactgttcttttgccttcagttttttgtttttccacctgaatgattcatcctctttcattgaaggcgttcactcaatgcgctttgacatgaacccttctctgagttttcccccaggaaatgggggttatgggttcttcttccatgtttgctctgctttgtatgaatcttgtttgtaggaatcttcacctgatgaagaatggcagattctttgactgacgaagaatggcaaaaccaccattccatcaatggtttacctgcttatctaccttttaggacagtgacgccatggataccacagaagacatcttttactgtatatttcaaggaccaagctttgcccagcacctagtgggtatgccaatcaatggggatgaaagaatattccatctgaaagccctttaggcactgacagcttgggaatcttggataagattgttttcatatatcaatgacactctctcaattcttcccaccatgagttggggggggagggagacacaagcggg

SEQ ID NO: 31212 - DNA, 1304 bp, Bovine  19866880716851
  misc_feature (1)..(1): n is a, c, g, or t
ntgtgctaaaggaacagcctactggaaatctctaatcattgagacagaaggaaagtgaacttgtcacgcactggcatttacagcttctttattagctgaagcaagtcacatggctatgcttaggttcaaaaggatagagatgtgtaatccttctccaaagagtccgaaagaaaagacacaaaatatgagttgaacggttatacaatctcccataacccttgacttcccagggtttcaacttcctcacagtacatctgtaagttctcaccaacaccactcacattgtcatcacccaaagcaccatcattctctgtcacttccaaaaccaccatcaccagcctcgtcacagccacagcaacatcctcatccatcctcatccacagcaacatcattaacgacattattactaccatctttaacccaggctccctggaaaatagggcctgcctgggggagaagctggcctaccgatgttttgctgcagagtgcaataccagggaaaaagagactgaggcagagaaagaggggcaacaaatagaggggatatttaagaagcaagccccagtttcatgacaaatgcaatgggctggttcagtcctgcagatcttcagatcttcatggcccatctgctgcacttctttcatagtttacttgtgaggaggaatagagaagaattaatctgttgattccttcccagcccccatctcccactggtcaaagtcggctctatggagcatttcttcccttgcttgtttgaaaggtgtaacctggtctccccaggcaacttctaatggagccagagcttctgagggtccagaacagagccatcagtctttcttgttcaagtagcctccatctgcagtgggagtgatggcaatgctagagatctggttttcctgctgtgggaacaatagggtgagctctcgctaagcctgctcaacaggagagcaaggcaagtgaccaaggcccaggcagagggaaggtgtggacacatggacttaaggtggcacaaaacttgggtcccatgcaattacccattgtgcctttcatatctgctcatagccacttggaacacgtgatcttaggacaatacaccttcaattcttccccaagaagttagatagaaaattctgttcttcaaggtactggaaagttgcaatactccaaaaagaattcaagaagcttagtaagccaaacctggtacttctgtgctactctggctggtcctagagatgtcaaaactgacatttaccactacactcattcagcatccattcgactagtctgtgtttcttccctgcggg

SEQ ID NO: 31213 - DNA, 1664 bp, Bovine  19866880792536
  misc_feature (1)..(1): n is a, c, g, or t
ncagtggagagggatgtgggaaagggatagttagggagtttgggatggacatgtacacactggtatatttaaaatggataaccaacaaggacccactgtctagcacagggaactctgctcaatgttgtgtggcagcctggatgggaggggagcttagaggagaatcagttcagttcagttgctcagtcatgtccgactctttgcgaccccatggactgcaacatgccaggcttccctgtccatcaccaactcccagaatttgttcaaactcaggtctattgagtcagtgatgccatccaaccatcatatcctctgtcatccccttctcctcctgccttcaatccttctcagcatcagggtcttttccaatgagtagttcttcacatcaggtggccaaagtattggagtttcagcatcagcatcagtccatccaatgaatattcaagactgatttcctttaggattgactggcttgattggaggagaatggatacatgtatatgtatggctgagtccctttgcttccacctgaaactatcacaacactgttaatcagctatactccaaagtgaaataaaaagttttttaaaaatgtgtttagaaagttgaagacatggatcatcaagtcaaacaactcatcaagttagtcatctgtgaccacttggtgacagtaacattgccagacaaacgcctatcacttatatggatttaagggagactctaaaagtattaggaataatgaaatataattaagtggccagtacccacagttggttgattctttactattctcacgaagtagctagaagctgatagtcacacactctgaacttgcccaagctcattgacaaccagacatcaagagtgaaagtgcaaatgtacaataatatcatcactcccacagttttctgagtttgggtccttcaattttaaattcctaacaccaagaaaattatgaaatgtttcataactcacccacacacacaccacacacatatagaaagacacacacagagagaaacacacagagaaaccacacatatataaattctggtgtgaggactattatttaaatgatgcctcaaccgtggagtcttcccatctcgatctcttagagggacagtgggacattctttatcattttgatgtataggatgtatgaccaaatagaggaaaatgtgaaattggaacttctatcattgtcctcctgggctgccacacccacactgtgaataatattcgccttactcatactaagacatgtgcaagccaagatgagcctactcaaaaaacaaagcatgtgctttaagccttcctggagctgctggaattgtcttgtgtttctcttcaacaaaatgcaacgattgctgagacactgcattacctgctgagcagttctgagctagacagcgtgagaaccctttcctgaatgccaaacaggtattgtcttctgtggctgggttgttttaaagagatgcaccccaggtctgaaataaactttgcaaaggcagtattctgtcaagagggctatgattatggttttggcccctctgctccagaatcttgactccaagaaacatactagatatagatggatagatatatacatacatacatacatgcatgcatacatacataggtcgatctctgcatgtccttagtaa

SEQ ID NO: 31214 - DNA, 2282 bp, Bovine  19866880800029
  misc_feature (1)..(1): n is a, c, g, or t
ntatcccaatgttcacggcagcactgtctacaacagcccaggacatggaagcaacctagatgtccactgacaggtgaatgagtcaagaagatgtggtacacatatacaatggaatagtcgtcagcatgtacggagtggggtaagccctggccctttcagaataggggtcagggaccatcgaggaaactgtgagaggctccagggaggtgaccagtggaaacgcattgggcagcctgttggccgaaagatgcaagcaacttggagagagttcacagaaccagggaaagcagtcaagatgtgaagcatgactgaatttggaagtggaagggaaaacatgacccaggtgataaaaagggggaaaaaagacaatctggagaaagcacatgcaagagacaaggagtcctggctgcaggagctgctaaaagccgacacagtccacaaccacaggagctggatgagggcgaatattctgaagaacaggaattcaaaatcaaggtccttaattttactgattgaccccatcccttagctgcccaagtacttcctgaaatttgtaaagatttatgaaacaaggagacccagatgtaagctcatagaagtacagcggaagtactcacagaagaactaagcttacttactacctacttacttactactctatgagaagtaagctcatagaagtaatgctgcagcggaaggactatagcatcaggagtcaagagattgggttctagctttgtcctgtcccaaccaacactgttctccaagaagtcacttgatttctcccctaatgtccaattctgcagcaaaaagagggtggaggaggggatagttagtgggaacctgctgtatagcacagggagttcagctccgtgctctgtgatgacctagaggggtaggggaggtgagagggagggggtagatgtatacttacagctggttcacttcgttgtagagcagaaactaacacaacattgtaaagcaactctactccaataataataatgtaaaaaaaaacaatctttgtctccctattgcagcctgagacactgtcttcataacgtttggtcacttgtttcttccttcacactctttcaccaggatgaagattagagctgctgactccccactcgcccatcagcaccatgttttgactttgggtgagttgcccttgacagtctcttgctgttgccacttgccagctatcaacacagtgaaagccacggtttttccggtaagtcatgtacagatgtgagagttggaccataaacaaggctgagcatcaaagaactgatgcttttgaattgtggttctggagaagacgcttgaaagtcccttggacagaaaggagatcaaaccagtcaatcctaaagggaatcaaccctggatattcttcggccacctgatgggaagagccaactcactggaaaagaccctcatggtgggaaagattgagggcaggaggagaaggggatgacagaggatgagatgattgactggtatcactgactcaacagacacgagtttgagcaaacactgggagatgataaaggacagagaagcctggcgtgcttcactccatgaggtcacaaagagttggacatgactgagtgactgagcaacaacaattgcttctgtcttatgttttggttttttggcctcaagacacatgggatcttaactccctgaccaggcattgaactcgcaccccctgcaatggaaggcaaagtcttaaccactggactgccagggaagtccccactttcatgtgtagaacacaatgtgtccgtttccttactctacttcagcaggttgggctactgcttaacctgggaggactctgctggttcccacttaattcaatggaaagcctgaaattctccagtcttggcactctggatggactgatgtctcaatagacattagccaagagaaggctgtgcaagggctctgatgactaagagtcattcatcttcccaaatgactaggaaggatcatcatacgtaattccaactgagctacactcagggagaaaaagcacaatccagtgaggcaatggacatgatggtcatctcaccaccacgaccaccacccctgccccaagtgtatgctggccactgccaaatccagacaactgccagggctctcttggatactagtgagtgttggcctgaccacccaggcttaatgcctcagaaatgtccacccagaatgagggaaccattgaaagaggagagaccaagctactgctctcttgaggtcaaagggcttgggtgtgggaa

SEQ ID NO: 31215 - DNA, 1538 bp, Bovine  19866880806512
  misc_feature (1)..(1): n is a, c, g, or t
naaataatcagcgtcacatctagaggcatcaggccaggcatcacgcagggcaaagctgcaaagcaaagacggaggaagcaaagcctgtgaccgactgctttttccattctctctacgaggaggaacacatgatgttttctggtgtcatttttatgaacattctctgggctgatgtcggctcctatcttccttcatggcatctgcagatttaggtatttcttagtgaaaatcctctttagcttttatggatgttttcagagtaatcaaattctaggatttctatcacattttcccaaatctgcggcctgcagcccatcaatgtacaggcctgaaaacatttttttttgctagtgattcttccttcaacatggagatgcgtaagaactccaacttgcagggtgcagaggaacattggttttaaaatcagagcaacttaggtgtgagacttggatctttccgtcttcagccttttgaactcccatgagttgcttaaccccttcttccctctcctttccttccttctttggtgtgatgcttttggtagcagtaaggtccagagtcaaggcgtcttgggagcagtggatgaagcagtgtattttaactcattcatcatagaccctggctccgtataaacactcaataagtttttgttctgtatccctgttcactgagacagagcttccacctctgccccagccttgaaacactggaagaatctctttctgcctcttttataatggagcccagaggtttaaataaattcagatgagggcattaggcttgtggactggcctaccctagacgtagcctggttctacctcctggggactcactaaatgaccctgagtaagagatttttgtctcagtttgatgagaaacaagaagcccacttgccctgagcctccttttcttttgcttttggaaacatgaatgtgtacaccagagtaggaatgcctttgaaaaaaaccattcaactgtgattcctggctcagcatttaagactttctcctgggttcaccctcagaacagtctcccccctccttttgaccttgagggagaagccaagaggtggggcttgtttataaagggaggaggagcagcccacagctgcaggcctcggatgatggcctgagatgccagatgctgtgcagagggacagcttccccagtcctttcatctgagattacccttggctcacacccttcactgcaaaaaggcaccctgggatccagtcgtagaggagtgggctgtgtggaactcatgggtctcagaactctaaccttctcccagggctgggaggggcatccagaggttatccagtctttgcttcaccacatcaccagtgtcttggaactcgatgataccgaaaagtcaatgagcccaactcttccctcatcctaccattttataaacgaggacacaggggcccagggatgagccaggtggtgtgatgtaaacctaagacagggccctggagttctcaagtgctggcccattgcctgcaacacacacagacacacacacacgtgcagaatgcg

SEQ ID NO: 31216 - DNA, 1333 bp, Bovine  19866880810159
  misc_feature (1)..(1): n is a, c, g, or t
nattcttcatataagggatgtcatatgatatttaaacacattgtttaaagttaaatttctgatttgcaaatgaactggtgccacagatgaatccagaggaatgacccttgcatgcatttaattccacagagaatacttttggaaatccattgataacttctggtctgtgggctgttccattggcataaatatcttagacatggattcccagggatgtgatccagtttcttggcaagaggcgtttgtgctgctattataattatcttcatcagtgtcattaccaacccctacattgtaaaaccatactcatggagactcttggtgacaactgatagcaaacccattcaagctggcttagcaaaatcagcctttattggctcacgaaacttgaaagtccagaagtagaggtggattcagtcattctacttaaataacaccgatccttcagtcttcatctcttacactgctttaatttttctccatagcacttgttattacctgacatggtgttctgtgtctgtgaaaagtgaaagtgctagttgctcagtcctgtctgactctttgagattccatggactgaggaaccccatggactgttgccctctaggctcttcagcccatggaattgattctccaggcaagaatactggaatgggtatttccttctctggggtatcttcccaggggttgaactcaggtctcctgcattgcaggtggaatctttaccatctgaagcccattctatgtctcacttcagttgctcagttgtgtctgactcttggagactccatggactgcaacatgccaggcctccctgtccatcactaaatcctggagtttgctcaaattcatgtccattgagttgatgaggccatccaactttttcataccctatctcttggtccggaatttctagagttattagtgtcaaggaagtcaaatataatctttgattccaaatgcaaaatggttaatttttcaatgtatagctctttcccttaatgttttgtttgtgtgggaatgatgttggaagctatgcaactcatttgtaaacctggacccaacctgccacctggcttctggaggaaggagggcagtggggtgaggacaagcagtactctttctctgcaagtccttggggatgaatattttcacaatgtaccacaaccagaaaacgaagcttaaatgagttggatgggctgtttgatttattacctctgtctctgccaacagatttgtttttctatgtaggaagcctagacgaggtagacttggaggcaggttccatttagtatgaagtctgtccaagtcttgttagctctgagaaagaagc

SEQ ID NO: 31217 - DNA, 1152 bp, Bovine  19866880840814
  misc_feature (1)..(1): n is a, c, g, or t
nttccgcctggagcccagatcactgggttggcaggaaacctctcatttcaaattgtctgtggctttttctcgcagccagcttcaatctctactgccatgccccaaatcagtacattcccaggaggtcacctgcttaaaggtcggggcagtaggtcaaccttcaccctgaccttgagaaagtcaagccgccacgcttggtcagccatctgtacgacataagagattagaggcttcactcagaatcccattaacatttctggactgtgcggctctgaattcccaaacctaaaatgtggcaagactctggccagaagagccctttggagaacaacgttatggaaatattggcagcacttcaaagtcacccaggaaaaggtaatgacccctccactcaccaactttgtatcctgggctctgaagacatcatattgcagaaggagatgattttcccgaagttaagagaagagctgtctataaggagagcccactggctatctgcttggggagccccgaaacactcagggggtgtctgcagtgtccacaaggccgggatgcaatgatacacagcgcctctagtgggcgctgctgctcagcccgctccctccttcagcctggctaccaaaagtacacatggctgcggtgttatccgtaagaaaagaaaaataatacaaaataatacaggtgtgcaaatactaaaagaaatatggtatatatacacagtggaaaattcagttcagttcagtcgcccagtcgtgtcccactctttgcaaccccatgaaccgcagcacaccagacctccctgtccatcaccaactcccagagtccacccaaatgcatgtccattgagtcggtgatgccatccaaccatctcatcctctgtcatccccttctcctcctgccctcaatcttttccagcatcagggttttttcaaatgagtcagctcttcgcataggtggccaaagtattggaatttcagcttcaacatcagtccttccaatgaacacccaggactgatctcctttaggatggactggctggatctccttgcagtccaagggactctcaagagtattctccaacaccacagttcaaaagcattaattctttggcgctcagctttctttatagtccaactctcaaatccatacatg

SEQ ID NO: 31218 - DNA, 1150 bp, Bovine  19866880877589
  misc_feature (1)..(1): n is a, c, g, or t
naggcgagtcttgctgcttgttacaccattcacatcgtcaccctggcctttggggtttgatgttgggtaccactttcctatggcaggaccctgactatctccacttcagcctgcaggtgctctaacctcagggctgccatcctgaaacatggtctcactgggctcattccatctctaccaacatgcgctcaactacctctgctctcacccttggcttcccgccttcagcccatactcagcttgtggtgtggacacagcactaggaccactgctctccaagtctcaccagaagcccaccctcccgcctctcatccttccaccctacaactcaggtgggcacaaacacaggtggtgtgagcacatggaaaaaggttgggtgagtgggtgtcaccaactttcttcacatttgccagaacctggctcaaggtcttgacccaggatactcctgcacccaaaagctgtaagtcatttccagtatcttatcaaggagtcatgatgtcaaagatgttgagacattccatcttcctgattccttctgtacaggatgctcagtggagaatcttagggtatcaacttactgtccactggccaacttctaggaggttatagaaaatgccaattgacggacttgaactttctaaaccagaagtgacaacaacctgcctccaataaattgatgctagctgcttggagcaatgtgttgggaagaattctggggaagcggggcagtggggaaccaagaagggtcctcagggagcggtactggggactctcagtcattcctgcctccattctggaacatacttcagctttgattccacaccctcattcctattccaactaggcagctggtcctacgtctcttttattataaaaattctagggccttacctatttgaggccaaggtttaggaagagagtcaagatcaattggcagtattttcaaatacatggatgtgagaggagtggaggcccctatgccaaatgtttgctttccttgcatctaaacagaaaacaaattttcatacattcctcatgctattgtattagtaggacagtgactacagtttatgattagtgtctgggtcttcatgagagacccagatgggagctgagatggattatatcctaaatgaagttgacaatgcat

SEQ ID NO: 31219 - DNA, 744 bp, Bovine  19866880880358
  misc_feature (1)..(1): n is a, c, g, or t
nttcctggggctcttatattatacattccagtgagacagcacgtgctcaaggagaccaattgtcaggtctgaggcctttatcaccatcatcagggcagggagcccaagagcctgagccaggggagcctgggcaggccctcttctcctccctctctgccttggctcagcccttgtaccctcagagcactgcagcctcgcctgatggtctccatgttgcaaagagggtcctggaggacaaaggcaaagggtccaggtgaggtgtatccaaggaccggaagattccattgcacacctcttgggcaccacaggatccaggttagggagaggctccctctctgccctgtctcggatcccacttcaagaggactcaggcagctgctggccctttaaacagagccagctcccaccggacactcttaaagctcacttcattcatgaattaagtccctgacatcccatatctgtatgatcaatatgtttgtttattagcagcagctgctgtgttttagcgaaggcagtgggccccagtgagagggctgcccagtaaccacagagcagggcctgggacagggagaagagaggcctcccgctggccgatgggacctggggctggataggatttcatggtaatggtcctttaattgaaatcactgctccagcagcctgttgggtaggggagctgtgctgatggctcctggcccggcccccctttcaagaggtccattaactggtggggcgtgctcc

SEQ ID NO: 31220 - DNA, 1352 bp, Bovine  19866880897105
  misc_feature (1)..(1): n is a, c, g, or t
ncctagcgcagggtaatgatgggtgtttattgccagccacttacctcagcgtcatggacttatagatgaaatacagagaatgggctcctttgtctggaaggaccccaccccagaactcggagcagagatggcagccgcagctgctcctactgaaaaatatggctttctaggtttttctctagcagaagccctgatggacttgcctggaaggaagggtgtctggttacagggctgggctaggagcttctcctctgggagtggagctgaaaagagggggctgacttatggggaaagcggggacgagggactgttgcttgctccctctcattggtttaggagggaggcttagctcaatgtggcttgcagagaataggaccaacgtgggggtgggccgttctgatgcacctgcttgttggatcctaaccagccccgttaagggagctataggttgtaaaggtaacagtgatgttttgccttagccttcgtcaccagttaggtatctccaggccgtttgccaggcagtctctcatataacgttttaactgaacataaattaggattgttcccttggatttttcttcaatcctattttcaaatccatttagaataagtagcagagtcccgagaaggctgtgatgccaagtttggcgagcccaaggaggaaaggagtgctcagataccttgcatgtgctaagttgctcagtctgactctgcaaccccatggactatagcctgccaggctcctctgtccatgggattctccaggcaggaatattgcagtgggttgccatgccctcctccaggggatcttcccaatccagggattgaacccgcatctcctgcattggcaggcagtttctttactgcttgtgccacttaggaaggctgctgaaacacattatctgtttcctttctttctagaaagagctagatgattccaaaatggattatcttgggaactaaggcagttaagtcctggacccatatgcttgaacttgtcctgagagtttcagttagattaacctctgttggatactgattcccaaatcacttatatctaggtgaaatctaagcttgtcactttgccatttccccctttttatcccaagaagaaaaaaaaaaaatcacatgatttcatttcccccagagtacctgaaaatgctaagacattcttgagcatgtacttcggagctgtaaccaactagacagaccatggtccatctccctaagctaagacaacctgccttcctgttgaatctcatgacttcatcttcttctgtgctcaccaccataatcacatacgcaaactttagtagcttcatgcagttatgctaattaagtaattagattta

SEQ ID NO: 31221 - DNA, 1554 bp, Bovine  19866880903462
  misc_feature (1)..(1): n is a, c, g, or t
ntatgatactgtagggttaaacgtaatcaatgctgattgtaatcattaggaattaagagatttcttctagtagtgagctaaaaatggcttatgctaataaatcaatgagcaatgagaagggaaagtgaaaagtctttgggtaataggcccaggagtggaagtggtagggagggttgtgtttgtgcagaaagctgccggcagacatgaccgcagaggtgtcacagtaacagaagcactcactcctggaatagcttgtcagactccaagtatctgaccaccaaggggctggaaattaaatagactgtgggtccaagggtattggctgacaagatctgggggcctcatcagctatgtgactttaggtgagttgcttaacctctctgaactttggtttcctcatcagtaaaactagggaataagtgtacatcttaagacagttcattcaccaattttattaagtacctaccatgtgccagacactgttctagagactggaatagcatagtgagcagaacaaagcccctctcttgtgcatttaaccttccaggggaaggggacagcttgtggataagcaaatcaataaatgcttgtcaggtaggaataagagccataaagagatatgtagcagtgtaagggggacagtgagggatggaagctaattttataaatggggcttccctggtggctgagtagtaaagaatctgcctgcagtgcaagagacacgggtttaatccctaggttgggaagatcccctgaaggaggaaatggctatccactccagtattcttgctgggaaatcccatggacagaggagcctggcaggctacagtccatggggtggcaaaagagttacacatgagttagtgagatttagaggatccagtggattcaaatgacctgccctgcagtcagcacatgggtgatccatgaggtaaggaaggcagaaggcctggatcctcctaaatagtggaagtgttgaactttggggatgctgatggcttaagcagtttcctgggactgatacacaagatcctggaaagcaggggtcccaacctctgggccacagaccagtacctcctatcagatcagcggtggcatcagatcaggaacaaagtgcacaatgaatgtaatgcacttgaaataattctgaaaccatccccccgcctccgctccatggaaaaacagtcttccatgaaaccagtccctggtgccaaaaagtttagggactgctgaagggtaccttgcaggaacaatgcttgaaaccagcaatcccaggtgctgccatttaccctgagtttgtcaaaagccagccaaccaagaatctgattcccaacatccagtgaggcaatgatggattttgattcagggtcaggactatggtgggcagctctccaagttcaagtccaggctctttggacctcagctgggcaggttatttgtcttctcctgtgcctcagtttctccacttaaagaatgggagaaataatagcactgaccttatgagattctgtgagaattaaatgaagaaatgtccggaaaatagctagcacagta

SEQ ID NO: 31222 - DNA, 1602 bp, Bovine  19866880952592
  misc_feature (1)..(1): n is a, c, g, or t
nctggagagccctgatgtagagaaactgcctgaaaatgtaagccctagctagagattctgtcagggggtttggggagtagggtctaatagtctacattttaacctcgtctctcaggggagacatactattttacattcattcagagctctgtgtattacaaaatgctttcacagggtttaagttcagattttcgccttcggagaatcgagggcagttccggggggccgttttcttgcggtctcctaattcacttttcattcagtaactatcttgctggaattagagttatttacatgtgctctgttactccgactatgttgtgaacaccgggagagagacatcattttcatcagctttgcatgggacgaatgcttgtcttatcagaaaggatcaatgactagttgaattttgtccagatagacatgtggatgtcattatttgcccagactttgggagaccagataactgagtgatctccacagtctaacttttcctgcaactaatctagctatatgactgaccttcaaaacagccattccgatgatgtttataaacccacacaggagaaagaaaaaaaaaagaagaaaagaatctgttttgctgataattaagctcagaaatacacacgcatcaattattcagttcctacaagtcctcattaaatacagggtttccaagtgcagatggcaaaataattcaaatgaggactggtctcaagtttatctgcatgttcaatgaaagaaaaataaagtatgttggtggcaggaggaggggggttgttaagacactggttaagccagctaaaaatgaaagtgagatgactggcaatgcataactgagtatttacagtttcagcaaagcccagagaggagaggatccagccacaaaccaccttcctgaaatgctatgatgtagttaagcatcacatacacccaaaatcaaaggctatggaatagttgagacccagaaacttttcctttgctatcggtctaaactgctgcaattaaaaatagactctcgtttggtttttcttcttttttactgcttcgtatgcactttacggagcactcaataaatgaggttttattgggtttttagaacacattcttgcagacctgaattccctaggtttaaattcatcttgctcctttattttggaggttcaccacttaagcctaggtccttctaggaaaaatttgcaaaaggaagaatctgatccccttccaactctggtcggaaaggagactgcaattacgcttgtggaaatgtacacagttggccatactaagcttttgtggggacaaaggaaaaggtagctttcacatattggtataagcactgagtagagaaacgtgttgctgtctgctcaaacctaatccaaaacatgcacagtctaagattcagcaagtcctcctccaggtattaacccagaagaagccccagcacatgggcacatggaggaaacaggtacagtggtgcttgggtcaccagattattgcattaaatggtgaaacaacaggggacctaaacagaaacagtgcactcagatgaaggaattactctatagcagctaagaaagatggatcttaaaatctttgcct

SEQ ID NO: 31223 - DNA, 3669 bp, Bovine  19866880977703
  misc_feature (1)..(1): n is a, c, g, or t
ncctactctttgcttgattctacaacaaccttagcccttatttccttcaaaagatgggaaaactgaggctcagagagtgttaggttcacagagtggcagagacaggctttgacttcacatctcattgatcacagagctaacactggtatacagataccagcagttctcaaagtgtgatttccagaccagcagcatcagcctcacacgggaatctggtaaaaatgcaaatttctcaggctgtatctaactccccagaaatgaagcagaaactctggggagagggctcagtaatctgtgttttaataagccctgcaggtaatgctgatatgcacaattcttcaaggacacttgggcttccctagtggctcagatggtaaagaaaccacctgcaatgcaggagacccgggttcaatccctggatcaggaagatcccctggtttggcaacccactccagttttcgtgcctggagaattccatggacagaggagccttggcgggctacagcccatggggccacaaagagttggatgcaactgagctactaacatagcacacttcaagggcactcagcatacaggggagcatggcctaaaagagagattcccaaagtatgtccccagacaagcagcatttctaacttgttacaaatgcaagttctggtcgccctacccccagactgaccgacgctgaaactcagcatgcggggcccccaggactagtgtaacaagccctccagggtggttccaatctgcacccaagtttaagaacagctttaccttctgttgcctcttctttgtaagcaaagtgagggccttccctggtggtccagtggttaagaatctgccagtgcaggggacacaagttcgatccctggtccggaaagagcccacatgccgccaggcaactaagcccatggatcacaaccactgaagcccacacacacacggagcctgtgctctgccaagagaggccagcacagtgagaagcctgggcaccgcaactagagagcggccccctgctggccgcaactagagaaagcccatgcgcagcaacaagacccagagaagctaaacataaattttagaaaataagccacgtgggataagaaaagacaccctcagcttgtccaagtgcacagtgacaaacaagctccaggaatgaaatgttttaatttgttataggtgtgtgggggataggtggacaagaaggcaagacagagaaatctgaagatgcaggacccaggccaaggtgcagagtgctgcagtcctccagaagggaacatagctttagcatcatggaaacagggccattctcacatgagaagagaggaaaggtgaggtatttttttgtttgtttgtttgtttgtttctggtgatatttattcaaaaagcaaataggaaccctggtggctccatggtaaagaatctgcttgcaattcaggagacccgagtttgatgcctaggtcaggacgatcccgtggagaagggcatggcaacccagtccagtattcttgcctggagaaccccagggacagaggagcctgtcaggctacagtccatggggtcacaaagagtcggacacgactgagtgactaacacacacacatacagcagaaagacaggtggcctcaggtaaattcagtaaatggcaatccatctgcaacagaaacatccgagaccaaaagggcttgtctttgtctcttgtggacaggaaggcagtggcagcctctgatgaccactagctgtatactcagcaccacgggtcatgctttccatacacgatcattttccctcatgataacaccccttccctttttatagttggggaaacagagatgctgagaaagtaagcattttgttcaaagtttcacagtttgaaagtgagaagcaggatccacacttgccatgctattggaaagagccagtggtttctggtctggcactgtccacgaaaacttccgtataaagggaagtattcagccaacatggcagtcacttgtcttgtggttactaagctcttgaagagtggctagtggtactgagaagctggtttttaaactttactcaatcataattaaagacccacatgtggttaatagtcactgcactggagagctcagctctcgaccaatggtgagttccatctttgatttcaggctgatccttgtccctgggtgactcaagctcgagagaactggtgacaaaattctagcacaggccctggttacagagtagcaaacaccctttttcccagatcgccttcatccagcatcctcttgctggtggatggtgatgtcaatggccacctggccttcctgtggctttgacaaagcaaatctcttttttccctggggcacccccagcccaccatcacactcattataaagcgtttcctaggattatagttggccagtcacaaattaaccctagtctttaaataggaggatagctttatgcaagctactgaattcttagagtctccatttccccatctataaaaatggggagaacataattagctttgatggttattgaaatgaaatgagctgatgtataatgtaaggcatctcctccctttcttaacatccttacctgaccctaccttccacgacaatgattcctctaagatctagaagcttcccagctttgagggttattctgactattcatggatgataaggcacctcacagatctgccttaaagagtatttccccaaacgccttccagagtaaagagtccagaatccaagagcaattgtacggtcacccacaagccagcggccccagtgctctacctcttacttgcctgaattagctggtctccccagatgggttagaccacaccagccacctcacacttggcctgaacggagaccacctgagaggccctgctgccatccaccacaccaacaactccacacagcaggggcccctgcccagccgagcccatgacgaggatgtctaaaatcaaattacttttgctttcatcaatatgaatgtcaataaaaagttattattcagtcagtggacgttttaattaccaaatgtcaagcactgacacccttccattagcagtttaatggtcaagagagacagtcctgaatggaagcccagaagaatccccagccctctctttccctgcagaggaaggatcccaccagaactcttaacagtaacagcttggcactcccttctcaaacgtctctaaagggaatgctctctacctcttgaagagcatccctgcagcccaaagttttctcgagcctgctggaatctcccctggttcagtcttcgataggaatttgcaagaacagttgacgccagtttacaggcaatgaagcagaaagacactgagtgccagctgggggcgggggtcctctgagaaccccagcgtatggacgatgcctgggtccacagacaaatgagccagcttccttgggcctcagtccccaggcctacaaaatagggagtgtcacactcatgtcacatgagatcatgtatgtgaagaattcagctcagagcctggctgcatgtatggaagaaactggttttgctgttgatggtgctatagttgctactacaaaggagacatcattaagtgaattttcctccattgagtccttttttggtttcccactacattcatataggcgtcttcacttcactcat

SEQ ID NO: 31224 - DNA, 3290 bp, Bovine  19866880986191
  misc_feature (1)..(1): n is a, c, g, or t
nctgtgctagcggtgttctctattagtgttctctttccagaagccctttccaggagaagatggccatcatctcccatttcctctgaatgagcacatgaggtcataccccctgatgggagatgggccaaagagctgggaagttcttcccgttgtgctatatgcttgtgtgttatttgttcagtcatgtctgactctttgcgaccccatgaactgtaacctgccaggctcctctgtccatggaattctccaggcaagaacactggagtgggttgccatttccttctcctgcagatcttcctgattcagggatccaacctgggtctcctgcactgcaggcagattctttaccatctgagccacagggaagcctgctacattcttaatggtcaataattaaaaacccaagttctacccactcttagccaagaagcctggcatccaagtgcccttctgtattctccccggctgctttatttttaagatatttatttatttggcttccctgggccttaattgctgcacgaggggtctttacttatggcctgtgaactcttagttgcagcatgtgggatctagttccctgatcagggatcgaacccaggtcccctgttttgggagtgtgcagtcttagccactggaccaccagggaaattcccccagctacctttaatgcaggacttcccaaatggtgctctaggcatttttaaggaaaaagaaaaatccatgtcaaataaatgtgggaaagtctggagcacatgccttttttgttttgctgtgggattctgagagcttctattggtgtaggtcatttgcagttttgccagaacatttcccatgtttttgggtcaccgaacttgattttggggatacacttgttaacatctctctgtggacacagatgttcattggattgcattccaggctgttctgggcgtctagggttctgtttttgcctccccagcagacgtgggaactcacgtgacgtgggaactcactgtgcccagatgagcctgaacctgtttggcacatgctccatcctgtttcttcctgagcctctgggagggacaggaagtggccgagtcccatgggaatgcccagagttggggtggtggcactcatcaggatttctggcagagcactgaatacccttcatgcaagcagatctgagggctttgtcacttgttctctgcctagaagctcttgcaggtgcctttagcactttttaagcccctagatctggagatgctggtcatggccaaattttcactgcattccttgtttccaggcagatctggaacttcagggagtcgtctccaaggagaaatgtacaatccaagatgcaaatgccatcctcccaccccacccccgagccgctgtttccaaaccattgtatgaaaggttaaagcatctctgaatttcacgaaggggccaccttttcatcagaagagaaagtggccctggactctggtcccagcctactagctcagcaaccaggagactgtgggcagggcatgcaccttctctaaacctgagataagaaaatgagataagaaaacttgataatgaaaatgaaaaccacccaaagtggtattttttgggatgacgtggcatgagcatttgaaaaggctctgtcacttcgcctaagtggcatatacatggccatctttgccttgacaacaatatttttacaacagatcgttacaattcctgcctcaaatatgctgttcagggaaaccagcttgatggtgtcaaaaatagaggttgccaaggcttaaagttatttctgaaaagataaggatctttccctccaatgaaatcttcccccccaccaactctaagaaaaagcagtttatcacccagatccgaagccacagagatgctcttagagtcaggactgtaatatgttggttgtcaggaaatgatcgatgtagatgagcagagggcttagaccaatttccttttgggttaatgagactgaaaagctctgggctcaaccaggggatggcagagagattcatggtaagatttttgtgtttgttttgtcttctctgcttgccccgcctcccttgtcagcaaacattattttgttgaaactacagtacccctgaacccctatatacctgcccaagtgcatcacttatgttatttatatatctgtgcccatgtggtacttgttatacagttagagttctaatgcctggttgcttaagtgacctcctttttccttgttcttataagtacacagccccttcattctttctcagcagacctctacataggactttcagacataaatgtacatgtttataggtcttgtttatatttatgcatatatctcatgttttggacactgatcattgtcagttcacatcttttggctataagtaataggcaatcctgacccacttgggcttaaacaagaaggcaatttgcaaccacataactcaagcaaataggtaggaaaggctcctggtgaaaaacattaggactctaatcctgctttcctgagattttcttgcctctgcccttctgcatttggctttaccaccagtggctttcctcttgataacataaaggttgcagcagctccaggcatcacaatgaaacacatggattggggacagcacagaattgtatcttcttgtgggttgattgaaactgagaaaaccttttccaagttccccaagtagattttccctcctgtctcattgaccggaattgtgtcatctgtttattcctaaaccataaagaaaatgggactaaaacaaactcataggctcctctaaatacacccctgagcttggagatgcaactcacttcccctgaggctgcctggaggggagtgattgcctccctggagtcagtctgtcagcaagaaagaaaggggaaatggctatgagaagcaacactgcccaccaccccagttccttccccagggtcaactcctgctctgctaggagtaagcagaggcctcaaggagtagaagtggggtggggggaagatgagaacattgatctcatgcaaattttactcctcctgtatctccccttagggaaagcaaactggtaatttgtggtggttgtcagtgatgttctggtctggtaaattgtcctgctaattttcaaggctatagttatatgcccgagcagagacagatttcttcatatggttttagctggctccgatgatcttggctgagctagctgtgtgagttcctgggagctgctgtgtgatactttggaagcatcgtttctggggagtaggtgggagcaagggtggcaaagagaaag

SEQ ID NO: 31225 - DNA, 1906 bp, Bovine  19866880992294
  misc_feature (1)..(1): n is a, c, g, or t
ncccaggtatatcacacttcatcttgaccccaaagtcagtgagttagggacttacaaagattctcatattatagaagagaaaaaaaggctgagaggcttaactactcagaggcagagttgggatctaaacccagaatgtaccttcacattcttcccttcttgccctctctcccattcttcctcgcgggtggactcaccccaggagggtctcctgagagcacctggtcccttcccgcatcccctctgccctccgggcttcccaggtccacgcctttctgctgaacaagccccgctgctctgacctgccacacatttagctgctgagcacgtgtagactcacatcgtgcttttaactgcaggcaaaacccatccctctgggaactgtcccagtttgagggtttttttttttttttttaaaaaggcagtcatgttaaaatagagattaatgctatagacagagagagacatgaaaatagatccaggagggatggtagatagcctatctgaatagatcccagagataaatacatggaaaacatagagaattattgttgggaataattctccatgggaggctctatggataaatatatagaccagggatagtggaatcatttagaggaagtgagatgaaaacagcacgtgggagtccgcaactgtgagagctgtgctgaatgggcctgggccttcggtaccacacgtttggtggagttgttccaagaggaggtcggaaatctgcgggcgggctgttatcttccagaagccacatggcagggtgtcctggggagagtgagaggggaattaactggggactttgtgaggggttctgggagcaggatgggagatgctgaggcagacctatgagacagcatcatcggggtgggctttgtaagttgacacggggatgtgaaggccgaatggagcctggggaaaaaggggctagactgaaaagggcagtgttcccagggacccacagagagaagttcagggctctagtccttgagggcatctggagaggagagccaagtcccccacccagcaggtgaattggtgcggcaggccgtctgcacaaacatgggacatatgcctggaggctgcagcccagtgtcataaaaaatccatccccgggtagcactgttcctgtggttgatgactgtggctctgtggtgattggatctggacttggctcaggccctgcccaccagtatccagggaagattgtgaaaagctggggtgaacttgggacagagctgctcacatgttcttcttctccccaccctggtccttgccctgtttatccagaactctgcggctctgtttgacagacattcctgactgggctgtttggctgtagaatgttctactcaagggcagatgaaaagggccaggaggctgctatgattcagaaaggtgggacagtgctcatctctttgcatgaatgctaagtcgctttagtcatgtctgactctttgcaacaccctggactgtagcccaccaggttgctctgtccatggaattctccagacaagaatactggagtgggctgcctaccacgccctcctccaggggatcttcccaacccggggtttgaacctgcattggcatgtgggttcttgaccactagtgctacctgggaagcccactcatctctctatggaacttcttttgtttcttagaatgattgactaggaaaggggtcaacaatccttaagtgagcactttgaccctggacactgattccatctttacaccccaccctccttttccaggagaaaaagggagtaactgttgactgtttctgacagagaccttgccatgatagccaacgacccataattctcccacgcatgtcaagagtatccactgactatcttgccttattctagggtgggttatgggctgtggt

SEQ ID NO: 31226 - DNA, 659 bp, Bovine  19866881002953
  misc_feature (1)..(1): n is a, c, g, or t
nctggacgctggggatttccaggggatagcgtgggtcaagagctggagagatggtggcccgggtgcccaccgtgggtctctggaagctggtgagcttcactcagcctgttctctgctccaaggatgtgtgtgtctgtaggaagccagtgggaggcagggagggtcacaatcacgtaggcttttcacggccacgcagcagtcctctgaaaaatggtccctctgaaaaaatgaagcttggggaggcagtttgacagggaagagctggttgatctttcaaggcggagggtctaagatgggactgctggagaggtcagtgactggaagggaggaagtggcttcttatcccctgtgccactgaaggaccaaaagggcaactgtggggacagggagccaggagtagattgggagtccctctgtgggtgtctccatccttgtgtcaggactccaactctttgcctgggagttgggactcctttccttgaagacaccccaacacctcagagccaggcaactggattcccacaggagctgtgcagagcggcaggtgggggaaggtcagaggtcacgggtaggatgacccttcctcaccccttctccccagtgccctgttatatccgtggctggtatgactgaactggggaagggtccagcctcctggc

SEQ ID NO: 31227 - DNA, 2307 bp, Bovine  19866881004239
  misc_feature (1)..(1): n is a, c, g, or t
nggtcatgtgtaaagtgaaggcccaacactgctatgtttaaaatggatagccaataaggacatactgtatagtacagggaacactgctcagtgttgtgtggcagcctgatgcgagaggagtttggaggagaatgtgtgtgtgctaagtcgcttcagtcatgcctgactctttgtgaccctgtgaactgaagcccatcaggctcctctgtccatgggattctccaggcaagaatactggagtgggttgccatgccctcctccagaggagcttcctgacccggggattgaacctcaatctcttatgtctcctgctttggcaggtgggttctttaccactagcaccacctgggaagcccttgcaggagaatggatacatttatgaatatggctgagtcactctgctatccacctgaaacgatcacaacattgctaattggctatattccagtataaaatgttaaaataaaatgaagtgaaggcaccgtggggagaagggagactagaggtaggtctggatcttagagaaattccacaccatagggcaagccaaggagtggccttactattgtatggctgaaatggagaggaagtgaaggtcactgataaggaaggggttgaagaggagcagtgccaaggcatcatcagcactgtttcacgtctcagaactccagtgctgctctcaaattcaacagcagaagagactttttattacaaccttgcagaaagagattcatcataaaacctctggcgcaagtcccacttggcttctccatccaagatgatatcacagtgtaagaagctgtcaggaaggaagctacctgagctcatggtggagcatcttgaacattatgatgatcgctccgagttgctacaccctccatgagtcacattcagctttgcaccagtttccccagatgggaaagtaatttaaaggcactagtcaaatctaccagcctaggcagagaacagaggtgatgtgcaaacacctgatgttccagtgactctgccatggtatcgcaaggagccaggtatgtaggcagcctgggtgcaggcagaggcatacgggctccctgtggagtaatgtaagtggaagaggaagaggagtaagaggcaggatgctgaccctcaggacccagagatgccctggcccatgttaacagggctggcagacagatggggccacgacatggaggaagctggcacagaactagcaggattttgcttccaaactgccagatgctagctacagctttccatctgcctcttcttgtcctctcctttagggtttcactgtttacatggtacacatccaaatacatttgctgacctcacctagggaggctggcttggtgaaaaggtcagcactccaacagttcagaaacgcaaggtgcctcctctctggcgtacgcccaggaagccagaattcacaggggcaccgtttacagtctagagagatcgctgaaacatccagggatgccacggcaagagccatcctcgctactatagatcatgtacaagcttcacctgccactaacccaccttgcagcctcttctgtcctgcttccttcttcctcccatcattcttggcactgtcatgcgatgcaggaccgtcaatgggaaaataaagaccccactggcaaataaagaccccattggcaaattcagcagaaaactgaccccttgggcaaccctttcaaaaagaagtttggacttccagggttgtccagtagttgagagtctgcctaccaatgcaggggaaatgggtttcattcctgatccaggaagattccacatgccgtggagcaactaagcctatgtgccacaactactgagcctactcttgcctggagtctgtgctttgcaacaagaaaggcctctgcaatgagaagcccacgcaccataatgaagagtagcccccactcactgcaacgagagaaagtccacatgcacagcaatgaagtcccagcacagccaaaaacaaattaatgaattaattttaaaagaaagctatctgaagaagtaggctcctacgaggaaaacgggaaagttccaggtgccctgggatctatcagcctggggctgttgcttttgaattaccaggtatgccgcagattgcacaagtcctgccttgatcatccagcaacttgagcctagaaggagagcaaagtgggggttcggtacccaaggaaatgggcactaagggtggctgtgggcactcggtctgaccacacagcaggctgggacacacgggggtcatcacggatgggccatctgcgattatgtggtgcgaggggcagagacacatga

SEQ ID NO: 31228 - DNA, 1667 bp, Bovine  19866881012135
  misc_feature (1)..(1): n is a, c, g, or t
nctcacctccaactgccatcacaccctccacatagctgcacacagctttcctaaaaagataggcttactcctgccttgtctgcacgtgcagctaaacaaacacacgcccattacagacgttattttatagacatgattttaatgtgagattgaaaaacctccttctggacatttgatcaatattacccacatctctggatatccaaactccgtccatggcagtgtgggccagagacgagctgagccagcatggaaatcctccttgcctgaggctgcccatggcttggtcatcaccagtgccagccctccaaggtttttccatcccctgtaagacttggagggcttcccaggtggcgctagtggtaaagaacccgcctgccaatgcaggagacataagagacacgggttccatccccgggttgggaagatcccctggaggagggcatggcaacccactccagtactcttgcttggagaatctcatggacaggggagcttagtgagctatagtccatgggatcgtaaagggttggacacaactgaagcgactgagcacataagatgaaattatggggaggtggagtgatcagccatcatttcactgaatgggtgaaatgggaggacaaagtgaacaagaacatgtttctagtcttggaagtacagcacccccagcctggtgcagtcaaaggtggtccacatcgtgccaactaggattagaaatagctcactagaatcccttaagaatgtctggagagcattctctctgacccctttgctccccagggaccctggtgattatgccccctccccacttccctcccaggctcatcatcagggcctcctcctacttagatgaggttgctcctcctcttccagaacaatccaaggccatgcccccaaatgttttgctcccatcccttcctcagttcagtggaggccgcagcaaaagtggagtgtttccagtttctctgaccgtgcttggttttaagttaatcccctcctcctatccttcccttttgctgaaaattcgtttggctgttcccagtatatctgtatccatatctccagttgtcccctgtcccccccaacatgccccgaccccgtccccacctttcgagctcccatctctttccccttctagttttgatcttctttgggggttttggtttttactttattttgcttttttctgtttttctgtttttttgtttttgttttttataggtttcagagaaattatgttgaatccaataagccttcccggacattccaagcctcttaaccatggcatctatgttgaggatgtcaatgtctatttcagcaaaggacgtcatggcttttaaagactccttttaagcctccctgttttgatgtctccttggtaggctgggccctctgagaggttggaagctctaggcattgttccgtttggagccggggatgctaactagaaaccactcgagccatcggtgccccctgcatcctttatcgccaccaagacgggtgtgtccccgccccccatccaccactggcagggttgcccttcccctccagtcatcactgtgctccttttttttctggcctccaaggcagctcctgccatcgtctttagagccaataaagagaattaaaaacctgtgcaccaggaaccatcttttaaacataca

SEQ ID NO: 31229 - DNA, 1590 bp, Bovine  19866881019721
  misc_feature (1)..(1): n is a, c, g, or t
nctgtttccctgcagaaagtctgtggcctgtgtaacaagcagaatcagagcagccttcttcctggagaaagagtctgccttgttccatatttccaacagaggaaaatgcacatggccatacctggacaaagtgttctagatctttcctgtgctctttcagctgaagagagtccatcccactctcaggatccatgagccagcatcttctatgaggaagcttgaagaaggtcatcaggagggaaaaagcaggtgaacattgaccttcagagttcaaagatctcctttcagaatgatctctacttgagttgcaagttggacagttgaaagggagtccttggccatttgagaattggaagactacaattggagagatggaagcccgagtttaagggtggtactactagctgagtagcttaatattggcagggactcaccagccaatcgaaacgtgttacagtgcaccacgaaaggagagaggacatctacacctgtccagttagctcacttaacaggtgtgcttcagctgtcttcttgaattgagtttccttttccaatgcacaaaatcgtcttcccaggactatgttgaccacgtattacctgttcatcatgccaacctggagaaggcatgaaaacatttggtgccagataggtgctgcagaaaaaaggctggaggacaggaatattctttcctccgtggatactagagacatctgaactagtcatggtacccagaggacgagccaagatctataggcaagcccagtgagttctgtcatataaggaaggaaaagaatctgtacttcaaggaatgaatagttttcaaaataagcaaagaaaatctttgaacagtcagaagataaagccatgttctttagttttgtttcagattctcctagttgacatccagagcttggaaaagaacccatcataaatatttcgagtaaggggctatgagtgacagaagttagagagttctcttgaatctgtatgtctgccagggttgaagagtctaaacttctagaccatgaatatcaacatcagaggttgtcagtcacatcactatggtgataggatgtggaagacatcacccccagtgtctcagagtttgggcagagttgaacctggaggtcgcttctgtaggtacatatgacctgactagggttgccaataatcttcacttgggatctattataacatctataacaaggaaagttatagttattgagttggatcagtcactctagtttctgagacatattcacattctaggtccaatctacaccgtctacattggcggccaacacactctcaagcagagagcaactggaaaaattacgatgttcactttggtttaaggctcacccaaccatggccaccactttccaaatgcaaacaatccagggaaatgattctcaagcatattcaactgcaaagcacctgcaatgtgctttggggaacatttttggacattaatatattaaacttgtaataaccaaagagatatatttgtggtaaattaaattataacctcctcatactagatattggcttaaataaacagtaagtgtcacagtcgtaagacaaaatggg

SEQ ID NO: 31230 - DNA, 1283 bp, Bovine  19866881051037
  misc_feature (1)..(1): n is a, c, g, or t
nacacacacatacacacacacacttccagattggcaagcaccgtcccatgcatggtgtgctggaactggctcattctggcttgtgagagcaaactgttaaactttcaggagcttctaaaatcaagttgttaaacacagccattattaaaaattaattatttcctaattattaattcacagttattttactattgtactcttgaggttatttgtaactatttcacctgtttggtgaaaacaccgtataatgatgtgctactgctcatctcgtgacagctcggcattcaatgatgccactttggtgccttgaaattgaccacaccagaagaatttacagcacagatattggcaagcactgcaaaccatggcttttttcccttcagggaaataattattaaacctatcatcacattgcaactccatcaagtacccagtacagtcaataaagaaaagaccatactgagacatatcatcatgaaattttagaacaatggagataaagagaaaattgtaaaaactttcagaaagaacacatacatttcacgtataaaaaattaagccattaatggtatcagtgtaataataatactgaaaacttgaagccattacaatcatgtcctcagaattctgcaaaaaaaagattttaaaactagaattctacatcgaaataatagggtttaacacagacattttcatacacgtaaggtctcaaaaaactacctcccgtgttctttttctaaggaagcctctgaaagatattatcccccaataaaccacgaaagaatgatacaggaagtagagtcaaacagtggagagaagcacagagaattccgaggataatgtcaaagggaggctccaggatgacaggctgcgggttggaccaggtggaagcaggaagggggaggttcccatcacgggtgtacccaaggaaaggttacaatatctagaatatctgttgggtttgaatgtattaagacgagattgtctgtgctgtcccggcagggttctcagcataggcctcactgagaaggtgatgtttgagtaaagcttttgaaggaggttagggagcaagccatgtggccgtcaggggaagaatagagcaagcaaagggaatagtaaatggaaaggtccagaggtggtctcagacgtctgaggaacaccagggaactcggggtggctgggctggaggaaggaggaggcagagtaggtagaggtgtgtggtgagagacaggaccagacacatgtggccattccgaggctttggctttaactgtagatgagat

SEQ ID NO: 31231 - DNA, 1483 bp, Bovine  19866881117147
  misc_feature (1)..(1): n is a, c, g, or t
naaccccagagtctaaggaaaaaccaaaacttcgttcaaaacaggtttctgtggtctctgcagctgagttccaagtgcaatccttgagtctatgtaagcccttcacactgggactctgtctccttcactgatacccatagcaacggaccacatggtttcccaagggtcaagagggaggaatcacagatgaaaaaataatgtaaggatttaatctttttcttggtctctccaatatcttgcatgtaacatatgcttgcatgcatgcatgtccagtcactcagttgtgtccgactctttgtgatcccatggactgtagccacctatgtctataggagccctatgtctatgggactctccaggcacgaataccggagtgggttgccatttcctttcccaggggatcttcctgacccaaggatcaaatctgcatctcctgcattggcaggcagattctttaccactgagccaccaggaaagcccaacctaagtttgcaaaaggtttttttgtgtgtgtgttgaataaaggggctatgaaaactagatagctataacaaccatataattggtgtccatgcattttacagattcaagttctaggactatatttcctccacccattacagagaggaaatggaggtcatcttagcgtgttgctactgataagcaggcaacctagcatggaagcctagtatttccagtcttatccctatccactttctactgggtcatcctcctgcccatcagtctgaccacagcagtagcagggagaaaaaaattccatggcaaacagagtgtctgactctccaacagaaagctttctcctgaatcctattttcagttcagaggactttaagattaaagtcaaaagtaagcaaggtagaaccatgtgcagcccatatggtccctgtccccctgttttgaggctctgcccggtgaccagatggctgcccattctccaggacacccccctgcctggaatagagggaagggtgttccagacggccagaactgggcagagaccccagaatatcgctggagcagaacccacgcccctgccacatgccatctggatggctgtcccctcaatttttattctcatgaatcctctggggacaagtccagctagagacctgattagccagattcctactggaaaagttctctctggaactgttcccttgttatttatgcaaacgtccctcctctataaacggggcaggaattttaacccaacagaaattctggactgcaagttctctgttgagctaagattctctcatcaggcagcttgaggacttgggtttctccagtatgtcctttgcctgatctctctgacacccacatgagtcacatcgccatgattcttatccaacatagggagagagaccctgattcagagaggaaaggcaacttttccagaatgccctactgtcaaggctaatccctgagaaaggacatctgggtcttatgacatctaaaacaa

SEQ ID NO: 31232 - DNA, 1342 bp, Bovine  19866881160332
  misc_feature (1)..(1): n is a, c, g, or t
ncagtgcacacgtttctcattgcagtggctccttttgttgcagagcaggggctctagggtgcaagggcttcactcgttgtgacactggggcttagttgctccagggcatgtgggatcttcccagaccagagcttgaacccgtgttcctgcattggcacgtggatccccagtcattgggccagcagggaagtcctagattccgcactcctaacaaactcctaaaagatgctgaggctactggttctgaatccattgaggcctgaatcatgttaaataattcatcgattttaaaagtttttttttttttcttccaacttccccagattggggagcgattttggcattgtctaggagcaggctgggtgggcccaagcagagaagcctctagaggaagaagtgaaatgtttgcactcagaggctaatccattgcctcctcccgggtatcagcaagatgtgtgagctggcgctgctcatctctcatgtcaacactcctcttacactgaaggcaggcagtgctgcctctggggatgtgagacagactgatcaaagatcagaaggagccagagttaggtcatgaatcaacacacactgtgctgtgcccctggtggatgaagacaggaagaagcgtgaaactgggaaaatcataggcaggaagcacccggaatccagccagtcactttcacatgcattatgccagttcattcttgatcaaaaataccctcaaagttggcattattacctgcattttctagattagaaaattgtgactcgcagaaggtaaatggcttatcagcctggaaaacatctacatgacacccaaatccatcttttcttcatgaaagcgcactataagtgtcttaaatctttttttaatatttatttttatttatttgactgcaatgggtcttagtcatggtactcaggatctttagttgcaacatgcaaactcatatgggatctagttccctgaccagggattgaacccaggccctctgcattgggagcacagagtcttagccattggaccatcagggaagtcccaaaagtgtctcatattttaagtcatgttgataccgggtagaggaactggggtgacacgtcatccacttctgaatcattttatcatggacatgttggacctgtggtccacctacagcttctttctagtattttccatcctgtgcaattaatctaatgatatggaaacaagaagaaacattataaatggaagctgtgcaaaaggaggcaatgatagcccaagaattgtggagaattgttttcttggttcttcccatctttcagagtctaccatcagaaggtaggaaaaggaaatacatccaat

SEQ ID NO: 31233 - DNA, 1525 bp, Bovine  19866881169332
  misc_feature (1)..(1): n is a, c, g, or t
ngagtggatagccgttctcttctccggggatcttcccgacccgggattgaacccaggtctctcccattgcaggcagattcttaaccatcaaagccacctggaaaacccttccaatccaaggatagatccattctatgataattttcaaacaaatgtgtgattgcagtttttccttaccttgctttaaaactgaccagaggccctgccgtaaaggatctagttgggagctctctttcttgagagtctttcatttagttctcccaagaacccagccctttcatctctgggagtctagggacagcatctctccaggggacttcttgggctgcccttggaattatcaagacagcgttcagtgctccttctaaaagtcactggctgctaaatcaatggtgtgctgcccccgtgacctgtttcttggagttttagaaacagttgttccatggatatatatttaaagaaaatgtcagatttctcccagaggctcatgggactctgcattcatctttgcccgggatcaatacaccagtgagctggctgtgacttatggtggaatgaagacgttccctccaggccgagtcactgtgggagaagcaccatgtccacggagtattttatttctgtcatattgttaaataagaaaagaattatattggaaaataaagaaacccctctctgagggagcagtcgcttgataggggtctttttttttttttttttgaggaagaattgaatgttgagagtggaaaatttatctcttggctggaggggccgcatgttggctcttagctgtggctgtgattaaaatccaaacaatcccagttcctggcaaatggaagagggggtcgtattttcttgtctgacttcctgattagtccacatggcgccatctgccacaagccatgtagactgccagggtctgcccaatggagcctgcgggctggggtgtggggaaggattgggtagttccaggaagaaagactgttggtcctagaggagatggctctgtgaactggggcagccagatcatcgcaagggtagaggtgtgaggcttccagtgaccttctgcaggaacagaaggcttgaactggggcttttgacagcttcttagcacattttattccttcgtgggggatctctgcctgccccaaccagcccctcctctgatccttgatagaagaatgaatgctgttgggattccccatcagaaggctgagtgtgtatgacttttccagtagcagagaaggagaaagaagagacgtctactgagtccctaatgtatacaaggacttcccctgtggctcagcagtaaagaatccgcctgccaatgcaggaggcgctgagatgtggttcagtccctgggttgggaagatcccctggaggaggaaatggcaactcactccagtattattacctaggaaatcccatggacagaggagtctggcggtctacagtccatggggtcacaaagacacggacacgaatgagcgactaaacaacagcagcaatgtctaagaggtccact

SEQ ID NO: 31234 - DNA, 1548 bp, Bovine  19866881184663
  misc_feature (1)..(1): n is a, c, g, or t
nctgacagcgagtcggctgcccaactgtgatcttgaaagcatccaagtcttgattttcagtccctccctctctgtacctatgtttcatcaccccaggaaaccagcttcccaatcagggtccagccacgaagatgcaatctggagcctgtccgcttggtcagctcctgccctgggcatatgctagtcttctcttgcaaaagatggttacaagagagcacagagacccaggagtgtgcccagctggcatcccaattgtgaatgccatagtcactgacttttcctagaggattcaccctactgcttacagaaagcattattctaagaaccgtacgaagctccaagactttggccacctgatgcaaagagccaactcattggaaaagaccctgatgctaggaaagtttgagggcaggaggagaagagggtgacagaggatgagacagttggatggcatcatcgacttagtggacatgagtttgagcaaactctgggaggtagtgaaggacagagaagccaggcgtgctgcagtctacggggtcacgaagagtcggacaggactgagtgactgaacaacgagctccaagcatcaggcgtggccacccagagaacaacaaaaggccacccccttcactctcacaagctctcgggggctgtggcttggtgacgtcatcatgatgtaattctgacttcttccatccacgaatgcagcatataaaagaggccgttcttccttctgaagaccccacaccccctcagcaatttgtctctgcctttcgaatttttcccatgaaagaactatctctttggtcttcttgaagacagtcaactccccccgctgctaagccacaccaagattcgtttgaaattgctgacggatgtggaggaaaagtccaagaaagaagaattccttgatgcagcactagccctacagagagtttgctttaaaaggaacaaaccacagagaaagaagagactggcagaaccagcgagcttctcccagaaccagggagcttatacttcatgatctttgaacgtggactctgcacacaccagtcccacaccagagatgcctgctgcccaccatgggggcgaagtgagggtggctgccctcagcctccttgaaggaaggaagctcccggtcatctcatcactagggctgcttgccgacccccgaagggccccccctgagccgaccccctaaaatccagcccctgagacaaggaagcagatgctgccacccagtgttcctcttgaaggccaagggagtgtttttctacatcgttgatatatttgcttttccctcaattaaattgctgtaaaaggggggtgtgggttaaagccatttgagccatttttattcagctaaattacactggatggctcatttaatgaactttaatgaagccaaaatgctttctctaatcaaatctcaagtgacgtgactggtgtcttgacctgagatcaggagactggaggcagcttgtccacaaggcctggggctgagctaaaccctgggtttcccagagaacgttcctgggaagccgaggt

SEQ ID NO: 31235 - DNA, 1873 bp, Bovine  19866881231610
  misc_feature (1)..(1): n is a, c, g, or t
naagaatcaaatggtaatttcagaactaaaaaaaatctgaaataaagaagtaactcaataatgaactgaccaaagaagaagaaaagaccagtaaatttttaaaaaaagatcaaccaagaaaataacaaaattgaaacacaaagagaaaaaaaaaaaagaaggaaaaaatacgcacatcagaatgctgtgggaaaaacaaatcaaacagtgtatataaatgcaactggagtccaagaagaggaaagagagaactgaggtaaaacaaatatctgaaggtaaaatgaccaaaattttcaaaagtttatggaacacatcaatctacagatttgggtttagtgaatgtcaagttggataaatacaaagaacagcacatctgatgacgtaatagtcaaatcaccgataaccaaagatgaataggaaattataaagcagccagaaaagggagggacattaaatttagagtaataaccatatgatttacagaaaatatctcaatatggcttatagaaaacaatagaatgacatagtttagctgctgcaaggaaaaaaatctataattctatatgctgtgaaaatattattcaaaaatgaaagcaaaataaagacattttcagcaaaacaaaagaagagaatattcaccaatagcagagtgcaccaaaagaaatacgacgagaagctctctgactgaggtacaaatggaggtctagatcttcaggaaggaaggaagagtaaaagggaaagggtaaatatttttttaactttttattttatattggagtatccatgcatgcgtgttaagtcgcttccgtcgtgtctgactctgcgatcctatggactgtggcccaccaggctcctctgtctatgggattgtccaggcaagaatactggagtgggttgccatggcctcctccaggggatcttccccacccagggatggaacctgtgtttcttgtctcctgcattggcaggcaggttctttaccactagcgccacctatggttgatgaacaatattgtgatagttccaggtgcacagcaaagcgactcagttcagtccagtcgcccagtcatggccgactctttgcaaccccacggactgcagcacgccaggcttcccagcccatcaccaactccaggaacttgcgccgggactcaaccatacacatacatctatccattctcccccaaactcccttcccatccaggctgccatataacactgagcagagttccctgtgctatactgtaggtggaaagggtatattagtatattacatattggtataggtaaaatacattaaaaataacaccaatggtgggaaaggaagtaaaggaatcatactttctaaggttcttacattattaaatggaataacactaatactaattacaaaatttaagttaagaatacatattataatgtctagaagagacatttaaaataatataaggaagtacaatttaaaagccaacaggagaataaaaaggaataatttaaaatgcttgattaactaatcaaaagaagattgaaaataagaagcatataaaaaagagatagaaattggacacagagtaaaagggcaaacttaaagccagttatatccttaattacactaaatgtaaatataccagacacttcaacttttttacaaaatgattgtctggataaagaatcaatctcaaattatgctatttgtaagaggcacactttaaagacataatttgaaagcaaaggatgaaaaaagatataccatagaaatgttaatcagaagaaagtttgtatagctatattcacatcagacaaatattcttccagacaggaatattactagaaataaagggaacacgtcataataataagagtcaattcatca

SEQ ID NO: 31236 - DNA, 1288 bp, Bovine  19866881241958
  misc_feature (1)..(1): n is a, c, g, or t
ntcccatggggttgcaaagagtcagacatgactaagcgactaactttcactctcatccaaagggggtcgtcagtgtctggcccctaggggaccctgcggtggtgtgtgttccttctgggcttttccactcaaaagccatgttcacgaagcaagctcctcccaacccctttaaaaaaaaatcacttcatttgtgttgtttctgtgggcaggaatgtagaaaatgagcctattcttaaaaaaaaaaaaaaattcctagaagttaaaaagaactaaaagagaatggaaagaaactgaattaggaagacctgcagggagattgaatctcaggaatttaaagagtagtctttctagagcccaggggatgcgggggcattaagcgctatccatgggctcagaacctgggattcccccagcaagcccatcagccaggtggtgtgtgtggccccacgcagagagagaatggagcaggctcagagatcactggggagttggtggagagcctggctcgcgggtggctgctccaggatttaagcccaggtctctggcactaaagccagcatctttccggtgatccttctgctgacctgaaccttgcctctcctccctccctgcagacacatagagaactggcgcggtctgcacacgctcaacgctgtggacatggagctctatactggcctccaaaagctgtgagtgcaccagctcccggtggggtgggggcaggggccagcccatacgtagttcaggcttcgagatacaacctgaacccacgtcccccgggttagtgctttcctcagtcccgtgctggactgatggttcacaaggagcagggatatttccagtcacctcctcctttggattcagtgcgagtgactgcgggggaattgggtggggaaagggaggaggctgcagtgctagagttgctggaccagagtcttatccacttgccaggatgggcacatttctcacactcacccaggtcccagtgggatgtgagcccaaatcctgcccgctcgtcctgtggtcctgtccctcaactggaccacaagtgatgaccggcgatgaagagatgcattcagtttacagaggcgactgttgtccagtcttggcctcactgctgtcagtcttggcccagagcagagctgtattgctaccccgtaagctctgctgaccctcttttcctctctctcttcaggaccatcaagaactcaggacttcggaacatccagcccagagcctttgccaagaacccccacttgcgctatatgtgagtagagctgggtccggg

SEQ ID NO: 31237 - DNA, 769 bp, Bovine  19866881307044
  misc_feature (1)..(1): n is a, c, g, or t
nctctgaaagcaggacttgcgggaaactctgacagctaagtgcaagtaagtgaaccacaggacactgctctctcagggtcccagactttactgtctttctgtccttcattccgtgtgtgtgtatgtatgcaccctcagagcacatgctcacatatcctttccaccctgtaacaacccaatcacactgaacccaggacccaggaagagacacaagtctcttgattggacagaacacagaccacagttaatgctgtaacgagcatacacttagcatgtgggagagcaattcagccctcacttggactctatttatcatttctttcagcactgagtctgtaagcgacatctgaatcaccaggacggcttgttaaatacagaccactggccccacccccagagtttctgattcatctggtcttggatggggcccaagagtccatatttctaacaaaatcccaggtgaaccggatgttgctggaccagtgaccttactttaaggaccactgcttcacagttttagagaagccaagtcttgacttccaagtgatacctgatcagaatggaatcggtgagtgtgtgtgttggggggcggggtagtggtgagccctgccaaagccaggctttctgacagctgcaggaagtgacagttgacagcccgacagcaaagaaagagacagcaaactataaaaagcagacataagaactcaaaaagcaaggcagtctgaagccatctcagtgggataaaattattatacacccctaaataaat

SEQ ID NO: 31238 - DNA, 3249 bp, Bovine  19866881363105
  misc_feature (1)..(1): n is a, c, g, or t
nacattttatcttaacatattcacagtgggttaattttgtatcttggtatcagacaaatgattgcaatgcctctcttcctttttctttcatttttttttaacatttcaaatgatcttcattaagagaaaaaagagttgtttttaatttgctcatccatttcaattgtttcatgtccttttatcgatttttatgttgaaatatttcttttcatatttcaaaaacagatcccttgtttagcagctttcaaacctggcatcaggtaatagcttgcttgccaagacagtgagcttccccttccccccaactaataaaaaaatcaataagtcattagagatgcctttaatcaagattaaataaatgaataaatttaactttcatccgaccgtgaaaagcatacttgctatagtaaaatagcacagtcaagtttgaatccttgatgatcaaattgggtttaaagaataaaaccttaccaaagcctccccatcactgatgactgcctacctgatccccaggggtcaaagggacgcagaatgctcatgtctccttctccaagagatagagagggtcagctttcagcatcttgaatgtcctccactcaatgaccacaacagatcagaacaaattgatattaagagaagccatgacacacctacacagagtattaaaaagcagagacatccatttgccaacaaaggtctgtatagtcaaagccatggtttttctagtagtcatgtatggatgtgagagttgaaccataaataaggctgagcgccaaagaattgatgttttcaaactgcagttctggagaaggctcttgagagtcccttagactgcaaggagatcaaagcagtcaatcctaaaggaaacgaaccctgaatattcattggaaggactgatgttaaagctgaagctccaatactttggccacctgatgtgaagagctgactcattggaaaagaccctgatgctgggaaggatggaggacaagaggagaagggaacaacagaggatgagacggttggatggtatcaccaacttaatggacatgagtttgagcaagttccgggagttggtgatggacagggaagcttggtatgctgcagtccatgaggtcacaaagagtcggacgcaactgagcaactgaattgatagaggaagtgactcaattcaaagacccaagttgtgctgccagaagcacttttcttgtaatttgggaaatgctctcaaacaatgtggttatagatgagactttattgaagaaccctcagctgaaagctgacagcaagtcagctgagcccaggggtagatggagcttagtcagtcacgcagagaagcagcatccactctccatctgcagataaggaaaagcctcaaagaaaaaatacttgaaaatttctaattacatttgacagaatagctaaaaagcttatgtacaatcactttagtgagttctaaggctttaaaacttcatttagtttcactgcacttaaaaaaaatctctgaatattctgtcaggtgaccttccctggtggcttaaagaatccggagattctttagacgataaagaatccacctgcaaggcagaaggcccaggtttgatccctgggtcaggaagattccctggggaagggaatggctacccactccagtatacttgcctggagaaccccatggatagaagagcctggtgggctacagtctgtggggtcacaaacagtcagacatgactgagcaataagcatgcatgcattctatcaggtacaacataaaatgagtaaagaaaatatagtcttgtttctagaaacattgactcctaggagttctcctatgtctgctcttgtttatcttagaataaatttttaaatctctgatattattctgctttttatcttctctttgtttcatctcttttctatcggaattaaacttttgtttttctttttaatgtatttatattttaaatagataacacattcacatgctcaaatatcaaaatgtataagaaaatacacagtaaaaagacacttccccacctctctccctacaggtaaccactgttattatttttttgtatgtcctttggagaaaaatttttagcatacagtagctgcaaatacaagcaaatactacctcatctttggaattaaacctttcatatcacaatatgtcccactccatcggggtagggttggagtaccttctgggaggaagtgtcttgcaccatgcctggcatagaattagggatgctattatataggaagcactcagtaaatgcttgtgaatctaaagaggctactgcaggaagaacagagaaatgcacatacagcctgacttctgttcctccactaatgttatgaactcactcagattctcacttaaagcaaggggacaaggaccttaccttgtgcccccctcccgaagtcccttcaacccaatcctatttctctaccagagtggttttgagtatgggatggagaaaaggaattttttaaaggagaagacacaaagaaatgaggaaaggaaaacaactaaaaaaaggatgcaggagaggaaggggaaggtggaattcagagaagcatgagcccctttgaaagggaagggtcagatgaaacccactaaaaattctgatcatcacctgaaccccattccatccccattccatcaccatccttctgtcagacataagctgtgattcaggacactgaaacactcgagattaggactcaataaatttatcatgacacagtgattactgaacaccaggcacctggagaaaacattccaagccagactggcagtgcctgtgctgacagtgctcttttccacatctgaagaggccatgacttttagtcccacgacctaagacatctgctgagtgtgaagcctcaactcctaatctcctttatgttatgctttgctgtcagaaacaaaacctctcccctcaaaataattttttaagttctctagacttatatcctcttatctcatcccaaagagtgacttaccattctatcagaaacatatctaagtcccagaatagagaatgtcatatagtatctctgcctttgaggaactttggcccttctttcacatggtagctgtgaacgtttttataacagatatcagaaagtttccacagtccgatcaaaaacatctgcttccttcagtttgtatttcccattcagtatgtcttttgacaaattccaaagctctgtcctgcggttaagacaaagatacaattctgcaat

SEQ ID NO: 31239 - DNA, 1789 bp, Bovine  19866881367373
  misc_feature (1)..(1): n is a, c, g, or t
ngaatccaatggacagaggtgccctggcggtttgaagtcccatggggtctcaaaagagtcagacacaactgaatgactaaataacaacagccaacctttggctgagtatgtcttctctcctatcccaaaggcaacaggtttgctgccaagtcattctgctttggaaggagaggtggaatgctgtcagtttctctgggatccccttccctttgggagtttctctggggagtttccagagtggaccttgggaacagagattccattcttgccacttggggcatttgtatcctgattacattcattcccatgatgcatcttctcatggaccattccgatctttgcctggtgggaaggcattggggaggagatggcctgtctccatcacttagggctgcagattctcagatgctggtttctcatccttggccccgtctcactgttcagcgcgggacacttaagctctcaggcccactttggagctcaggaagagccaatcctccttccccattcatctctgcttcatctctctttcatctaatggtttgccaccttggcaggaagggtgctgctgggagctggggaggccccctcctgcaagttctctctcctagcagggggcactgtgtttgctaataggtgttaaatgggagcatcaaattttaatcagcgccttaatggagtccggggacctgggggagttctcgagtcctgcattatgctgctcgctggagccaagttggatgcagtgagtaggaaggtggggtgggcagctgccatcacagccagagctcctggaagatgaggtggtgccggccactttcttccatggtggcccagcttaagtggccatgtcactactgtggatgctcttggtgacacatctatcactgacttcctcttggtgagaagcaggtctagtagcagatatggaaatgggaaaaccttggcattggaagaccctggttcatatcctaacattttcaagttgagtgaatgactgtggacaagtctgttgatgtggttgttgctgtcgctgttttgttgctcagttgtgtctgactctttgcgaccccatggatggtagcccacaaggctcctctgtccatgggatttcccaggaaagaatactggagtgggttgtcatttcctcctccaggggatcttccttgacccagggatagaatccgtgtttcctgcattggcaggtgattctttactgctgaacccaccaagggaagcccttctcagtgtggtagccagcttattttaatcaggacccccagtgaatcaggccttttgtgatgggatgttgccatactcccatttagaggctaagtttcttcatttccatcacactgagttgttctacgacttactttgacatagactatggtgtcagtgtcataaggaagatctggagtcttggccttaagagaccttgttgcttttactttctaccctcttggagagaccactaggaaaggaagcctctccaacctagtggaggctgagaacccacatgcagaagaaccaggtgctcccatccatggtaagtaagtaagtaagtaagtaagtgaagtcgctcagtcgtgtctgactctgcgaccccgtggactgtagcctaccaggcttctccatccatgggattctccaggcaagaatactagagtgggttgccatttcctgctccaagggatcttcccaacctggggattgaacccaggtctcccacattggaggcagacactttaacctctgagccaccagggaagatccatggtagtagtag

SEQ ID NO: 31240 - DNA, 751 bp, Bovine  19866881400837
  misc_feature (1)..(1): n is a, c, g, or t
nagtcggacacaactgaggtgactagactgcacatgcatgcaaatcgctaggggaacaggtgacctactgaacccatcaaagtctcaatttcctcatctgcgaaatggtctcattttgcgaaatcctctcacagggatatttcccagggtcgcctcgaggatagagaccctagaacagtgcctggtacatggaagcggctcaacaaatgttagttccctttgtttttggaagaagctggggcctaggagccacgagatgcccagctgaccatctcattctggattcaaaggggaggaaagcttcaaggtgcaaggcccggcccgcagaggcagagagaagtgaggagatagattctggaaaagtcaagggcaaagaacactgcccagtgccaggagccagagctggagtctcatgctgtgctggactctctgatgatggtctgcatgcccagccaggctccagtctggaagcgaaggtgttaatctgcctgaatcagccacacaggactcagatacttatgccaggctccaggctcccaggaacaggcgaggaggaggcttcctaaattagaatcagagtgcagaactggggtcacaccttggagcaagggtcaagggtgggggggagctccctcactctgcatgcggatggctcagatgggctgctgcgagcgggagcggagcggccaccctggcctctgtttacagaaagcagactggaggcctgtgacccgaggccatacatgacttg

SEQ ID NO: 31241 - DNA, 1285 bp, Bovine  19866881493799
  misc_feature (1)..(1): n is a, c, g, or t
ntcatgtgttagccagaagttccaatttctgctgctctgtttatgaatgatgcagttagttcgtgagttctaaaacatgctgtgaattttcttccacttatgctaataatatctctaacctgctgggcagtgaggatttccctactgttttttctcagggaagtaaagcctgaatgtcagtcgcttccttatatcctggactgcagatcagttgatccacagctggctaatgtccttgttattgttgttgttgtttggtcattaagtcgtgtctgactcttttgtgacctcagggactatagcccgccaggcttctctgtccataggatttcccaggtcagaatactggagtgggtggctatttcattctccaggggatcttcccaacccacagatcaaacccacatctcctgcgttgcaggcagattctttaccactgagccactggggaagcccaatgtcttccttggcttactttaaaaaacactctcttcctggcttttgcgatcttgctaagaatggttgtgaattctcttgtagtccacctgatttcatgcttttgaacttccctatccctttctctccaagccctaagttgcagtgagaatttcaagattgtcagataaatgctaaagccatagttctacagactaggtgcacatcgaccacattgtgctttaacctccttggccaaggagtctaacctaatgtttgcaaatcctctgagacttgttagcctcgctcagtgattttgtgacttccttctggactccttcttaaggttagatctgactgtagtaccagattctgaaaccctctctcccacttcaaatcatcttgtaatctttcttgaccttccatgccaaggagcctaccttcccttaggtgtgatctctaattgctaccctagctgcctctagcatcctagggcttggagatcagcatctccactggccttttgacacaaaagttgcatcccatttggctatcttagaataagatgcatcaagagggcatcttcagatgaagagtgcagactgatgcaactgattctggtcattgggtcactctgtgtgtgcttctgtctcggccccttttaggtgggaggacataccatgctcccgattcgctggatgccccccgaaagcatcatgtaccggaagttcactacggagagtgacgtgtggagctttggggtgattctctgggagatcttcacctacggaaagcagccatggttccagctctcaaacacagaagtacggaagggggcagatgccgggag

SEQ ID NO: 31242 - DNA, 1721 bp, Bovine  19866881523126
  misc_feature (1)..(1): n is a, c, g, or t
nacagatgcctacacacaccttgtgtggggccctgttgatgaactgcagagattctcagaggagggtccaggggttggctcagtggtattgaggatctggtcactcaaagcagaggctagataccaactggtgtggacatacttcagtatttgaacaatgaccatactggtatgtatccccttactgttagccctaagctgtgcctgaatcctgtgacttccactcagggctccactgttagcccagtgcagcagcagaaagcctatatcctcatggcttgaatagaaccatcataatcataacatcaagaagtttgagctctgcagatttagaatctccaagtctgtggatcagggagctgataaatatcagcatttcgggacttccctggtggtccagtgactaagactctgtgctgtcatttcagggggcccgggttcgatccctagttagagaactagatcccacatgctgctcatacaccacaacaaaagggtcccacgtgccccaacaaagacctggcacagccaaagggaaaaaaatagcatttcattcaataattttgagtagggtctcacaaaggatggtagaagtgtctggttttattgaatcatatcataatacaatataaaagcctctctctctctctctgagtcatttgtattctccggtaagtctctttttgtctgtcccagtgcctcttcctcatctgagttccacgagacaatccaaagtgtcaaagatgtaatcttggaggggaactctcccacttcagctactcatcaatcttgtacccatagcagctttatataagacccctgtatccttcccagggacatatctatatagctcaatccatgggaaatgaaatttacatgggagaagggacggtgtctatgtattacttattcagtgacatcctgtctcattgcaaacagtgttagaggtggtttgcaaaaatatacatgggcaatgcaatgggatcaatgaagagaatgataatatctggaaataggggaaataaatataaggaaataaaactggtggcgagattagactattaagtgcctgatgatagagggagcttatggatttggctccaggcatcccagtgaccaaagcacagaggtaaatattttaggttacaggctgctgttcagaggaagaatagctttctcaaatgttgtggtttaacagacgcttctcccatagcaccacataaagagcggagtgtgggatgcagagttatgctcaccagcaacctgaaaatagatcccatggcgcacctcttaggaatgttggttaaaatatcccttgatgcaagtcagtggcttcatgctcaaacccacttcacaaactgggtgggtggcaggagagatgtttttagaagcacccacagcagcctggtcttaccctggggagacccagccttgcctggaaaatgggggcctttggggaactccattgctgagggctgatggaatttccctcttcatcccagaacatctcatctgggaccttgcaggtcagctttcccagccagtggtgctcttcccatctcaccccctcctcccactaaggcttttcttcccaggcttattggaacttgatcatgtgaggccgtaaatcaccaaaatctagaacaaatctcatttgacatttttatcttgactcttttgggggcctttaattagcatgattgcagtgcaggagattgccc

SEQ ID NO: 31243 - DNA, 1454 bp, Bovine  19866881613144
  misc_feature (1)..(1): n is a, c, g, or t
nggtggcagagttactgctttctctgaatgggtccccaggtgcctggtcctcttctctgaacctccagtgctgtgctcagcttaacactgaagcgcgaggtaccccaagtttttgtcacagtgaatgtggcagtgtggggctaccaccaggactctagaagtttccagaatgctaggattagtattccgcctcctaggattaagcctgaatcttcattaccaatttttggagacatctggcccacctgtttcaccagtaattagtccttcccagagcttatattacatgacttttgcggtcacctggaaattaaatttggctgtaaattaaagaggctggagggtaatctgagaataatacccataatattagcaaggctttgtgttgaggtacactttttactcattaaccttattggaacctatcaaattaaactggggaaggaggctggaggacaacgaggggagagtttgggtttaaagttacaaattctgtaagcaaagcacagagccctagcaatgttgctggctatgacttactgtagctaccgaacataaggaggtcatattttagtgaaggagaaaaggataatctcgaatgcggcagtcacagacaacatactccctccaaaacaaaaagctaattatagctcaaacctaaatacaagatggactcatgtcctttatataaacctggacgacactttgatataggacggcttcaccaggacccatcatgactgcgtgaatacagaattacacaaacatttactaacattcccaccagggcagactgggagatacaggacagaagggtacagaagtcaagggctctaccaacaccctctcatgacgcctgagatgaactggacactcactcacaatggtgactggctcaatggtgacttcatcattaataagaaagtaaaaaaattcaggaaaaaaaaaatctctcacaaatgtattactcagatctcaatgggcttccctggtgtcactggaaagaatcttctttccaatgcaggatacacaggttggatcactgggccaggaagattccctggagaagaaaataacaacccactccagtattcttgcctgggaaatcccatggacaaaggagcctggcaggctacagtccatagggttgcaaagagtggaacatgacttagtgactaaataacaaccatttttagtcacctctgctccttttttttttttttttaaagaatacacaaggtatgattcagaagaaaaatattagaaaccatttttccatggatggttggtaaggtctcaggagacaattttctatacagtttctcttaagggcagaatcagctacaagtcaatgagagaaaccagactcagctgactgcagtttactggcttgctctgttgtacatttccaaactcgtatataaggagacaatgtggaaacaggagaatgatgg

SEQ ID NO: 31244 - DNA, 1357 bp, Bovine  19866881621494
  misc_feature (1)..(1): n is a, c, g, or t
ncctcaggatggggatgcatgaagaaaatgggcaggtccttattctcaaaaaagttacagaaggagagatgaatatttaacggatgagcatacacaccacacactcaaaagccaccacaccaccccaccatactttaaaattgtgatgggggacttctctggtggtccagtggctaagactcaaagctcccgatgcagggggcctaggttcaatccctggtcaagggaacgagatcccacatgccgaaactaagagccagcacagccaaattaatgaataatcaattaattagtttcaaaaattaaaaaataaaattgtgatgaatgcagtgatggaagagtccagagcacaaggggaatcacagagtctaagtcagagcatcacaggttttaaaatactttcaaggatgaaactatgttactgtaggtagacttatgagttcctggagcagcaggtaaataaccagctcccatggtctggcagagtttccagctaagatggaacatggactaagggttagttgaattaatgaagggctgggtggctggatggatggtgaccttgctgctacaccttcagttacgaaacttggcttctggtcccttattctcatacctgcctctattccctgggggtttgccttcattttctctgtttctcaacatcatcttggccccaccccaaagctgtctcaagtcacaaactgcatgccttggaaatgcctcctagaatgccatttgttctggaaaaaaaaaacccttcacagacaacattttccactctgccctcccagccctgcctcccccatccttgccagagttgtctccacttcttccaaggggagtttaaaaatggaaagtcacgtgcaaatggaaaccttgagaaacccagtgccttggagagatgaccatcttccccagggaaggtggcttatgctggagtcatttatctgcccacgttagactgcaaggtcttaggcagggaattttatgtctcctggagcactgaacacagtggaggcactcaacaaattgtaaataaccctggggaggagcaattgggaacactgggtaaaacactgcaaaaatgtccctcctgcatgcagagctgggatgcagcttcattctcagtccatgtctcagagcatcctgaaaccacagccctggctggactgtcacacggggtcaaggaactttatttaccccattggtaaagactgattggaaaagatccagatgctgggaagagcgaaggcaaaagaagaagagggtgagatgctatctaaccatcttcatttacgagatggttggatggcatcactgactcaaggacaagagtttgagcaaactccgggag

SEQ ID NO: 31245 - DNA, 1806 bp, Bovine  19866881624162
  misc_feature (1)..(1): n is a, c, g, or t
nacacatcctcaatgccaaggcaatactgacaacaaatgtaacacaatgcagatgacaccagtgaaaagtggatgtacgcatgccttactgggaccctggatttagaggggagcctttgtctggggctcatatcctgattccagttcttcttagctgcataactccgaataaagaaagaacttcccttcgtcaggcctgggtctccctgtactgaggccgcctgctcctgccccacagataggcctgtggaaagcaagctcgtacggtacttaatgcgatgcttggcatatagtaaaaacacaagagatggaagctattactattattaccctgatacccaatgcctaaaaaggtctcagaagtcaggttccctttggggataagagggatgtgattgctttttgccgagaagcagatgtgtctgcttgagggaagagccgagaagagccaagataagccaagaagagcctcttgttccctgcatcttctctggtggccatactgggtctttaccacatggctgtaaagtttctgacatgtgcactttccagggactttgggtcagggggttggggagaaccaaatttccccaagtagctggaagactgtgagggcaaaggaaaaaaagaaaagaaattggccctgctgtaagttatgcactttttttgtcgttaagggatctcgtttaatttttactaaaaccagaaaaggctggtataatatccccatttttcagacagagaaactgagacccggaggaggaaagagattagctctagacaatcagctggtgggctggaactagagcccaggtttgcttagctctaaggtccctgcacttggctgtctaccacactgtgtcccagttccgggtgtctttgcaggtataggtgtgagtttgtgggtgatgctacagtcataagacacaggactgtgtggaggtgtatctacattccacacaggcagatgcgggccatctgtatgcagagcacacgggagtcagttattccagtcactcggagttcagtttatccccctgaggacttcttaacaccaggggctgctcttcccctgacaaatatggattgcttcattggtccttaaattctcgtttgagtgacctacaaagcacaaagaatgacagcacttcttgaattagttttgtctgtaaaccacttcaacagaggaaaatcagctacctatcgtgtggttcctcaaaacgagaatcgttgccagaattaatggcaagaccagcacggctcttaatggaacaataaggagcagtgtctgattttcagaaaataccagagatgactgattcatccatgccagagcaaattggacccactgtcagcttctaaaaattaattctaaaagagatgcacccatcaaaatctgaggacctcttatgtggatgtctgagaactctcaagctctgatatcgtctttctctcagtgacttgagcccaagtcttggaagataataaaaatcccaaagcagtaggatacttcgataaatgtctgccctcggccccagcttccatgaacatacttccacatgtccattttttcagctgttctgggagcccatgaaacgcatccatgtattatttagtgtcacataggttacactatggagaaggcgatggcagcccactccagtactcttgactggcaaattccatgaacagaggagcctggtaggctgcaatccatggggtagataggagttggacacgacggagcgacttcactttcacttttcactttcatgcatggagaaggaaaggcaacccactctagtg

SEQ ID NO: 31246 - DNA, 1090 bp, Bovine  19866881636918
  misc_feature (1)..(1): n is a, c, g, or t
nacatgaatctgagcaactctgggagatagtggagggcagaggagactggcgtgctgcagtccatggggtcacagagttagaacaacaacaaagacatctccctcctcccagcagctgaaacaggttttgaattttgccttgataaggaagaaaggataggctgaaagggggctgatgtcctatatccctagcatcactgaaagacaaccaaatgaagaagcgaaacacaggcagagaaaagcgccctggcagcagagtggcattaaatgtaggttaaggcatggcttgaggtcaaactgaacagaaagctggcagacaggaaaactaaaagtagagtgtcaggcccctgatttccactggtaaaattttcctagagttctcaactgaacaaatcagttaagacaaggtgggggagacattgcaagcacagaccctttttcctatacatgtatttttaatgtggaacctccaccatacagtagagagtggaagaaatatgtgaataaaatggaaattgagcaaaacgtatgtctttttatagccaatgattcatacaaagtgacggctcttaaatattaataataagtcaatttttagggcagaaaggcagagatggagggagatgataacatttctctattttttttcttcatggtccaaatttagaaaaataaatacagtaaatactctacctatagttgcaatatttatatagtttatcatctgcctcggggtattagttctgcttgggaacaaatacactgcttcaacttgacactgagatcatgatttggagctgagaagaaactggtttcaagaattcaaataatctcacacaaatttcaaatgtgacaaagagacagcatttttcatgaaaatgtgaacctcactcatcactgatttgcacaaaaccttagcatgcatcctcaggactagaaaatctcaattgagagagtctggggacttccctggcagtccagcggttaagattctgcctttcaatgcaggctgtgcaggttcgatcccggttgggaagctaagatcccccatgccttgcggccaaaaagttaaacataaaacaagcaatat

SEQ ID NO: 31247 - DNA, 1010 bp, Bovine  19866880557138
  misc_feature (1)..(1): n is a, c, g, or t
ngttgtgtttaacttgataaaacaccagccgggatcactcctctgctgaaaaacagttgagttattcttattgcctacagaataaaacctatacacctttaaggacgtttgtaatctcactactgtctacatcttcagcttcatctcctactggattcatcatctattttttaaaatttttattggggtgtagttgatttacaatggcaccccactccagtactcttgcctggaaaatcccatggatggaggagcctggtaggctgcagtccatggggtcgcgaagaatcagacatgactgagcgacttcactttcacttttcactttcatgcattggagaaggaaatgcaacctgctccagtgttcttgcctggagaatcctagggacaggggagcctggtgggctgccgtctctggggtcacacagagtcggacacaactgaatcgacttagcagcagttgatttacaatgttgggttagtttcaggtgtacagcaaaatgaatctgtttgacatatacatatatcttccatcatctacttttatttattaaactttaatggagcatctaaaccatctagcaactctgaaaatgagattttaaggaaaaatatcctcccagccctcagtaagagatagggaagtaactaaatgtgctaatgctatgttaaaatatgcagttgtgggtattaaacatggctaggttgacagattcacaaagaaggcttcttagaggaggtgacagttgagactcgagaggtgagtaggagctatcagaacaaaaaagtgagaacatcaagagaaaaggcacagaggacttaaacagttaaacattctggatttaaaaggtggttaggacatgagacttaagcacacacgaggcaggactctagacaggcaggccagactagaaaacatttggctggtgggggttattttgtaagtgccatggtctgaatgcttatcttccctcccctaaaattcaaatgttgaaatcctagtgtcaatg

SEQ ID NO: 31248 - DNA, 1022 bp, Bovine  19866880573546
  misc_feature (1)..(1): n is a, c, g, or t
nttttcttataacatgggggcacatttgtgcacatatttactctacatagaatgtaatgtgcttagagtaagtgaggctaaactggttggatctgagagtagtattgtgggcttccaaaatatatgatggccagcttaatttgaatttatatttttggtaattactgaggagactcaaattataactgcatctgcattttctcaaggaactggccttttctattaaagagattaagggaattgggcctggaaattaaggaaatacaggagtttatgcttgaatgaatcactgtgcaaaaaatacaaaatattaacactgggaaagtcttttatcacttatccttatcaagcattctggggaactaaaaccactgtgtgctggcataaaaaaatgaagatatagttacagaacaatgactatatgcaatagttcgttgcagggctgtaaggatgacaaaatgtagatgtaagactctccataaatttgaagttgtgcagtatttttttccttctccctctcttgctccactttctgccattctctccccaactctggccctggctggttgactttctggagtgaatcaatgggttctgttgttgtgtggcttctggttggttttgagctgtggtcaacaaaagcaggagaccagaggaagggagaggaggaaattctggatatctacacccttacttctagtcctctgaggtcatcaaaggctggctatccctttctactaaaggccaagatttctgtaacaaagcctgcttcatgtatctgttttttttggggggtggggcacggttcaaggaacttattcctcataccacactgtaagcctcaagatggtaactgatgcgctttgaccaaccttggaatactgaactatcctttgtagtttctttgtgttctatgcacaccttttcaatatttctttattaaaaaactactctgtttagcctgtttgaatgttctatatctttcctgttggaatctgacacagaaatctaagaactaacag

SEQ ID NO: 31249 - DNA, 1968 bp, Bovine  19866880585564
  misc_feature (1)..(1): n is a, c, g, or t
naattccccaggccagaatactggagtgggtaccctttcccttctccaggggatcttgccaacccacgggttgaacctaggtctcccgcattgcaggtggtttctttaccagctgagccaccagggaagcccaagtgtctgaaaaggagggcagagagctgcagactccaaagtaaagttgtcaactctaattattattgttttgtaggcatgtgtcagcctccaagagaaacttaacatttgatttttgatgagaaatcacccaacttttaaaagttggcaattaatttaaaaagtctgaaaacactgcccactccgcaaacatgcctgtggaccgtgtgccactgagctacctgttgacagccttggcccataagaattatcctttgtgctcatgtccttttccccagtgtcagccatgctcactaagcttcttaggtacccagtggtaaaaaaatttcaagtgatttattcccaagaagggtagaggcctgataaactgagagccgtgcagttgggagggactctaaaacatcctgtccatcgtttgcttttggagtcttggaacccagggtctggggcacactgccttctctttcttcccttagccttgctgtcttggaccttcatggctgggtctttgcttatacattttgcccaggaagtttctggctcatgagagggaagtacgggagcccacttggaccctatgattaatacagtgatgtgatgacatctgttcttgtgaatctggttaatgtgaatcagtccctaagactcaggtcagctctgggaacactggaaaaaagcctttctgggcctgcaatgctgaaggtcattggcatatacaacttgcaaagtcctgcaagtcctgagttgccatctggctgccgttttgttgctgtgtaactccagagctggaaattatagaaatgaattagtgaatctggtgaagtagcttagttcacctacacaggtggttagaggaggaggctgtatatttcctcttccaggatggggtgttgatgtgtctgctcacttgatcacatggtgtcatgtaactctaacaagagacgttttgagtggggattgggggctccagtgagatggacactggagggcccccactgctcagtgctcccctgaggggcttggcttaaattcaactgggccactttggagaatctgagtatggtagtgggtcatcttttgtttgtacccttctgtaaatggaagggagaaaaatcacagttctacaggagatagaatgaaaaggagacctttgtatttgaagtgatagctttctgaacattcaaagagagactttagcacgtttctcatcccgagaaaagcaatgcaagtggttttgtgggagagggtgtgggaagagcagatggctctctttccagggtggatgtgtcagcagaagcaagtgcctcagcagccgcccctgtgtgtgagtcggaccactgggcatggcacctttcacccggcagccgtctgaacgcgttagacagcattctatctagctggtgttctcagtgcacacgcagatgaggtgtggtggtttagttgctaagtcgtgtctgactctactgaacccatagactatagcctgccaggctcctctgtccatgagatttcccaggcaagaaaactagagtgggtagccattcccttttttggggatctttctgacccagaaattgaacccaggtctcctgcatagcaggcagattccttactgactgagctacgagggaatccctgcagatgaggacttattcctaacttcacagaatttgtaaatgagtagctgtgttttaactcagagtctctgattattaagtccatctcttgttggatacaactgtgtctgtacgtaccctcctcttatggacatcagggctctgagccttctctgaattgtactccaggccaattcaggccctcaagggaacagaacaa

SEQ ID NO: 31250 - DNA, 862 bp, Bovine  19866880595909
  misc_feature (1)..(1): n is a, c, g, or t
nctgtttgggtttttttaattaattttttaccatcaagcctgtcacagccatcttattaataagttaactattcaaaaacaaagaccagtttagttttgggggaacttggtactaacaacattatcacagagtactagacccagggttagggcgtaaaggaagaaatgaggatggttgtttaaatgggtctgaaattggaaatgaccttaaaactaaaaatagagaggaaaaagaatgtgagataactaagcacataggatttgcccctcacagagctaaaatagcttagttcttaagagtgcaagtatagcagtaagacagacttgagttcatactcaggccctgttcttcaccagttttgaccttaaataagtattacatttgagccaactatttgcttgagagagtgacacctcaggttgttctggggtttattgggaagttaacaaaatgctttgcctattgcctggcagacagttaaagaaagaaagaaagaaagaaagaggtcgctcagtcgtgtccgactctttgcgaccccgtggactgtagcctaccaggctcctccgtccatgggattctccaggcaagaatactggagtgggttgccatttccttctccaggggatcttcctaacccagggatcgaacccaggtctcccgcattggaggcagacgctttaacctctgagccatcgtgagacttaaatggtagaggaagaagctaccaaatcaaaaactcccagaaagctttcaaagaacttaaggaagcaagaaagtgcatcaccaggcaatcccttctcagaaggtgaattctagaattttaaggcaaaggcacccttattttcttcaaagaaactgcgg

SEQ ID NO: 31251 - DNA, 876 bp, Bovine  19866880606205
  misc_feature (1)..(1): n is a, c, g, or t
naatttgggggatgctttgtatttgttccacagtttcactacttagtgtgtcttttacacttgaagtacatctcagtttggactagacatatcaagtactcactgaccagatgtgagtggcattttacatcttgttagacagcatagccttagcatttcataagctgttcacagctgttctctctgagccagccaacacatggtcatggagaagacagaattaggagtcagactttcctcaaagttcttcagtcagtcttctaaagattcctgattgattagttctttgtttttagagagatatatcagaaagtttcagatgataatgatttaactgtctgaagttattaatgatataaatcgaattattttaatttgtctatcaagttaattttcttacgtgatagatatttagcatatgtgaggaaatttagtactgaagagttaaagctatgatgctgtccttgatgatgtgttttgttttttaagattgcagcaaaaattggaggtgatgctggtacgtcactgaattcaaatgactatggttatgggggacaaaaaagacctttggaagatggaggtaagttatagccataaatattttaaattgttttacacagagtttagttgaagtgattttcattgcttttcaagtgttctttttttgaaacattgcttttatcataaggttcctaaaattgtaagggttatattggcctcagaaggagagggggtaaaaagagacctaaacaaggtaggtaaaatttaagttaaccagccagttttgtcttagtagaaaacactatgttccctcttttaggattgtgtcagattgatagtttgcacagacaacttgttaatatactaagtaaaagt

SEQ ID NO: 31252 - DNA, 1337 bp, Bovine  19866880606411
  misc_feature (1)..(1): n is a, c, g, or t
nacagaatgttagtgttggaaatgaccttggaatttacctagtccaacaagctcattttcagatgagactacaaaagcccaaagaggagaaatatcaaagcagacatattcccaatgaaaaccaaaccagaaaatcatgtgtaggaaaaaaagctgccaagaaacaaaacaaaatgcatttggggcagctgcatttggatagtgatactgtgggagatttttcattttctcacttttccgagttgtctaaatcttcaataaggagcgtgtatttcttatacagtagagaaaaatgactttatataaaagaaggaaaaaatagaaaggagaagctgagtttataaatagcatattatagtcattaaatgcatgtctagtatcatagtgtgaaagggttacaagatagggagaaaggtggcttgataagtttaagaagattttggaagaagagtattctggaagagtatgaagttcaagaatttatatacgcaagcaggcagagcctgaggaagcaactgttaaaaggcaccagtctgtaagtgttgtgtgagttgtctggaataggccatggaagttgctatgtgaaggacagggcttttagtggcattgacttgtgaggagtttggaaatcttgtctctgtttggatgaggcgaggttggggtgctataagctgtaagaacatcatggaatgtaaatgtttaggaatcaccttcatagagcctgtgacttcctcctcccccaagacctgaaccttccttgtctatgtaagaggtagagtcatggaatccagtttcagagtcttgtcttaattagacatttcacatgtctcgctaaggctgtgatggttttagctgaatgaaccacagaatcacaaactactggagttgtcagaatagagaaaaaattatgtctcccaaaagtctctaagctaataactggtgggccctgatagagttgccagatttaatcaataaaaatattagacacaattaaatttggattttagataagcaatgataatgtttagtgtaactggagagtctgtgtttcagccggcaaccctactagtcaatgatgaaaacccactgcctcgtgactgaagactgttcagtacttttctgaaagcaggccagtctgatttccagaatggccttacatacgagaggctatagagcttagtggctaccaaggtcaacctggcccttggggttatttttttcacctgtataaaagagttacaaatagcacctacttcacattgttgttgtgaagattaaatgaattatcacaaacaaaacatataggaaagatacttattagggtcaaatatcaaaca

SEQ ID NO: 31253 - DNA, 711 bp, Bovine  19866880651673
  misc_feature (1)..(1): n is a, c, g, or t
natgctcttccttaagtcggctctaacatcgccttctcactgagactggtaccgatcactccatttaaaattacagtacccctaaaaaaagagggaacaaaactcctaagttctagcacctcctgttcccttcagcacttaatttcctccattgatactagcatcctgtatatatttaacttgtctttttcctctcccatatactagggtataagttccacaaagaattttgtctattttgttttctgatgcagcccacaagggcctagaattgtacctgaaacatagttggagttcaaaatatgttgagtaaaagattcttcatgaaaatatggtatttaaaagcctgaatctttagcataaagctttagtactgattacaatactggtatcttatgtatgtgttaatttctttttttttaaatactatagtgtgaggaaagaaactagtctttgagggggttaggcatgaggagcatcactcatatcttcactggggagtagtaagagggtgaagtatgaagactgagaagctaagtaaaaatgacttggatccaatgtttacgtgtccacaaattccagaaattgcaaagctggaatctctggtaagtagaatgcttcctaagtaagttaagtgtatgggggtgctggcctcgtgaaaccttccagaaactaaaactgcttgcttttctcaacttgctgacgccagcc

SEQ ID NO: 31254 - DNA, 1743 bp, Bovine  19866880652729
  misc_feature (1)..(1): n is a, c, g, or t
ntcttctgtgttaatctttttcttcattatcttttctatttttgaataagaatttataaagacacgtattttctatagttacctgataaacttgagtgcaaaattcaactactaaatagagattaacaatgctctgattatctcaaccaagtctcaatattgttttgctatgcactgcaaaagtattatagactaaaccagttgtcttcctcattttagctacataacacaagagttactaaaaaaattcagtgaagaggtttggagtacaaaatatttctgccaaaaattaaactgctaaaaggaaaagaaactcatttacaaagtatctcagaaaatacccctgttagttaaccaaatagttgacatgatgaaaacattagccagtatccaagtggaactggaaatttaatcactctagttttagaattgagggaatctgttggttaaaagattcataaagaccaaatccaatctagcaactagaatcaagtttttcctgtattacccacaaactgacgaatatggcattttctacaatagagggaagagaatataatcaattactgggattcttctcttccccaccctcataagttttcatcctattgcaggacatacctgaaaaggacagtcaattaaattttagcctgtccattcacattaaggcccaaatcctgcctacaatttcacatatcttacccatttgtttactgttgaactatcctctcccaaatttgaatctaattatagaacctaattataggattctcaaatctaattatgggattctgaaacactctgaaatagtatcagctttgtttcagataataaatttccagcccctgtgatcatatctgtgtaactgcttcaataagaactgaaaggaaactaaaatgctccacctaatgaaacactactgcagctatcacctttacttaagagaaagaaatcaaaagcactacctataagcttttgttccactataattactgaagtagaacagttttttttgggaactgagggactggcactccttcattaacatcaatattctagctgatggttatttagttttattaactgaacaatttttaggaaactggtcatgatatcacgtagacaaaccaaagtgaaaggttagaagagcaaaagcaataggaagtgtcactaaagattctttttctatttgtctagaacaggaataggaactgtttaataatggtgtaggaactatccttgtcatacaattctcttaagacaaatttcttcagttgaacaattacaccattatctacaatgtcaaaagtatctataaggttgaaagaaggagagtgagacctggggatgcagctatgcaattcaacttaaggttcttaatattagtctctttgaagcctgggaactctattacacactatcttgacctcttgtttaaagggatctcttcttgcttcccctttcagagaaatagagagaaagagataggcagacaaatacagatagacagaggtgaatgtatatacacttaaaaaggtaagtggggagaaagagaagtcaaggaatcacatactgcccaatacctcaagtactgaaaggtataatgctttagagattctaatgtacttcgagtcatttcatgtatcccttgttgggaaaatatttcattcctacccaattccctatagctccacattcctacgaacagctacccagactgcacaattttccacacaccaaagg

SEQ ID NO: 31255 - DNA, 1171 bp, Bovine  19866880653569
  misc_feature (1)..(1): n is a, c, g, or t
ngtgtaccacagcagcatctttaatgattgattctagagtgtgaggaaggcacacagtccttctgccaactcatcacccccttactgctcactggctaggaccacaagacttttctggttttattttttagttagcatgcatttcccttaaaaggaatatagcctgaaatagagcacagaggaacacaggcaaggatttgaaaaagtatttgagtctgattcagtattaagggctctggtcctctttctgggttcctgtgaaactttgtagacattcttatgttctagctgtaaacagaggcccctttctatgtaaaatccttcctagatataggaagaatacaaatgatagctagataaaaggctactttcagtgcattttgattgattcattagatagaagtcaacagatgaggttaggtgagtgtaacagactgaataatgaccacccaaagatggttcctagtacatggaacttgtaaatgttaccatataagataatctttgtgggtgtgattaagaatcttaacatggggagattaccctatattatctgataggctctagatccaatcacaaccatcctcataacagagaggcagacggagatctgaaacgcacgatgaagaggaaggcaagggttggagtcatgtggccacaagcctaaagtggcatcagaagctgcaagaggtaccgactgaattctcctccaagactccagagggaacatggcccaaacgacaccttgagttcagtccatgataatgatttcagacttcaggcctccagaactccaaaagagtatatttctatcattttaagccaccaaatttgtggtagtttctatagcagcctcagaaaactaatacaacatgttatgttatgtagactggagtcaacagatatgagaacattttagaattacagctgcttcccttagaacaattcatcattcttcattttcacattacatgtgagtacagtatcttaaaccattattatgttattcctacccatcaaatataagttctcaggagtcgtcacaggaatattaacaagtttaatatcatcttcatctgctttgtcccaggaattagaattgccacaagcacagctatgacaagaattgacactctggacctaaaattggatggacagaagttacttcaaa

SEQ ID NO: 31256 - DNA, 1637 bp, Bovine  19866880658529
  misc_feature (1)..(1): n is a, c, g, or t
ncatcagggatattaggttgtaattttctttttttgtagtatcaattcttttgttttggtgtcagggtgatgctagcctcataaagtgactttggaagtgttctttattcttcaattttgttttcatttttttgaataatttgagaaggattggtattaaatttctttaaatgtttggcagaatcacctgtgaagccacctagatctggacttttgtggggagagggggggaatactaattcagtttcattactagtaattggtctattcagattttctaattcctcatgatttagtcttggaagattgcatgtttctaggaatttatacatttcttttaggctgtctaatttgttggcatataactgttcataatgttctcttatgatcttctgcatttctgtgatattgattgtaattgctttctttcttttctgaatttatttgggctctttttttcttaataagtctgtctggctaaagatttgccaatttgttagcttttcaaagaaccagctcttagtttcatcaatcttttctattgcctttttagctgttatttcacttacttctgctttgatctttattatttttccttctactaactttgggccttgttcttctttttctagttccttgaaatgtaaagttagatggttaagaattttcttgtttcttgagccaggccaatattacaaagaaattccctcttagaaactgcttttgcatcattcagcgtaaggaagagtaccctaaaagtatgagaaaggttagcacggctatcgtgctataatcaaatcaagcaaatactcacaaggtcattcatattagtttggctagctggattaatttcctccaaaaattctaagacataaaatgtgtatctatccataagatggactccaactgcaggatcaggttgatgctatgaaaaagcaaaagaaaaaaagtacatgtctaataagacatatgatcattaaaacaaaatatttaaaatataatcaaaatttccacctaagatataaagtctacataagtaatttcagaaatagctacatatttcaacaacaatgccatttacaaacaggaaaaaagaaaatgtacctaccgaaagtgaatcttctcccacttggctactagctaaagccattatgttaggagaataaaatctctcatacatggatgctccttgacaagtatcaataataaatagtagttcattgtagctgaaagaaaagtgatagtatctatgacatgaatcatgctgttaatcatacattgattaatattttataatacttccataagatgtttaactcatatcttaatcatttcatcagctaaaaatttgcgatttttcaatagaattcccaatataaatctatactagaaaatttaaaggtaaaatcatatctggggaaaccacttcaacagagtgcagtggttgtaccacaaagtggctgcccaaactcttttcccttcccttatctatgacacataactcagagtccaaacaaatgtttaattcaaaaagcacttctctggcactcacacagtcctagaaactgagctagttttagaaaaaccacacacacacacatatatatgacagtcaccatactcaaaaatctcaaaat

SEQ ID NO: 31257 - DNA, 1909 bp, Bovine  19866880743083
  misc_feature (1)..(1): n is a, c, g, or t
ncacatttcttctaggtttccacctaaattgaggctttcatttcacacctggattatttaatgagaatgcctattgacagacactgttgacatctggcccccattccgtcagctcaccttgagctggcacagaatattctgctaacttcccaacgtcaattcaacacttctctgcttctaagttctccagccagacaggatcttgcccagccctagctaaacaacagaaggacaatctcaatcagtgaggcttgggaataggtagaaaaactccccagctacctctcagttgctatgacaattctgaggcagttctacaaaaatttccacaggattaaacccccagttgcccatcactggctttttccccgttcctgactatttacccttgtgcttcctggcatctcacctgcattcacgttatacccaggtctgctttcaagatagcacttcagaggaactgtaagagttacaaaagcgacactatcaagatcttgcttagcctaaagctgcccaagtgttctcttggtctcaatcctttcccaaatcacagctcattctgcatttcatgtggaccacatactgtgcgtgtgtgttgagtcactttcagtcgtgtccgactctttgtgaccctatggactgtagctcaccatgttcctctgtccatgggattttccaggcaaggatactgcagtgggttgccacttccttctccacgggatcttcccaaatctgggatggaacctgcatctcctgtactgacaggttgattctttaccactgagtcattcaggaatactagccccttatctctatctgctgaaataaaattcacttctgagaagctattttattcctaaaggccaaggttactttgcttactttcaaaatgagaacttaaaaatactctatgtgatgtacaattatttcattagtctgttgtttatttaaaagtactttaagagcagagatttccttaagaaatatctaacatataatatgatgtcataaataaccagacatttagaaaatcattattaaaggctgaggggaaaagcaaaggattacagtgatggtcagaaacaataaattatgttctcatttgctttgatgaacttggttctgaatataacagtatattgtcactcactttgaacctaccatccatgaaatgaagcaaagggaaatgcatacagttagctacttgcttgaaatcctctctgatttggtaacacaggtttcttatggtgttgattaatggtgagcagaacactgtccaacaaatcaggtgtcccattgttgagcaaggggaccacctctcctaaccccaactggagctaaatatccagttggagagtgactgaaggtatagcaatgaaaaagacaaacagctagctccccttttgacttctgaaaagctggcaaccaaaataattctgacaaaataaaagtcattttaccgttcatcatacttccccgtgtttgcagttttgaaatggaagagaatttcagcaccaaaaacattcagcacagaccatttgtgtggcatttttgtttttagtttttggtttttcatctagtctcttggcaagtttaatgtttaccacaaatactgttgtctagcatcgtgatactgtgacttggatctccaggacctatttatccaccagctgccagtttacacccttagacaacatctctccaattctcccacctcccagtccctggtagctaccatttatttccctgtttctatgaatttggcttttctagactccacatataagtgataccatacaatatctatatagcattggtttctgtatatcttataagggttctcagtgctttcaagaaattctgtgcttgagcttattttcagctatttagattacttttcacctcacta

SEQ ID NO: 31258 - DNA, 867 bp, Bovine  19866880749426
  misc_feature (1)..(1): n is a, c, g, or t
naagagctgatattttttgggatagggaagttattggatgacttaggaggttcacagaaatatttcagtttaaacaaaacaaattttttggcactagatgttagatctgaaatgatgaggcattgtttattattgatgctgtctggttctctttctcttttggatatggatgaatgctgacacttggtgcaaattccctgtgatttatggaatcccgtatttacaaagtggttgtccttaccatgatttctctagaattttgatgtgtaaggtactgacaatcatgtacaattgcaacggtaacttgcttgttaacattatatgagcatttatcattaagggtcttagctgggcacaggtgctttcttagtaataggtttttgccttgaaatgttctctctcacctctactgctaaactgataacaaggtcagtttctttatgtcattttgttctcttacctgaaaatatctctcttttttgtgcctttggtaaaattcccagtgcattaaaaaaacaggttttcaggtcttacagtctacaagatggggatacccttctactgttacaatgacatggacatttttttaactgtaccatgtttctgggaaccactaaacattttcagaattctgttgttttttctcaaagaacttttttttcatagtggaggatgattgttttattctttttaaaattttgattcttgttttatttattttattcttgttttcctttcacacaaaacagcacctttcagtgaacactaagagctcactccatttttttcccccccgtggagaaaaatcaaaggatgtttgaactttgggttcttgagcatagcttgggtctgaccaggtttacacat

SEQ ID NO: 31259 - DNA, 1941 bp, Bovine  19866880753591
  misc_feature (1)..(1): n is a, c, g, or t
nactccgagttcctaacgcagggggcctgagtctgatccctggccaggcaactagatgccacatgccacaactaagacccagagcagccaaattaaaaaaaaaaaaaaaaaaagtcaaacaaaaaatctacactaaaaaaagctgctatttattcctttactttttagaaatgactacttctcacatttctcaccaaaaatctttcaccatttatgctcttcatttcctttacgagtccacagtttgtcacatgttacagttcactgtgctccaaaatctagctgaattccaacttatatcaaaggttatttcagcaagattatttcaggctttagagaaactctaatccttccataatctcaaaatgtctctgttgtggaaaaagcctttacttcctggaattcctaactcagaacaggcatgaggatcaaataagattgtatatttgaaaagtcactgaagattataacagcagtacataaacgttaaaattatctccacaacgctgcatttcaaacgattaaaataacttatctactacaatctaatgccattaaatgcatttatgtttttggttacaaataggttataaagaatcacaaaagatagaaaagtgaaagctggctctaaaccagatcaaaaataagaagcaatcttaagcagactatctctcttgcatatggcaagaggtcaaataatttatttctggaatatttcttgtaccgtccatttttttcaatcctgccaaagtaaagtaatataaagcccctggtgtagtacaatttattcctaatactttttcttaagattagcattgtctttcaataagattcccattttcccccatgtttatattaacagcatgaattcactaacaatattcatattatgttcagaccaaatagcttatttgctttggtcagacctttccagacgatacatttgcttcaaccagaaacgaactaggacagcctcattttattttgaaagagattttccttaaaagaaaaataatctgatcaaactaaaaaattctacaattctatacatctactaagcaagagtctagggatccttgtggtaaaattcagcgtcagtttagagcctacgcgcctgccggtgttgtcaccactgtcccaattttcctggccttatattgattatatgaaaacgtaacccctaaaaatacttgagtgtaaagcaccagagtcatccaacaattattcaaaagaagagcatttcatagtaggtaaatatgtaagagtaaaggtctgggaaaccacacatcatggaaactgactcaaacaaaagctgcggatgcacagacagcaagggctaccgtaacctctcaaaacagtcgggattaaatatgcatcgaagaaaaatgccagggacgacgacacctaggtttttccgctgacaacaaagaataacggggcccctacggctacacgaatgggtccgatcaccccaactgcgccgcaaagcgaaaccagaaccccggagccagcgcgctgcggggcttccagtcttccgcgcccaccgtgcggggctggcaagctggaatgcggaccgaggaaggagcggagaccttcttagggattcgtctcaccaacactcctgccttccagggaagcgccccctgggaaccctgcctcaaatctacgactgactcgcgtcctccgccgacccctaccggggcggccaccaatcatcagcgcaaagcactggaggggcctaggccttctacccacacgcgcgctcaccaccatccggaatcaagaaaaagaggccgctacagcagccacagctccggtgcgcggcagcgagaacgcagatcggcccctggctgcagggcgggcgcccttcggccctgcgcccctcccagcagcgtcgcgctcacctccaaggccttccccacgggccccgccagcgcgggc

SEQ ID NO: 31260 - DNA, 2006 bp, Bovine  19866880776051
  misc_feature (1)..(1): n is a, c, g, or t
ntgtgttgagtggttgggagggtattttaaaatatattttcaaaattcattttgggtttaggttaagtcagaagtcagtccttttatcttgaatgtttaactaagttaatatgtaatatttacttatcagtatgacattcttggttatattcaagtaacctaaagagactgctaaatcctcataggtaatatgaggaaaattggctctactatgaccattaaaaaataatttaaacaactcttctattgttgattttgttgcaggagctgtttattttataaatattgtgtttcagataataataatgtggatttgaatggagaatatcattttatgtcctaaaatttgtattaaagtataaaatataaatcacagatcttgtctaagctttttagctcacaacatacctctcttttataaaaattgtgatacatttgtaccatttaattgatgcttatttaaaactgtcacatttaaaatgtcactcgtgtcatgccgtcattcctcttttgtgaaaccttagcaagatattaaattagttatgtatataaatgagttttagctaagggtgaaaagatggagataccttaaataaaaaaaattagctaaagaactgggtagcctatttatgaacatgtcttgtttaatacactcttaaaaatacagtagtttattacagttccatatatagaggttctatactaagtcttatcagtgacagtgacaaatactgcaaaagcatagactgagtgtacacagaggggtgtagtacagtgtaaatggaaaatttcaggtgagatcatggaagcccatgaatgacaggctaaaagtcttcagctttggtgaagaattgaattcctttgttagagttgtcatactagagcacagggtagcagttcttggttaaataatgataatgagttatttggatcagtataaataagggattcattatatgtatggctagatacgtgttcttttaaatagttgaggtctaaaataatggacttaaattgtatgagttggtaaacaactgttctgtgattcactatcttaattttccttctccctccacttgtttactcttgttccagtactgtttattttgccttctgtggatgatgatttttttttaatatttctttaattgatttttaaggtgttaatttttgctatacagcaaagtgactcagttgtatatacattcttttttgtattcttttccattatgatttatcccagaagattggttgtagttccctgtgctgtacaataggaccttgctgtttatccattctaagtgtaaaaatttgcatctgctaacccaaactctcagtctattcctttgccttccccccacccctcggaaaccagaatctgttctctatgtctgtgagcctgtttctgttttgtagatgggttcatttgtgctgtattttagattccacatgtaggtgtatcatacggtatttgtgtttcccatgttgtcgcaaatggcgttctttttcatggttgagtagtattccattgtgtataggtaccacatcttctttatccattcatctgtcaatggacatttaggttgtatccacgtcttggatattgtctctggctattgtgaatattgttgctatgaacataggagtgcatgtatcgttttgggttgtagttttgtccagatacatgctcaggagtgagattgctggaccatatggtaattctgtttttagttttctgaggaacctctatgctgtttttcgtagtggctgcagctacttaacattcccacaagcagtgtagaaggattctgttttttccgcacactctccagcatttgttatttgtagactttttaatggtcaccattctgattggtatgaaatgatacctcattgtagctttgatttgcatttctctcataatcagggatgttgagaaccttttcatgtgcctgtgaccatctgtatgttttgtttggaaaactctctaggttttctgcccattt

SEQ ID NO: 31261 - DNA, 1905 bp, Bovine  19866880859052
  misc_feature (1)..(1): n is a, c, g, or t
ntttcagcacccgtgtccatagtctgttctctacgtctctgtctccattgctgccctgcgaataggttcttcagtaccatctttctagattccatgtatatgcattaatatacgacattggtgaaaacaatttttattgaagtaaagttgatatacaacgttgtgctagtgtcaagtgaacggcacagtgattccgttttcatatatatttatctattctttttcagattcttttcccttataggttattataaaacattgagtagaggtcccgtgctatacagtaggtccctgtcgggtatctattttatatatactagcgtgtgtatgtttatcccaaactcctaatttatccctcttaccttgcctctttggttttatggttttcaaatttaaccataaatttgaaaacaactgattttaaaagtaatgactgataaccacaaattaaagactgtggcttgtttaggggcaacaccctaattcccaaagttagtcacagtgggtcttaattgtttctgtgacagaatttatccaaactgctgtactcttcatttgatgtagcaaaatgctattaatctaaatatttgtgaataaagtactgtctctagattaaattaaaattgcttgcattattttctgaattacaaaaacaaaaagtaacggccagcctttgttgagcggtcaccatatatcaggcaccgtgatccctgctttgcgcatgagcagattcagggccccaggaaacttatctgctgagcgtgcccaccaaattgggactgtggatcctcccctgtgccctctgcactcctccccactagaccacctgtagtgactgctgttgtttgtctgtaacaccctctgccctccatggacacaatctttgagggtaaggtcagtgtcctgttcactactgtatccatggctcccgacatgcccccaggagatcagcagggctcagtccacactggtggatcaagcactgaagcctgctcactgtgtgactacagccccgaacagggcaccagattcgggatggatgtctgatccatgacttcttttctaggtggcccaggctctggcaaaggcacacaatgtggaaagctggcggaaaaatatggatttacacatctctcgactgatgagctcctgcagaatgagctgtcatcggaatctggaagaagcaagttgatcagagacatcatggaacgtggagagctggtgccctcagtaagcaacagctgccttctctggccggggagagatctggaagtgttgccattaatctagcttcagaaacaaagaaacgcaaaaaggataatgctgtattttgtttcttttaacaatccagaagcaggcaggaagtccacagcaaaggcccatctgccggaccaagttacccaggcccctggttccatctgtcttgttgctctgccagtgccttgaatgtaacctatttcatactttttcctaaaattggtcccggctttagagttaaaagcttcaaagcagaaatgatcttggtgcagcagaacctagatctagaattaccttgttgttggttcagttgctaagccgtgtccaactctttttgaccccatggactgcagcatgccaggcttccctgtccttcaccatcttctggagcttgctcaagctcaagtccattgagttgatgatgccatccaaccatctcatcctctgttgcctgcttttcctcctcccctcaatctttcccagcatcaaggtcttttccaattagttggctcttccaataaggtggccaaaatattgtagcttcaacttcagcatcagtccttccaatgaatattcaggattgatttcctttaggattgactgatttgatctctttgcagtccaaaggactttagaaccttctgaaaa

SEQ ID NO: 31262 - DNA, 1237 bp, Bovine  19866880888882
  misc_feature (1)..(1): n is a, c, g, or t
ngctgtgaaaatacgtccattgaagatctgacactagctaacgttatcaccaactcttcctaagagacaatgacaacgcagaatttactaatttaaatcctaaattaaattaggattgaatttttaaaaggcaaatcactaaatgatggcttaaattctcattttagagtatatcttatagtaagatttttttttggacaaaattcttaaaaactttaaaaggctgcaaaaaaaggttaacattttactagacctgagatgttacttcagaagcggaagtcagtaacacagtttaatccccacatatggaaacatgtaattcaccatgaaaaagggttcttttatttgctagctgaaacttgaaatgcccttcatttctaagttatttaacatctcaaattacttcccccatgccttccaagagatgcaggagagactgggccttatcttctttggcgagcaatgactttgctgaatgtgaagtaatatttttaaaagccctaatatttttaaaagcctctgaacaaccatgaaagaaacgtccaaagtcccaaaactattataagttggatcataaaataggctaagttcaattttaatatagactatttttaacatttacattttcctttcaaaataaccacctaaaattataaataggacttataaagaaagcaggaatgactatatcccctatctcactaataaaaaagaaaaaaaaaggaaataaacttacaataactgccttctaaaatggcactcatgagacttccctggtggtccagtggttaagaatttgccttccaatgcaggggacacaggtttgatccctagtcgcagaactaagatcaccatgcaatggggcaaccaatctgagtaccatgtacatgtgaccacaatgaaagatcctgcacgctgcaactaagatccaatgccgccaaataaacaaacatttttaaattataaaataaaaaataaaatgccactcatgatcattctctcttcctggtacttcataccgcatctcatgttgaagagggctaacctgggtaaccaataacagatagaaataatggcgtgtgatttctgaggctacatcaaaacaatcactgcttctgtctcactctctcttgtggaagccaggtgccatgttatgaaaaggctcaagcagtcctattggaaaagtccataaaaccataaaaaacataggtttcctaccaaaaggtagcaccaacgt

SEQ ID NO: 31263 - DNA, 1465 bp, Bovine  19866880908338
  misc_feature (1)..(1): n is a, c, g, or t
ngaggaaaattgctttcaatgtttacatgttgtgttggtttctgccatacaacaatgtgaatcagtcataattttatatatatatcccttccctcatgtgccttcctcccctgatctcaaccctttaggtcagcacagagtgacagggtgtcctgggaaccctgtggacacagcggatttttgtcacataagaaaagtttcgaatatgtcttgggatcatcaaggatctacatcatacaattcaattcagtaaagacttactgagcacctactttgttccagggtgtgctggatatcggaaatacacgacaggaagattaaatcatgtctggttttttgtaattattaaggcaccagtgaggactaaaatattttgcaaagatttgataaagaaaggttaaaagaagaaaatagaggagcataggcaagataaacttgctgtgggtgtaaatagcctcacgtggttcctatcttttctctatcagacttaatatggtggtgagcccagcagttagacagcaagtactcatcagactgaattaaccaggaaattcaattaattaaaatacccctttccttcctattttccattttttccctttcctcccagcattccagcagtttgagactttataaaagctacaaggtggtgacatacagatttaaacctttgccaataaagtgtctaaaactaaagaaactagttaacagtctcagaagtcgactttcagcctcgtgtgacatttggaaactttgctaattacaggctccattctctccagcgctcaatgtctcctctacaagccctaagtggtatcctggcagcctgaaaaaaaatctgaaagtgccagatgtgtgactaggggctaatttaggccccgggaaaatcaggctcattctgttttcttttacttattttttttccttccttttatttatttttcttagttgagatgctgcattcttttacttttaaaaatttctcactagcagtgttgacttttacagtcatagccaaatagggtcattttataattatatgggcaattcagtggagatcaagtggaatcagagatcagttcagaaaaagaaaaatgaagggaaatgtattttgcaatgtgaacacaggaccttaggatgaaagatgtcacttacgagtagaaaaataggagtttaaatcaaattccttcttagttaatacacattttctgttaccagtactgagaggttgtttctttttatagacttctttaggatgtcatttaacattgatgaaaacatggtttactggaatagtcagaaataattctgaataataaaataactcttagaagagtcatgtttctcgttgttgaagacatgggcaggaagtaagtatgactttggagaaataattaaatttcattcagtcaaacatggcagcgcttctgccttcaggaggtagggggcaggcatccccagggct

SEQ ID NO: 31264 - DNA, 1124 bp, Bovine  19866880956249
  misc_feature (1)..(1): n is a, c, g, or t
ntgatgttgatgggggtcaaattgcccaagatatatattttcattcacctccttagagattgaacctgacaaaactgtaatagcttattgagttccaaatgacaatgacatactggatattttcaagcacttttatttttcttatcctgactggttagaaaagaaagccattatcccacaaaataataatcttgtgatgtttcaaaataattttttcacagcatgtaattttataatacagtagtgagcctcttgatgcattgtatagacatagaatattatagccaacaaatgtataaaatttatagttgcttttccacaaatttaactagatctctctggagcttctcctatataaacaagcatcatgaaactgtaaactttctctgtaaatgaccagagagcaaatagttttagctttgcagactctaaggtctcccttgtaactacttaactctgctcttgtagagcaaaagcagccatgtgtgtgagtgttaagtcgtttcagtcgtgtctgactctttgcaaccctttggactgcagcccatcaggttcctctgtccataggattctgcaggcaagaatactggagtgggtttccatgccctcttccaggggatcttccctacccagggactgaacccaagtctcatgtcccctgcgtttgcaggtgggttctttaccattagcaccacctgggaaagcagccatagacattatataaacaaataagtgtgactttgttccaataaaactttatggacactaaaatttgattttatataacatttatatatcatgaaacatctttttgatatttttcaatcatttaaaaatgtgaataccattcgtagctcataagccatggaccagccatggcgtgggcctggtttggtccaagggtaatatctagatattaagttttaaaaagatgttctgcaccttactctggtttcaaattctccaagctttagataacatttaatgatactgacatttataaaatgtatcatactgagcatttataaaatttgttaacctactgacacctagggccttgaaaaatactaggtatgtctcaaatttaatgtacatatgagtcacctggagatcttcttaaaagc

SEQ ID NO: 31265 - DNA, 1637 bp, Bovine  19866880959996
  misc_feature (1)..(1): n is a, c, g, or t
ncatttatggtttatagattttttgatgatgcccattctgattggtgttgaggtggtatcttattgtagttttgatctgcatttctctaatatttagtgataatggggattttttcacatgcttattagccatctgtatgttcaactgctaatttaaattcacttaagtccatatgacaactttcaactaaaagagtgcttaccacagattactaataatatatcattgttaatgtgagctgctacaaattttatactaatactaatttcagcattttttccaaagaagaaacaatatattgctatcacatgaagagttcaagactgtgcaaaaagcaagaataaatacaagataagaaataaatgtatgttcacaagccccctaaataatggggcacttggttactaggaatcttattttctccaaaaaggatgagaaataacaacaggtaagatcttataaggtgaactttttccatgctctaagaaatctaaatttttcctttaaaaagaattcagttcatacttctgtaaaatataataaaactgctcctaaatgtgtaattgctaaaaaaagaaaatataattcagttcaatagaaacaacaaacgtaaatctaaagttagaagaagtaacataaaaataagtttaaatctcttaagatgtgtaaatctactaaccatggaaaaattaggtactaatttatcttatgaaaagtagtcatttattaccgtcttttctgccacatttgttcaaaagcatctgcaagttctatgttggtaatttcttcagaatcttgaaatttcaagaaaccatttccaccatgtccttatagaaagggtcagaaagatcaaacagacattttttttaaatgcaaactgcaaacatctagatattaacattcacttcattcatggcaatattttaatatcacttgttattgtatattctagggttaaaagtaactaatttttctactataccaaataaacagataaatgatagactgtgtaaaatatagtagatatacatttaagagctttcttatcattcagttttataaaagcatatttatactttttcactggctccattattatgtcagaaatgagtttccatagataaacatttctcaaataccaggcaaacacttttggtgagacaggagttgaagacactaactagtcccttagtaagctagcactgttcacagtgtatacttgaaacattgtaactctaggaaacgcagttttcacctaaaaaattatgtttttataaccatcagccactgtactatgagagctgaccaaaagatcatgacattcaaaatgcatgagagagccatgctctctgcctggatacaaacgttagctttactacttaatgactgtgttaccttaggcaagtaacctttctatgccacagtttcctcagctgttaagtaagaaatgtatgagtaagaccatcactagcatgccaatataggccctttgtgccaattttaaaaggtacttcccactgcctatcaaagtagaaaaatctatttccgtgccccctcagaatataagcagtcctatgagcttaacagtgggtagtatatgcctttgggggacaaaaaatatttcttccctcattag

SEQ ID NO: 31266 - DNA, 1168 bp, Bovine  19866881004512
  misc_feature (1)..(1): n is a, c, g, or t
nacttacgcaggtttatttgccaatgtagccccggtgtaggctttcaaataattttttaatacatgaatccaaaaccatctttagcttaaacatgatcatgcaatgaagatgcctatttgataatatcactccatgttttaaaaatcccttcggtgcacctcaataaagttgcttaacatggcatctaagatgggtcatcttgccggtgcttgtgtcttcgttaccttgtgctgtgctcacattctccctgtctcaatgaattgcttatagttctggagtttgcccatagtttcaccatttttattcaacagtctcctctgaatgccctcccaaattctgacacttgtattatagttgaatatttgatgagaatgaattttagaagagtatgtgttagatacaacaaaatggcaattctgacaataagctttccagatcttatttaaaccaattcgtatcatggaactagtccttaaactggaagggacattatggtcatctagtgagtacctcctaattttacatatgaaagtgaaagcgaagtcgctcagtcatgtctgactctgcgaccccatggactgtagcctatccggctcctcagtccatggaattttccaggcaagagtactggagtgggttgccagaggtaaccaaattcatgtcacctgaatttttatttaggttctgtacctgaatgatttagcatgactttagcagataacataggctttattgtcctcatctttaagtaggtatgaataatccctggagtttaactcaaaaatacactggttcctactgattcaaagtaaaaacttgtgccaataaagatttacttttgagctatttttgctagagtgaaccatttgatgttcactacaggctctcattctctctgttccaaagtcattttggaataatactagaatagcaaaatcttaaaaagtctcaagatcttaatatgattttgctctgtattagttcccagattattatatactctgatggttaattgtatgtaccaacacttatttcaaagacattgttacttctgttaaatccattattgtactacaacttaaatataaaactatatatatgtatatacctcatgaaagttttctgcttctctctctttaatttcaaggtcaattgctcttcttcttg

SEQ ID NO: 31267 - DNA, 1871 bp, Bovine  19866881011265
  misc_feature (1)..(1): n is a, c, g, or t
nctcccaaatgttaagtccccctaataatactgtaaagtaggcgttattacttctattttatggagaagaaaactgaccacaatggaatggaatctgctccaatgccctgtgggtggtaaatgacagctccatcagagaacagaactctctgacttgagagcccatattctttgcaaccaacattcaagtagatcctcaaatgcctgagggtaggcaacagtgagaataaaacaaaccagaccaagggactccagccagaaaaggtcttactagcagacttgaaagtgtcactgaatagacctccaaatttgttgcttccgctgcctcctatgaagcctcctttccaaatagcaactccatggctataaaatattctttgcatctggagatgtctagtattcaaggaaaattttaaggtttagcccctgctccctcttgcctatctagatagacaagctagccagcttctagattgttcttttaagtaatccacacaaacatgttcttgggaggctgtaagtaatgccaagaagggctcctggtcatgtgagagctatagttaggaataaaagtacactgtcgtgaatcagagctgaagcagagatctgactgcaagctgctattcccgctgctaagtttcttcagtcgtgtctgactctgtgcgaccccatggacagcagcccaccaggctcctctgtccacaggattctccaggcaagaatactggagtgggttgccatttccttctccctctgactgcaagagaaaagccttattattcagttcagtggattaactgtgtgagtacaagcaaatggaaacagagtgtggatagtcatagtctccatggactcacaccctctcttgttcagcatgggatggagttagcaggtaatgaaaaggatatccagccatacacaaatgattataagaaaaaagaataaaaaagtggaagcgggataaagcaataccttagaaaggagttgtagaacaacgcatggagtcattgttaacttcaggatagtaacagacagccagagggaccccacaggtactagaatgattgagaaggcactgggaatcagagcccagttgggagagaaggtcctgagcctggatcccaggctattggttggccctgcactgtgaggtaagcttgctggacaggccagggctggaggttgacaactcacttcttgcacaaggggagctgaaatactcctttccttccactcactgtggctttcccaaagcactaaatgggaagataaccaagaggaggatgtttctatcatattccatgatctgtgaaagaatttcagtccaaatgggttataaaatggaaaatctcctgcatgtgctctttggaagacaaaacttaaggactgaaagacctatttcccataaatgcctgatttatagcgaactgataatattggaattttctttaatgtaaggagttggtcagaggttgcctcatactgacccttgggaacttttacttatggtttccagatgcatgaacaagaaatgacccaggttgggttagtctcacaaaataagtggcattgaactttgtttgtgtgactggactggttttgtctgctcgggaaaatttcaaagctggtctcggtttggttttgattttaagtctctaactgaaccttccccctcttaacatttcctactcataaatactgcgtaccccaaaccttcaacagactcacctgcattcctctgctattcccgaatgaactcatcttttttaaacaatttttgtgcttgcctcattttacccatctatttaggtcgatatgtcccatctgacaaccttgctccatcttgaaatctttaaaccccattcgctaag

SEQ ID NO: 31268 - DNA, 646 bp, Bovine  19866881055744
  misc_feature (1)..(1): n is a, c, g, or t
nccctactggctccactccaccaccttaaaaactgaaatctacccaagtggcctttggtagaagctggatggaagcaaacattaccccagaaaactctgagatgaaatctggggcttatgttcccaaccttagcaggcctagcatccagcttggcagggacgggaggacgggacacaagcttgaaatgcaaagtgaagaagtgcagagtcttaggaaagccttgggaaaaataacccaccacacacattgcctaccatctttctttttttttagaaaaagaatgttaagctcaagaacagctagagtacatttgtttcttctttttttttttcacttaattgagcagttgccacagtaactcaagaacagactactcattgccttcagtgaattgcagatacacatttttcatctcctgaaagtggcagtgagcttttaaaaaaggtaatcttgagctgctgcttttttctcctggcctggtatcagtattctttctccataggaccctgaagtggcagcactttgctttcatgaataagaaaaatatgtctggggagacagggtttagaaatttcatcaggattcagggctgccagccagtcaacaacaccactccaggctcatctgtgtcactgtctgctccac

SEQ ID NO: 31269 - DNA, 824 bp, Bovine  19866881134138
  misc_feature (1)..(1): n is a, c, g, or t
nttgccctagaatttgggctgctttcctttctgtctcgatttctttctgaagattcaacactgacttctcgtttttctctatctctgtatttatcactattttcatgtctttcttttcttgctttcacatgctcttccttttctttgcttttctcttccttctcgcatcctttctcattgtgtcggtcataattacttcgttgtctgtgtctttcctgttctctggagggatatttctccctgtctttctcccttttccattctctgtcattcctttctctctcgtctcttcccctcagtctctcttcttcatgcctcttccagtgggaatctctgtgactggactctctgtgcctatgggaatcccttttttcttttcgagaatcacggtcagtgtggtagctgtcctgctccctggctggtctctcttggtgttcatcttcccttttctcatggcctcttgacctggaactttttgtgtggcattgggtgccatgttctctttcctcactagatgacggtgagcgggcaggattcctgtgatgcttggagtgactgcttagggtctctgtgcccttttcccttctgcagttccctttatccccctccatttcatcattctcactgctcttagcatcaaagtcactgtctgcatctgggttttcctctactttcacaccagtttggcgaatgcagttctcaggaggtattctgctctctgaacttacttcatcagaatatccttttgatttctcttcttttatctcagaccttaagaaaaataatgtaacacaaaatgccacattattaatagtaagtaagtt

SEQ ID NO: 31270 - DNA, 1427 bp, Bovine  19866881160960
  misc_feature (1)..(1): n is a, c, g, or t
ntcaggaaggtcccctggagtaggaaatggcagtaggaatatctactgcagtagtcttgcctggaaaattccacggacagaagagcctgacgggctacagttcatgtggtcccaaagagtcagacacaactgagcatgcatgcaaatgcatacataggcttaagaatgaaaaaaaaatcttagatctcatttggtataacctttcattcaatagagaatttgtcttctcagttctttgtaaattccttgaggagaaagattctcttatcctttattataatcccaacacctaccatatatcactaccatatagtgatacagtaatatttgttgagttaaagattgaataaaataaatatatgattgaatagacattcttaatgaatagttacctaattgccagatcattattcaaaatttgtgtactccttgaagaaaattataaatacttttgataatgcaagtatattctttattttagaagtaacttctaaattttacactgtcatcagtatatcagaaaagtctgtcttaagatgttattctatcatcaaaaattgcccaataatctgtgtgtatgtctctcagtccatgaaaatatatatattggttaagtgtgtcatttctgagatttccatttagaacaatatcatttttcaactgaactaattctcacttgagtctgtaaatagttgtgtgaaattagattggtatctcagtttatttcccaaagtatgtgcaaaaaacatagaatttcattttagcctcttgtttgccaaccattcttagtactatctcataataattcagaatgcgtatgctcatatcttttaaaatccaaaccactctagaaaactgtgggaaactcgtccttgaacagttttcagttttgttttcttagccaagcaaaatgcccttaggtatttttattctttctcttttagctcacttgtaaagctaccaactaattctccaagtagttaccatgaaatcttccatataagaatttcctttagggttaaagttctctgttccctttcaattcagtgttttgatcccaattgaggtaatgctttttctaagcaccaaaaaaaggaaacctaaaggtatcaggtttaacaatattctttcagatagtctttattttctataaaaagtttgttttatatataatagacctaaaagttatcactgaaaaagcagttaatacattattttcatgttcactaagtttatctgggacttcccaggtggtgctagtggtaaaaaagctaaatccacccgccagtgtaggagacatagagactcagggttcgatcccaggttggcaagatcccctggaggagggcatggcaacccactctagtattcatgcctggagaacccccagaacagtggagccggcaggctacagtccatagtatccc

SEQ ID NO: 31271 - DNA, 933 bp, Bovine  19866881404514
  misc_feature (1)..(1): n is a, c, g, or t
nagatccttactttaaggatcattttctttcctttgacaaattcagggcactaaacatttctcacaaattccttgtaaattaactagtaatcactttataaagttaattaatcatctgtagcaaattctccaatgacacaaaaagtcattatcattatacatgattagcaatgtgatcagtcacctagggaggtaaagtttaaggaaagtaattatttggagaatgtcagccattgttaaattaggagtttctctcattattcatatctgattagcatgaaatatgaatcacaaatgtgacactgattcaacagacaaatgaatatacttgtttgtattccaagtatttcttagctttcagaaatgttaagtcttaatgcaaattacattgatatcatgttattttggagttgttaatatgcttttgttaaaaattttaagaagtaatatggcaataaaaggactaaaacctgaaacactatcctcagaaaagcactagtatgtgtttaccattcagttaagttcagttcagtcgctcagtcgtgtccgactctttgcgaccccatgaatcacagcacgccaggtctccctgtccatcaccaactcctggagttcactcaaactcacgtccatcaagtgaatgatgccctccagccatctcatcctctgttgtccccttttcctcctgcccccaatccctcccagcatcagagtcttttccagtgagtcaactcttcgcatgaggtggcattaggaaatggcaaacaatttgaatgagtttatgaagggctcccccggtggctcagttggtaaagaatgcagtcagtaaagaatacttgcaatgcagaagaccctggttcgatccctggggtgggggaaggtcccctggagaagggaatggctgctcactccagtattcttgcctggagaatt

SEQ ID NO: 31272 - DNA, 1297 bp, Bovine  19866881455485
  misc_feature (1)..(1): n is a, c, g, or t
nccccttgaaagaaagctaatcttcctcctccaaaaccctccccgctcaaaccactgacattcttgcagaaacttggaccacaccagcggctcctcccgcaagcctcctccgccctcactgcgttctcctctgcagccttctttttcttcaccaagatgaccaggaaaggggctccctctcggctcggccacccagaccctcgctcgggctccaagcggtcgccagccagcccaccctgattcagcgctccgtggcgggcctcccttcggctttctattcctcctcccagacacggaatccagagggcgaaggccagagctcccgcccacccctctgccactaacccgcggccgctgagaccccacacagccctccacccacgtacctgatgctccaggcccagtgcagccggtccacgcctgcttccccgccgcagcccggcgctgagccgcagcctggccccgggggcggagtccttccggggtcaggaatgggaaggtggagagaaagtagcgggggcctcctagcctttctgcgtgaggggctacgtgtgaagcagctcccgccatttctgttgagggtagaggctcctgcctttcccgaatggctgtgaaatgtacagtggaagaattgcatcctgttacagtgctgtcaagaaatggcatcgcagtttgtaaccttttgagggccccaggaccatcctaggaatctggtgaaaaatatggggcattttctctatatgtcatttaaatacattagtaaaagaaaatagcttgtacattaccaagagaatatatataatatatatctattatatatatatagttagatactctgaaccaatccatggctcccaggttaagaacgtctactacagaccttcagcccctaaataaattaatgttgagcattccaatcctgtattaatgatgttttatttacttcgattcctttttagcttttccctaagttaggcaaggtattcacagctctgaggttctgtctaaaacacatacactaacgagggaggagggagaacaacaaaacaacatgctgtttttatatgcagtcctgagcccaaacatttcgtccaaattgcggatttaaaaattccaacttctgagcatatttgtggtgaaaagccaaaataattttgcaaggattgctaaaacatgagagcacatgttactattcctatctaagaaacaagaatgaacaattattactggtggtgttcaaaagtccctgttagtgaaatggaaaataggatgaacagtaataccaatgtgtgacatt

SEQ ID NO: 31273 - DNA, 1034 bp, Bovine  19866881457096
  misc_feature (1)..(1): n is a, c, g, or t
nccagtcagagggcagacagaatgaaacccccgatcacagaaatctaatcaaactgatcacatggaccacagccttgtctaactcaatgaaactatgagccctgctgtgtagggccacccaagatggacgggtcatgctggagagttctgacaaaatgtggtccactggagaagggaatggcaaaccacttcagtattcttgccttgagaacaccatgaactattaaagcacattactgctcaaaatgttacagacacttaagtgtactagatgcaaggaagcaaacaaataaaaggatcactaaaatgaaattggtaagattttagttatttagtaattttggtgtcatggtagttattaatgaaggcatacttattatagagatgttattctctcttctccacagttaaaggtaatctcaaattacagtttggaaaattactactcatctggaaattgtaaaagttataaaagtctaatgttgagaaatttggaattttaatatctagttgttttatttatgaaattactttgagagaaattcctttagttttactactttgtgttgatttcaaaataatttttgctctttgttctttcatttatgtttcttaattttgatttgataaaaatagagttgtgatgggtaaagaagctggatcttatttccctatttctctcaaggtcagtggtaagtgcgtttcacagctctttgtgatggactgactaccaaaaggtaataaatctaatagtttcctaatgcaagctctggataaagaagttatttaaccattattttatcttactctttttgtcccagtggattccatttattaacttaaatattttaaattgactgaaatgtttgagagaaagagagaaaactgtttgatcattaaactaaatttggctaagtcaagcagtatgaataaaccatttctagcactgagcagctgctgtttccagatataaagagaggggagtgttagttattcctttaaaaaaagggctcattttttttaatgatagtaaa

SEQ ID NO: 31274 - DNA, 793 bp, Bovine  19866881784280
  misc_feature (1)..(1): n is a, c, g, or t
ncactgactcctttagccaaaataagcactgtaacatggtgtttctctattgccaaataaaaaagtgacggtacatcttgctgatgtattgagtactttatacaatacttacaaattgcaaggtcacgcttgtctcattaaatcctatgtaccctatggaaactttcagtctccgtaagaccacatatataggcatgaagaatatagaacactgcagaagtattgaaatcaagtgtgaaagtatgtttcctttacatactaactgggagagaaaacagtttcgtgatgaataaaggtaaagtacttgtgggtttttttaattaataatttcaagggttatgattaaaattgccatcaaactcagtatgaatctatcatattgatggacatgcattcttccctattcagacatgccccttgcccaccacttagtagggattcagatacatttacttaaggagagggatgctgcctggatactgctgatgataccagatggagagaagggtttatttggttataaaaactgttttgatttgggacttttaatgaagaggtttgttttagaacaaacatgtacaggatagataaatgtatatagctatatttttagactcttaagttaaacataaacttaagtatattaataagcaaatcatataaataggagttaaactttttcctagcaaggatttgaggttggagatagaatggaaaactagatctgtgtttccgtctcatcttctgttttctttgctgtctgccatccttctgttatctcatgccattttca

SEQ ID NO: 31275 - DNA, 697 bp, Bovine  19866881840367
  misc_feature (1)..(1): n is a, c, g, or t
naaaagtcaggtttcttcccttcaatagagaggggttttttatacccattccctaaaaatctatttggtcactcttgtctcttgtgtcaaaggccacaaagaaagcatcttactcaagtagtagcttctgaactgaccagaaactaaccaacctcaagcactgaacatgacaaaccattctctttaacatggacaatttcttttttttaggtgaagtataaaagagaaaaatacaacttctggaaagccactcattttatctgatgaaataaattccccagagttgtttcatgtactagcagcattattaaatagtgcaattctttgaaacagatttcaaacaatattctactcaaataaaaaagtaattaagtttacttatagctttgtttataaaaccacagcttaaaactttcagtccttcaaacaggaaaattaacccaagcaataactatcttgcttacacaatactagggatgggtatgtgcagacatatgtatatgtgtgaatcattcaaagtcactggtacctcaacaagaaaccaaaatacaaaatttaaattaaaaaatgaaatgcaaaatactatataatggaatttttagctttgatatatctaaagatattcctctattaataataagaattatgaacagtcaagtgttaaattaagaatacagtaagaaaaatccaggagcta

SEQ ID NO: 31276 - DNA, 2048 bp, Bovine  19866880653251
  misc_feature (1)..(1): n is a, c, g, or t
naatgaagacccagctcagttaaaaataaataaataaatattaaaaaaaaaaaccacccccctttagaatctgacaaagtgccttggaaacaaagtgtttcaaaggcatgacataaaatgggtgagggagctctgcttaaggaaaataacatgcagtcatgaattttgtcttgaattctgcataaaatatttcatatttttataatacctcaaaactgctctaaacccacaagcctcactttgcatgcttcttgggcctgtatcactgaccaactcacgtcacttccataaacattcctttagtcatggttatcacctgtgcagcccagtgcaggttgtatattcattaatactagggtagagactgctacagtgttttatggacaaaattcctatcctgggtttccactgcagctttcatatgccaaggggagctaaggtctttcttaatatcaccctattcaggtgccaccaagacaataacagggcaagaggctgaaacatgggaaaagaaatgggttaagaccacatttgaggataaaaacctgagtgcaaacaatacactaggccaagtgtgatgcccttgttacataaagtccactatcctgtggagagagtggtgctcagcctgagaatcctgctactcaaagcccagacccactggtgaccttgcaacccctgggaggtggtccagtggccatgaattcccatccttgacctggccccacatcaacaatgtgcatgcgagtggtggtggtcctgagcggccctgaggtctccaccccttgagtctggggggcctctgacggctgtgacccacagagtgtcctcgggcttctgccctgagaaagcctgcttccacttcctgtcactggaacacctgccaggagccctgagcttccatcaagagtccaattaccatgaggccaccatctacaagcacatggtcaccaggccagctgagctgcaaccccccaggcatccagcagatgggcccaacagagggagcaaggtcaccccatggggcagctgaatgcccgcaagtgactccatgagtctggaacaaaggggtcacccagctgggcccttcctgacacactccatcatgagagaaaatgaaacagttcatttcagatcttggaatgttgaggtagtttcttactcgcctgcagaaactgaaacagagtctttgcactctttttagtgaatctatcttccctctaaagacaccctctagatgctcttgtatagcacggatgtacagtcacttagcatgaacctacacctgctgctactcacccaacctgatagccacataccgataaagccagaggacggcgggttgggctggatcttctccttcgtgttctcctggatgatgtcccaaagctgccagataaacttggggtgaagaatgtaaaatggctggttcgggtttctctgacgatgctgaacatacggtgtgaacaggttgtaatctggcttcttgtaccactaagagaaaaaaacacacagtcaaggcagaggtccacactgtgaaaaggaaactgggcagtgctggggttgtgggtagttagaggctgaggaccagactgggaggggggttaggatgccccttctgtaggcacttctacactggatgaggggtgagtgagtataggggctgaggtccagcctgggggactggtgcttattctttagtaaaaggagggagaagggctagagcagagtcagcagacttttctagaaggggccaggtagtaaaagaggttaggctttggggccatggggtctctgctgcaactcctgggctccactgtatacttacatggaaagcagccacagatggtacaatatgtggctgtgtttcaataaaactttatttacaaaaacaaaggcaaacaaacaaaaaagaagtaaagaaaaaacaaacaaacaaaaaaaacaaagggaaaaaaaacaaaaacaaaaaacagggccagatggcccatggccatggtttcaatcactgtatttcagaaatatgctttccaatctaatctctagtt

SEQ ID NO: 31277 - DNA, 1734 bp, Bovine  19866880885392
  misc_feature (1)..(1): n is a, c, g, or t
ntaaagggatgaatttctctgtgaaatagaatttaagaaggataattactgggtcattggttaggtgcatttaaaatgccggctttttttttccccccagaaactaatgcctgtgatggcaatgtttattttggctggcccaaaattagttatttcactagcacttcacaggttattatattcaacagttacacctgacacaccagattctttaccatctgagccaccagggatggctcagttgaggctcaggtgactcagatggggttaaatgtttctattttgcaatctaattttctaattttctcttcacagatatctcctagaatatcacatgcatgctttaaagcttcaagaacctccgaaatttcctcttttctatcactaaaggtttttaagtctagtaaattaaacttcaggaaataaaatgaacgctaataagctggcactttgtccacagaaatggctggaggcttttttggttccaacatacttgctttatttcctgacttgtcatgcaatttggccaggtttaggagcagatggggtttaaactgaggatgaaagaggaaggacatgatgctctcacataaaacaagagcatttacttgtcattccactgttacatattgattgttttagatttttaatttaccttttagtgtttgagtcaattaaaaacacgggaggatgtcatttaatatagctcatgagccactgcctttaagggagttattggtagctgcgagaggggggcattgtggagtggaacagagtacaggcttctgggcacatgcgtgcatgcatacgtgtgcacatgtgcatgtgtgcatgcagtatgtatatgtgtgcactaggtgcacacacatgtaacggaatgtgtatgtatgtgttcgtgcattcatgtatgtgttgtccatatgcatgtaatgtgagtgcacatgtgtgcatgcatgtaacataaacacgtgtgtttgtgacatatgtgtataatgcatgcatgcatgaacgtgtgtatatatgtgatgctcatgtgtaatggacatttaaactgtttcaggtttttactgctatactgttgtccttaactcaccatcatctgtctctttgtatatatgtcagaggactgttagaagtgggatcctgggatgtaaggtcgtgagcctgaacggaggtgaatgtgtttatttcatttatgggaagtttggcttcctcttctgtgtcacctcatcttttggcccattactctctggagatttctatttttccttattaacatcagggaatttcttatgttttctgtacccaaatcttttctcaggaatgtgcattacaaaaatattttttcaatctgtgccttacccttcagtttgttttggtgtctttctttgaacagatgtttttaatttcaatgtccttagacttataaatatcttcctttatggtttatcctttttggttttgttgtttgagacaagtcatttcactttgatttcctctctatttcaagtatcatggctggtagcagagggagtggacaagaacatgaatttattactctatctagaccctctaaataacttttaaagagacttatgagggtccaaaaggacatacggtagcagctaaggtcaagtgaaggtcatccctgtgctatgctcaaatactcagtgatgtctgactctttgcaatcccatggactatagcccgccaggttcctctgtccatgggatt

SEQ ID NO: 31278 - DNA, 1298 bp, Bovine  19866880935844
  misc_feature (1)..(1): n is a, c, g, or t
natgacagttgtttgtttgttgatttttgggaattaaactgagtaccccacaaaaaaaaagaaagaaaattaaaacgagacactgaacagagaatggagaggccaagacagaatcgaaaaccaggaccaggatcataaattgagtgttacagtcaggacctacaacatcagttgaattaagggcttttccaaaagagtcttgatttcaaatattctgtgcagtcattcttataacaaattttatttgaaacaatgctccctgtagtcatatccatagaacattttaaacccaaatgatagctctgatcagagccaggaaattccacttgaacaaactgtaaggagtatcctaaaccaggtccatgaagcttgaaggagtttaatggccctgaatctaccccagataggttgaggtcaacccttcgaagtctatctttctccttctcaagtccatggggacaccaatcattagctggggaaaagagtgtcgtccacaggtcaggctcacatttctagtcaaaagctgggcattcatgagctaaacagaccctgatgggcagactgactgtgtcttaagcttctgttacccagtggaaattatctcactgcctctcagccaaccttaatattaacaagtgtcctgaagaaaacagttcaacattttaaaaataaaaacatgagtctttctctagcttatactttgccaggcagggaatggctgttttcttctttgtataatatgttctctgcttcaaagccttgaaaacatcctgaaagtctgaaaaacccactcctatacaagaagcctaaaagaacttcttttaaggcaaaatcagtgacatgcagtctaatgcatatttcgtatcttggtttaatccatctactggtgtaaacctttaatccccaatctcccctctcgtttagggagtgctgggagaaagtggtcaaaattgggattatatggcttaatactaaaagcagttgatgcttacgctctcaaagcattgcatagttgaggagtcaggcagttgcttaggcagttagtaagcgatgggtcctggtgaggcaggtcgcctgttactgggtagtaaagtaggaggttggctctcatttttctttggaggttccacttgcagctgtttttgaaaactttctcttctgaatagtcacatatgtagaaaacaaacttatgggtgctggggggaaaagaggagagagataaattggaagattgggatcaacatacacacactactagatataagatggagaaggcaatggcaacccattccagtact

SEQ ID NO: 31279 - DNA, 1281 bp, Bovine  19866880958555
  misc_feature (1)..(1): n is a, c, g, or t
nttccctagtgattgtctccatctgaacaggtactttaccatgaattattctacaaattctctacaaattcagaatcacattcatgacaggagattatagctgcaattgccattatatttatacatttattataacaatgatgcaatgtgtgccataattagatgatgatattgtagctgacaacccataccacttaatttacagaggagatcagaaacaaaacatatacatttactctcaagaccatacctagaaactctgccttcttatgttaattacctccttctcatacaccttgggttctcaatcgctatttgcaattgagggaatagctatttgagagataaatcaatgtattaaatatgtatattcatgcaagtgtatgtgtttggcaagatttaaattctcaatggctccatagaagaaccacttgagtaagagatgtttgtctctctctcaaagggaaaccatgtttcctcttttcttattcttagttacttaattggacacatttccttacttatcttgactgaaagagagcttaagacctaaagtgttttgcttgcatatagctgctatttagtaagtaaaagtgaaatgctttgttttcttcattactttacttggtttcttgaattatgttccaatgttagtgttttgattttagattcctttaaacaaacctgatgttttgagggttttgggcaaatatgtaatgtacaaaataaattttttaacatttggaaattccacaccaggcatatttttataagctctgtaggttattttctgatatacacccatccccaaaccacagagctcattttttcacagaagattgatttgcttatcaaattatatcaaaattggtgcatttagcatctaccatgtttctactaaactgaattcaaccacgaagtcagttttatggttgcacaataataataacaataaaaatatacaggaactaacatccaaatgagaaaggctttaaaggaaaccctcaaaaagctcagtgcagaactaggtaatttcacccagatgctgtaatcaaaatcaaaatgtttatgttgccaagttcaccaaaaggggagacagagctctcaggagaagagaatcccacacttaggcaacattagatgcaccgagaacaagtttcacttgtcacatgtccttcgagttgggtgtccaacgacactaaactcattctttgtattaataatcaaaaggaatgctgatacacccagaacaacttaggctttttatttgaagctgcaaag

SEQ ID NO: 31280 - DNA, 1465 bp, Bovine  19866880960015
  misc_feature (1)..(1): n is a, c, g, or t
ncctcctgtagggaaagccgtgcttggatgtggaaagggaagagagtaaggggtgactgatatatttacctacctgtgccacggcaggtgcagccctgagttactgatttctttccttattaaatcctcataacccttctgtgaaatgctattgtcccctcatttcatccactgaaaccctagttccaagacttatagaaaccgtggtatgaatggctgtcttcagatttcttgctaagcaaagaaggatctagctttcccaagaaaacgttcttctggcactttcttgtacccatctctgtggaaaagaagctatttcttttattatgacagaggactagggagcaaagggtcctttcctgaacgtcctaaacaaaagtgcctacattcaaaggttttctgccactcactacagggtgttttaccagtactgcattaaggagataatgaggctcagaagtaacctgatggagtgactattttcagagaggaacttgcagtgttcaggatgcgttaggggcctgcctgacacccaggatcccagtgtccataaatattgaatagagttggtttatttttgtaacttaaagcccgggaaacaccatgtgagtggttttaaattcagctcataaaataaccttccaaatgagtccatttggttcttgaggtctccagaccatgtttcaactttacaatcacctctgacacagaatgatggttccctgccccccaaatctggatacctttgcacctttaccaaccttgcaaaacaggaagaaaagtggaaagggaattgctcattaaaatatctgcttgaagtttcattagctcaaagtaacccacctaagctttccggacccctgtggttgataaataatcggaataaacacagtactcacagtgacaatgatggcaacaaggatggttcgctcttagagaggagtagtcttctaagctctttcacattaatcaagatagattgttttttaaaagacctctaattactttcctgttaattatttatattcaccaagagttttacgcttgcttgttagttagtagcctcatgaggtatggtgcgtattaaatattgatttatgcctggcaattgtgaacagagctggcttgcccggccgcatccttggctaaagtcactcgtcctcctcagtcttcttccgcagctgcttatcaccaaccacatgcccaaaatcgaacaagaacacctcgtgtgtccagctaacactcttgttttcatcatagacacatggaacttatatacctgagagatctcttcttacaatcccatcaggagccacacaaatgatgcccttagcatcactgtgttgataagtggatttcagggtatccttgtttctacctcacactcaaagcagacaccactaatccacattgggctggtccaactggtcctcaacccaattataatggttctttacacagctct

SEQ ID NO: 31281 - DNA, 1874 bp, Bovine  19866881151010
  misc_feature (1)..(1): n is a, c, g, or t
ntggacccggcactgagtgggctgttcattggacccaagggctgtcacagtctctaatgtctgatgtaggaggacggcacagtcaagggcataggatgggacaactctcctcaggtgggaggcagccctctcctggaggagtgagatttgggaagaggagccgggagtggtggagctgtgagcggaggtgctggcatctggtttctgggggccatttctctctttgtgtcttgtcccagcaaagccttttgccagaaaaagcactgaagtagagaaagcagcatttcagtagtgctattgaaaaatgttctctccctcagccaaaacggagatagaaatgccaagactttaaacactcagagaagagctgacccggagccagatctgtgctgggcccgctcggcatgggggctgctgagggtgggggcaggcaggaccttcacaagatgacgtgaaatgacaccgagcagaggcactcctcggccgccagcaccttctcattcccctggagaccacagagaagataagccacttgggttttaaacaacagaatgagagaatccagctggcatgtcccccgaggcctggggtatcctgtttcctgggccgcagctgtcccccgacaaaggcccagtgactcagggaggagatgacacagaagcctcttgtgagagttttcccgcctgggtccctcctaatgtgttcagccttccctgttttttaggaccaatttgtacttagcctggcgatggggatgaaaggagagcttcagaaaatggaccacactgatgagcatcccgactggaagtggggttaacctagagaatcccaggtcacttagggatgctctaagtgctgagagaaaaatcatgaaaatccactgtgattttaaagaaaaatatttacccagtaattactttactgggcttccccagtggttcagaggtaaagaatatgcttacaatgcagaagactcaggagatatgggtttgatccctgggtgagaagttcccctggaggagggcatgacaacccactccagtattcttgcctggagattcctgtggacaaaggagcctgatgggatatggtccacaaagtcgcagagtcagacatgactgaagcgactgagcacgcacaatcactttactacttgcagggagaaaagaagtctggtggaatcagcaagtaacaataagatctcataggaagcggtagatgctgggatattcccagactcacttgggtttggggtggtattgagagttcagaagtcactctagtgagggcatgggggcagggagagaaatataggatctgttccactagaggatgaaacacagtggaattttctttgaaaggatgttgaggggacattctttccagagttatttctccactgatctccagtagcatattgggcacctaccgacctggagagttcatctttcagtgtcctatctttttgccttttcatactattcatggggttctagaggcaagaatactgaagtggtttgccattcccttctctggtggaccacatcctgtcagacctctccaccttgacctgtctgtcttaggtggccccacatggcatggcttagtttcactgagttagacaaggctgtggtctgtgtgatcagattggctagttgtctgcaactgtggtttcaacctgtctgatgggcaaccttctgatgccctctctcagcgcctaccgtgttacttgcatttactcttaccttggacatggggtatctcttcagggatgctcaagcaatgtgcagccactgctccttaccttggacgttgggtatttccttgcggccaccgctccgaccttggatgtggggagctcctctcagccacca

SEQ ID NO: 31282 - DNA, 1793 bp, Bovine  19866881315947
  misc_feature (1)..(1): n is a, c, g, or t
nctgtccgacctcagggccttctggtcagctacacactgtagagtcgtgggtctcactgtccaacccgcagtctggactcgggggcggtgtccctgagctgcccctgggtggtgccagcatcccccaccactgcatcccgtctcctgctggtgatgctccggaccctctcagatgaggaagggaggcctgcatttcttgaggaagcagggttcctgctggctggaggccccctcgtaaggaccacctgccggccactgacactttgaccgcgaatctgggagaaaccttacatccccatggcagtatgccacttcccatccttcccatcaccgtgagtgttggagctacttcagctgtgagccttggcacattactggtataaagtgtaaatatctgaatgctgattatcataaaacaaacagaccactctgtccagagcatattcaggcagccagagaccccagctggcagtcagcttgtgcatctctgaacagccagaaacaggcttcccaaccccactgccctgccaccacctgccaccccccttgcagaaagttctgagagctaaaagctgcccagtgccacttgcccatgtgaacctttgtctcttatttatttttttgaactttttattttctattgggtataactgattaacaatgttgtgatagtttcaggtattcagccagctatacatatgtatccattctcccctaaactctcctcccatccaggctgtcacataacattgagcagagttccctctgctgtacagtaggtccttgttgcttatctattttaaatccagcaagtctctgccttttcaaccattttccatctgctctgctgccaaaggacagaccttgaactgctgagggagatggtcccaatgagaggacatgtccctgtccatctgggtatcccacccctcctggtcgcccatgtgtgtaccagacagccaggctcaccaccctggccagaagggactgagccccgcccccaactccactctgtccctcacagtccacctctggtcccctccttttggaagcaaccaggatgacttcaatcccagtctctcctctgtccactcacccatcttgggacagcgaaggtagtcagaatcatcactttgtcttcctactgagagagcaaaccccctgggatcagggacctctacacctggagctcctccgaaagtgttgagagctggcctccccttctgatgggcggaattcatgtggttggccagccaggcgagactctccagtggctgccagctcagagccctgtggattctgtgaacataaaaaaggatgttaggggaaacaggattttaggggaccacatgatcccaccagtgcagggacttaggctagaattcagcatggtatttgtggcagagaggggaaaaaatttcattaaaattttaagcaaggtgcaccatccccagctttgagatataatagaaaaagatgggactctgaaatggtgtagagaaagggaaccattcagagccaaatgagattaataatgtttgtaaggagtttgttggagaaggtgatggcattaccactccagtactcttgcctggaaaatcccatggatggaggagcctggtgggctgcagtccatggggtcactgagggtcagacacaactgagtgacttccctttcacacattggagaaggaaatggcaacccactccagcgttcttgcctggagaatcccagggacaggggagcctggtgggctgccatctatggggtcgcacagagtggacacaactaa

SEQ ID NO: 31283 - DNA, 1185 bp, Bovine  19866881369244
  misc_feature (1)..(1): n is a, c, g, or t
ntcatccccatccttggactgtgccactgagtaggtaaaaggggtccttcggatggaggtgtaaatctgtgcaatttaaagaaacccattgaaggcacagcacccaccccagccaccaaggaaagagcatcagaattaaggtgttgcccctggatctcagatgagaaatgagacagactttctggcgtcacaagggggagaaccctgggtttaaagagaatcctgggtttaagtccaactacaaacccacaggctctcctgggctcaactctgtctcctccaaggcgccctcttaccccaagagactggtggcaagcctgaacggagaccatttccaaagacagaagacaaaaaacactgtttgggctaaaaccgttaacatatgctcatccttactggagcctgtctccccagatcacgtatcttgccgtgtttgtgtagataccagtgccaaagcatgagagcaaggaacgacttggagatgcacaaaagacaagagctgcccttattccctccatggcagacggtaaatggcatttctcacctacaattctttaggcaagccgaaggctgaggcaatgactgtctcacacatctggcctgcactgctccggggctcgctataaacgcctttcaatttgaacgcaccagtgaaagcaggtgcgcagaaagagaaatgggtgcttttatgggacttttaaagtgctgtgctctttgtttctagagttattgtctctgttccaactcttcctgcaggttgggcatcttgatgtttcatgatgaagatcatggtggttctggtatgaatactaatgatgtctgatcgaacactggttcatttttgagataaccagctagtgattttcatttgaaaatgggtatgcaaataattttgggcttcccaagtgtcgctagtggtaaagaacccgcctgccaatgcaagagacataagagacttgtgtttgatccctggctcaggaagatcccctggaggatagcaactcactccagtattctcacctggagaatcccacggacagaggggcctggagggctacagtccatggggtcacacagagtcggacacaactgaagtgacttagcacgcactcacacatacaaataattgtatacatcacagggaaaggaacacaatgtgtgtttttaattttttatgttaacaat

SEQ ID NO: 31284 - DNA, 709 bp, Bovine  19866880345189
  misc_feature (1)..(1): n is a, c, g, or t
ntggtgaatgggagccggcggggagacggatgcttgcagtgactttgttgtcgccccaggttgcccagaagagaggaagaggacggagcagagatccaggtcatggtaggcagtccccagcaccaggccctcagatgaggcttctgtagtcacagctcctccccagcccctgcccacacccccaagcagacagaaaaatcgtttggccaagagttaacaacgccctcgctgtagctaatgagagcagacggtgctgtagtgggaggcttcaggccagtgggcagccagaatgttcccaggggacccccacacacacactgcacacggggccacagcctctacgccacatacgtggctacacccccggattgcggaaatgcacacgtatgtacgcccacactccggaagagccagaccttccccggccagcccagaactcctggggcaccgcatctgtcatagctgccctgccggcaccacacacagcagctcctttgctcctcagagcggcaggtgacaatcctggtgctcaggcagaggaagggagggaaggaaacgtgaggtcagaagccagaaggtgtgccagcttccattctgggcacctgggactcttcagggtccacactgaccaagatgctctccctggcccacctctttcccaccacaccacactcccgtctgtggagactggggcccacctcagcttcct

SEQ ID NO: 31285 - DNA, 808 bp, Bovine  19866880434870
  misc_feature (1)..(1): n is a, c, g, or t
ngatgcaaggcctggtgaacgagtcaaattaggaagctgagggcagagcaggttttcaggagatgctgagctcagtgaggatgtggggttgagggtcccaggggttggcttgagggcagccaatctcttcactcattcattcatcacacattctctgccaggggcttatttcagctgggggctggtgcagagccatggatgtgatgggaacaggaggaggaagaagggagggggtcagggattgcttcagagtatgtgtcaggcttttcctctgggtggtagggacccctgagtgaacgttctcacctccctgaagctcccatatagagatggagtccgaggcctgacttcagcccccagaccgggaccccagcatagagagaatcgcccttcttcctgggagggtcctggccccggaaagtgaggtcaggcagctcaactctctgggaccctcctcacctgccctgccttctcctccccaggtaagagcaaggaggcagagattaagagaatcaacaaggaactggccaacatccgctccaagttcaagggtaggctgggggcccatctcctgggtctgcgggaggagtgggctgggggctggagtacccgggacttgtaagtatagtcctttctcacttttgccaccccgtcctccttcctctgaccccaggggacaaagccttggacggctacagcaagaaaaagtatgtgtgtaaattgctcttcatcttcctgcttggccaccgacattgactttgggcacatggagggctgtgaacctgctgagctccaacaagtacacaga

SEQ ID NO: 31286 - DNA, 1536 bp, Bovine  19866880467670
  misc_feature (1)..(1): n is a, c, g, or t
ntgcatcgctcccaaatcagtcccttgctggagttacttctcccctcacccattccccactagctccttctatcccagattctctctcctccagagttctttcctgagatttgctcccgccgcttgtttcccctaatttcgtgctcgcattttcatcttcctctaaatatcctccagcgtttgtcctcccagtcctacctctccgaatttctgtgccccccagttcctcatcctgcccaggcatgccatccccaacccgccgcttcctcagttccaactttctcattcagaaggttcttttctcattcagggaattccttcccctttcgtagattccaacccccatttcgatccacccattgtcccctctagttcttccccatccacctgtttccatctttccccttttggattccatgtccctccagttctatttcccctcttggcccaccaccccttccagttccttcatttccgatttccttccctctgggttcatctcttcagttatactccccctaccctcctgcaggtcattattccctccctagcctcggatctatccccgcccttttatttctctcatcctgagttctgtccccacccgttgagtgtgtccccttggatatttctttacccctgagttctgtcccctcccctgggatctatccctgctttgatttttgcccacaccctctggaacccgatccaggtatacatccgtgagtactttccgcgcccgtgagttctagtccctccctctggaatctgtctccgccacctgggatctgtccccgccctctgaactcttattgcacccctgaattccagccctgcccctctggggttgaacctcgactgtcctcggccatctccagcccgaaggcaggttctgctccgctcctttcgccgccagcccctttccccgacgccgagtccacctccagatacagcccccaggagggtgctcctttccccatcgcctccctgcgtcgggccaaaaatgcacttgggattaaaatttcatgatgtggcacaggtccgcgagggagtgggagggagcagccagcgcggcgggcgggcgccaaggacgaggcgcagcctctcgcctctagctttgcctcgctgaatctttgggtgtcacagttttgcctgtgtttgagaaaacctcgaattcttagggaggagaggctgggggctgggactcctgggttcgagggaggagggagccgggagctcggagtccagagtctaggggagaagcccgcggagccgtccgcacgcgccaccctgcggcggcagaatccccggtctgggtgtggaggcggcggccgcggctccgagccaggtgtgaaggtggagcagatggtgaagaggagggagtgggaggggagccccgccgctgccagatctcaagccttcgccggaaccatcaccatggagaccgcggaaggcagagaggacccagccccacattttcgggacccgggaacgagttcttcagcctcccacggagggttcctttgcaaactacaa

SEQ ID NO: 31287 - DNA, 2045 bp, Bovine  19866880585007
  misc_feature (1)..(1): n is a, c, g, or t
ntgcttttgcctttcacatttaagttttaaatctactggagtcacttctgtctgatgaaaaataagattcaattttcattgtttccatgtggataatcacttgacacggctccatttgtcgaaaagtccattctttgcctgttgatttgcaaagccagctctgcagtaactcatgttttcacatgcaggttcctgggcttgattttttttttcctattctgtgattttttcctgtgcaaataccacttagtcttttttaaaataaatttcttttatttggttgcactgggtcttaattgcagcatgcatgatctttgatcttcactgctgcatgtgaactcttaattgcagcatgtgggatctagttccctaaccagggatcgaacctgggtgtcctgctttgggaacatggagtctcagccactggaccaccagggaaatctcccactcagtctaaactgttatatatttgtagtaagttcagatattcagtagagcaatctcttaccttattctttgctctcagaggtgtcttgtaattttttttattctccacttcagaatcaccttgtcaagttccagcaaaagaaagactcctccacttccaaaaaaaaagaaaaaccatttgcattttgattgcagtgcactgaatctatagactgtagaggtaaaaactaatatgcttgtgttattaatcatctcaacttagcaacatgaactatagctctgttttggtctgctttaacatgtctcaatagtgttttatactgttttcataaagttctttcacatcttttgttaggtttatttctatatgtcggtttttgttgtttagttgctaagttgtgtctggctctgcaaccctctggactgtagcccgccaggctcctctatccatgggattctccaggcaagatcactggagtgcgtttccatttccttctccaggggatcttcctgacccaaggatcaaacctggggctcctgcattggcaggcggattctttaccactgagccacctgggaaaacccctagttactctcagggtctacagcaaagcccagaacagggtgagacacagaggcagtgttcagtgtgttgagtgaatatgaaaaacagggactctgctaccttgggcagactatggcccccagccctgcctcagcccccaactcaccacaccattcactgacagcagctggtccccacgcttcaggcctccgtggcggtcagccacacccccagggatgacacgggagatgtagataggtgaattctgctccttgccccccatgatgttgaagcccaggccctcatccgtcttgggcagttccactaccctgggatgtgcatggccctcactggctgtgaaggcggccaccgtggcctgggaaagagaaagccttgggaggtgaggaccccccacaatgggcatacgcattcaggtagaggctaggcccctgcccaggaaagggatttggccagggagctttcctcaagaatggggcaccggccacacaagtcaacacaagatcactctggtgacaggacgtcagatttagtcactttggacacttcactttcaaagagaaagtctccatttggtgtgtgtgtgtcttgaatctcactttttttgccaatctcacctttttacagagagaaaaaaaggcctggacagagagtctcaagcctcgagcaagcaaacagcatctaaccgtggctaagtaagatttcagtgtttaacccaacttcattgttttcatcatgtaaaggtttaaagttatcttctggtcaggcatttcatactagtttctaactgtacttgctaattgccaggagaattccatggacagaggagcccagtgggctatagtccattggatcacaaagagtcgaacacgactcagtgactaaaactttctcttttcactttcaaagatacttttatatgacattgaagctacaaatgtgagactcttcaaaatacattataaatactagtaaaggtgatagatatggcaaacatcagaaggaggaaacagga

SEQ ID NO: 31288 - DNA, 1802 bp, Bovine  19866880601381
  misc_feature (1)..(1): n is a, c, g, or t
ngagattctaggagagaatcctctttgctttttccagcttttacaaagacctttttttcttggctgccctgatcagggaaatgaacctgcaccctcagcagtgaaagctcagaatcctaaccactggacccccagggaacatccagaagtaaactcaatttctttgtttctttgccacgcaacacacttggcaggatctcagttccctgaccagggatgaaacctgggcccttacagtgaaagcctggaatcctaaactaggatgccagagaaccctataaggacccttttgatgacactaagggcccaccaggataactcaggttcatcccccatctcaagatccttggcttaatcacatatgcacaggcccttttgccgcatcaggtcatatagtgaacaggtaacgtctttcaaggggccgttattttgcctacaacaaggacacagaggagagaggggagagatctgaatccaggtgtgagtgaagccaactccccccaccccccaactctgctttcctgtagagaatctggggaaggcgtttaggcacaaccagccctctgcagcctgctggcctgtgagaacaccaggcaggggtgagcaggctcagtcctgggctccgtccccttcttcccctgggggcagtcctctgccttcaggtcccctgtaagttaccgtctggatcaacagctctaggtcccgggcctcgaatgtgtgctgattctgagggtccaggtgttcaaactgcttcaggaggttcaggtgatccaactgtatgtctggatgagagggaagagtggggggaaagcatgaactcatggaatgttccttcttccaaaatccctatcctggactggatgggctctaaaggaggtcacagagggcatggaaggatgtcacagaggacagcatgaatgggcctggagcaatcagggaaggcttcctggaggaggcaatgaacacaattgagtctgatgctgaaaatgataataaccaacatgtgtcaaatacatattatatgccaggccctgctccctaaacacattaaatatattaatgcatttacttttcacaaaagtctcacataggttctgccattatctcactttatggttgtggaaacaggctcagagaggggaagggacatctaggtcaccatctaagaagaggcagaatgaagattagctgggcttcagagcacatgatactcagcctccttatgggttgaactgccttgcccccacattcacacaggggttcaaatcctgacccccagtatcgcagaacttatttggagacagggttttagaggtgatcaacttaaaatgaggtcatgagggtgagccctaatcccatatgacagaagtccttataaaaatggaaaatctgggggcctccctcgtggttcagtggtgaagaatctgcctgctaatgcaggagacacaggttcaatccctggtctgggaagacctcacatgccttggagcaactgagcctgatcgctgcaactatcgagcctgtgctctagagccggggagccgcaactacggaagcccactgcgcctggagcccgtgctccaccacaagagaagcccctgcacggcaactagagagtagcccttgctctttcacttggtggtctgcccagcaaggaagacccagcacagccaaataaataaattaaaagaaaaaaaatttttaagtacatttgtggtaggaagaaaatttgatcaatcttctacacagattttacaaaggccttgagaaggaggccccgaaggcgcccccagcccaaatca

SEQ ID NO: 31289 - DNA, 1099 bp, Bovine  19866880616009
  misc_feature (1)..(1): n is a, c, g, or t
ncacacacacacacacacaatggctccagtttcagaaccattttatacaaagtcacagtgtcagaactctagtagaaaacgggggcgggaggtggggggggaagggtgatcagctcaggaggtgtccatggtttcgccttctgtggggggaaggaaagccacatggtcagcacggcccagcaggcagggccagggctccctcctccctctccggggcaggcacagtgggggacactcactgagctcattgaagaggaaggcatcttggtattccttcatgtattgcgtggagcgtgactcgtccaggaagagagagtagacccgcttgatgtcatccacctgcacctcggtgccctgatggggacacgagacctcaggggggcctcacccaggagtcaggtcacgtcctgccatggccacctcctggctgtgggccccaccgctccatccctcagtttctttacctgtaaaatggacttaacagcatcaactgcagccaacagatatttacccagcacctcccatgtgtcaggctgggagccacaaaaataaacccaagggcctgaagttcccgccttcgagaacttttaagttctgggactaaatgccaccgcctagggaaagtcctgggagtagcgtgtggaccgctcactcctctgacgctgggtggactcggcggctcaccttgcgtttccggcacaccaaactggcagccgtgatgagctggatggcatagcgtagcgaggtctccagcccgatgcgggtcagaaccgtgtaggcatcctcactcatctccacgtcttcttcctcacacctgcgggcagggaggggcgggggtgttcagccagggacagagccatgaggagtcagagtccttggaagcccagaacgcggagtgagaagggccaccgaggcaggagctggacctcaaaactcgggcctcccgtgcctccccttttcagggctctttcccaagcgccaggcacccgcatagcccctcccttgtccaaagagccccgccccccccatcagaggccactgctcggatgccccgcccagtcctgcttctggcaggccaagtgacctcccccgcagacct

SEQ ID NO: 31290 - DNA, 1561 bp, Bovine  19866880642765
  misc_feature (1)..(1): n is a, c, g, or t
nacccagggcaagtcactgggccttgccgtccccccatcttgaaaacagagctgagggaactccttggtggtccagtggttaggactccgtgcttccactgaagggggcacaggattgagtactggttgggaaactaagatgtggcaagccgtgtggcatggccaaaaaataaaattagtaagataaggggcttccctggtggtccaatgattaagacgccaagcttccaacacagggggcacgggttagatccctggttgggaactaagatcccacaggccctgcagtacgtgtcgtgcggtgaaaggaatggaacagaatggggctgagacgatatctactcctgagctccttttgaggaaaggctgagccaaaagccaggggcaacttgctcattatccctggcaatcgcacccctttcttccctgtgcttcagctggcacaaggccgcaatcatgcacctgagcagccccgggcagtgggtccaggtggctgtgctgggtgcagccttcaggcccccggctcttgtgagctctttgccccccactttcttctcccttccttttgaagatgaggtgaggaagagccagcaggcataaccgggcacagcaaaaccctatggcagagcttcccaagttttatggtatctggtactcttcctgcctcagggatttttccactgtatccttaggtcaagagaaatactaagctgcattccctttatttctattcagcagtgaggtataagcgacttgctccctgttctcccaggggcctcctcaggggccggcagggctcaccgggtgatgccgcggttggtagccatgatgaggacaggcgccatgtcactctccagggcccggttgaggaaggagaagctctcaatgtccagcatgtggacctcgtcgatgaacagcacctgggggccattgggcaggtgtcaagcccaccccccgcaccccatgcccctcttctcccacgccccccacctggcctggcccaggtactcacgccagggatgatctctgccttgccctcctcccgccattcggccaccttggcgttgatctgctctcggacttcggacttgatctctcctgtgtcgcctgcgggaggcaggggttggggtggggggcagagtgtcagagaggagaagggatccagggccgggggtgggggaaggcagtggacgaaggcagagagagacgggacgccggggacacagagagcaagctggagtggtgactgacagtggctggggactcagacctcccagagaggcaacagatagggagagacgaaccaaaccacaggtggagaagaacggaagccggcaaagagggatggcagagagagggagaggggaaagagggctgggaggggcggggggagggagccgcctgcgggggtgggacgggagggcctcacctgagaagagggccaggaagccctgggtgcgggagttgatgacgtcgatctcatggagagacaccgtgtgcaccacctccttgcgcttctgcagctccccgtctgggcactgcacgaacttggtctatgggc

SEQ ID NO: 31291 - DNA, 3543 bp, Bovine  19866880653825
  misc_feature (1)..(1): n is a, c, g, or t
ncttgggcagagatgctcaccagattctcccataagtcttccctctcttgaggttcagagaggggaagtcactggatgtcacacagcaaggaagtagaaaagcagattaacactaataatcattgtaggaaaataatactgggtagtagtcaaaatcccaataactcatatttaataaatgtttacaagatttattaaatatgaggaggactagaggactggtgtagaggagcagactgaacacatgtctcccatgtgttcctcaaaacaactttaggaaatagatatcattattccctaggtctcagggaggtttaggtggctgatccaatgttgcagaactagtgatgaggctgaaactaccgagggtgaggaggggctgaaggaggaaagcgggactgagaacaagagggaaagacagagaccaggaagaaagagggacagagatccagaaagaagggaacatagacctaaagacagagagggccagagaccagcgagaggtggggaagaattccaggagacagagattcagtgtaggacagggacagagactcagagaaaaggataccaggagaccaggaagaggcccccccaccccaagtttactgttcccctcttggaaggtgtgtgggtggggaatggggctgtctggagctgtgcacatggagcccaatgtcactgcctcccatttctcccaggcttgtccttcatgcccttgcagatctggtccaaggtcctggccgtctcaggaatcctcaccatgggtcttgccctcctgggctgtgtgggggccctgaaggagttccgctgcctcctgggcctggtgagttcccctccacccttccacctctaggatcattcacatcttgtccttaaatagagccctggcagccccttcatcttggggagttcagcctgacctgcccactctgtcttcctccctgctccagtattttgggacactgctgctcctgtttgccacacagatcaccctaggaatcctcatctccactcagagagtccaggtgagctcaccttctcctctcacccgagctagtgggtggggagggagagagtggaaacagacagaagcaaaggcagacaggggctaagacagacaaagataaataacagagagagatagagaagacagaaagacagagactggtagagagacacagagaaggatctagagacagacagggtcagagaaagactcaccaacacaaaggaagacagagatccaaagggaaacagaagcgaggaaagaaaacccttggagaaacagctccaagaaagagaaacttaatgagatcgtgggagacagtggagacccggaaagacaaacgggggaaacaggcagagggcggtttggagggacagagacatagctagccattcagtgaaacaccgaggctgccacgaagattctcagagaccaccagaggctgggacggctacggagtggctggggtgggttggagcagagggcagtggggaagcaggtgggggattcagcctcactctcggcctatcagctgaagaagaaagtgaaggacgtcgtgcagaagaccatccaaaactaccgcactcatccggaggagacggcggcggaggagagctgggactacgtgcagtttcaggtgcatgaggccccccccaccaggatccttccctctagctctgggattctgacttggctccgccctctgcctggaggagacttggccccgacgggatccaagctcccagctctaggaccctaacgtaaccctacccacctaagccacctccagcccgtggcgacttggcccagtcccccagctctcaacccctgcagtgactcctccccctggctcgacagactccgccctcagtcccaaggccctagcctgaccccactctctgcccagtagcgactctggttcccaagggaccaggcccaagcgagattcctttccctggtcactcacatggccccgccctcccatccattatccccctacttacagctggtttgtactgcctacccaatcctccaaagcacgattctgcagctctttccccagcctcaagacccccgcccccatgacacctctctcccaacctcatgtacccctactgtcccttggccctgctgtgatcccaccccagcccagttttgttagccctctactcctcaatatgacccagtacccagtcacacccatcacctagtcctctgaccccccaaagcatcttgcatctctctagtccttgttcctgacttttttttttttttttttttggtagttgctttacaatgttgtgttaacttctgctgtaccctgttcctctgacttttgttcttctcagctgcgctgctgtggctgggagtctcctcaggactggttccatatccccagcatgagacgcaacgagtccaaaggggaccgcgtgccctgctcctgctataactcatcggcgaccaacgactccacaatcttcgataagatctccccccagtttagccggctcggatcactggcgcagccccgacacaatgtagaagtttgctcggtccccgcgaacagctacatctaccaacaggtggggaagatgtggagcgcaggaccagaggggtctgacagggtgggcctacgggaaagggctgttttacaacaggggcagaacccctacaaggggcgagatcttttggaagggcgggggcctaaagaaaaggcccaggcgaaagggcagaatctggaacgctgatacctggggatgaggtcttcagcttggatggactgaagcccagagactagagacccctgataactagggaatggggtggtacctgaaagaggggttaaggctggactgaggacagtgggctccgggcttgagggcaaatcccaaaagtaacctacctataacctgtccctgtatcctcagggctgcgaacggaatctctccaactggttgaccaacaacctcatctccatagtgggcatttgtctcggcgtgggtctactcgaggtgatctggtcccgcccccactcgcgattggcctagatggccctgccccaaattgcgcgtccaaccagtctctgggaaaggcgcatgcattgatagaagtacagccaatccaggccttcctgggactccacctggcctagcctctgtgagccctgattggttgcacgggagcaggcgttcccgcccttcctcacgaggctcccattggtcctccttgatatctggggatataccttgctattggccgcaatatccccctttccccgcaggtgagtgtagcggggttgagcctgctattaccgcgcagcctgttgcaccgcgaaaccccagccgcaggtgccgggtgcctacagttcgagctccgggcgcagcggcgtgctgagcagcagtgggcgtagcggcagtctgtggggtggctggggcatggctgacgcctgccccaactggggggacaaggccccgctgggcaagctgcctaaggtgctggggactctggttgctttgggatcaagacgaggaaca

SEQ ID NO: 31292 - DNA, 1597 bp, Bovine  19866880737713
  misc_feature (1)..(1): n is a, c, g, or t
naagacacggaggagaagacatggaagaagaggaggactgtgattcagaagcaactgaagatgagggagaagccgaggtctcctctgccaccccaccccccagtgccttcctgagtgcctgggtgtatcgaccaggagaagacatggaggaagaggaggactgtgattcagaagcaactgaagatgagggagaagccgaggtctcctctgccaccccaccccccagtgccttcatgagtgcctgggtgtatcgaccaggagacacagaggaagaggaggactgtgattcaactgaagatgagggagaagccaaggtctcctcttccatctctctgacaagtaccttcctgagcgcctgggtgtatcaaccaggagacacagaggaagaggaggactgtgattcagaagcaactgaagatgagggagaagccgaggtctcctctgccaccccaccccccagtgccttcctgagcgcctgggtgtatcgaccaggagaagacacggaggaagaagatgagtatgaggacgaagataatgaatcaggagcagctgacttggggcccagcccctcccttcagacccagagtgccctcctcagggaccagatttatcagcctggagagaaaacagacggaggagaagctgctgagaagtggggagaagctgagtcctgccccttccgagtggccatctatctacctggagagaagcccccacctccctgggatcctcctcggttgcccctccgactgcaaagacggctcaagtctgcacaaacccccaccaggcatcaggaccttgaacgtctcctgaagaccagaaaggtgggtactgagaacttagattcttgaggttagggaggagagggctgggagctggcactcctgggcctggggaccaaaggactggaggccccgactcctggctcccccaacttgcagagggttgcatgtgagctccattgggagggctgtgttcacgttaatgcaatcctttgcaagaggctggcccctgtgggaggaaggagcctctgagctcatgtcaaccccagggccccacctctaccttcagtgagtcagctggggaatcacttggcaggcaagataacaagccagatgacaagcattgttgcgcaactcatttttgttgttgttgtttctctttctccccacctgcggccctctggatcttgtgtgtgtgtgtctccccgtgtctgtgcccgtccatctccaggtgcgcttctctgagaaggtctccatccatcccctggttgtctgggcaggaccggctcaggccgcccgcagaggcccctgggagcagtttgcccgggatcgaagccgcttcgcccgacgcatcgcccaggtccaagaggagctgggtccctacctcacccctgctgcccgggccagggcctgggcacgtctcgggaaccctcccacttccctggccactgtccctgcccctacccagacctcaccgatgtcccccatccaggccacgcccttgagccacgctctggcctctccctcccctccctgtgtgtctcctagacctagacctcagtgggaggcgggctaatgtaagtagtttttgtgtt

SEQ ID NO: 31293 - DNA, 1569 bp, Bovine  19866880784840
  misc_feature (1)..(1): n is a, c, g, or t
nactgcaagacggattctcaaccactggaccaccaggtacgtccctaaatattttttttaattcctgtccccattctctgaagccccaggtaacctctattctactttctgtctctatgaattggcttattttagatttttcgtagatgtggaatcatacactattagtcttgttgtgtctgactcatttcagttagtgtgttttcagggttcatctgtgttgtcactctgaagaattagagcttcattccttttattctgttgtatagatagaccacactgtctattcatccacttggtggacaggttgggtcttagtagaattttttttttttaataaaatgtgatcatttcacatttcttgttgtttgcctatcctttttcactgtgcagcccttcttggtgctcattctctgtcagtaatatagatgtaacttgttctttttaaacagctatcttattccataacatgagggttgcacggtttagctaactggtcccccatggatggacatctaagttattgctagttacctctcttgacacctgcttcattgagctcgacgctccccatttgacatagcaaagtctggagggaccaccccctcatttaccccctcccttgaccccaaccaccccagctgtgtgtctctgccccactcccaggtcagtgactggtgggaagaattcgtgtacctgcgctccaggaactcactgatggtgaacagcaactattacatgatggtgagaaggggagacggaggttaggaagtgggcaagggatggggttcattgttcctcgggtctagggctggggtgtctggctagaatgtggggtttagggtcagtgaccccaatcacagtctggaattcaccatcccgcctgttgggatcaagacctgtgtttgaggtcagtgcctccatcctgcgcaaacctgacgcctggcctggcccgcaggacttcctgtacgtcacgcccactcctgtgcaggccgcgcgcgcgggcaacgcagtccacgccctccttctgtaccgccaccgcctggaccgccaggagatcctgccagtaagagggctgcccctgcgggctggggatggaggctgtggtcctcagatgtgtggccaccacctgggtcctgggaggcaggtcacgagcctgtgatctcctgcagactttgctgatgggaatgcgacccttgtgctctgcccagtatgagaagatattcaacaccacgcgaattcccggggtccacagaggtgaggcccctctacccctctcgttaatagaggtagaacagtatagtggctaagaacacgctctctggagccagcctacctgggttcgaatcccagctccgtaactcccaagctgtgaccttcagttcagttcagtgaccttgggcaagttattaccctctctgagcttgagtttcctcttcgctcaagtgggacaataagggtacccgcaagccacttggtaagtggctaacaaaggtccttattcttacaacgtatcccccccaaccccagatcacatccgccacctccgtgacagccgacacgtggctg

SEQ ID NO: 31294 - DNA, 1916 bp, Bovine  19866880792509
  misc_feature (1)..(1): n is a, c, g, or t
ncctttccttcctctgctctacctttccctatacacacagactgtgatttcacacagaactcatctttttgattaaggccttggagctttgcttgggtctctgctgggaacaccctgacttttctctgcctgacaactcaggaaggtctgtggcatcttctcttactccctacttacatggcacccagccccttgggctcctctgtcgtgatcaccccggaccttttcctctacacttgagcctccacagtacgttaccccagttagagcacacagtctgtctttctgcctccctgccggctgggactagccttgacagcaggcacctgactcctccgtatgccccccgtgccccaggtccctcgatctgaagcctccaccttcagtgcctcccaccacgtggcctacttcgaagcttctgccaaactgcgcctcaacgtggatgaagccttcgagcagctggtgcgggctgtccggtgagctgagcccccttcccgtgatcctcctcgtcccctaagcccctactccacccaaactcaccagcctcttcccacaggaagtaccaggaacaagagctcccgccctccccgcccagcgcccccaggaagaaggccggaggttgcccctgtgtccttctgtagggacaagctgctctcgctgagcccccttcccgatctgggtctcccaggacacactacacccccacccgcgattcctggcctcccccggggggccgtgaccaccctgtgccttctgtcaccgctgccttcccccacccgagccccagggtgagggctcccgggcacccgggtcactgctgtatataactcccctccccagagaaaataaacgtcactgccaaggaggtgtttttttataaaagggaccgggtgaactccaggcctgtgcacacttgctaaagcctagcgccaccgagaaccatcagatctaagaccctttgctcagggcagagacaagctgagccagccatctgacccccacttcctctcttaacagattccacccttttctgtctcaatgggcattttgttgggatgaggattaatatttgaggggggacttccctggcagtctagaggttaagactttgccttgcaaggcagggagtatgggttggatccctggtcagagaactaagattcccacaggcaggcaggcagggaggagctggtgaccggggctggggtgggggtgggggggcgtaaataaaaaaatctttttttctgggaagttctagaactgcacttttcagtctggtagctggaagctatatgtggctatttaaattaacttcaatgtaaaaactcagctcctgagtcacacagccacattcaaaagctcagtattcacacgtgtgacttagtggctactacccacaccccagccccaccgccgtgggcagggcacatacacaatattctcattactgcagaaaggtctgtcggacagaagtggtgttctaggagaccttggagacgagcagcaagtgctacgaaccgtgcccacctgcctcccacctccaatgtgtactgagaaaggcggtttggttgcgcaggggagaaggaacaggtgggctgaatggtgtttaagccgcagacaggcaggttctcagttccagaaaggtctcggttgggctgacgtctgactctcaaccttgaattcaactggaggctggtgtggaggaacctccctgccagcctctcctctgggggtggggccgaagtgtagggtgacaacggtttggggatcaggacccccaattctgtaccgcagctgctaacttcgaagactggagccagaaccggagaacaccactcccccatcgcccaggcccatcagagaggccatcttttttttttttaatatttccttatttggctataccaggtctgttt

SEQ ID NO: 31295 - DNA, 1402 bp, Bovine  19866880795300
  misc_feature (1)..(1): n is a, c, g, or t
ncttgaagcccagaccaatgttcttgtagtatcgagggagcttttctttgccagtttctccaagcaggaccctctttttattttgaaagatggtcggttgcttttggtacgcacgttctgtctaaggggatgaggaggaagcaggtaagacccgagcaggcaacaacctggcctggaaagcttcacaaaatcccaataccaccttgtcgggtatttaactccctgaacgttggccaccagcgccaagcaccccagaattatcttccaagacactaacccaaatatatctctaattcagactcaactctgaacccagggttacatcagtatttatgatctaaaacacctcctaccacctggagcattcaatccttaaagccccagcgatacaaaacaagccttaaacaccaaaactgttcagcaaaaattattcaagacacaaaaacatccaaccaggatgcacgccttaactaacataggcggctccagaattaaataccaaactgacgggctccctggagtggcccttagacgtcagttctcaaaggattaaccctacagcctaaagcctccccccccccaaaaaaaaagtactctgtaaatcttgatttttgaaaagacaacttccaaaatccttgaaccttaaattaaaccccaaatgcggagcctccaaaatttaagtgttagtcgtccagtcgtgcccgactctttgcgaccccatggactgcagcccactaggctcttctgtccatgagatttcccaggcaagaatactggaatgggttgccatttccttctccagaggatcttcccgacacagggatcgaacccaggattcctgcactgcaggcagattatttaccgaccgagctacaaaggaacatttaggaggtgctaatcgagattaacgccaagacaactgccctctgcccgatttaacccctgggaaattaacccccaaactggagcgcggagtcccactctccaggactcgcctctgaaacccagaccccgcagagtcggcatcggcacgtagcccatacctgaatgtccgccatcttcccggctgcctgaaaaaaggaaggccgcggcggcgtccgggtttccttatcgactgcacaagggttagagaggaagtgacgacaaaggggcgggacaaacacggtttggggcggtgccttggcgagactctgattggcgaacggtcctacctaagcacgcgattcgcagacagaacgaaagctgccatgatggtcaaggcagaggagcgggaagcggcacactgtctcgcgagagtcttacgccatcattgcgcgccggcatgctagggtcacgttgggaaggcgtggccagccttaaccagcctatgttatcgcgacatttatcggaaggcggccatgtt

SEQ ID NO: 31296 - DNA, 797 bp, Bovine  19866880820010
  misc_feature (1)..(1): n is a, c, g, or t
ntggccccccacccccggctcctcattaccgctggcagctcctaatgagcctggggtgggggtgacccggtgcccccggccccctggtctgcgtcactggccgctgcgggggctgtggaggcgatataagggggctgccagcctcgctgccgggagcccactgcgcggtagggcaccctgcaaatgggcttcgggggtgggtgggtggatgatggggtctggtttctgggcccagacacgggcatcactgagctctttcttgtctctccacaggtgatggagacccgccaggtacccaggagcccccgggtgcggctgctgctgctgctcctgcttcttgtgtcctggggccaccgcacggcctcaggagtcgccctacctcctgcgggggtcttcaggtaagtgggacatccaagtctcccagggaagggtggggactccgagaggtggaaagagacccgaagagaatggggaacaaagactcagaaaggggaaatagagacccagagaggaggccagagataggaggttgacaggtaggtaatctgcaaaataaagagatacaaaaggattctgagaaaggctttgagagacttgaaaggagtcgaagcaggaacgagtttgttccttgagcaacgtttattgggtctggggtgtgtgccacgcgtgcgccgagcgctggggcgggacaggggcatcagactcggtctctgtactcaggaggctcggaactggtgaacactgagccgaagacccacacagagcaagagacaggggacagagaccgagcccctccg

SEQ ID NO: 31297 - DNA, 1037 bp, Bovine  19866880880066
  misc_feature (1)..(1): n is a, c, g, or t
nccccatgctcttccccaccccacgctctccgccccccacccccttccgcccccgcatgcctgtttcccttccctgttctcctgtcttcatggttccctcatcctttcgtccgtctctctctcacccgacccttagacccacccccacagtggcccgaggagacctccgcccagggctttcgccagctgctggagctgaacctgctggggacatacaccctgaccaaggtgaggctggggtccccgccaccaggcctgggtgacctcctgaccatgagcttttcagacccactttgtctaagagccaaatgttttgtgtgccttgctttgatcttattccggaagggctccgttcttcgtagaaaagaaatgcccatagatccctatatccagccaaagctacctgtgttggctacatagccccatcttcttagcaaccttccagaaccttccagcatggtgtggtgagggatgttaaggatatggagggaggggttgggacaaggagtcagtaatagacagatacagctttgccatccaacgaatagctattaggaggaaagagcatcccccctctacccctatgcctttcctctgaagcttgctataaccgcctcctatttactgtctcagttcaaataccacatcttcagaaaggcccttcccaatcatccttgcttatgtggcatctacacctatatatggggcttccctggtagctcagctgggacagaatccacctgcaattcaggagaccacggttcgattcctgggttgggaagatcccctggagaagggaaaggctacccactccagtattctggcctggagaatcccagttgcaaagagtcggacacaactgagcgactttcactttcacacctatatgttcattctctatgataacagcttgttttcatcaaagtattttttaagattatagtttactctcttttttggtaaggtgttgttgttttttttttttgatgtagaccatttaaaaagtcttcattgaatttggtgcagtattgcttctg

SEQ ID NO: 31298 - DNA, 1419 bp, Bovine  19866880898115
  misc_feature (1)..(1): n is a, c, g, or t
natttgagcaaagacctgaatgagatcaggttgagccatgtgggtatctcggggaagggcattcccgactgagggaacagccagtgcaaaggccctggggcaggaatgtgcctgcctcaggccagtgtggccggactggagagaggcaggaggagagaccagctctgtttaggccacaatgaggatttggacttgtgtggcaggtgcgcgggtaaggggccagcgtggagcagaggagggaggtgaggggacttagatcttcacaggctccctcaggctgcacatggagaacagactggcaagcgagggctgaggcagggaggctggtagggtgaggaggaaacgattttcaggtgggtgacggtggtggcagtggcgggggtgagatgcggtgggattctgaacacattttgacgatcagccaacaaacttgctgatggatcggactgtcagtgggcggtgagaggcagacggagtcacaggtcccctccaaggctttgggcccgaacacctggaaggttggagctgtcacttactccctgtggaaggagatgggggttggagagtgggggtggggtttcaaggcaaaggtgaagggctcagggtgacctcctcctttcccgagctgcgttgattctagccagagacagatccacgttggagcccccgcgccacattcactgtgtcccacccgggctatcaacccaagctcagaccccttgagcgtaagtcccgataaagcgccctctgcggcgtcagctgccacctgtcaccaccaggtggcgccccttgcaccagcccgatccaccccagctcactctccccccaaaatttcctttcactttcgatctttggctgtcacccggcgtggccccttccacacccagctggggcaagcctggtgcgtgaggagaaatggactccgggtccccgaagggcggggccggggtccccctcctggggctgagcgcagacggcggggggtcgggttcctgggtccctggcctgagcagagttgcgggcaccggacgtcggagttcttagaaggggagatgaggagttttcaccgtaactgtgctttacgcaggaagccctatagagtaggaggcggaaacttagccacatcaaaggaccgagggaggggcggggaggtgaaggggcgggcaaggaaggggctggggtgtgggggtccgagactcgctcttctgtcccttccaagatccggccacaggcatgaagggcccccggcagaaatggtagtgctggcgccagcctggagcccaactgtgcgtatcccttggggttaaggtgggggaatggcagtgtcaagatgggcagagcttagaggggaggtggacagagttggggtggacacgagtggggagatgaacaggggtggggggagatggacagagttgg

SEQ ID NO: 31299 - DNA, 1806 bp, Bovine  19866880967651
  misc_feature (1)..(1): n is a, c, g, or t
ntgtctggatccggagctccccgcagcgtctctcggcgcttttccgatctctagtttaaccgagttgtaaacacattggcggtcgggcattgcattggggaaagtggggtagaagagccccaaacttggacttcgggtgtctgcgtgtgtctgtctgcgtgtctgtgactagccaaagtctcgtgctttctggaaaaaaaaaaaaaaaaagctaaaggtctgtgctcttccgtgtctgtgggtccgtcccatgtgaacgcttcctgatcttctgccccgtatcactttctatttttctgcagcgtccatcgatggccccggtgggagcttagaaggcggcaggcgaagagggctaggaggggggaagagccaaggagaagcagaaggggtggcgggcgagggggtccgctgagccggctccgcaccgggtcctaagagggctcgcggaggggaggggaggccggggtcaccccgaagccatggcccggtccgctaggacggcgctgcgttaaggcacctcggagcaggaagacacaccaactctccccttcccgcccggaaaagctgcacccgagcggcaggcgagagggattccaaactgaggagcaggcggggtggaggggcgggtctccagaagccaagtggctgataatctccacctgccggctcggaagccccgcctctggagcgccggtggggagggcgcgtgggtccgccacccatcccacctccctcgcccctccccgccccggcccggtcccccgcctcccgcctccggccaccatctctgcctcccaccacctccaccatgacggtgatgtctggagagaatgtggacgaggcttcggctgccccaggccaccctcaggacagcagctacccgcggccggccgagcacgacgaccacgaatgctgcgagcgcgtggtcatcaacatctccgggctgcgcttcgagacgcagctcaagactctggcgcagttccccaacacgctgctgggcaaccctaagaaacgcatgcgctacttcgacccgctgaggaacgagtacttcttcgaccgcaaccggcccagcttcgacgccatcctctactactaccagtccgggggccggctgcgccggccggtcaacgtgccgctggacatgttctccgaggagatcaagttttacgagctgggcgaggaggccatggagaagttccgcgaggacgagggcttcatcaaggaggaggaacggcccttgccggagaaggagtaccagcgccaggtgtggctgctcttcgagtacccggagagctcggggcccgcgcgggtcatcgccatcgtctccgttatggtcatcctcatctccatcgtcatcttctgcctggagacgctgcccgagctgaaggacgagaaggacttcccgggagccatccaccgcctggacaacaccaccgtggtctacaacgccaacatcttcacggaccccttcttcatcgtcgagacgctgtgcatcatctggttctccttcgagctggtggtgcgcttcttcgcctgccccagcaagacggacttcttcaaaaacatcatgaacttcatcgacatcgtggccatcatcccctatttcatcaccctgggcaccgagatagcagagcagaaggggaaccagaagggtgagcaggccacctcgctggccatcctcagagtcatcaggttggtaagggtatttaggatcttcaaactctcccgccactctaagggcttgcagatcctgggccagaccctcaaggctagtatgagggagctagggctgctcatctttttcct

SEQ ID NO: 31300 - DNA, 1316 bp, Bovine  19866881073108
  misc_feature (1)..(1): n is a, c, g, or t
ncgctgcaggccgttctgcaaatggaacagaggaaacagcagcagcaaagccacaacaaacccagcccccggccccgagggacagctcaagttccacccggacacaggtgctggcctgctgggcccaggggccagggagggagctgggggcccagacttccgtgtctgagggaggaggggctgcgatgtctagccctgccatgttctccctccgttttcagatgatgtacccgtcccagctccagctggtgaccagaaggatgtggatgcttcagaaaagaaggtcccagaacagacccctgagccaccccagctggattcacagcacctgtgatcgttccaggaccccaacactcagggttcctcccaaggctcatgggaggggggtggagtgtcacaatcaacctcctctggggacccggccacacttgtggcctcctgcaggagggggaacaggctggctgtttccttctcatactgctgcccaggccctgtatctgccacctcagtctccacagccttccagtctgtggtcccctctttctgttcccctccaagggacttgccttctcgtatccagttgagtgctcactggcctcagcttcactgagggaagcccccttcctccagggagggtctgctcacacctgcctttctagttggtttggccttgacgcccaggttgtggccactccagcatcccgcatccccacagctgctgaaatcctgcctgctgctctgggcccagcttccgctggtctgtggggcttcagtggcccctcaacacctttctctacattttgtgggactggcgatgcctcaaagatagtgtctcccccacagctgggtgtgagggccagaagagtcctctgcatcgctgatcaactctgatcccaggagccctgactctcctgacccctggtttccagccatctcagccccctccctgatgtcatggctcctagccccttccttccacatccccagaaggatcacagaactgaccccaccgcaggattaggttccagcccctcagcctttctggctttatctcacacggctccctgttctgctctatatgctggttccatccaaatacactttctggaacaaatccatgcctctgtttctttggaaaccctgtttcttctgaaactccacttgtgcttcacctgccaaagccctcttcattaagaatcaattcaagcatttctgagaggctccatcatggcatctttgtcctgtcctgatgggtctgctgcctacacacatgtgcataccttcagtagaatcccttcagccacaaggacagaaaa

SEQ ID NO: 31301 - DNA, 1392 bp, Bovine  19866881075945
  misc_feature (1)..(1): n is a, c, g, or t
ncccagagatcccagcaccaggttgtggggagtgggtgtgggtaaagggaaggccactcccaggatgttctagatctagaaagcccccaggttggatataagaaccagctgtagcaagaggggtctcaatcactctggtcaagggacctgtagcagcagagtgggcggtgttccaacttggagaggaggggtgggcacagagcagtaaaacatcagactcatagaggcctggcagcagcagacaacgaatggtcagactccctgaagactagcagcagcaggacggaaggtggtcagacttagggaggacgtcccatagcagttaacgagtggccagaatcaacgaggccagcagcaccaggatggaaggcactcagacgtggggaggcaagcaacgcaggacaagaggctgtcaggctttggacgaactggcagcggtggggcagaaagcagtcagactcaggaagggttgctgcagcagagggagaaaagacaaccggaagtcgggagcacagttccccaggaggacctcacccagctccaccgtgaggggctgggccagccccgcgtgctgcaccacgcagcggtagtggtgctcgtcgccactcttgactgtgagtgatgaccaggcgtagaaggagccgtcgccgttggggcccatgtctatctcaccagagccaatggccagcccgttccgcaggaagcgcagcttcagctcaggtgggtagaaggagaaggcgctgcaggtgagcacagagaagccgggactgccgggtcgggccttcaggcgcatggagggtggctctgcagacgaacaggcagacaggcctaagccccaggcccagggaccccccaggaccaggcccagagttgcgcagagatggagagaggcctccattcctccccctctacccagcaggtctcaccatgtgccgtgtgctgctctgtgctgtgtgctcagtcgctcagtcgtgtctgactctttgtgacctcatggactgtagtccaccaggttcctctgtctatgggactctccaggcaagaatactggagcaggttgccatttcctactccaggggatcttccggacccagggatcaaacctgcgtctcttacatctcctacattggcaggtggattctttaccactgtgccacctgggaagcccccatactacacctgatcgtgcactatgctgtcctgagcctaaaggccttcttaggggtactgatatccaacctgcccaccacaagggtatccatctctcttccagtccttcctacaatgacacacgcatctaccatgggatgtgccaggcactcttccagacactagagatacagcagtgaacaagagagacaaaagtgttagtgctcagtcgtgtccaactct

SEQ ID NO: 31302 - DNA, 2175 bp, Bovine  19866881109047
  misc_feature (1)..(1): n is a, c, g, or t
ngtgcctggtgctcctggggctgccccgggtgcccccaccccttcgaggtgctgctgcttcactcactcgacaggcccttccccattgatgtcgccatccacgtcaagcatcgggtccttctgcgtgggctcctcatctgacttcctggcgtggagggacacccagagtgaggaataggggagagggagggtaggagaggagttctccagagagacccaaactcagcacccagagacatggcaggaaggagaggaattaccccaaagggacctgcccccagagccctagtcagaaagcagaggaatcgtatagagtcccccgaaagcttcccctcccacaacgtgcccccagtctgggggagggaaagaatgaacatggttaggcaaagcactagacagaccacgtagaaaggcggccagaactgagcaggaaggagaggcccgatcgccccaccccacccccaatcccgcctcctgccaatttaaccccagggactgacctgaaggtgatgaggtcggtgtagatgagtggggggcaaaagaaggcaagaaccagggcccagatgggcgtggtgctgtccatctccccccaccacttctgtgtcagcagagactgcgggggtgggggaggattaggagcctgaatctcccccgcaaccccctcccgaagaccccaggcaaggattggaccctgctccagagcccagggcaaatgctccctgcagtggtggggctgggggcgggggggacggaaagggtcaaaggcaggaccacgtgtcgcagattttagtagagttaaacagccaacatttgttaacacaatacaccagatactgggctaagcacttcggacagatcagctcacttaagcttcaccaccccgccccccaggaggacaggtactattattttctccttttccatagatggggcacagggaggttacggaaggggcgaaaactggaacccaggagtttaaccatcattcagagtaaaggactctgggaaagtacttgaagtgccagcaagtgaaggtgggactccctgctgcgtaggcaaacctcgtactctgggtgggactcactgagcccctgtcagattcagactaaggaaaccaagagaagtttcaaactgtcaggattaagggcttccctggtgggtagtccagtggttaagattccacgtttccacttcaggggggcgtgggttcgatccctggtcagggaatttccacgtgccactgtgtgccccccaaaaaagaaagaaagtagaaactgacaaccagaatgcaaaaatgcggggctgagtacaaataatgaggtacgaaatttactcccaattatcataaataagtcttttttttttttttaatgtcaggattagcagaatgggagagacagaggggcacacagagcttcccaaaggaagggtaggattccctaaaccagagtttgtctccacctggaacactaggtaattgtccagtgacgccgttctgattgttgaaacctggaaacggggacctctcagggaagtgggaaggacttcttgtgtgagaggcgggacttcctactaaagtcaccagtattcctgtatctggaatagaattttttttttttggccacattgcacaggcatgcaggatcttagttccctgatcagggctcaaacttgtgccccgtgcagtggaagcacagaatcctaatcactggactgccagggaattccctggaatagaactttttaaaaaatatttgtttgttttatttatttggctgtgtctagtcttagctgtggcatgtgggatgttttagttgcggcatgtgggatctgactccctgaccagggatcaaacccaggcgccctgcattaggaacgcagagtcctaggcattgaagcaccaggaattcctggaatagaactttctagaagggtgtgctttgctgtgggaaggttggctttcctgtggcacggcgtggggcttctttggggaagagcaagctttctgggtgagggctgagattttctggaggaggggtggtctccaggaagggggtcaagaccatggactgcccatggtcaagaccatggcaggggctcatcctccagacttcccagagtccagctgaggactgtgtggggtgtctcagatgctcacctgtaccccatcctggg

SEQ ID NO: 31303 - DNA, 925 bp, Bovine  19866881111971
  misc_feature (1)..(1): n is a, c, g, or t
ncttgtaagatcccaaaataagtcataattaaaacaatgtttgttaacctgttcagtgttggctattactgtaattattctttcatccacacatgcatgtcaattacccatcctacttattgcgccaacttcaaaaaactcttctcagcagttcaaacaagagtgctccaaatgtcctgcacccggtccagcctcataccctgcgcctccccactggttccccagcaagctgatgctacaccaccctttccgaaaaccactaatcccccttccacctttgtatgagccgctgccttatgtagctcgtccctgacctctctggctcagctagctccttgtggttattcagatagagcataaaagtatatatattttagagatgccttgctctgacccagccaccttatattttcctcctttatagcaggcgagcattttgaatttttgttaagacccatcccccatgatcagactatgatttcaggagagcaagtgttgcccataagcccactccctagagcacagaacggggcgcccaggcgccatctagtaagtattggttattagtaaactcatgtaaaaaaaggcatgctgaggcccttcctttaaatgagcaggcacagacgctgatgagagttgtttattgaatttactcacatgccagcttcccatcgaaactggacaagcagatggcaaaggcttggagcgggcaaagtgggaagcggaagtccatggtgaacgtgtctggggctacacgaccaaactggagcacgaggtagtccgctgaagaggaagtcaggaactgagggtgtgttatttccctgccgcgggcctctgagccgcgagaactacgactcccgagaggctgtgcggcgcccttattccgcccagaatcccggaagtgtgtttacagggccctcagccg

SEQ ID NO: 31304 - DNA, 885 bp, Bovine  19866881163305
  misc_feature (1)..(1): n is a, c, g, or t
nccgttcccaggaatccggggggactgaccccggctacagtaagtaagaagacagggctaggtacctggattcctggggctggggcaggaaggtcactggggcctggaccccagagatggggctgggggacccagtctcctggatctggggtggtgatcaggggcagtgtggaagagtctgagggcctggtcccttgggtcctagaggcagtcacattgagggaattggttggatccttgtgttttcttagcgtctcaggagtctgggttactgagaggttggggcctggggaaatgggatgtgtggtcctcacatgagcagggacagggtggagcccctcctggcctattccaggtgttggacatggctgccgacggcctccttgcggggctggtgagcatcctggatcccccagacacctgggttcctagccacatggacctgcggcctggcgagtgagtatctgggctgctggactgggagaggccctggcgtgggggtcggacacacctctgaggctccctcctccctgtcttgcagaagcgaggacatgctggagctggtggccgaggtccgaattggggacagggatccagtccctctgccggtacccagcctgctgccccgtctcagggcctggaggacaggcaaaacgggtatgtggggccagggccgccctggcaggggtcaatcgaggccttagctgtcgctggtagcagtggtagtgctgttggtgtcatttagacaaaacctgtaccttaacgtctttcctgctagacttcaggaaaggctgtaagcacgcacgtgtcgatgtaagtaaagctgaaactgacgtgagagctagtgcctgggagcagtgagccgcgtgtccagggctctgtgta

SEQ ID NO: 31305 - DNA, 535 bp, Bovine  19866881186563
  misc_feature (1)..(1): n is a, c, g, or t
nttggcctccaggaagctttggaggagaggaagaggggggcggtggggtggggccccagagttttttgagaggaggaagtttgctagaaagaggtttgtttcttgtaaaagaagaaagaaataacttttgctgatagggttggttttgataaaggaaatcttaacgatgcaggagacagcagttgcccctcccttccctctccaccccccaccccccaaggcaagggattggctgggttccaggtggttttgaggatgtcacgttgaaaacctcacggggaatcgggcaccccgggtcaagacagatgctgggtgtgggagcagcaacacggcgtctccagggagggggtgtggaccactgggggcctgcggcacctctggcgggctgtgctgtcctcccccttccccccgctgccctctgtctctgcctgccctgtcccagcccccctcatggccgcactctccccacagcgtgacctggacttcaccatcgacctggacttcaagggccagctgtgtgagctctcctgctcca

SEQ ID NO: 31306 - DNA, 685 bp, Bovine  19866881257291
  misc_feature (1)..(1): n is a, c, g, or t
ntcttgggggaaggtgattccatggccttcctcacctcctcaaggatgtcagccaggagctcactttccaccagaggaatcacaggactttccttcaggcctgggagagagtgcagttagggacaccctcctactcatatccctgaagaccaaaagaactacaattcccagaatcccatgaggcacactaattcatggttctaacatatggatgccacaggaggtcctgagagatgtagttctaaacagttgcttgagtggatgagtagagaggatacccacctccactaccaggcttgccctgctaccctcccaccctcccacccttgttctccacatgcttacctttctgcaggcattcccggacatgcttggcttcataactcatgcccattccatttgtaaaattgaactccttgcctggggctggaggcagtgggaactccttatgctcccccttcaccaccagctctgttgggctccagcaggggtcgaggagctgagagaagagataagaggtggtcccaccaccctcaccaacagggctgctcaggagctctctcttgtcagttaagcaccgatcacccgccatcctcaggaaggggtttggggtccccacccaacccagccctgccttggttgctggaggattatttcttagcatcaggattgccacagtacaaga

SEQ ID NO: 31307 - DNA, 1282 bp, Bovine  19866881270493
  misc_feature (1)..(1): n is a, c, g, or t
ngcatccgcctgtgtggcgagctgcaggcaagtggcatcaccccagagtgggcagcgccgaaggagcaggcgggcggaccgttcctcgctgctgcggtagcattctccaaagaggtctggggaggaagagttgtgggaagacagtgggagggaagagatgaggggatcgcaggggaaggggcagggttactagagaaggaagggggagacttacaacccccccttcctggctgctgcctgtagtgcccccaggcacccataccccacgcaccaacacccagcccctcgaacttggccgccagctccttcctccgcgccgcctcctcggcctcagtctccaggcgccccaacactcgcagcaacaaagaggcccccaagagctgaggccacagaattggaaccctggagagacagagacatggggtcatgggtagggacagagtttgaagtgagattcatggaggtggtagagaagatgggaggaaagtttgtgatcaaggaaagggacagaggccagaggtcatcagaaattaaccaaggaaatcaggaaccaaggatgtctgcagatggatctggaagaaactggatgtcaagggaacatgtcagaagtcagatggttcagagactgcccgggctgggctggaattaaaaggacatcagagccgagaagcagtcagaagtgtcacctaaaatggcagaggaaaaaggaagacagcatctcacgtcttggccagacctattgaaagacagctacatgctcagtccgactctttgtgaccacgcggactgtagcccaccaggctcctctgtccaggagattctccaggcaagaacactggagtaggttgccattcccttctccaggggatcttcccgacccagggatcgaacctgagtctcctgcattgcaggcagattctttatcactgagccacctagtaagttgagagagatggcagaggctgctgctgctgctaagtcgcttcagccgtgtctgactccgtgcgaccccatagatggcagcccaccaggctcctccatccctgggattctccaggcaagaacactggagtgggttgccattgccttctccagtgcaggcatgcatgctaagtcgcctcagttggagagaacctcaaaacttggtccctccgcaacggcaacaaataagctggctaaaaaagaaaaaactgtcaggatcagctttttcagaattctggaatctaacataaaatttacaacaaacaggagaatgcttaataagaaagatttcagtaaagag

SEQ ID NO: 31308 - DNA, 1114 bp, Bovine  19866881339368
  misc_feature (1)..(1): n is a, c, g, or t
ncactctcccttgctcccagtgctgtcagatcctcctcccatcctatttgcctctcaggggtagtgaagctgcagactggcagtttcaaggatacccaaattcccctaaagcttctcttctccactcttttctgcctcagtggtttcaaatctctcctttcagggctttatttgaatggacaattcagactcttcctctctcttgtggttttgggcacctccccctttccttgaacccctgggactctcaggagaacccctgagattactcaacccccctcctctttcaaaaaaattcaaggtcttcctctagaagtttcaaatctctcccaactgtattctgctttttccaagttggtttaactaatcacccatccctgccattctagggattgattctcaccagcgtttctgaggggaaatggcagtttcaagtacccccacccaaccttttcatccctcccccaccagcagactctgctgcagcaccaaatttccccaaaaccttctcccagcttagcacattgcctagggaaacaaccaaaatggcagttttaacaatatgcctctcttcacccccatgcactttttctgacacgattttcaggtctaagaagagcggctgctcaagtccatcaactcaacggtttgaagccaccgccactgaacttccccatggtggtttcaagatgctccccttacccccaattccttgcactttattctcctgggtggttttgaactgccctcattttctcagtggccatttattgcgtccctcaggggctaaatgactccaaatctgggatccttcccctctcagactcccctatttcggcttagaatttgggggaacatatgtaaaggagaagtcacagaatcccaggaaagggaatggggctggggaaaaggggtgtttttccccggggcagggttgtgtctttgtgtctctgtctctgtgattgtaaatcctgccctgcccctctcccaataaaatgcttcggtgtacacactccgtcgtcactggccttgggaatctccaacctccttctccctcggaccgaggagcccaagcccccagtctcctgaccccagccaccctcctctcccaggt

SEQ ID NO: 31309 - DNA, 1927 bp, Bovine  19866881357594
  misc_feature (1)..(1): n is a, c, g, or t
nccacttccctctccactccttccctctctcttgcctggcctccctagctctctcctctgctgataactcctttttccaacatcaccctccttgccctgaagtgcctcccttctcttctttaaccctttccctgctcccaacctggtccaggaatggagactgcaggtggaggaactgggacacgatgtagagagcaaagaggtggcgatcgaccccctgtccactcatcgctgccttcagcagagcttggtgcttatccaccgccaggcggaacagggcgaggcactgtgcgtcctggggacccccggggaggtcacaggtcatggaaagacaggaaatgggcttactgctggggcctgtcgcacccccggcctcaacccagcttgcaacttccctgcaaggcagagatatcaactccacttcgcagcagggatacaggcacagagaggggaagtcacttgcccagggtcacacagcaaggcagaatcaggtgggttcccaggtatcgagggcccaaactcccttcactgagcctcaaaacaagtagggggagaggaaacagaggtgcctgcggggttctgagcgagagattatgtagggaacatgaggaatggtacaaatgaaagctacaaggtcacacagaggttaaataaagagacctacattttggaaacgggtgcccactcgtgccctctgtgtgatccccattaaagcatgtagtacactatgctgaactacctctgtctcccccatcagtgagctccttaaggtcagagactcggcttgttcctcccctgtctcatcacagagcttggacctcagaaggcgctccttaagtgtttgtaaatgtatgaatgagaaggtggaaatgaccgaagcctcaaatgaggcccacacccactgtcttctctttgtcctccatggctctcacaaagtcgcgggcctccctcgtgcaagaacgcaccgtctctgtgcggccttccaggaacaagcgagtcatggtggattcataagtcaggcagaactgacccctgtcctggggacaaggaggagacacgcctgtcagccaggctcaggaagccttcacagacctgacccacctctgtgtggccctccagcctccttccacccaggaacatgcagttgggagagggctcgatggagcccttaatcaagatggcagacccaccaccaaggagtcatgaaagggctcgacaatacgggtcttgggggcccaggggaactgaggtcctgagaggggggctgggggttaagaacccaactgaccccggaagtgggccagctgcaaaggtggtctggatgaagctgtctgaagagagatggcagcgtttgatgaaattcttgccaaagtgggagaaggggaagacgtggcagtcgatgtttccagacaaggtcttggctgccctcagggctagagagatggatagatggatctgccagagaaggagggagggaggaatggctgggggttacagacaggaggaagttggagttggggctggtgctggcagtgaaggtcaggatgggattgaggtttggggacagggatgggatggacagggaatggagctgggaatgaggaatgaattaggactgggaatggggttgggattgggtataggatgggatatgaatgggggttatgtatgggatggggttgaggagggcatggcaacccacttcagtcttcttacctggagaatcccatggacagaggagcctggtgggctacagtccatggggtggcaaagagttggacatgactgaggccacttaggatgcatgggatggggttagggttgaggatgggattgaatttaagcatggtgatggggagactttcctggttgtccagggctaagactccatcatcccaacgtaggggcccgggacaaggaactagat

SEQ ID NO: 31310 - DNA, 2098 bp, Bovine  19866881378204
  misc_feature (1)..(1): n is a, c, g, or t
ncccccacccgccagcgccttcgggctggggggggcgctggaggccgccgagagcgaggggctggggctcggctgcccttcacccctgtaagcggctggacgaggagctgaagcggaacctggagaccctgccctccttctcctctgacgaggaagactctgttgccaagaaccgggacctccaggagagcatctcctcagccatctctgctctcgatgacccgccactggccgggcctaaggacgtctccactccagatgggccccccttagctgcagaggctgcagtccccgggccacccccgctcccggggctccccagcgccagcagcagcggcacacctggtgagagctgggaaggaggtctgtgggggcaggccagggattccccaagattcagggcacaggtctgatggtgtaggttacacactggtcagcataggttgtaagtgatggggacaggtgggtgacagggtcggagagagcttttaaaactgatgaggggacatgggatgtgtgaagacctctaggggttagagatgtatgacagaggacagaagagggtctgggggagcagacagggacttggggagagttggttaaagaaacatgcattaacaacgactagtcagatcgtggggtgtggggcatcaggaaaggctaggggtacagtcatgtctgaacggcatttagtcctgagagggcatgtcggacaaaatttcaggggctttgataggggcattggggatgaaagagttgaggtttgggggagggtgtttggagcagtgaatgaagcttaggtgctcagaggagtcttatggaatggtgacgtcttctggaaggtgggaaatggggagtaagacagtgagagactaaaggaaagcatcagggaagagatgggaaagactggcaagttctatgcagagcgtctggatcggctgtaatgggagagagcatcatggaaagagagggccttggaagggtcaggaaggctcacggctaaggacccagggatggatcaaaagcagtttgaagagtcaggagatctcaaggcgttgggctgggtgagtgaggatgtttcaaatatcatgggtatttaacaggaaggagagggcattggcaattccgaagagcaggctgaggaaaggaaaggaaaggggagagcttggatagaggaggatgagatctctgagcagataaggaacaggtatacagaggggatggcccaggaatcaggagggacattaacaaatgggaagtaagcaccagactgggaccccaaaacagcaaaggtaattctggactacaatggactctgtgggaacctgtttcaggggctcagaatcctcactggagtctcagggagggatgctggtgtggcaggaggactgttggggagctgagtggcaataaggaaggagccaaggggctgttggcacagggagagacattcacggacaagagcagaggtgctgggatggagaatggtatttgcagactggggggcagggcagggccagaagatttgtagggactaggctagggagccaggaggggggtttgatgggaccagagaggcctcctggccattgtggtggggggacactaagcaatgcagttgggttgcagaactgccctatgacactgggggtctgcgaagaccggggaaagatgaggaccagagtggcatgtctgcctgagtgcctagtcaataagtcacgtctgactctttgtgatcccctggactgtagcccgccaggctcctctgtccatggggattcaccaggcaagagtactgaagtgggttgccatgccctcctccagggatcttcccaacccaggattgaacccaggtctcccacgttgcagatggattatttaccatctgagccaccaaggaagcccattaggacattggaaagaggagttaaaggaacgtgggcttcttgtaggtgtcggggatggggcaggtgttgaaggtcagggagaggacagtgagcgggtcagacaaggaccctctttgaaggaggagaaagggcaacagaagagtaatggaaagtagaaatggaggggggttgaggccagagatggttgttag

SEQ ID NO: 31311 - DNA, 1152 bp, Bovine  19866881385093
  misc_feature (1)..(1): n is a, c, g, or t
ncgacggcgcagtggggcccggtgggagtctgtcccgggtccccccatggccaggctgcccaggccgctgcccaggccctggcggaactcctcgcagagcagggtgaaggcccagaagtagagcagcagctccagcacgctgggcctctccggctcgaagtcgatgagcagcacgcgcgcaaacagcagcaggaagaggaggtagctgaccacgttgcccatgaaggccgtcaccggcgccccccagaactgcggccagcggcgcaggcgcggcaggcaccccccacagcagtccctgcgtctgggcggcctcagtacccccaagggcatcttctcagggggctctgtggccctgtgcgggagaaagggggagaagggaggagggctcaccctgatctctgcacctgactttcaccaccatcaagactcagctttctgaccctcctcatcctgctttccagtcaatccccaccttcacgccttcggacaccctccatcttctcgagttttgacccctgatctaacctctgaaatctaccttcaacactgctgagcttccacccctgactttccccacccttctgacctctggcctctggcctctggcctgacttctgactcttttctggcttttggctccaagtccctcttctttccccctcacaatctctggctctctttctgaccttggaccatctacctgacctctggccctcatatataacctctgacctcctcatttcgcgacctcggttccccaggtttgacaattctgttaactacagttggcacttgccatctacctctacagggcttcccaggtggcattagtggtaagagatgtgggttggattcctgggtcaggaagatcccctggagaaggaaatggcactgaaaatggcacccactccagtattcttgcctggaaaattccacggacagagtagcctggtggcctacagtccatggggttgcaaagagtcggacactgaagtgactgagcacacatctgctcaaggattaaatcaggcgctgctgcagctggctgaccttcaacaccccttgaagggaattcagggtggaaagcaggaatgaggcactctgtgctctggggaaaacggcagaacaggttttcagtatagatattttcag

SEQ ID NO: 31312 - DNA, 1930 bp, Bovine  19866881390870
  misc_feature (1)..(1): n is a, c, g, or t
nctgaccccctccacctaccaggcagcttcgggatcttctggtacctgttctggctgctcgtctcctacgagtccccggcgctgcaccctagcatttcggaggaggagcgcaagtacatcgaggacgccatcggcgagagcgccaagctcatgaaccccgtcacggtccgggcccaagcctggggggtgggggcgcggtggggagaggagagctatcaaggcaggggagacgggaggaagaggggctttgaatccgcactgcgtgtggatcttggtagatctacatagacatttccatagacatttagaggagacgatgggatcgccagttggatggcgctagaacctaggaggcgtgattaaagcccagggaggacggagttagcaggtgcggagagcagggctaggtggcgaggtggtcggaaccactgatgggcctggttaaacctgcagaggcggattagaatgtggggttttgctcagacctcaggatgggtgaagatcgaattagggggcataattgggtggaaggagactcttgggtccacatttatgactctctgaaggtcagcatggggtctggacacccaccagcctgaggaccactgaggctaggatgtcagcgttcccatagggacgcgatcaggccggcaaccccgcctcctcggcggctttagtgagacagggaaatctgggtctctgcgggactatcgtgggatccctgaagggactcggagagcgcccgggcctgttctttgtcctagcagcccttccctcctctcgcccaccacagaaatttaacacaccttggaggcgcttctttacgtccatgccagtctacgccattatcgtggccaacttctgtcgtagctggactttctacctgcttcttatctcccagcctgcctacttcgaagaagtgttcggtttcgagatcagcaaggttgggcccggaaggggagagctgcgggcgcggcgggcgggtgagcgcgggaaggagaggaacctggatcccaaggggttggaaagggggcagggaggaagcccatggtacctgagcccgtggtgagagccctgggcaggtggccgccgagccgcgactccctgtacgcccgccggcgcaggtgggcctggtgtcagcgttgcctcacctggtgatgaccatcatcgtgcccattggaggccagatcgccgacttcctgaggagtcgccgcatcatgtccaccaccaacgtgcgcaagttgatgaactgtgggggtgagtggggcggggcctggaactggtatgggaccgggctgggatgcgcggagcatggctgggcggatctagagggctgaaccatggcggatggggcggggtcagagggcgtgtccatgggggcgtgtccaaaaaggcggaggcggagcgagaccaggtctggcaggaacagaatctcaggtggcagcctccggggcagtgtctgtagaagggcaaggcgggtgtggctgcccaggtgaagcaaaggtgagaccacgttgggtctggaaggacggggcctatacgaggctggccagagtaggatgggaactgggtgatgaagagggacactcggagagacaaaggtgtgagtgtaatgaatggggactgagagggaagccgtgaaggtgccggggtggggcctacaccctcggtcttcagggcgtggtctagtcagggggtggggccattgaggtcccagctggggcagcgaagcctgtgcacgtggtcaagggccaggcactagagaactgagggcttggttagggcgggcgcgggcagaatggaggacaaagccagggacaggcgtggaagtggcaggactgggtcaaactgggggaggctgggagccgggagtgggtctggagaggcggtgcggggcggcctgtgctcagagggggcggccctccgtagg

SEQ ID NO: 31313 - DNA, 1512 bp, Bovine  19866881413387
  misc_feature (1)..(1): n is a, c, g, or t
nccctggcggctctcctgaattctgggtcttgttcctccccagccctgagaagcctcacctgagcctttggctggaggcccctgacctcctcttggctgaaatcgacctccccaaactggtgagcgcatcccctgaggtctggggtcttggacagggagtgatgggagagattgcaacaaatgttgctagaccagtgtgagcctggctagtgctgccccgtgagcccagctgccttctctgttccccggggtccttaggcccacttccggtgctgtccttacagtgctcagacctgtattactgtgtcccacctttttccggggcatccctggtggctcagatggtaaagagcctgccagcaatgtgggagacccagattaaatcccagggttgggaagatctcctggagaaggaaatggcaagccgctccagtatccttgcctggaaaattccatggaccgaggagcctggtgggctacagtccatggggtctcaaagagtggagcacgacagtgactaacactttgagtttcacctttttcctgggagattagactcttttaatatggtaccccaacacgtgaggcttctctctctggtctgtgttctgatcatcctgctgctgggaagggaagggtgggctgattctcgcgcacctccaggatggtgctctggggctgtcgctggaagtcggggagaatcgcctggtgatggggggcccccagcagctgtaccatctggatacctacatccccctgcggatcaactgtgatgagagcaaggcagccttccatcagaagagaaaggtacctgggggctgggggtttggggaagctaggaaccctgggaggcctagactcttggatctgagggaagagggggcagggggctggacccctgggctctgaatcctctctctgttttctcttctcagcaactgatggtggccatgccccttctgtcagtgccttcttgaccggatgtcttcctatgcttctgtgttgaggggagaggctggtggcttctctaaaactgaaataaaagatgtttgcctttgtcttgtgtgtggctaggagtacatggggaatgggagggaagatggacattgggctggagtcccgtagaggtcactgccccagctcaggcctcgtcctcttccccggatgttctccctggcctcctgacctcttgtcttaccccttgtttgtccccaacaaggtctcagggctgaccttgcccggctcctgttcacggcccctccttggctctccagcacccctgggagaaggtccaagcccctccgccgagcactcaaggctctgtgctatccggtccccttcacactccattttgtctcttccagtcactcaggctaatcacggtgaaccacactgattttttgcacctttctgtagttccccttcgtaggatccttttctcgagtacacctacccagatctactccagtacatctcgtttgccctcacagggctcatctgacttttcaccca

SEQ ID NO: 31314 - DNA, 890 bp, Bovine  19866881565575
  misc_feature (1)..(1): n is a, c, g, or t
naggaaggaggaaatctcagggtccggagtactgggtctgagggaagagggagatggggccctggattcttgcgtctgaaggaagacgagggacctggacttttaggtccgagggcagagggcggccggatgccaggaatcctgaatttgagggaagacgatctgggcatccagactcttggatctgagggagggaccacgcttctaggcttctggctttcctggcaacgtccccccacccccaccctcagggccgggcttccagtatccggcccctatttacgattcgacccactacctcacccgactttggaggtggatagaagcccggagtgactgacagaggagaggcggtgtctggcggaatggcaatgggaacgcgctatgctgggaaggtggtcatcgtgaccggcggcggccgcggcataggagccgggatcgttcgagctttcggtgaatggggtctggctggctctaaatattgggaatctgggagaggagggacccccgagggctaactaatgggtgtgagaaaaagtaggtcctatactggagtcttggagaaggaaatggcaacccactccagtgttcttgcctggagaatcccagggacgggggagcctggtgggctgccgtctctggggtcacacagagtcggacacgactgaagggacttagcagtagcatactggagtctagattcttatcttacaagatccggtttgcaaagtgaacgaaaaggtaggcagtggttgcctagggcctgagattttggcagatttccaaacgccgtttctgtgttctcagctgtctctgcaaacaggcggtttgggggacgatgtctcttgcagatttcgggtttactctggaacccaggaaggcaggctcag

SEQ ID NO: 31315 - DNA, 1061 bp, Bovine  19866881649524
  misc_feature (1)..(1): n is a, c, g, or t
nattcccgtaagccgcacagtttgtcaaaaaaaaagtttatacttgtaaatggcacctggcatgtagtaagcactcattaaatgttagttatcacttccctgggagttgggagtttggttagttacccagcagcttgtgggatgttccctaaccagggactgaaccctgaccatgacagtgaaagcgaggaatcctatcaacttgaccaccagggaatcccaacccaacattttcattcattcctcattcattccaaggccagcccctgagctctggaccctgctgtatcaattgttttgcctttttgacagtctcaccttcagggtcctgcctgagagtaacccctcctccgggagccctccctgactccctcagcctgagcaatctgccttatcctatcgccatgaccactcactgcattctggtctgacctccttgggggcaggacccagatctgtttattcctcacagtatcttgggcacgcatctcaatgctaagtcaacatctaagagtggtgcttagcagatgggataagtgattgaataggtgacctttcctctccacagaacgactttctcacaggtgtgttccctgctagccccctcagctggcttttcctcttcagtgcaattcaacttgcctgcttcctccagctggatccttccttaggactgatggagaagatcaaagagtctctgccagactggtgaggttccccacttcaacccagtaacctcctaaccccttggcctccacccaggacatttctgtatcagcatgtgtgcctgttaaagaaaagtcacctctaagacttacctggggtcagattaataaaggtaaagcatcaagtaaagggaggtgatttcctctattgtctctgcacatttttcatcctggctgcttcttgctaaagggaatgttggcaaactagacaaaggccaggtatggttatatatactaacagaagtatgagttctgctaatctacagttgtgtggtcttaggcaagagacctcactgttcttggtgtcaggggcttcacgacccaaatgaacttttg

SEQ ID NO: 31316 - DNA, 933 bp, Bovine  19866881753740
  misc_feature (1)..(1): n is a, c, g, or t
ncagtaactccttccaacgccacgacctcacttctgagggcctgctaaggaactcagacttgcatgtcccaccactggggggtctgcttcccaagtctgtgaagcctgagctccacacagatccagcctctccagcccaccttccaggccctaactcacacttatttctgtagaaattgccagaaatgttgatgccctcacagcgcacgaccacaaccttgcggcctagagggaatggaaaatggaacaatcaaggagggcaaaagtcaggaagccaggtgcccagttactgcccagaaaggagaccccagccctgcctgaaactggcccctgtgcacaaacacaccagaaggcaccaaatctcctaccccaagtcaaagagcgctaactggtggagcttgtctcatgctcaagttcaatttgttactccaacaaaacatgttttgaattcacagcccctgacccgggaggggaggatgctggcaggtctcagagcggtgcatggggttgatctcacggtcgtgagactcaaacgaaagatggtgatttttgctcatcactgacctgctgagctcatgtctgatgggagctgtgggcagcgggcagacttacccagaagcacctgcttggccacaatggccgccaggcggcccaggagatggcctcgggccatcgagcaccaggacctgttggagacaggtttaagagctcagaagggctcagaggcacccacaactttgactgcccacctcaaccaattactcctctccattagttaacttacctcccagaacacctgctaaccagatattagacccaaaactagaacttaaggctcactgagatggccaagaaagcaaatgactcagaattttcagtgagcagctaagatacaaaataaaccaatccctcacattttcagctgcttcaagg

SEQ ID NO: 31317 - DNA, 660 bp, Bovine  19866881766556
  misc_feature (1)..(1): n is a, c, g, or t
nctataccctgataaaaataaaaagtgaaaaaaaagtcttagaaaggctgccattgaaggataattaaagccgcatctaaaaggctcagaaaaaagaaagagtgccaagcatgaggcctgatgcacatcaggtgctcagcacatgtctgctctgaatattaacatggccatttgctgaagtgatcgtgaccagggtcccttcttccagaatgggaagctcctggccgagcgggatggagtgaagaggaggagtgaggagctggcctcggagaaggacattttgaaggtgccacccctccctagtgccttgacgatttcctacctccccaaggcccgtttttaccctcaccagtttcagcccctgtggtctggtgagatcagggacttgactcaagccctgaggtccccagggccagtgggcagctcactgaaggccctctcggtgtagctgatgtccagagacatgaagggaggttgaggagaggagctccagagagcgggataggccagggagggcaggccagacacatggacgggctccttccttggcagcggcagctctatgaatgtgaacacctcatttgccagcgagacgccatcctcttccgaggtgagtgggctggaggggaaatgtgccttttgatgtgtctcctgcctcaa

SEQ ID NO: 31318 - DNA, 932 bp, Bovine  19866881993155
  misc_feature (1)..(1): n is a, c, g, or t
naatccatgacagcttcttggccccgcccctttcatcctcaggccccgcccacacgagcgcgaccccacccctcaccatcttgctcacgatgacgatcttgggccccagctgtttgttgactgtgaagatgtgcagcagcctcagcgtgaagatcatgaagtcaaggcagaggacagtgcggcccaggtcatacaggcccggggtcagcctgggtatagggagacgcggcagacgtcactcaagggttacagggtgcaaagaaagccccgagtcttcccaacaccagactgaaggcgagaatgtggcctctccagggccagaattgggacactccccactccagttcacctgggatttactcaaaatttggcaccgtgagactgccaagcagggcttcgcagggcgctggtacccattaaataatggctgtatgaaaaacggccttagcaaaaagctgggagggaggcccctataacatcaagttgggaaaactgcaggtatatttgcccaacctataaatggcaaaatatggagccttccagcaaaccagtaagcagaagacaatgaacctaacaggaaaatggataaaggttaaggacagacaattcacagaagaaggtcaaacagtgaataatgttagcaatccctaaggggaaaacgaaaattatatccctattttgcatcatcgtgtacttcaactttgaaggaattaaaaacctaaagttaaaggtaagacatcaaatcttaataagaaaatatagaagaatttcttcatgaacttgaaataagataactgtcattaagaaaaagagtcctatatacaagacacaaaatcatggcaaaagaaaatactgaaaagttaactactttgaaatataaaatttatgcatattaagagataacataaatatgatggacagagaaaggcaaa

SEQ ID NO: 31319 - DNA, 1681 bp, Bovine  19866880357432
  misc_feature (1)..(1): n is a, c, g, or t
ntgagaggaagagtctttaaagaatcattaagttgagtcttagggcagatcatcacccaataccactgatgtccttacaagaagaaatttggatacagacacacacacacacacagagaaatggtggaaaggcaaagagaggagacagccatcaacaagccaagaacagattcttccctcaaggtcttcagaaggaaccaaccctcctaacacctagatcttagcctgtagcctccagaattgtgagaaaatacatttttgttgtttggggcaccccgtctgtggtactttgttagagcagtcctagcaaacaaatacagatgccaagtttgaattgtgtcaaaccaagtccagtttctttttggtcttcctcccattggtagatagaagatcaaactttgagtcttcttagtttcacaggttttgccaatgactactaaaagaaaaatgatattttccacaaaaaatagttcataggtacaaaacattctaaatgcaaaacttatatatagaaaaaaatcattttcctaatcattccccacctccctgaaaaaaaataaaagccagcagaatctccaaaataggttgctggctcaactataaatagccatttatgtttacagacaaaatactaagcttctcagtgtaaaaaaatctacctcatgattttccccaagtacctttataaatgtgtaaaacataacaaaggaatgatatgccccaaagaagaattcaaatctccacctttcaacaaagagaaaaacagcttagaacttcaaaataccaactatgctcacatttgacccaccaggaaagagctggagctgattcatgtcactgcttcttattccatggtgtgtgagttgtatccaaactactgatgaatgaaataaatggaatgacatggaaaaggagagtgtttattttattctcttctaagagactgcccatgatcagagcacagatttcctgagaaccagcttacttctctccattcaggctcatccttttacctcctgtcttcccccttgtctgtttgcatcgcttctgcttactgagtcccctacctctttcccattcttttcctccaactttatcacagcctttccttccctgtttctgtctggatgacatgcctctgtttggagttggaatgctctgtttcttggattcaaaatgacagaaaagtcatcagtatctagagcagtagtgctcacagtgtggtctaccaaccagtggtggcatacgaggtcattttggggagtccacaaataaatttttaaatttaatagctttttaaatctaaatgtacattagaaaaaaatagaactggcacatcaaatctttacattctgacatcaatgagcagatggaggaagaattcagatgctgaagagagttttccaggtgaccttgaaatcaaaccacattagattttataaacctaagtgctttctctgacacatttaaccactgaaatagtgcaggtctccttccataaagtctcagcaccatgcaattctcctttacagcacttagcccaattacagcccattctttgtgtaactgtttgtcaagtggccatctttactaccagactcttcactctgaaaatggtcccatgactgcttgcctcctattgtatccttagctcttgcgcattctctcatatataagcttt

SEQ ID NO: 31320 - DNA, 1388 bp, Bovine  19866880499718
  misc_feature (1)..(1): n is a, c, g, or t
ntcagcccaaactcatcgacctttgtgattactggggtgctgccaataggtagcctgactatcttggttagctctgtatttgcagttcttcacttttttccccatggctttagcgggaagctgagagaggctacatcaacggtgctagtcagctgtcattttaaagctgatatctgacttcattattaagatatacatttccatttcaggatgttgttaattaaatatcacctcatctttgctgtatcttaaattcctttgttttcttcaattcaagaaacaagcatagtgggtttgaatcttcagctgccacagtctgtacatttgagctttactttttgaattgtgcagcataatagaagacaaattcctagtaccgctgagatttgagctgaatcttggaagagactggacctgaacagataaatgtatgtggggaagggcatcctcagtggaaaaaaatgatgtcatcaatggccaggaaaggaaagcctgtggagcgtttggggctaaagagacaagggcactaagattgtgcagttcaagtgagtgacaatgaaggtgtgaaaaggagttgaatgtgagagataagacagaactaggaggggcagaatatggtgattggatacaaacagtgatggggagatggttgttgacaataactcagagttttcaagcatctgtaattagaaaggtagaggtttaagagataaggagagagagaaggcgaagagaggagaagatgctgagttcattctagatgtatcacagttgagacgcctacagaggtgagcaggaggccttactataataagtttaatagcggggaagaggttggaactagagatctaggtttggaacagatgataactgaagccctaggagttggtgagatccctgtgaaaacggaaatggagtcttccgtagcatgggtcaggctataatctctgggctgaggccatggccacttgctgagttttggcaaggaggatgaatgggagattagatttaacagaacactgctctttaagatgtgcagacttagatttttctactaaggtactaaggcaaatggatatgcagtcaaggagcacacatgagggacctactgtgctaacctctctgtcagggaaaaggaagtcgtgagttctaacgctgtcccggatgttttacatttaagatctcatttagtcatcaccgttgttttgtctaagtcagtttcctcatctgtgatatgagatataaatgactaattcatagtcattgtgaaaatgaagtaacacaatggatttaaagtatctgaaaggtggtaagtagttaataaactatagttctgatattacaactaatcattttaggaattgtctgtacataattgacacactgca

SEQ ID NO: 31321 - DNA, 1984 bp, Bovine  19866880515590
  misc_feature (1)..(1): n is a, c, g, or t
nagagactggcaaaggtaacccccttcactaccgttttctatgttctcccttatctgaagctacagtaattgattttgtctgtttatcatttgtcttcttccttgcccacactgttattcagagcttagtgcacagcacagaacaggtgcatataataatgcaataatcatactactaaatagtagatactaatagtggggcttccctggtggctcacacagtaaagaacctgcctgcaatgcaggagacccaggttcaatccctgggttgggaagatcccctggagaagggaatggctacccactcctgtattcttgcctggtgaatcccatagacagaggagccttgtaaactacagtccatgagattgcagagtcggacgtgactgagcacacgcacacacacacatacacacacgtataaattaaatcatatacccacactcataggcacacacacggctagtaaactgcctaagtgaatggatgcctaagtgaatggatgcatgagtttgaaccgagagagcaaacctctctttcagcttggcttttactcagactttcatgccttgtaccagttaaaagcttttctctgtttaaatctgcaaatgattgtagtttcatctttttcatcctgccttctctactctcccctctaccccctcgcccactgcattgtaggttgaaattagactccatgctttcccagctggcaagaagaggactgaattctgtccttacttaagtcccttatataagaaaatattgtgatgctctgaggtttgttttgggggaatcacttgtaaggccttagtaaaaagtgcaaagacatcagagaaaggaggtgcaaacacaaataattggtcctaccctatgcctgaggaaaagcatgcaccaccagcacctcagttctgcaaagcagtcataagatgatacatacatccatttctgggaagtttatttacagctgaaacactgttcccacacaccctagcagacacgggtgttgctgggatctctgactgagccactttctttctacactgagtgtctcagggctcctttcccttccctgaatgctcagtgtcctcccctggacatcggccatctcccagtgtggtgatcaggtgacttgagggggccgtgggggtgtgcgggctggtggtccccgtgttaagcacctctgggctgctttgctggagagcccgcccgcacgccgcgctgcctcctgctgccgccgtcggctgtcatttcaccagctgtcgggtgtccccctgacgctgtcaccccctgccttcttttatgtccgcttgtcagaatgatggcttgggggtggatccacctctcctcaggagccaagtgtatggactttatgacagtcattttccacacagaaggtattttttccctttattaaccttgagattctggatggtagtgatggttagaagtgtggcttctaggaagtaaatagggccttgatttttctttttataatttctatgaaattacaaattttctaaattataactgtatctttgtgcaagcatgctaagtcactttagtcatgtctgactctttgcctcccaaatggattgtagcccgccaggctcctctgtccatgggattctccaggcaagaatactggagtgggttgccatgcctttctccagggaatcttcctgacccagggattgaacccaggtctcttatgtcttctcctgtgttggcaggtgggtctttatcactagcgccacctgggaagcccaaattgtatctttaggattatataaatgtatgcttttactttaatgctaatatattaatggacttaatgcgtatgtatttattatgtgcctattaagcaccggacatggtggctaaaataatgctgggcaaaaccaggttggttttaccttcctggagctacggcggagaggcaggcagatcagctagtaagtgcataaatgtcaaactgggactc

SEQ ID NO: 31322 - DNA, 625 bp, Bovine  19866880524379
  misc_feature (1)..(1): n is a, c, g, or t
nccttgggttgggaagatctctggaggagggcatggcaacccactccagtattcttgcctggagaatccccatggacagaggagcctggtggctacagcccatggggtcacaaagagtcggacatgactgagcaactaagcacagcaacaccacatgggaagccctataactagattatggatatgcattactgagtgcacatacaaacaactccgtttattgagagttacctgaatctgcttcttgtgcgaatcctttttgcccaattatccacatttgcattccttctgaggcctcatgcttcttggtctggacctgatcttccattgttggcatattttgccttcttgctttcctggctccttttggttcttgggatgttagtaacaatattgaacaccgtcacatggtagttatccatcagtttaaccttatatctcccaagaacctttcctgagatacagccccactgagctggagcttaaagtcagtttgtacaaaccactgtgactggcttcttgctaaggtaggggaaccttgacagctgtgacagaatgcttctgtggataaaatgcagtgagggaaatggctgaaaccatcattttaaatagaatcaatgtttgt

SEQ ID NO: 31323 - DNA, 1707 bp, Bovine  19866880574876
  misc_feature (1)..(1): n is a, c, g, or t
ntgttgtagaggtggagcaaatctggtttagttactcttccagaatcatgttctaactctggctattagatgtttagcactccattcaagtataagggtcacacctgcatgatggaaaatagtgttaaaatacagattaaaaacaaaacaaaacaagaaaacgttgctccctctaattgcattcaaaactgtctatagtgtctcacgtgtgttttattgagagccactgttttctggccagtgatccacaaaataagaagatagaaaggacaagaaggccagttgtcagacgaattcaaatcagctttaaggtagggaaagaatgagaagatgagacacatgagtcagcaacaagtttctgaagtaaaacaggcaaaacttagggctttctgaagtctttcttaacagagataggtgtaatttattattcataactgttctgaataagagcaagataaaaactgaaagcagaaaggtattcatgatcttatttctaacacaacagaagtattattgataatagcaggggtttaattttaagactgcttatttatgatattaataaatttagcatatttgcaattcatattagcacctttcaggatttaggcattggattaactacacaaggtatcattggtcctgttagagaatgtctattgcaagattcattaatttattaagcatgctttgagtaattattaagaattatgtttctatactttaaagacaaatgtgcctaagataaggtatttgtccatcattgaagataaatagggagatattttaccattaaagtatgtatgtgtgcatgtgtgatgggagagaattcaactatttctggtagttgataaacaaaatttactaaactacttttcagttgcagacactatgctatattatttagtcatttaaaccattttgataaggaactatgatttttttcctttgagtatcagatgaagttcaggctttatccatttaataggcaccatattctgcaaagtgaaatgtaaagggattgaaatgcatcttgaacaattagtaaattatttaatttagttatctataaataatacatttattcaacaattattcatgatcacttgccaagagaccagctccattctagaagctgcaaaacaaaacaggctaaataggttttctcgtattctaacgggagaaataagataacaaataagcaaataaatggatattatgccaggtggtgataagtgtgctgatggaaaatgaagcacgcctgggcactttctaagggaattagaaaaataaagcagagtgagcctccacccactttctgtattttcaagcctatgaaggtatccagaggaaagtgtcactggctttctagcaacattcctgcgcagatgggctgaccagcattactctcctcctgcctctagagggcagttcacatcagtgtgacagctgcttctctgaaaatgagtcttcttagggataaagttatatttatacataataagttccagatatgtgctgtacatcatagttcctatagttaacataagatgttgcgcacttagcatgagatttgctctctgctagcaaattgctctctacacacactaattgctaattgctctacacacacacacacacacacacacacacacacacacacacacacacaaagaaaataaaaactgacagaggtacacaggaaaa

SEQ ID NO: 31324 - DNA, 1175 bp, Bovine  19866880619584
  misc_feature (1)..(1): n is a, c, g, or t
ntatgttgaggcattgctttttgaaacttggtattgagctaatacagctttcacttaccaggggggaagtcttttaataatagaaaagtgggagagctccaagcactctgctccctgcttctctgacccatttggtactgggagttagagaggcttggttttctaatcagttttatctcaataatcctgacttcagaagcagcagtaacagaactaactgggcagaaaaaaattcccttgagaaccatttcaatttgtaaacccttggtaagtagtttagcacaaggatcttcaaccctggaggaatcatatcaaggtttaataaacctaagccacaaaagagacttttagatctgcaagattttatttgaaggcaaaagtgaagacagtaggggggaaagtagacttctggtttcaacatagaacaaaagccattgatggttttatttttaaacttaatcacagcttaaaagaatgataattcaccttaagttttagatttattttttccactttgtgcctgaagacctgagctccttactgtcttaatcatatgcctccgagtaggtggatttgcacaatggaagaataattccctttttccaggacaggaaaaaaagttagatgtggaaatgtgagtttctttgactctattacccaatacctgtacttctcctgattgaaagagccatattttacatttgtaatgtgcaaaacacaaaggtttcacatcaaagtttctggtggtttaaaatatttcttgagtctgatcacgagggttttctcccactttgaaatttccaccatttacaatctagctccaaatattacaaatctggagtggctgcttttatactcaggttttagatatgtccttttctccttgtatatgcattacgcattacaagtgattcagaatgttggtgaagttcccttcctaaaatgattccctgggagtaaggtataaatgaagggagagtggaggatgggtgagagggtgagctcggtgatggataattccaaggaaaaagattggagttttaaaaaataaattgcaacttacttgcattttttaagattaattctgtactgttaaacttcttgaccataggcattttatccaagcctgggctgtatcattgtcttactgccagcaagtctgtcagctaggatcc

SEQ ID NO: 31325 - DNA, 820 bp, Bovine  19866880628933
  misc_feature (1)..(1): n is a, c, g, or t
ntgcatctcgagttgtttgaatctctgcctctctgcactctactttctctttccctggctgcagggggagaaatgaatagaatgcttctaattctgatattgaatggtgtcctttacctaaagggcatccaagcagacaaaattaaatcagatgctcaatgggggaaactttccactaagcaggaatttaaaatagggaaatgtattaacatgttgaaaaatgggtaaattaagccgatctgtggatcagaggtgtgacttttcagcaacaagccacagaggtatttttatgtgcagttgcctgcacattgagaggtgacacatgccttctttacccttggaaatatccgtgtaatacatacctgggggactcatataaattggctggtttaaaacagtaggatgagaatccagattctgtttctttttagactagagttgatgtaatggaattacctatcagcattttccatctgagaattcttgcaaaggatgatgattcttgccttaatgagcggaggaaaagctctgttatttttggtccccagaatggttaaatgaaattgtttcattctccaagctttcttttatggtaaaaattatgctatgttttgaggaaaatgggcagtgtttttaggcttttttgtttgtttcgtttttctcttttagtaaacagaggagatggagacaaaggccagcatgtctccagagacctgaggccatgctctcacgttactcttcagtcttttctcctgagcaggtacatagcagagccaaggtcaaagcaacctactctactcatggggaggggcttttaaaa

SEQ ID NO: 31326 - DNA, 1446 bp, Bovine  19866880654478
  misc_feature (1)..(1): n is a, c, g, or t
naaaatccagccctttccatgcatcaagcactgtttcagacactcaacaggtatgttaaatcttttcattctcacagcagctatatgaacaagctattaaatctctccatttcgcaggaaaagatactgggcttactatcagagatgttaagtaactggcccaaggtgacccagttaatggtaagacttagatttgaacctagatctctctggctccaccaggaattccagctatgactactcactcagttttaagcacttcacctgacagatttcattgaattcgatcccatttccctttgacatttttaaaataattttatttatttattcttcgttgctgtccaggctttccctagttgcggcaagcaggcttctcattgcggcggcttctcttcttgcggagcgcgggctctagggctctcgggcttcagtagctgtggctcacaggctccagagcacaggtttaacagttgtggtgtacagacttagctgctatgaggcatgtgagatcttcccggaccagggatcaaacctgtgcctcctgcactggcaggcagattctctaccactgagccaccagagaagaccctccttttgacatctgacattggaccttccttatgaccaggggcatagcaactaagagccaagagtttggcagacccagtggagaaaggctgacgctaaattcatttcctataaataaaagacgccaagaagaagatctgtatgagctactctactagggacttctttaaaaataagtgttttactatgaaaagagaagtttagactcttgagcatcctgcaaatagaaaactaatttgccttatcaatttttgtccactgtgcttgatccttgggataatctgtgaggcactgtatcagtctcacttatattgtagtcttttatcatatggatgcaagatatatttcttgctgtcaaaactaatcatcaaagcatacaagaaaaccaaagcaaccttatttacttcctcagagatcagagcaaatgtcctactggtatttttttttaatactaagttgaatttttttggctgcacatcaaagcacttaaattaagaacaatatatcttcatttcaaatgtcggttgatatcccttaaatgtttgctttaaaaaaatgaattcaagtttaaagctggcaataattggcactgtattattaacaatttaaatcaaagtttaatgcttttgacatcacaaagacatggatcccacgttataataacctttggcaaatgaatagtaaactaaacataagcttccaagatagttaatcctgaaaggtacgacacagacgagagtagttaaatatagcaattattgatatatgctctcattccaatacaggggagggatagaggttgtttaattttaataatgtccccagaggttgactttgctcataacatttataaaa

SEQ ID NO: 31327 - DNA, 1225 bp, Bovine  19866880669541
  misc_feature (1)..(1): n is a, c, g, or t
ncaggcaaattctttactgactgaattacctagactcctctatattcatatgtgttatacatatatgtatatcaactttggattcttttcccatgtaagtcattaaagaatattgagtcaagttctctgtgttatacagtaggttcttattagctatttattttatatatagtcaaagaggtacatcgtaaaccaaggtgacaattttgtgaattgctaattgcagggcaccatcaacaagatagtggagttgttaagacttttggtcttgaagttctgtctcatttccatcatctgtaaaatgggaaaataacatctaaatcattgacttttgtgtaaaggattattagtattagcatggcacgaagccagtgtgttcaagtgaatctgtacgaaactatagtagtctgtgttagccccagaggaagggattttttttttttaattttaagtcatcttggagctaagttactcacagaatgacgaacagctaatggctttgttccctgctgtgtgaccaccctcccgcacacttcaaacccacatgagcaggaaacaggccgatcatgagctaaggaagattccctgtgtttcctttcaaaatcctttgattcttgtcccctttcttataggaatgaccttaagaggaaaccaaatctctgcccatgcaaatgactctggaaaagcagttccacaaccagcttgctggtgtggagggagccctggagagatcagggtgctactcagggatggacacaaactgttgctccatgggcgtctgccagctgaccctcgggaagaccactgacctacccaaaagcctccccattgtatccctggaccagagaatcctccctgacattttccccctcatctttaaaagtgagtatgtgaaagtgaatgtacagtccattaaaagtacagttcctacacttggtttcactttaaagcaggacagtagctctgcattctgaagtatcagcccccataggctcattgatggggtcacaaccttaactcagtagttaaagagggctcagggaccctctagccttatttaatttagtttagaaattcctttattacagttctcgaattcactggcctttggacgttacctgagttattcctgtgattggaagtctcctatttgggaatcagcttgtgtggtcatattccctcttctccatcaaaaaaaaaatttattgcatacttccaaactata

SEQ ID NO: 31328 - DNA, 636 bp, Bovine  19866880701512
  misc_feature (1)..(1): n is a, c, g, or t
ntaaatgatgaattttaataatatgtttttaaaagtcaggagggaaagctagaaaagtactcaaggaaaaagaaaaaaaggaagttaaaaaggagattcataaaaattggaaataccgataagggaattaccagttattggataatatcttcaaaatgttaagctacagaatgcaaaatattacacattttaggaagaaagacatattgctcaaaactgtttcccacctgtaaaaggatccgctgcaggaagggtgttagaagatcctgatgaagagcctggaacgtaccgaccgccacctgtgcatgtaaacaaaggaaaatctgaagcacgtcaaaattctgactttcataaatagcacactgcttacatcagaagactccaagtgtggagaaaaaagaacaaggcaacaaaagacagaataagaggagttatcttaagaggggttatcatcagaagtcttacagttggtcagtaaaaaactaaaatttcagcgattctctaagttttgtttttgttaactttaatactttttattatatcttagtttctgcacttaaatagtaaaatgactaggaattcaaatataaaaagataaattgcagttggtctctgacctaaataatacaccacaca

SEQ ID NO: 31329 - DNA, 873 bp, Bovine  19866880863503
  misc_feature (1)..(1): n is a, c, g, or t
ncatgtagtcagctgtcttttttttttttcctttaagggaaaaaaaaaaggctaggcataagcattttagttattattttatttgggatcaaaagttgttgggttttcttccccattgaaaaaataagataaagtgatttggcctttccaatcttataccaaccttgaggtcctgagttcaacctctctccaaaaagaaaaatgtcagggctgaaatgcacccaatttcacctaattttctgtgcctctatcttcaagaagatggactgagatggctcaccacacagaatggccacaacttacttgagaaaataaaaactgcaagcctgcgggttaagaaactgtaccattctggggcaggttctaggccctctgcacaattctcattttacagcttacccagaccagttgtgtaattacacagagcactctttctattggcaagatccattgatccttaagtgtacattttctggcatcccataaataaggacagtgtgtaagcagtgttttctgctcctggaacagtaaaggactaattagttgcatttgcagattaatgactttcaactagaaagggtgaatgcaaaaggataagccacagccacagtgacggaaggcaaatacaagtatttataagggcaggaggagggggtgggggccaggaagggccatcgattgcttctggcctctgtaccgtggacacattccaatgagggcgggtattccagcagcctaagaggtttccgcaaaggcaaggcatgaaaggcatcaggtacaaggatggccgtgaggggaggcacagaaaagaattctctgcagaaagagtcacagggagcaaggaacctctccctcctctcaccccagccagcc

SEQ ID NO: 31330 - DNA, 1578 bp, Bovine  19866880895652
  misc_feature (1)..(1): n is a, c, g, or t
ngtggggtatgtgtgcacacagagctgagtcactttgttgtacagcagaaactagccccaccattgttaagcagctatacttcaagaaatacatcaatcctgaatattcactggaaggactgatgcagaagttgaagctccaatattttggccacctagtacaaggagctgactcactgggaaagaccctgatgctgaagaaagattgaaggcaaaaggagaagcgggtagcagaggatgagatggttagatggcatcactgattcaatggacatgaatttgcaccaactccagaagatagtgaaggacaggcgcgcctggcatgctgcagcccatggggtcaaagagttggacacaacttagcaactaaacgacaacaacaacgcttcagtaaaaaaagaaaaaagatgtagtacatataatcgagaaatgataaagtgtcagtatcgtagaattgtatgtagagtgtggttgctgattcctaaagcccagaaaatattggaggggagggagggagcactaaggaattacggagaaagcacgtccagtaggagaaatgacagctcacaatgaaagaagtgaaagagctctggttatgtggtccttggagaccgtttagtgcagggcaaatagtctcactcaggaggttttgtttgcccttagtatcacactatggtgtgaaagctgatgtttctaatgatgaatctgagtctgtaagaagtgaagttcatgtggtggtggtcgcaaatttttgttgtaaaaatgtgtaaaaagcagaattttgtgtgtaaaaagaatacatgtttatgtattgggcagcttcatatgtatcaggcagccaggctcccctgtccttcactgtcttctggagtttgcttaaattattgtccattgaataggtgatgctatcttttcttgatttactggataaatgaggcattgtctttaggcaactatttgaaaacaccctattatgttatctcatatctgctttgagctctagtttctgtcaaactctctaagtttgtcagaatatatataatttctgttcactgaaacaacagaataaagaaaatggacttgtatattccttggtggatggccccataatgtcatttgaagcttgagacatggtttcactgaaaactgaaattagccccaaactagtggcctgtgtttttttctttaaaggtatcaactcagtgaggaatgtaactagggataacaggcttttatgcttggccagggtaggcggtgcatatatttaatatacagtgcttgatattactctcttgacagattctctaaacatcatgcttttccatggcaacgtgtgcccccgtgtgtctggtatttgatataagtaagatttttaaaaagtgtttgattgtagttaaatgatgagaactctgtggtatggtcaaagtgaaataccgtatacttcgtatgtaacaagtatgaatattataatctatctgaaatatatcaagtcaagaaatccagctttttaatagctatgagtttgctttctctagcttcctggcaattcagtgcatgttgcaatgtacactttgaggg

SEQ ID NO: 31331 - DNA, 1627 bp, Bovine  19866880905228
  misc_feature (1)..(1): n is a, c, g, or t
ntttattatttaccatgtaatcaaattccaattattatttgaaattcatttttgaagtcacccaatattaaattaattttttaaagtcccactcatatctgatcctaggggttcatgctactggtcttagcctctagcttcagtggatataaaaaaaaagtgaggaaaaaaatattttttaatgatgaatcaagacagaacaacctcaacctgcaaataacacttatagagatataatttcccttcgtttattttgttattcccaggtatcttcatatttccccaaattcttaaaacaaatccattcattaaatttgctttaaagaacactcaaacttttatggaatgaaagtgaaggggggtggtggttaatactgagcagttgtagtaaaaagagagtgttatgaaatcaagctgtctatttttatgggctgttgaattttatggacttataatatgcatccaaggaattatgaaatgaaagaaaattgtttgaataacactttagactgactctcactacttcactgtgctaagcagaatgtgggctccttggcagtgtggtgtagagatagggctggtcaacagaaaagaggtcagaccatcaagggactgggggctttgaaagcaccactaagtcccggtttgctaaagacagttcaggttgttacttgtcgtcatggaataaccttaacactgctgtctttcacttttcaaagtgccctgatttagaaataaattatatgattttacacagagaacacaaaatccagctccattaatttatgggagaggagtttctgagtggctgactgtactcagcaataacaaacacatctcttgtcctctggatggagtccaaactctttagggcacaatacagaatcctgcaggattgagccctggttcccgctgagtctctcttcctctctctctctgcttccccatatttctctttcacttttgcacttgttcacctctcattattttatgtcgtatatttgtggggacacaccaaagtagtattagtattgttttctcaatattttcagctactctctttcttttagataccgaagaagattgaacctaccagcttctaggtgataccagttgatcacactgagtagcaagcgtgtaggcgttttcttcttgagccatgtagcagaagctgaaaataattccattttggaagtcatccatttttatatgctctagtttctgtaggtctatcggattgtcttattcccatttttctttaatttcacttgtttttgtggcttgcttttcaaaggtgaggcataaacgaatattgaaatgccaggcatagtgctggacgctggagatccaagagtcaataaaacagggaccctgccctgggagacttcatcatcagcggggagagttgcaccagtcccaagcaaggaaagaggtgtgatatttatggggacctcttggagactccagcactgggtgcacggaccagaatggtgaacactaaaaatcaaaggcttgaaataaggggaatcaaaatataccctggaaagacttttggtaagccaggctgttgtgaccttgaaagtttgcggaggcttctattaggccagggggagtgttatagttgggt

SEQ ID NO: 31332 - DNA, 1235 bp, Bovine  19866880908934
  misc_feature (1)..(1): n is a, c, g, or t
nggccatcctgggagatgagacataacctcccagacacatcctgctctctagggcaatccaccaagaagagtcataggttctggcccaaagatgctggggaaaagatacccagaaacaagaaaaggtacccttccctggaagagggaagggatgagagaaaaagtcaaaaatagttagcttttctctcaatttttctaaagcaatttttctctgtcatcaatgttatgaacaccaaacaggaaggttgagatatatacattgcctcttataagtagtgtcgtatcaatctgacctagataggtaaactaagcgggaaacaagcgttagtgtgttctgatcaaaaaaataatcgtattgtacacttggttaatttaacacgtgcacacaggttgcttaatatgaatgaaagaattgccactatttagttatgcttgtgagacagcaaaaatttacaagtataatagcaattccttatattaatatcctatacacacacttttaagaccacccatatggtttttgtaaatctttttgccaatgttattttgctttgattccatttattaaaatgtaatttcatgcctgttgaaactaaaagtaataaaatcgagtgtggattctctatgttgttttaatttcatttttccagttactcatttttatgttgcttgatgatattgtcaacccacgacagcctggaaaatgttaacaaacttggtcgagcaccacagctagtttgagcaccactgcttgaccccaggctacagaactgagaggaaaaggggaggaagagacacacccacgtttataataacgataccatgatcaaaacagctctgtctgaaacatggtaacacactgagacaggatatgaagtcagcttcataaattatgaaccctaaatccagattgcatttgttctgcaatgatttgaacaagtttttcctgaagattgaaactaaaagcaaagataccaaagtagggggtgccatcttgtggcaagagccaccaacaccaggccccagctgtgccatcgtcctcctcacccccaaagcacgccttcgctcccctcggagcctgagagtctttttcagaaccccaacacttctcctttgaaacacaggactccagaataagaacaaagcccctgcctgcccccatttttcttcccagcagagctgtgtgtggtgagctaggtttttgagtcagcttctttagtcataggacataagga

SEQ ID NO: 31333 - DNA, 1802 bp, Bovine  19866880999436
  misc_feature (1)..(1): n is a, c, g, or t
nttgaaaggctcttttattatttgggtattttttaaaataagctttttttcccaacccaaatgaatgaaatatacatttaaaattatgaacttctttaatacttctcaatactcattggtgtgcattggttcatagatgatctgtgacaatgaaaattcttttcattgcagtgcttaatgtaacgaagccaactattgaactagttttaacgaatttggggaagcattttagtttctctgtcaagagttattatttcctttagggaattgaaaattatatctgagatagtaatttcctcataaagagatttggagggattatttttcccatagagccaatattccaattaattcatccaaagaaggaggtttctcatgttgagccaaactcaaagcaccagagtatgatgtcatgaattttaaaaaggcagccactctgccagatacttgaggtgccagtgcacacactcggtgattcataattgggctggttgactacatgatttgtcaaatagtcattctgctaggtaaactacttccaatggtgaaaccttattattttttcttttcttaaaaaatttttatgacaacattgaatgaaattctcattctttaaaacgttcagcctttttgaaaaggcttctaaatattctttgcctcaaaggagtggcttccctggtggcgcagtcagtaaagaatatgcttgcaatccaagagactgcctgcaatgcaggagatccgggtttgatctctgggtcaggaagaacccctggagaagaaaatggctacccactccagtattcttgcctggagaatcccacggaaagaggagctgtgggctatagtccatggggttgcaaagagtcagacacaacttagtgactaaaccacaaatcaccacaaaggaataaagagaaatataagacaaaaggaaagatagatattattgatgactcacctgattcatgtacttataaacatttccactaacatagatctgatatttggttgtgtgtagttctcatcaattcaggcaaactgattactggtctgagtgtggctctgtggtatagaaccctctgtatggagacctatgaagtttcagggcatctcatgtccctgggagaaatggagcaagtatctatgcatctaagtcacagggacagaaattaacaaaaacatgaaggcaatgatattcccacttgatatgttgagtattttcccactttgttttccagatagaaatatgagctatgaagctatctggctcaaaatttggtgtcaagggatactaagtgacatagtattagtcactcagttgtatccagccctttgtgaccctatgggctgtagcccaccagtctcctctgtccatgggattctccaggcaagaatactggagtgagttaccattcccttctccaggggaatcttcccaacccaggcatcaaacccaggtctcctgcattgcaggaagattcttttctatctgagcctttggggaagcccagtgccttgatgaaaagtctgttatactacttaagcaatattaaacaggaagaagtaaaataatttatttttaaaacaagaatgaacagtttaataagaagtttgtgagacatgttttcaagaggctttcatgtaacaatacaaaagcaggaatatgtttattcaaaaatactcagaaatacttcatagaacattcagagcaacaaatgaatgtaaagttagagaaacacgcagagaggtaccctgagcagcactgcctggaattttacaaagtttatgaaaagcatagggga

SEQ ID NO: 31334 - DNA, 1336 bp, Bovine  19866881092615
  misc_feature (1)..(1): n is a, c, g, or t
natttttattttatttttagaataaaatttatcttacttgtggctcagctggtaaagaatccacctgcaatgtgggagatctgggttcaatctctgggttggaaagatcccctggagaagggaaaggctacccactccagtattctggtttgtagagttccatggtccacgggaacgcaaagagtcaacacagctgagtgactttcaattcactttacttacttttttaaaaacatatctagggctctcctccgaagatttcttcttaaactaggctgctatcacacgaaaggtgatacagttagagaaggtatcatttctttgaagagttaacagaagtttactttggattcctttcaataccattaaaagagttgcctttactttgttaactactgacatggatgctgagatttattatcatctgaatcagtggggcagaatgatttattcttggcactgaaatttaggtcctcaaggatgaaaacgtcaccaaagaatgcaaatgatcaaattaagcactctattttttctatttctaaggatgacttggactatataattcaggcggtttgctttgctaaagtaagatcaatgtctcctgcctggtttttgactcatacttgtttgcctggagttacagggaggacttttataagtgttcctcgtgatactaggctcttaaattgatatattctgatttttaaaactggtaggatttttgtaccgagtaaaacaccaaacttcacacgtcaaaggagaaaatggatttctgatctgcagaaagcatagtgtgcatccatatcttctctagcacccagtcatgcctatttgacacaatttacacctaaattggttatattttaggaattttttgcaatagttatatctaaaaattacatttgctgcacaggcatttaatatactactagatgattattgatttttttcaaggtctttcaaaaccttgatgtttttgagaggaactgtcaccctcagcatctctttccctagactgagaatatatgattttatcatgtgcaatgggcttaggcatcaagcgaaccctttagaccgatcacatattctcaagattctttgaggttaattaaaaatggacactgtaacattatgcaaagacatctaagcttcctctcctggaatggagaaataacatcgaattttcccagctttatcaagtgctttacagaaatcataaaaggagaacaattgtttccaaagaaaataatcctttgaaacttttacttctctaaaaatccttatcttttgctgctttcagggtatcacttcatttataacatatgcacacacacac

SEQ ID NO: 31335 - DNA, 854 bp, Bovine  19866881131803
  misc_feature (1)..(1): n is a, c, g, or t
natttccctccactctctagtttttggaagttctgttatatcttgatttgctccataatggcattaagggaaaagtattagtaacttgcacatttcaacaaatagctgctgatagcttactttatgtctagagcattgctagatgagtaagctatactaagttcctgacctcatagaacttacagactagttatgtggatagacaaagaataagtatcagacaatgatatcagatgattgggaattatgataagtagtatgtaaggaacaaagatgattttgttcccctgctgcaagtgggaatgtgaagagtgactgctcactccaaactgaaaaattttgtttggctttgagcctccgatacatttccccttcttggaagacttcagcagaagaaaaatgtttgcaaaccagtgccctatggaattataaataaatgtgagaagctgagtgagttgggcggagccaagtttcctcatctataaaccacagataacgttatctgtcctaggggttgctgtgagggttaacaactataaatggaaaagaggcagaagagttactggctgaagactggagacagccagctaggtttctagttcctccgcttaccagctgctgctgtgtcaggtaagttatttagcctctctgtctcagcttcttcatgtagagggtggcgatggcgatagtgcctgcctcctaggaatgattggagtattaaataagaaaaaaaatatatatatggcttttaaactggtgcatggtaagtgataaaccaagtctagcttctgtccttgtcataatgtcatcatcaccaccatcgtcatcttcttgggtcctaacgtaagcaacag

SEQ ID NO: 31336 - DNA, 865 bp, Bovine  19866881149349
  misc_feature (1)..(1): n is a, c, g, or t
ntgcaaggcttatcccaaagtacaaccatctctcatctgaatttcttttctcctcacattcacttacaacccagatataatgaaatgccaggctttgtcactgaagctttatttttaatggctgcaaatggaaacaatttaaatatctatcatagacaaatataagaacaaattgtgatatattcagacaatggagtactacttaacaatgcaaaggacagagtatctacacacatgatgaataattcttaaaataataatgctgagcaaaagaggctacataagtcagaaaatatactgtgtgacctcatttacacaaaactctaaacaatgcaagcttgtgacagagaccagatcggtggacaccagggaaggaggcatgtggggagggtcaggagggaaagattacaaaggtgtacaatacaagaagaccttggggagggttatgtatatgggttttaggtgtggtgatgttttcattaatgtatacatatgtcaaaacttatcaaatgatatactttaaatatgtgcagtttattgaatgtcagctatttctcactaaaagttactcttgtgttaagacaaacacaggctcctatttaattatttgtttaaatagactaagtgacatgatgagagtgaccaaggctttttcattcaatatctctgccagtgactggcccaaggtggattttcagaagatacaggatagatgactatagaaggagttaagatatactgcagttgaatgatgtactattttggccttgctttggttcacacattaaaatgctgatcaggctgtagtgttagccgttaaccacattatttcccttgttgtaaagccaactatagtataaatgtc

SEQ ID NO: 31337 - DNA, 1118 bp, Bovine  19866881188347
  misc_feature (1)..(1): n is a, c, g, or t
nccttgactttgcctttttagttctgatatcaaaagtcacactgatgctaacatatttcatggctaattcttttcaatgagggttttgttagtggctcagagggcaaagaatctgcctacagtgcaggagaccgaggtttgatccgtgggttgggaagatctcctgaagaagggagtggctacccactgcagtattcttgcctggagaattccatggacagaagagcctggtgggctataatccatgggtttgcaaagagtcagacacaactgagcgattaacactttcacttttcaacaaatataacgcacaaacacaatagcagtcaaagatttaaagaccacaagttagaaatcactgatccaaagctaagtcatactacctggccaggtaagcaaaagactggttagctccagataggagtccttaggtgaatttcattgtttctgcatagaggtgtgtgtgtataaatgtgtgtgtatgtacgtgttggtgtgtatgtgtatttagtggattcattgctaacttaaaaagtgtgtaatttcatataaagggctttcctcatagttcagttggtaaagaatccacctgcaatacaggagaccccagtttgattcctgggtcgggaagatcccctggagaaggggtaggctacccactctggtattcttgggcttcccttgtagctcagttggtaaagaatccacctgcaatgtgggaaacctgggtttgatccctggatttggaagatcccctggagaagggaaaggctacccactctagtatttcatataaaactgatctctgcatccaaatgctttaaaaactgagaagacttgtcgattgaattgtagggtttcacaaacactgggggtgtgctttccattcccagggttggctgcttcattcttttatatgtcctgcctggttctggtaggcttttcagtttgccacccccaactagaaaagagaagccctggcctcttgcctcgctttgaagatcctttgctatgcggtcttctctccagccgctagcccattagttatgatcaaagctctttaacagcaatgggcccttgaaggcagtgcaggttcagattcgacagcaattatcaaa

SEQ ID NO: 31338 - DNA, 761 bp, Bovine  19866881192267
  misc_feature (1)..(1): n is a, c, g, or t
nattaaataaattaaaaaaccccttgcaggaacaccaaaggagtacaaaaatgtaaagatgcattccattttcagtgttcatgacatgagttattaattccatgggtcatgaagcaaaactttttaaaaagttaacttgcatttacccttttgacagcagtttgcatcacagtgattgaattttattaagagaattgtttgctagagctatctgtcttcattttggccactctggcataaatatttaatttatgttccaaattaaaaaaatgtctcataaaaactgagtggccgtgcggtaactgttcactataaaaaaaaaaaatgaggcttacatattgctgcacatgatgtaaagtacatctacgtgaaagaaggctttatttgacttgaggatattccctatttctagtgtctgtggaaaagaagagctggaaagcgatttccccagacaaaccttgctttaaaattctacctcttgtcatgtacttctgattcctacttaacacagatactctcctgaaaataattaagtagaaaatttatatgcgggaggatggtaatgattattgttgttgtttagttgctactttgtgtctgactctttgtgacccagtggacgctagcccaacagactcctctgtccatgagatttctcaggcaagaatactggagtgggttgccatttttttcaccagggggctctttctgacccagagatgaacccagggctcctacacggcaaaggattctttaccact

SEQ ID NO: 31339 - DNA, 896 bp, Bovine  19866881206349
  misc_feature (1)..(1): n is a, c, g, or t
ngaattccttctgcctgactgtcttcaaggtgagatatcacttctttcccattttggacttggagtgaagcattggctcttcttagatcttaagcctgctgacttttggactagtgctgtatctttattattgtttagtggctaagtcatgtctgactctttgcagcccaatgaactgcagcatgccaggcttcctgatccttcactatctccttgagtttgctcaaactcagtggccaaagtactggagcttcagcttcagcatcagtcctttcagtgaatattcagagttgatttcctttaggattgactattttaatctccttgttgtccaaaggactctcaagagctgtatctttggctttcctatttctcaggccactggactaggaccacaatgacatcatcagttctcataggtctccagaatgccttgccaactgcagatcttgggacttgtcagcctccataatcacatgaacctaacccttataataaacaaacaaacaagtaaataatacattttcctttgttagtcagcattctccagagaagcagaaccaatagaatgtgtgtgtacacgtgatgattaaacttgggttctataacatttctatccagccaacagtgctacaagaggggcaaaacaactaggtttgcccagataacaaagagttaattgagccgcttcagataaacatatggaaaaaaattatgcttggggtgtttcccaaaatagcaatgctcacgtttaaaattctaaataaaaatgtaattactgagtaattcctcttgattagcacctctgttctcatgatgagctaggattctataataatgttagaagaatgacacttagtcgaaagttcaagtgatatgccactgtattagcagta

SEQ ID NO: 31340 - DNA, 1904 bp, Bovine  19866881233537
  misc_feature (1)..(1): n is a, c, g, or t
nggatataaaaggaatcatgacacataatagataaggaagctctggtagtagggtctggtgtaggtgggaaatctaagctatatgaaacatattcagatttgaatttatacaactaatcttagacaaatagatgaattgattaataaagttttcactccatgtcctgatttgtaataaaaatgtaataaattagctggaattttgggtaccatttgaagtgtaacatagatgaagaagctctttgctcaaagccacaaagaataaaagaaatcattgtttaatatcacaagtgtgatgcatcagtcattaactgcaagtttttgtagacacacttctcatttttcaattcagattaaatgagaagattttaaaaacatattttgataacttagttttgctgttcacagaatagcagctgccctggtgtcttccttttgctgaatagcagatcattggtcataaacaatctaaggaactgagaaagaaaacactagctgtctttcctttctaaatatgtatgaacttatcaattccaaacagcttcaatatctgtgtaaactaatttctggtttcttttcttgaaatgagtgatccttgtatggaaagaaaggatgcagacgtcaacgtgttttctcaaagagctgtgtcataagaggtagggcttagtgggaaagaaaggtaaaccagtccacagagagagaaagagagcctacacagacagagaaaacagagttatggttaccaaaggggacaaagggcttcccaggtggcgacagtggtaaagaacctgcctgccaatgcaggagatgcaagagacttgggtttgatccctggattgggaagatcccctggaggaggaaaaatgaaaacccactccagtattcttgcctgaaaaattctatggacaaaaggagcctagtgggttacagtccatggggtcgcagagtcagacatgactgagcgagtgcatgcacgcacgcacacacacgcacacacacacacatacacacacacacacacacacacacgggacagaagaggggaagagtaaactgggaatttgggattaacagatacacactactatgtataaagtagataaacaacaaggacctactatatagcacagggaactatattcaatatcttgtaataacctataataaaaaagaatctgaaaaaacatgtaattgaatcactttgctgtatacttgaattgttataagtcagctatacttatgagggtgggggttggggagagacttgctgtgtggtcttgggcagtctatttagcatctcagactatccttatttgtaaaattgggcaatgggttgttgttaggataagagaaaatatttagaaagcatgtgccatttgattggtgcttagtaagtgctagctaattttcctcttataattgtaaggagctgagatgcaaattgcaatgccactgaaaggtaaaccaatcaattaaccaaagaggaacgcaaaaatagaagtaaaaccagtgaaacaaaactgtttaacacatcgaagcagtagatgagctttggggaaagagcagttgtatttacctgaagcagcttcagtctattttgtttggtaaagaatggagtgaaatcatgtaaaggacttggaaaaatgtggggggctaataacagtactcaactcacagagttattgtaggcattaaatgagatgatatttgtgatgtaccgtgcatggtacttggcacaaaataattgcttaatgatcagagataaaagtgtctattcaggccaaacatatattttatagatgaaaaaagtcaggctcaggagaattaggtaactctaagtttgcatcaaaaatctcactgtaatacactccataattaacttactatatttattcagtaaacaa

SEQ ID NO: 31341 - DNA, 1972 bp, Bovine  19866881234249
  misc_feature (1)..(1): n is a, c, g, or t
nctctttctgaaggtgcagaaagtaaatctgtcaattaaaaacttagtggaagactggcatgtttataaaagttcttacatgtaataagccaaatgatgtctagctgtgagattaagtttgaatttcacattgctcactttcaaatagcaatttccccccccccgttttggaaagctcaggtttgctgccggccacttcattaataaatgctattcagttttcccttcaatgagaaaggaagacattaaatgtctgtggcatgcatagaaatgaacaaacctccaaattttaatgggaacaatgccatatttctagaatcattcattccttatcttgtggctgcatgcctgctaagtaggcctctgtatttgcttcaaattcatcagtttgagatggctgctgtattccattcttgcagatggaaaataaaaatggatcctttactgagaagagaaacacatatttttagtttcacaccatgccacatcgttgttgaataggtttttatgttcagtgcttcaactcttgtaggtgatcaattcaaaatttactcagaaatcattgcgatgattatgaacccataaaaatcagagagcttgttttgtttttttaaacactaaactttcacattaacactgggctgttgcaggtggcatctttttcacagtatcctcaatttgtctctcaaattgataggcccagtggccccaacttcactagatagcttttccataggttagttaggaatgtaaatgaaatgggcattaggattttttttttcttttcctggagatacttttctaggagagagtgataatttcttatatcatgtacaattagagctgaaacaaagatcttttctttcctcctctttagttgtcacatactcctgtcctctcatttacaaaggtgataaacaaggctcagagacccacacagggtcacctaaccataatgtgtcaaaagcaaggctaggaccagattttctggtcccagttgagggctatatcatcaataaatctgaaatagctggtttaatatagccccacagtagattcaaagagccaacacattggaaaaatggagaagaaaatggcaacccactccagtattcgtgcctggagaatcccatggacgaggagcctggtgggctacagtccatgaggtcgctaagagtcagacacgactgagcgacttcactttcacttttcactttcatgcattggagaagaaaatagcaactcactccagtgttcttgcctggagaatcccagggacagaggagcctggtgggctacagtccacggggtcacacagagtcggacatgactgaagcggcttagtagcattggaaaagactctgatgctaggaaagtttgggggcaagaggagaaggggtgatagaagataagatggttggatggcattactgactcaatggatatgagtttgagcaaactctgggagttaatgaaggatagggaagcctggcgtgcagttcagtggggtggaaaaagagtccaatacaacttagcaactgaacaacaacggcagattaaacaatatttaatacatttgatgtaaaattaagaaaggattcttactataattgtaatatgaactaaagtaaataatggtgataagaagcccaatactgagatggataaggacttggaataaatgaactaacaattccaattaaggacatttagaccaccaggtggctcagtggtaaaaacccacttgctgatgcaggagacatgacactgtcggttcaatccgtgggttgagaagatccccggaggagggcgtggccacccactccagttttcttgcctggagaatcccatggacagaggaacctggtggcctatcatccatggggtcacaaagagttggacatgattgaagcaacttagctcacatagcacacatgcatgtatttataaaagcagcagttattgaaagtat

SEQ ID NO: 31342 - DNA, 1675 bp, Bovine  19866881237200
  misc_feature (1)..(1): n is a, c, g, or t
natgcagggggcacaggttccatccctggttggagaactaagatcctgcatgcctgcagggtgtggccaaaaataaaaaacaataaaaaaaagtgactgtagttatattgaagtggattcacctggcaagaggccccgcccatatgccgtatcgcgttggctctggcttggttaattactcagaacacaaggaaactctggattggttaatacggaaaacacgaggactcttcctcaggtgtcccgtttctgacctgcagagagccctggtggaaagagacgctgcccggtgcccgctcacatgggagtaaggatgctataccacgacaaagaacctttgttcaacttggaattatcgaagctggaaaccaagaaggttttaataaactccatgggagaaaaaaaaaagatacgacctggtgagtaagactgcttaccagttgtagatttctaaagcattctagctaaaggggctgtttctgaaaagtgatgaggcatacattatagaccttcttccccaaaattataaatggaagagtaccaacattaatctgtaaaggagagatttctggagtcaagttcacaggctaagaattctgaataactagcattggctgacagtcagtgaggctgaagccaggatgttctccatttatcctctttcctctagatactattgagtttttgttgtctttgcaaataatattgaagtttgggaacataattttgaatttgttcagatttggccataagatgaattataagattctatatattgtggcttccctggtggctcagtggtaaataacctgcctgccaatgtaggagatgcgggttccatccctgggtcaggaagatctgctggagaagaaaatggcaacctactccggtatacttgcctgggaaatctcatggacagaggagccttgtgggttgcagtccatggggttgcagagagtctgacaggacttagtgactgagcacacacacatatatgatgtttaatgtaaattctcaattctggttgttagctaagacgtccatgtggacttattttgtttggaatagctaaaaggtactataactcagtggctacacttgcattatgcgttgaaggctgttctctgctttggaaatctggcttgctcttcctggaatcaaagcaattgaacaaactgagaagacatccacattaccattacagatacagtataataaaaagcatgctgtgagtttattttaaaattgagtctatgactgcagtcagattgctcgctaaggattttaacacagctgaaatccattctctagagagattcttttgtgtttcccttgattctacatccgcttctttgagtatctggataatatctgtgtacattctgttatgtttatatcttgcattgtataccaaatgtcttcattcattaatctgtgcattaatattgttcctttactagttggttaaatgtttttccatttgtttctttgtatttaaaaacatgtgtttccatttgccccttggtgttgataaaaggttggagttgggaactgaaactgggtggatttagttttgcttgagtagtaataagaatgaagagtttacaatgatttaaaattgtaatatttaaggcattagagtggcagcagtagacaacgttgtggcaaatataaa

SEQ ID NO: 31343 - DNA, 1672 bp, Bovine  19866881252349
  misc_feature (1)..(1): n is a, c, g, or t
nttaccactcatgccacctggaggtaatctaggcaaaaaggatgttgtcttggctcagcattctggcagtagacctgagagactggatagatttggaaaataggaggcaaagttgattgaattgtcttaaattacttgcctgctttgaatatgattggatatttaacagttttaaaaatgacagtagctctggtaagcagtggtactttattatgtatgtgatttgtaacattttgctgctatcctgtttctttttaagaattaagaatgaccacacatacataaaattcttgggtgaatggtctactggaggagtattgtattcttcagaagtctgaaattatagaaaactattcaatattgagtatattttcatttgtgtgtcgtaagatattcttcactttttatcaatttgctgataattacagcctggagagtaatgtcaaagaatactgagcaattaaatagtcttttctatggttttcaataactgatttatgcaaccaaagaatttgaagatgtttaataaagattttattaaatgatgtatgatgttatagacatatttttattgtttaatggttctttatgtcttttaattttaggaggccaaatatcttttgccacctctggaaaaagagttatttttggcagagcacagtgaccttgaagaaggtggattagacctgactgtggcattaaaaccagttagtttctatatatcagacaaaaaagaaatgcttcggcagtgtttctgtatcataggagagaagaagttacagaagatgcttcctgatgtgttaaaggtacttcatgacatagattaccaggttctccactatatagaaatatacaaaaactttctttgtagcagtcattttacttaatggaaattataattgtatgttttcaactaagctacttcaaaaagatacagggattttgcagaaccataatggctttgtgtattgaaaaatttgccagaaagaaatgggacactttactatatttaggtaaggaattttttgaccttctgggaataattctattaaatattggcaatttaagtaactagattagatatacactgattcttttgctttaaggagtatactgctgtgtaacagtatgtaataaagaaagaaagtgaaagttagtcactctcatgtcagactctttgtgaccccatggactgtagcccatcaggctcctctctccatggaattctccaggcaagaatactggagtgggttgccatttccttctccaggggatcttactgatccagagattgaaccctgggtcttccatgttgcaggcagactctttaccaactgagtcatcagggaagaccacagtatgcaatgatagttggtaatagcctgtatttcattaaattcttaaatgtttttggatgtttatttctaaaaattactcagaaacgtatgtggtgttgtaattttactgatatggaaaaaagacttgggcaagttaaacccaacagcatatatatctaagatgaatggagccagggctagaatatttaagcctttagtggtattcgcctaacataaataggagaagactcttgaaagtcccttggactgcaaggagatccatccagtccatcctaaaggaaatcagtcctgaatattcattggaaggactgata

SEQ ID NO: 31344 - DNA, 976 bp, Bovine  19866881281116
  misc_feature (1)..(1): n is a, c, g, or t
ntgttttaaacatattattgttcagttaagagaaaacagactgttctacgtatttataagggctttccccagtggctcagcagtaatttgcctgtaatacaggagctgcaggagactcagtgatattctccagatccagggtttgatccatgggtcgagaagattccctggaggagggcatgacaacccattccagtactcttgctggaaaatcccatggaaagaggaacccggtgggttacaatccatagggttgcaaagagttggacacgtctcaggtgacttagcctgcatgcaggcatgcgtttataagtaacagctggggaggtgtgggggaaggttgagggttggcagagacagaaatagcactcacattctaggctttgttggctcacgcggaatttgggaggaaagcacatcctccttgatgacacagcggaggagcttactcctgttcccagctggcctcacgacaggctcttttctttctcacacattcagccccgagagtcaggtgatgactccggccaccctgcttcgggcactgtgccgcccgtgttcctttacaaggcctggctcccagctgtttcacggtggaggcatctgacactctgataaatgaacaggccatcggatattccatccaacagagggcagtggctcactgaaactctcacatatttgctctgaaaatagattttcctgaaactttccacttaaatagctgggattaactttcagtgaggccaacctagtggcaactaagcagagcatgtaaccccagatggttgggcagccacacgtggtcacagttctgccttaattcgctgctgattacttcctttgaaatttgcaaccagattctaaactattcacctttcaacatctggaaatgctgagcgcatttggtcatttattcgtcttgtttaagctgtacacccgggttggggtaagactgtatttgccaaagcagggt

SEQ ID NO: 31345 - DNA, 1700 bp, Bovine  19866881565398
  misc_feature (1)..(1): n is a, c, g, or t
naactttctcaaaaactgccttgactttttgtgaaattatgtttttgtttcatggttgcaatatcttatatctctaaggatgctaatgctgattttttatttttaagttattttctccctaagtggtctgtttcctctaaattggttgtttcccctccctgtttgttttggtcactatattagcccaaatgtctagtaattcttatcctgcgcttagtattagggtgtgtgcgtgttcagttgtgtcgactctgtgaccctatggatcatagtccttcaggctcttctgtccatgggattctccagggaaaagtactggactgcattgtcatttcctcgcccaggggatcttcctgacccagggcctctgcatcacaggtggatttttcacccatgcaccacccataccccaaggctcatctgtgcctgtgttaccgccctctccttccagccaaagacttttctgaagaaaaaacttctgacttttgctgggtacaaggggcagtttgtttgtttgtttgttttttcttgatgctgtatgcattttttccccccactgattcaagaagtacttaatgattatcatgtagaacactgtgctgcaaatttaggaagatgaaaaaaaaaaccaagtctggactctgccattaagagcttcacagaacactacacacaaacattgatactagagagtgctaaggggcacatttaggtagatttagtactttatataatatagactttttaagatgtcttatcttttacatttctttggacttattgataaaatgggttctgaaaccacatttttaaaaaaccacaccaaaatagacaagttaaaattttacatgtgtatacctatggccaattcgtgttgatgtatggcagaaacatcacaatatcatcataaggtaattatcctctaatttaaaataaaattaaaaaaaaagaaaagatttggaggaaaaaaaaaatagctactaccaaataccttcctttgaagattttttgaaatgattccacttctgactctgaagactttcaactagctttcctaattctagttcctccttttttttgtccccatttcctagagatacgtaatggtgctcattcttgagccttttggaggttcattggtaaattgggcctcttactttccctgttcctgtttagaactcattttattcacgtatcctaaggctgttactacatttctgtcagttttccatattcagtgttataattgttccttttttttttttcttattctttctgaccttggggatttaatacctttcttaaaataaacatagatagaaacagaatatgcattatacaaaacaatatgtattgttataatggtgtttggaaaaggaatgaatgagtgtgtgtgcaatatttatctaggactcttccctctttatgtacacttgtgttatctcctttagctgaaccacaaactccttgatttagtttgagtcagaaatataattctttaattcccctcagcagctaatttattgccttccacgtggtgtgtgtatatatatatgtatatctgttgtttgtcttgttatgtaaggcagtgatgccaagtaaatgatatatataacagtttggtaattattctaatccccaggcagttattaatatcctgtgtccctagagcagtcatttatatgtccctgtattagtcc

SEQ ID NO: 31346 - DNA, 1043 bp, Bovine  19866881633789
  misc_feature (1)..(1): n is a, c, g, or t
naaaaaaaaaaaaagaagacgccataggaaccaattgtttaaagaagctttcaattgggacagtttgagaatcaaaaaagaaaacaagatgttagggaatcaactcattctgaaactatcaaaagaggtgggggagggcagaaggcaagcatttacctgtcttttctgggtaagtgtgccacagggtaaacaaacagtagatgtggtaggttcttaactaaacatgctaggtattaaatccagaaataatggcagaattagagtaaattttttttttgaggggtcaacaagctacggcctgtgggccacctgtttttgtacggtgcacaaactaataatagtttttatatttttaagtgggtgagaggaaaataaggcacttcttgacatatgaaaattatatgacattcatatttcagtgtctataaataaaggtttactgaaacacagacatgttcactcatttatttactgtcaatggctgcttctccatgcaacagcagaggtgagcagttatgaaagtgactgcatggcttgcaaatcctaaaatatttactatcttgccctgtacagacaaagtttaccaaaccctattatagtgctatacattgaactatttacaaatgaaatagtatattggaaatttcctttaaaataatgttctggaaggggcagaagatgaaaccaaataggccatatgttgataatccttaaagctatgcaaatacatgggtggaagagagcattatagtatttctcttaaaatacgttgtctctacttttatacacatttgaggatgtcctttaaaaaaagttctaaaaaaatctgtatcactctgtattgcagatttcccatacctacacacaaagcattttgcaaactccttaaaggaattcagtttagaatgcttatgggccatactatttgtttacagatatcccaaactattccagacacaacaacaacaaaaagtacacatactgtattgattaactgtatcattttataaccaagagctgttaagcaatcacaagtccaggaa

SEQ ID NO: 31347 - DNA, 1158 bp, Bovine  19866881713478
  misc_feature (1)..(1): n is a, c, g, or t
natttccattcaatctgtttagaaaagagatggagtcagcaggtaattatgtccagaaatatataaatgttttagtatgactggaaatataaatctgcactatactccctgatttcttccaaccaccccaaccattctcattattcaaaagcactcaccaaatcctacttcatgaaggaaactatctagtgccaaagactattacatattcccagcatactcccccaaacttgaatgataagcaattgtgttcccccggatgtgcatatgaagcctagcaaagaagaacataaaataacaggaagaacaggaagaaaacaaacccaaagctaaaattatcagtggaactgattagcatatgtataagagacacttgtacagatgtgagatgctttctttagaatgtaagttctcagagctgtgattcttaatcaattttggagttgtgacatcttatcatcatttatttgccttttatgatcatcactaacctcctcccaaagtgtatttttaaatgagagcaaataatttttattctcaagcatttgcttttatttttactctccttgagaatcaccctagaggctcacgctggcccatacggttagcagtgggtaagaatttcatgggttctgccctttgcctttttcctttttttattgtggtactataaaatagccactgccacagcaatgagtgtggacagaaggaagaaagctgaaatgcgagctatttctacaagaaatcttcaaagtccagacaggatcaaaatctggatgggacattttgaaatagacccaaaagcggagaggatgaacactgacatgccttctccacatacacttctataccattctatttaggcaaatgttgtgaatcctgaaaatcagtctccatgaaggttacttcagtgattcacttcattgcagactcgatcatgctaaactgttttcatggaccttactgattatttgagacaacagaggataagatggttggatggcatcaccaattcaatggacatgagtttgagcaagctctgggagttggtgatggacagggaagcctggcgtgctgcagcccatggggtcacaaagactcagacatgactgagagacgaatgactaatgattatttgaggaatgggcccaatacata

SEQ ID NO: 31348 - DNA, 1606 bp, Bovine  19866880454318
  misc_feature (1)..(1): n is a, c, g, or t
naaaaaattacagtcgcttggatctcccaatcacctgaacttcaatagagggttgatttcacagacagttatgaaaattgttcagttggagaagaaaacctctttgtttaccctgcatttgtaccttataaaaatcaaacttgattagatggttcagtaacactggctggatgaaagaaattgatttataggtgtgcattttggagaatatttgtaacattgataaataaaaaggagatgttttcctagactttgtattgttctaactcacatgaaataagtggtttaatttaattctctttccccctgcttttggtgagattttatagtcccatcagctgtggttcttttgaggacagtgatcccatgactgatgatgacttactgtctatgccgtgcgtctcacaagttcaacacacacccctatgtctcaacaccacatataagaacaattgtcttggagggattcattggtagtttttcaaaggtatttgaagagaaagccaaattcttgttgctcccttcccctaccatttccagaagtgtcatcacacaggttgactcttacctctggttgccccagaccaggataaaaggtctggcttgactcatggagactggctttggctacacggcgaaagagccaagctctaatcctgatgatttcataagagccttctgtgtggtctcatggaaggaatactcagccaggagtcgggaaatcggagatctgctcctggttcagttttgagggcaagtagctgggccagctttgctggactctagtggggcttgtgggcctcctgccttcccatttcagtgctccttaaaaaagcaaagcctttgaattcacacatcacttggcttcaatctctatcactcatgaaatgcaatcattagatttacctctctgtatctcactcttctcatttataaagtggagaagctaactacatcatgcgacttaagtgaaaaccaaatgaattaatatacataggattgtaccatatagatagagcattatgcttggcatacaacaatctcaataagtgaactccactgcttttcctcttagagctgatctcaccatcttgtttcctaacaaacccacttttgattaattttcagagaagaaaagatcatatgagcttctatattatcgactaatatggaaagaagtaactgttccttctcaaatatattggcattttaacaagaaaacattagaaattatagctataggatcatattgaagcagcaaggagaagccaatagggactgtgtctgaagatataggagaaattacctagaaattctttgcattagagcatttttgattcagtcgtttgagttaaaccttctaaacattaagtggtcaatattttgaaataggtaggacatcaagatcattatcagatacacctcagtgtggcatagcttttcagatcccttttcagaagggaaattttaatctatgtgtgttgagtaagtaggatgcagttcatacaacctagatatttgataggttagggacaacaggaagatggaaaatatgaaaaataacttgcacataactatacttgaacccagaattgtaagaacataa

SEQ ID NO: 31349 - DNA, 1452 bp, Bovine  19866880585208
  misc_feature (1)..(1): n is a, c, g, or t
nagttaataagctaattaaaattcacctcttctcatctgcccttcactattctgccaaacatatgattgtctcagtttcctacttagcattaaagttggaaacttggaccctgaagcagaggcattcatttgcctacaaatttatacataataataaacactgtattcatgtaatagcagcttctgttatttcatgccttcactggcctgatgccagaatttcaccaacaggagaaaatcctttgttttgtcccattgaatattgtttgggatcaaacagaccatggaattataaaccaaagacatatggataatataacagtatcaccattcagaattcacaagttacaatggtggaacataatggaatatgtttagttttcatttttataattagctggttgtgagtaaattataataacataatatttaccatatactatttaagttctatgtatgtatcaacatattaatcatcttgataattaagtattattactatccttgtcttaaagaaactgagacagagaaacgttaagaatcttgtacatgatcctacaatatgtaaatggcagagctaggatttgaatgcaggcaaagtagctcttttcctatgctggactgccttgagttgttataagaagtaagtattaactaaatttgtgatttcaggattcatctagtgacacgtgcctctatgattcttgtgtttgaatgtgtgattgacttcctctaaaccagtggaaaactttttcctgattcctaaggaccaatagtgtggggttagcaatgcttctacctagaggatcagccaagtcagaatgaagaatccatactagcctaccagggcagatcagggtataccaggcaatatcaaccaaatgcagagagcattgagctgagattactaactatatcaggctccagtaattgaaatgtttcataggaaccatcttttctaaaagcaagggcaaaattctcataattctcatgtgaatttttgataaatttcagaaccttaaaaagttatatcaccctgatattcacttaaattaactagatcaaacagctgagaccatggtcagggctctcaaaatatttttgcttgtagatttggatggatagatggatgatgaatggataagcgaaagaaagagaactgaagtacataacatttcaacttgccatggtttgttgaggctaccaagcaatttttaaatgattttctttttttattttaatagttttgtcctctcctaatcccctggaaaaggaaatggcaacccactccagtattcttgcctggaggatcccatggatgagaagcctggtaggctacagtccatggggtcgcaaagagttggacatgactgagtgacttactttatttcacttcaatccttgatagggccttcccaagtggctcagtggtaaagaacccacctgccaatg

SEQ ID NO: 31350 - DNA, 1207 bp, Bovine  19866880591117
  misc_feature (1)..(1): n is a, c, g, or t
ntctgggttaggaagatgctctggagaagggaatggctacccactccagtattcttgcctggagaattctatgaacagaggagcctggcaggctagagtctataggtcacaaagagtcagacatgactgcacaactaacactttcactccatttttaggaaacttggaatatagaagaaacctatatagaagaaaataaaattgcccacgataccacaatgctaatagccattgtcaatattaatttgcatagaatattcattatattattttctacgcttttctatagaaatatatcataagttttttagcaatttgggtgtattcctttttgtgtacatgtattcatgtgatatatattattgatttttaaaccaattatataatttacaattttttgtagaactatatctagtgtgtaactttcagcctagttgaaaataatttgtaagctataaagctgttgtatttcaaagagtttgggctcacgcagacctctattcattagttttaagacaccactgtgaaatgacgtaggtggcaagtattattatcattgtattgcagatggggcacccaaagcagacagcagttgcataaccaaggcagagctagaaatatactggggttattttgaaagtaggtagaatgtaaattacaggtgaaattaaacgttggcacttaatacttctaatcaaaagcctcatctctttgaaatgataatgcataaaatgtaccagccctctcttacttctccacgaattaagaaccaaatatgaccttggggagtccacatgggtatgagtggaaagttaaaccagttgcatatgccaagttgttgccagattcttgcctgaaggtttaaatggtgtgttaaagctacaaggaaatctaaaagattgcattgaatttggatgatgaagtcaaaatacccataggtgtgtgcatgagcaaacatacagagatacacaagaattttaagaccaaaagtaacactggagcccaattccatggtatttttattagtaatctttacttgggcacaatttcacttgaaggtagtggggattctttttcctgagtcaagcctgcggactcaagtctgttgggagccagcagaccacagcagacgtcatcaaatcctggtgcttcaggatgtacatactgatcaccgcaggggtcgggaaagattttattttttaacttg

SEQ ID NO: 31351 - DNA, 1890 bp, Bovine  19866880591238
  misc_feature (1)..(1): n is a, c, g, or t
nccaaaggatattcaggactgagttcctttaggattgactggtttgatttcccctgtagtccaagggattctcaagagtcttctcccaacaccacagttcaaaagcatcaattcttcagcgctcagctttctttatagtccaactctcacatccatatatgaccactggaaaaaccatagccttgactagacggacctttgttggcaaagtaatgtctctgcttttgaatatgctgtctaggttggtcataacttttcttccaaggagcaagcgtctttgaatttcatggctgcagttaccatctgcagtgcttttggagcccaagaaaataaagtctgtatctgtttccattgtttcccaatttatttgccttgaaatgatgggaccagatgccatgatttttgttttttgaatattgagtttaagccaactttttcactctcctctttcactttcatcaagaggctctttagttcctcttcactttctgccataagagtggtattatctgcatatctgagggtattgatatttctcctggcaatcttgattccagcttgtgcttcctccagcccagcatttctcatgatgtcctatgcatataagttaaacaagcagggtgacaaatacagccttgacatactcctttcccaatttggaaccagtccattgttttatgtccagttctaactgttgcttcttgactcacatacagatttctcaggaggcaggtaaggtggtctggtattcccatcttttgaagaatattcagtagtttgttgtgatccacacagttgaaggctttggcatagtcaataaagcagatgtttttctgaaactcttttactttttcgatgatccaactgatgttggcaacttaatgtctggttcctctgtcttttctaaatccagctttaacatctgggaagttcatggctaatgtatttttgaagcctggcttggagaattttgagcattactttactagcgtgtgagatgagtgcaattgtgcggtagtttgagcattctttggcattgcctttctttgggattggaatgaaaactgaccttttccagtcctgtggccactgctgagttttcctaatttgctggcatattgagtgtagcacttttacagcatcatctttcaggatttggaatgctggtttttctgatatataaatgtcaatcaatttaaaatcaatcaattaaaaaaattaaaatctacctctttattaaagtggccatggctatcctctctcataagagtttaacgaagaatgctaaatggatgaaccaaagcatatcaggtgaactctgcagtggcagtgtattacagctgagtagctgatctgaagaaatcacacactgatacatgccagaactctgcaaaatctagctttcccttggaggcaacagaggtgtcaattgctttatatcattcttaatttcataaaataaagactagaaatgtttgcacactatgacagacccgtgaaagcacaatttttagacttttgctaccagcttggcttttgccaaaaatgttctcacagcctccggtcttcatgcgcttcttcatgctgtcaggcatggaacaactttttccatgaaaacaaaacacttcccaaggagtgttctcagaaattctaaggggctttaaaggaacatcctaaatcctcatgttctgatggtttcacaacgcttacactgcgtccaagtaccctatccctaatttgttctggtgagtttttgttttcactcagagggttttctcaactgggctcgatagctcatgtcagcagagagtcaaaaatatccttactgggtgccaagaaagtggtaaccacacacgtacaaaatacaactgttctactggacttttactc

SEQ ID NO: 31352 - DNA, 1471 bp, Bovine  19866880600462
  misc_feature (1)..(1): n is a, c, g, or t
nctgattcaaattgatgtttgctcaaataaactctgaaaaaaaaatgtcagtatgcctcagtttatcttttaacacttctaattatattagttgaaacaagattaataattgtaaagttctatttataggctctttttgctatcccttttttgctatctttttgcagctccctaacgtaagttaaatattcagcatcaaagcaatattcagtcaatctttctaaagaaaaaaaaagttataacatttagaaatcatcttaccatcaagaaaattgtatttagtagaatttttaaaaatatatgataaattttagagaaattcctattaattgataaagtcattcaattaccagaattcattagaccatgaataaaatcatttcttcaatgaatgacattagctgcttctttaagaacagaaagtatccttctaaaaactattcctttttaattgaaaattcctgggacgaatacaccactaaagaggaatattaatcgtctgatctgatattactgatttaatttagtaaaatttagaaaattttaaaaacctaaaccatgcgcttttgttgaaaataccagtttgtcacagaagaaagtcaaaactatttaactatctcctgctctaataaagccgatttcacttcctggagcatacaaaggtaactctcaaatagtcagactgtcctgaatatgaaccatacacaatacacgtatcaagagctgtgagagataagggataaactatgacctcaagaaaggtaggtcacaaaagcaaatctcagaaaaacaccttcagaatgcctgatccttgtgtagtgatggctcattactcaagattaagaatgatttagttaaacaattctagataaatgaatgcattaatctgcaatatgaagatgtttttcagtagtctctccctccatgaagctttcctgtgcaagtcatagtcaaccaacttccaagtccagtagtctttagctcctgtagaatctatttccaaatccactgctatcacctctatcctaaacaaacagttttcaaagcagtacctgtgccgcactgaatatgagatggggccaagaattacttttctaacaaattctcaagtggtgcaaatggcacatggaccacattttgagaacactgtcttgagatatttcttctagattagtataatagtctcctaactaactattctaagtacacccacttaggtaccacctttaatccagtctctacagcatatattaaaaaaaacaaaaacaaaaaactcaaatctaatcaccacacccatattatcatcagtctcatgaacatgccatgatctttacttcattcatagtactaactagtgctaccagacactacttcatcacctagacaactgattatgatgaactgtaggcaccccaaaaggttaacccacagagttggttttttttttttaacacattgcaaatgacaagtg

SEQ ID NO: 31353 - DNA, 1233 bp, Bovine  19866880618861
  misc_feature (1)..(1): n is a, c, g, or t
ntactgtaaactttcctggaaaatgggtgatgttaaacatcttttcacgtgcatgtctgccatctatgcatcttaagaaaaacatccattcagatcctctgcatattttttaatcaggttctttgttttttgctgttgagttatatgagctctttcatattttgaatattattgtatacatgatttgcaactgtcttctatattcccacaatgagatattacttcacacccattagaattgctattattaatattaaagggggagaaataacaaatgttggagaaaaggaaccttcatatactgttggtgggaatgtaaattgatgcagccactatggaaaatagtatggagggttctcaaaaaatgaagactagaactaccatatgatccagctattccatttctgatcatttatcctatgagtatgaaaacactaattagaaaagatatatgcacccttatgtttatcacagaatggtttacaatagccaaggtatagaaacaatccaagtgcacatcagtgggtgaattaataaagaagctgtgcaatgaaatactacttaccaataaaaaagataaaaattttgctatttgtgacaacatgggcagaccttgaagctattatgctgagtgaaatgtcaaatggataatgacaagtactatataattttacttatatgtggaatatatatatatatatatatatatatatatatatatatatgaccaaaccaaaccaaaataaacacatagatacaaagaacagattaatgtttaccagagcggaaagggatgggtggagagcaaaatggttagaggagtttagctgcatggtgacagatggaaactaaacttttggtggtgaatcttgtgcagacagtgtaaacagaagtcaaaatactatgttgcattcatgaaactttaaaaaatttttaaaaataaaagtataatagtataaaattattatttctagtgtattttttatttcagtcattctcacactagaaagtatttatttgaatacccaattctatatatatatattactgtggagaaattcaagaagcttaagaaatagccccaaatctcaaaaattttataatctcactagaagacaaatagtcagaaagcaattataacaaaatattaagtatcaaaagatgtcaaaggaatacaaataaggaaggattagaggttaattggtcctggagggggaaaaaagcatgaagagt

SEQ ID NO: 31354 - DNA, 842 bp, Bovine  19866880654619
  misc_feature (1)..(1): n is a, c, g, or t
ntgactgggctactgccctggaaatgctttttaaaaattatactataatttatcattagaacgaaaagtcattgtgtgtatagaaaggctagaaactatggagtgggatgtctatttgatatcagtgaggtaactattactggagggatgatccccatatcttattttcttgcaaattaatgaaatgcgttggtgggtcctaaaaatgggaaatacaagttaaattacttgtgtaaggtgttgtgaatgagataatgcataaagaattgtctgtcgccttgctacaccacgtgtggttcctgaaccaagagcaccagcattaccagggaacttgtgaaaaatgcagaatctcaggctgcatgccagacttacaaaatcaaaaagtgcatttgaagatccccaggtgattcatctgcacattaaattctaagaaatactgatatcacatgctaagcccgtcaactagaggaaggaggaattgtctaatctctttgaagagatggaagaaatttcaaaacaaagagttgtgatcaattcattcgtcaggcaggactgtcattcagagatcaaacaccaatatcagaaacttcctgctgagtttgaacagcagctgcttaactttctgtgacatgtgattctactaaagaaagttggttaaataagaaagactaaccaatccggggctttttgatttatctccaaatttactaaaagaattttttctgtatgcatgaaatgaaaattctaagttataagaaagcattgttgtaattttattgacagctttttttgattccttagcatttcttaaaaatcatagtgtacctagaagggtgggatgg

SEQ ID NO: 31355 - DNA, 2843 bp, Bovine  19866880659313
  misc_feature (1)..(1): n is a, c, g, or t
nttggtgatggacagggaaagcatggtgtgctgcagtccgtggggtcgtgaagaagtcggacacgactgagcaactgggctgactgaaattaggaagagataagttctaatgggaaagtctgaaagacttttcgtgcctgatgtaacacttaagcttaggctttgagaagaagtcaatatcaaaaaggaagatggagccaggaaggaagcacattccaggaaacaggaaaagcatgaactgagtcacagagacatgaagcaatgtggaatgtctggggagcaatttgttgcagctggaacataggagatagagcagtaaggttggaaggctagtagttcttatagaaagctttgtttgctatacttaaaaagtatggattttatccagtggaacagttgatgatgggttttaaacaaaagtgttgctcaatcaaattagcattttagaaaaatcaccctggtagcagtatagaagaagaatcagtagatgggaagacaaatcaggagacgactattgcagtggtagcactgatgatgaaggagtggaatcagatgccagagcacctgactgcctaaatgagaactctgcgtggagtgtgagggaagctgtccagggtgatgcccatctgtctggctggaacagcagagtgggtgatgagagctttccccaaggaagtgaacagcataggaaaggttagtttggttctgaacttactgatcagaagagttttacatgaaaaaattgtcaacatgaaaggcagatgaagcgatgaaaacatacatctttgcctgggataaccgtgtggtgtgaacgaagtagagagcccagtgggtctagcaggcaacacagagaagcagtggcaggatcaccaacaaaaaatggtttcccagaaacacgagagtgattgacagtgtcagatatctcagaggcctgagtgaatctgccaaatttgatcatttgaagtccatgatgactttagtttcagatttagtgttctgatagatacaagctttgttgtagctgcttgaaagtgaatggctgagctatatagatagcagttattggctgtttttcaaaaactttaacattcaatgaaggttaaggaaatttatggaatcatagtaagaattacttgttttctattttgtagtaaagtgaaaagattaatgcttatagcctatagacaaacagctagtagagaatttggaagagccttaaggatagccacatggagaaggaaatggcaacccactctagtattcttgcctggagaattccatggacagaggagcctggcatggtacagtccatagggttgcacagaatcagacacgtctaagcatgcatgcaaagatatcttcaagggaacagctgggggattaattttaaatggaagagtacctcttttatctgggcttccctgatagcccagttggtaaaggatccgcctgcaatgcaggagaccctggttcgattcctgggtcgggaagatcccctggagaagggaaagactacccattccagtattctggcttggagaattccatggactgtatagtccatggggtctcaaagagttggacctgactgagcgaatttctctttcacctgtttatctgacactggaaagaaagagaggaggacaggtgtaagaggtttgttcttggaagtgaggatttcagggggttcagaaccaaattttctctctggagtaaggaaatatactgagagagaaaggaggtgaaggtttgtactgtagtatgcatcaggttaattggctttctctgaggcatattactactgggtaagtggtttgaaccagtactagatgttaattttgagctttatacaggggaatatattagtaatttttgaaccaccagcccttatactcaaaaaatcttgattaaatattacaaaataaaatgtgatgactgatccccatttgaatgctggtttagttaatactgtagggggtgaactaatatgaggagagattttctagctcgttaccccactgtaaaaatttaacagtaacaatgtttcttccctatccctcacttcattgtcgcaatttataagggcagtatctaggacctagagagatcatgttgcatctctctttatgacatcacggcctactcatttcttaggttttactaacctctatatcacagaaaatgtaagttgcttttagaacttatgaggtgttcagataactgacttcagataacttgaatctcactttggctcaagttttctgtttaacttgttttgtaatactgggattttaacttttacagcagacatataatttgcaacaaaaaaatttcctaggtgctggttttagaagtgtcttcaaattaaagcgttatctgcattgttgttcaaatttagtttaaaaaaaatagatgtccagaagaagggggacacatttgttaacataagtgtataaacagtgttaatatcttttctgttatcattaaaatcaagtttgaagtgtcttcacaaattgaaactttgaaaacaattcttcaggttaataaagcatataaagtcagctaaaaggattagacttgtaagtatatatggaaatgagtgttacatatctcccaatggttttacaatttaatcactaaagggtaaactattgtagcctgtttagctttgtgcattcaatttgaggttagagcaatgacttttttaacatgaaaattaactcctcctagagaattagtatttgcatattttatcaaaactgtttataccctgaaagagcaggcaaaacagtttttgtgattaacttggcagttctaggtggttgtttttttcttttcttcca

SEQ ID NO: 31356 - DNA, 2031 bp, Bovine  19866880660252
  misc_feature (1)..(1): n is a, c, g, or t
ngcccacgttgcaactccagggggcgctgttcacatactagtctaggtcaatggcacgatgtgggtggtgggtgcatcactttccaagaatccagtgtgtccgttctttgccatgactctcaggtcatgcttaactctgttcatacttgcaagcacttacttttaaagataattgaaaaaggagaggtttccctttcctttagtttttagtaaaactggtttcctgagcagaccattagctgtgattccaacctactattttagaaagtaaagagtctaagaaagaaacacagagatagccccttccattaaaaaagccactctaaagacaactcaaataaagaattcccctaagaagggaaatttttctagagatgagattgccaatcaccttttctttctaaatcctaaccactttaaagtgatacttcctctagttgagttttctactgataagttagataaacatgaatcctttcaattatttggaacatgtagtgttaaatctgttcactgttattttcctaaatacattcttacaagtacctatttcagtccagtgagaatatacttctctaaaactatgatgcaagcactctttccttactttgttatcttttttaacatgttataaaaaaaaaaaaaaatccagtattttaaaatggaagtccactcatgtgacaccagtgcacaaacatttctgttggttcctcatcttcagcaaatccagaggcctcacaatgacacataggatctgtctccaggacctctcagctcctcctctacatccctgggcctctgcacactcttctccctctgctccttgggctgcttcagggtactcttctgcagggcctggcaatgcccacttctcagggaaagctttggcagttctagttaaaatctgtaccactgcctctacctcctccatctttgccccatccttgtaggcaccctgcctgatttcttcctcagtagaatttcttccattgtcctctttaaaatgaggatgtacaagatctttacaatgaagatgtacaaaattaaaatataaaattaaaagtataagatttgtattaattaccactccttccccccaccatcatattcccactagaatctaagttctgttagggtaggaattttgtttgttttattctctgctgtttttctaatgtgtagaagcgtatacagacttataagactcaatagccatttttattgggcaaatcacattagcaaatcatgtagttatagaatattatgcgttataaattctggattaaccaggctcatattacaagcaaaatgccacacaatttctctttctctaatcattagtgtataagcagacattagaaatcttagtatagtagtactatttaactctgctctatgtaatgacaatgggtatggagaagattcagaagctgtgggtttttagggaagtcactgaatttccttccagtggatggtttacttaaaaaatgaacccagaaaataatcttgttatttaaaaaacaaagacattgctaaaggggtcacaacacatttttaattttcctgtgataaaacaataaactaaatgatagagcctgaacaaatgctcacttgtctctaagttctcagggaagtttgataccaaagtccccctggacagcctctcagaacctctgcagagctcaccaaagcacaataacacactgctttcagccttccccccatgcctttttatccctttttagctgtttatagttaccagaatcaccccctgacccagatatacatagctcccaccataatcgatatcccccactggaggggtacatttgttacaatcaatgaacctacactgacacatcattatcacccaaagttccaattttacattacattcactcttggtgatgcacattctgggtttggacaaatttgtaatgacatgtatctaccattataggatcacacaacgtagcttcactgcctaagggccttcttcatgtttatgggttttctattataagagtaata

SEQ ID NO: 31357 - DNA, 1976 bp, Bovine  19866880695683
  misc_feature (1)..(1): n is a, c, g, or t
nggcatgcccagaagtccaaatgtgggaatgctgagcaatggaaatgcatgttatgtgcttttccagaaagctaaataatataaaatctctgatgacaccttgccttagaatactgtattgatgtttttatccgtcttaaacttaatactttaattttattccttcacaactgtgaacacacacttgaagaattgagttcagtgggcatccagttgatgtaaaagagtgaacactttgggcatgcttgatgcttttctcctttggccacttgtatttttgtatatgatattcaaacatatgttatcactttgatattttgtttttctgcctcttaatgaaatatatgatgtgcagttatgtgttgagtaattacactgccagtctgtagagtcgcacagacttctgtctgaaagttaggtatgtggcactaataccgtgtcagtgtatgattgaagtgtaaattgtttaaaagttaaggcctatgattttggtcagctcttgggttcaagcaaaattagtagttcctggaaagtgaaaattgaactagtctgtttttagtattcttaattatgcaaatgagcaactttgatatgagtttaaaatgtttgtaccatagaaaagaaaatttcagggaagctagagtagtaggcaagcatgagatattaggaaagataatttttgagaactgtggagaaagtaagctctgtgtttatgagataggagagaagaatgaagacaattagaagagattagcaaatggttagaaggacatttgggcagaatttggggtatgatatattttgtcttagtgtttttctcttttcatccagtattatgactgtgggcaaatgactttaggtaggaggtcagaatctttaatttttactttgtattgttaaaaaaaaaagctaatgggaaatggttatagcacagccttcttccatcgttttatattctagctgctcagtttatttactcacgacgtgacaaaccttcagctgttgaacctgtagaagaatatgattatgaagatttgaaagaattctccagttctcttgtgaatcatcagctaagtggaattgatcaaggtatagtaagaattagtctgtttcttatctgaaaatgattaataatttactgagatttaccaatgttatttatcagttttattgttcataatattaatcatgggtagaattggtatgaactaccattatatcttgtatcttcaaggaaaatttacattttgttaattatgttttgtgaagactatatggttaactatatggttgaaaaattgattgtgtggctgttattcagtaactggaatttgtgattgaaatcttcttaggagagaaacttccgcgattcgttttcttttatcagtatttattgttttataagctgtatgtagagcttatggttagattacagaagctcatttccttggaaaatgttaggttccaaaagactggtttttattaaaaataataataagttcagagtaacactatacaaatgtcctgattggtcacagtcatataaattaaatttcaagatagaacttgtaaatggtaatggctttggttctgagtttgcttctttttagttctcttaaacattttaacaaagatattttatattttggctttcatcttttataaataaatttcaaatgtgacagtttcagacatactgctccagtcataggttgatgaataggggttgtagaaccaaaatcatcaggtataaaagtagtgctctctgttggtgctgagccgggctcagcttgtttgctccttctctggagtgtactctttctctggctttgatctatgaatatttttaaattgaaaatttataacaatttgaaaacaggaaggagggaagtatataaatctgagagttgatctttgcgtaaatcggtacaatatatgtcagctgcaacccaaaccgagaaaaatagaaagcacag

SEQ ID NO: 31358 - DNA, 1252 bp, Bovine  19866880736668
  misc_feature (1)..(1): n is a, c, g, or t
ntaaccttaatgaagaaacactaccaatttttgctaagatacaggaaagtaagatgctctatccattttataagtacttatttctattagtgttatgaatagaatggtttttaatttaagaagctttatacttttggtaaagtacttaacatctttatgcaaattgatttacaaccttgtgaaaatgagcgttattttgtgcactagcatcatgatttttagagtgaatgttttgtaataatgaaagtaggccattatgcttcatttctcttatagattactatgctttattactatagaagtgaaatctaatcttttacccctcttctattatgaccagacaactagacgtttaataattatggtgtctatttactatattaaaaataattatagaagatagtattgaaggaagacaattaaatttcccttttaatctctgtacatagtatttgtatgtatgaaatatacttcagttgctggttccccacttcaaagattcatataaaataggctagagtatatctcttactaaacatattattgtttcttatcctttctatataataaatctttcaagtactccatacaattcagcatttcctattgtgaggaaagctttagtaaaataccatttttaagaaaataagaaagtattaagctgtatttgaattttattgataatcaatatttttctcacagacaaattgattccattttctgtttgtaataaatccatataattgattcagcatgtttggtaacttaatgtgcggggcttcagaaaagactggtgtttgaggaattaatcatcagcataatcatgaaaagtacatgagcatagtgtacttatcctttagtgagtatgctaaaagagtagccattatattatgtaaattttattcattaatattaaaaatagaaggctatagcagcaaagtactcaaaacccccttctccagaaggagcaaggaaatgggttgagaagggctcacagtaggcaaaaaaaagatggtggcagcaagaactagagtcaccaaatcattgtatcaaataatgctacttttgccctttgcatttaaaatattgggaataagaaaatggtgttttagccatatttctagatacatcatcagtctgggatgaagaggtgctgacaccacagctgattctaccaaactgaagaccatttaataaaactagacccagagtatactgggctgtatgggatgaacaatgaggaatgaacatt

SEQ ID NO: 31359 - DNA, 1759 bp, Bovine  19866880760422
  misc_feature (1)..(1): n is a, c, g, or t
natacccatggggaaaggtataactccgtcaagacagagactcccacttctgctcagggcacaggttggctgtggtagtttgaaaattccacagaactcagtgccccgtagccttcaggaggaacccagagcaccagctgcagtggcagccatgcccagtgcacactgactgggtctagcagcaatggtgaattgtgagcaccttggggagttacaggagacacagagggctgaggagaaaaccttggaaagaaagtgacagatctacggtcaccagtaggatgtgtttttctaggagcacaggtgaaacgtctgagtgaggatcacgaaataatggatgaaagaatcaaagacacaaattagctgcattaaaatcatataaaatctatagtaaataaattctgtaaagcaattacccttcaattaaaaataaattacttttaaaaaatttttaataaaataaaatatgacatagacatagagaatagacaggtggttgccaagggggagggatggagtgacagtatggattagcagatgcaactaatatacatacagaataaatgaacaataagctcctactgtatagaacaggtaaccatattcaatatcctgtgataaaccataatgggaaagaatacaaaaaagaatgtaaggatatgcataagtgaatcactttgctctatagcagaaattaaacacactgtaaatcaactatacttcaattttttaaaaaagtcattgacatggtacccattctctcccatatccctatgagttaatcttatcatcttcttccataggatttagagggatgggaaaaggattaacatcatgagggcaccaaccttcagcatctacctccttcttgggaaatacaactttcagctaatatccctctgacaataacatttatatggccctgctgcctgctgagcaattttatgcatgatcatttcatttaattctcaagacagaccccatgagtgggatacagcgctcaccccttttattcacatgaggaaaatgaggcttagaaaagtaaagtaacagaaaatgatggagtcttttgattgaatatttttaaatgaatctagataataaaatggattgatttatcagccttagaaggtctgtttatgaatttcaacctcatggttatagactttaccctttaggatgttaatgtgattgaacaatttcatcacatgctgtaacttgaaaatgtattatttcacctaatctggcagacttgtagggagcacatttctaatataaggctgttttagagaataaaacctaattccaggaggactgataatttgtttaatatctctcagtcagtgcagaaagggtcaaactcaggacctctggctcagaatctgtatccaccttgaatcatagccctcatgacctatcacttttcccacaactacttggtgaccccagagtcagaaggtgaaagctctgggctgacaattgggaaatcccaaatggaagcctcctggctcttgttcagcttctcttttaccttggggaaagtcgtagctttctattttatttctccatctgcgggatgggttaggtagtaataacacctacttacccaagcttacatgaacgttacaaggacgaattagataatgtctgcactgagctttgctctcttcagaagaaagtccctgtaaaactgaagggagaaattcattacgggggctaatgagatcaaagcctgcggccaggagctggggaagctctt

SEQ ID NO: 31360 - DNA, 1031 bp, Bovine  19866880760706
  misc_feature (1)..(1): n is a, c, g, or t
ntctgctaatttaaatgttgattcctccagaaatactttcacagaaacatctggaatgtatgaccagatgaaagtgaaataaaatataaatatagacattttaggtaaaatttacttaaaatagcaaactatttgggattgtttttccttaagcttattcctttctgtatattctctgttgaaagcttgaacaaacatgtatgatttatttccaaatgatataatttttgtaggcaatctaaattgaaaactaagcttatgtctatacataatccattttaaaattctagttttcaacacattcttatcctgaagttgaaactgtaaaatatgcatttttttctttgtacttttataagctaaggatgtagattttagggggttttggtttttttattttttacatcactttgaaactactttctaattggataagaagtttaaaatcagtaatcagccgaggccagttttatggcagtcagattatagtagtgaaaacacatatgtaagatgttgctaattgctgaaccctgtggtatgaccactctcatttaaaagccagagtgtcgtgccagactgttcttagtggttgcagctagaggggattgtgagaatgtgggggctggagagatgaggatttcaccattagttctgtatacttcagtgtcattaaagtctgcagtaagagtcaacattatttgaatattttcaaatatgttttacttgggtttttaaattgttttttcaaggccagtgttatctataaataaaaatgtctttccatcaaaattactttaaagacacagttattaatacatttaagacagagctgttaatttgctatctagtatttcttcaaagaaggacacctgttttactagactcttaaggtcagaaatcataatttatcctttataatcttatcttttttatttttatatggttttttaaaaattggaacataattggtttacaatgtcatgttagtttctgctatacaacatcttgaatcagccatatgtgtacatata

SEQ ID NO: 31361 - DNA, 1362 bp, Bovine  19866880788761
  misc_feature (1)..(1): n is a, c, g, or t
nctgctgctgctaagtcgctcctatgccttggcaaaaaagcatttcagatgccatgtcttgaaatcctcacattcactgagccatcagtttttcacttcctacctcattaatgattatggacatttttttatgtttatgctttgatatttgttaacactctcttacaagtgattttcaaataagcaaaaacaccttcaaggaaaagtttgattcaatccaaggcagagcctgtggatttccttttgctggtcctctttgcactttcagtggaacaaacagtgcaatttttatcctttccgtttttagagctgcagctgtaaaagtaattaatggctaaagaaactctagcacatcctgcagaaggccattctgcattcagcataagctgtggaaccagggcctctgcatgctagtagccctggagagcatatcctggtgaatgctgaaggactcctatcttaaccttggaatctgcaaagcaccccaatttattttggccactgatacccaaggaaaaacttgtatcaacaggtgttttcattgcagtttcagttgatgattttgctgcatgtaaaaatattttttaatctctgaaagtagatagtgatgacctcagactttctttgcattattagctaagaaatgaggatagtcacacattttataaaaggatatgcatttccttccccgtgattatttttcttctccttttttgtctccacttttttctttttgtctaccttccttccaaatgcacttgtgccaaacatgcctgcggttaagtaatttcagacataatgaggaaacggatcatgtgtgccacctgcatagtcaatggacctgaggtgggattgcaaccagatgagctggcttcctggcctggcaaggctcttatacctgtgactttgagtaaattgcttcaccctctagattctcaattttctgattcctaaaaaaagattaacaatacctgcctggttttcttctcagtgtccttgacaaataatgaatgtgaaagtgctttataaactgtgtctttacaaacacagggaataatggtgttgttttggggggctgtgtcatgaggcatgtgcatgtgggatcttagttccctgaaatgaaagtgaaagttgctcatttgtgtctgactctttgccaccccatggactatacggtccatggaattctctaggccagaatactggagtgggtagcctttcccttctccagaggacttacccaacccagggatcaaacccaggtctcccgcattgcaggcaaattctttaccagctgacccaccagggaagcccttagttcccgactaggaatcaaaacacgtgtccctgcagtagaaacgg

SEQ ID NO: 31362 - DNA, 1354 bp, Bovine  19866880846799
  misc_feature (1)..(1): n is a, c, g, or t
nactggaaaatctgcataaagcagtcctagaaaaacacaaatgcccaagaaaagccaacaaactgccagaagccacagataaatacaaaacaccaaaaacctggttttccataactagaccagacattgactctagcttagctaaatttaatcctggttatagtattttgtttgcaactatttgaataataattagaacaattgcactcatctcacactctagtaaagtaatgctcaaaattctccaagctaggcttcagcagtatgcaaaccaagaacttccagatgctcaagctggatttagaaaaaggcaaagaaacaagagatcaaattgccaacatccagtagatcatagaaaaagcaagagaattccagtaaaacatctacttttactttattgactatgctagtctttgcgtgaatcgcaaaaaactgtggaaaattcttaaagagatgggaataccagaccaccttacccaactcctgagaaatctgtgtgcaaatcaagaagcaacagttaaaaccagacatggaacaatggactggttcccaatcgggaaaggagtacgtcaaggctgtatattgtcaccctgcttatttaacttacatgcagagaagagagatgccaggctggatgaagcacaagctggaatcaagattgcagggagaaatatcagtaatctcagaaatgcaggtgacaccacccttatggcagaaagtgaagaactaaagagcctcctgataaaagtgaaagagaatagtgaaaaagttggcttaaaactcaacattcagaaaactaagattatggcgtctggtcccatcacttcatggcaaatagatggggaaacaatggaaacaatggcagactttattttcttgggctccgaaatcactgcagccatgaaattaaaaaactcttgctccttggaagaaaagctacaaacaacttagacagcatattagagagcagagacattacttcgctgacaaaagtctgtctagtcaaagctatggtttttccagtagtcatatatagatgtgagagttggaccataaagaaagctgatgccgaagaatcgatgcttttgcagattaaagagtgaagttaagtctcaagcagggtaaataataacaaacctacgctaggatataacctgactttcaagacaacaaagagaaaagagtcaaaaaccatagaaaagaacagactattatctacaagacaagagggctcagttgaagagcagatctttcatttattaacagagtccaggaaacaatacaacagtttcttcagagaactgtggctacagttttgaatacctcaatggtcgagcccgatttttggttagca

SEQ ID NO: 31363 - DNA, 1002 bp, Bovine  19866880917442
  misc_feature (1)..(1): n is a, c, g, or t
ntttgcacagtatcaaagaatcttagagtattattgcaagcagctgaaactcacttttccagttccatgtgctttggattgctcctaacttcatatgaattgtttatgaatttttcagtgaggcaaacccttttgcttgattggcatggctaagaagtataatgcactagcatgcacacaacaggctcttgggttctaatccagacttccccaatttctaattgcatgttttgaattcattaacttcttaaaaaaaatgctcatctgtatattggggactgtagtttgtcctccatgtgtatcatacagggttgctgtgaagatcaagtggatatagtgttactttcaaaatgacagcacacttaccagtatgcattggtggtacctactttagatagtccctgtccttagaaacgtacgcaaggaggcttcaccaacagcaggtccacttgcactgaggtgtattatttcctctcacatgttctttctcattccttcttccactctggcagaactgtgtcagtgggtcaccaaaagagattgctgattcaactgattcctgaaaaaaagttagtcagatctcttcggtattatggagatcaaacaactgatttactggtcttctctatttttctgctgcccttgttggcatgtcaacagacagagaaacagtccgtctccgtgtgacatcgatctttccaggcatttcttagtgttggtatgctattgttgacctgcttccctggatacctctgtgttcactttgttctcccttgggtcactttttttccacttgccctggcaaggtttcatatagctgttagtaatattgcagcagcctgctttcaatatatcttataaaataactttgccatgtagagttttgggatgaactggaaaggctaaatgagtgaggaaggaaagttgagctcaaattcagagtgccctaccccagagagtacaagacctggattttttttgtttggttgggtttggtaaaca

SEQ ID NO: 31364 - DNA, 2912 bp, Bovine  19866880955974
  misc_feature (1)..(1): n is a, c, g, or t
nttgaaaacatggatagatctagagggtattatactaagagaagtaagtaagatggagaaagacaaatatcctatgatttcacttacatgtggaatctaaaagacaaaacaaatgaacaacaaaaacaggctcagatacatggggggatgggcgaaacaggcgaaggggattaagaggtacaaaattccatttacgaaataaattacagcacaaggaatatagtcaataagattataataattttgtatagtgacagatggttactagatttactgtggtgatcacttcataatatatttaaatgttgaatcaccacgtcgcatgtctgaaactaacgttgtatgccaactatacttcaaaaaaattaattaaaaaagatgtccaagatacactggtgaaataaaaatattatgatcctagtttcatcaaaacaaagaacagacatgaacagacatgtattcatatattcagataacatctttaacagggtatgcaagaaacagagtgaagatgaatgttagctggataaaggaattttatctttcatttacactattctctattgtttggatttttaaaactatgagcatatattacttttatagtataaataaaaattttacaaaaggaactttatcaacaactttcctccactaatacatgaatgatgtaggttagtacttaggctagcaaaaataaaaagcctaaagagttcacagtataaacacaaatgaaagttgtcagcacttctgttttcccaaacctcctgagttgcttttctccctgatagcaccagtactcttctttctataagacgtaaatttacagcacactacagtgaagattttctagaatgagcttgagaaaacattctcctatacccccgtggtacatgttaatttggggagtctctggccatttgtggagtgtaatgaacaagactcatcccctcctcttgcagacgaaaagccaaatgctgccatcacctgccaacacttcaatgaaccagatgaaatgttgggaggtatctggtacactgagcgacacaacaggtgtgttccacttggaaggactcagacgatttagcagctgccaaatggtataattttacttcttattctatagtttgaatagaaattaaaaaaaaaacaactattgaaggggtttctttcctgtttttcttaagaagtacagacaatatgattctaaaggcttccacatgaagaaagggtacaatgaaacaaacatataaagggatgtaaaaatgcagcgtgagggcttccctggtggttcagtggtaaaaaaatccacttgcccataaaggaggcatcagttagatccttgatccaggaagatcgcacatgctgcaaagcaactaaccccctgtgccactaccactgagcttgcactccagagctgggagctgcaaccactgagcccatgggccacagctactgaagcctacacatcctagagcccctagtcctcaacaagcaaggccaccacgagaagcctgcgcacagcatctagggagcagcccctgctcttcacagctagagaaaagcccttgtagcaacaaagacccagcacagccaataatgttggctattatattaaaaaaggcaatgtaatgcaaaacgtggctagctgtgcaggtaacagctgtctgcctgtgctgctgactagacgtggaggacaaagggtactggcctgagagcacggaggctgggctcctaccagcagggttattctgaacgaactccttataacctttctggatctatcctgatttcctcatctacaaaaaggagctgactagaatcaccagggttgatctctaaggttccttccatgtcactaattctatagttctatgaactcaggacccactctccaactcgtccccaattctagttgcttatcagagatcacttttcaggtccttttttctttttaagaaaaaacttatctcatatatgataataaaaataaaacttgcacatgaaattaaacatctgatagaatttgtggtaggtttataaggcaggatcttgataaaatcaaaccatacatactctgataaagaaactaaactgaagaaatgcaactctgccaggtgctaaggaagcccagatacacatttctcaagggctggctgtttgcgtcacgactcaagagtaaacccaaggcattttggttacctgggacagcattaacgtttcccggggacttctcacataagcttagatcattctttatactttctccaaaagggacataaaacagtgtctaagtattcatgtgctatgttccacatgtgaagacaaatacatatatgtaggattctagtggctcagacagtaaagcggccgcctgtaatgtgggagacctgggttcaatccctgagttgggacgataccctggagaaggacgtggcaacccactccagtactcttgcctggaaaattccatggatggaggagcctggtaggctacagtccatggggtcgcaaggagtcaaacatgactgagcaacttcactggttggttggtagtctaatacatggattcagataaagtagatcaaaatgtgttcttcaacaaaagaaatccttgtatcttaagccctaaagctttatttgagctccatcttctccaggagaatttttctcctttttttcctaaatgtattcctaggctctcacaaatccttactctacctatttatgtttttaaatgttttacgtgcacatctacaagctctttggatctgccggaattagggtttgggcagcagtgggatagcctgaagcagatctcaaaggtcaggtagggtatctgaaggtctgttgggatatattataaaggtctacttccagcagaagaagtctgtagaagacaaggcacacac

SEQ ID NO: 31365 - DNA, 4929 bp, Bovine  19866880997385
  misc_feature (1)..(1): n is a, c, g, or t
nggaagacaggtttgacagtaattttttaaatatcagaaattatttttaaaatcatatcaaacacagtatccagatgacagaaacccaaaatatcactctttttcatatcacaactagaatattaagttcagttctggatgctatttctaaagaacgtgaacaaactggatggattcagtatagattcagtaggattaaatggatggaattatcttaaaaaagagatggtcaagatgagacagacagacccaaacatctcaagagccatgtttatagaagaggaaactgacttgttctgtaacaatctagaagcaaagcaaaatcaagatactaatcttttgtagtaaagcacaaaacttgagtaattaacaaaaacacagagtttctaaagtagaagtaatttttgttttctaggaaagaatgtatccacaagcaaggggactgttgttttttttttttttttttagtaaccagtgatacatccttctcatacgttgaagctaaatggctaaaggtgtgtagagattagaaacactgcaatgctttcatcagaatagcccactattagcagatagtgcagtctccggcaaacaacaagaactccagaggctcttcggtaacatgttaactaaaaagaaaaaggatttcctggctcactatttgtgtgaccctagggaagacacttatcttttcagtgcctcagtttcctaatttatgaaattgggataataataagggataatacttattgaagaattacacagatgaaaagaaagtaagtataaagatacactggcaagagtaagtagtcaatgcacatataattatgatgaacaatcttggaggtttgggatcattatgaacactagtaatataaataatagctagtgataccacgtgtgacgcagttgacagttctcatattgtagcgctgaacaagaacgtggaaaacctctcttttagtggtgtttacattttactaggggagacaaaattccataatttttataggcctttctgctataaagccttgcattctgtagaatgaggctcatgaaaaatgcagttgtttcagactacttaaaatccatggaacttataactagagtgctgatagaaactaacaatcctaatcaaagcattaaatcaaagtattaaacctctgctggtatctgcacccagcacgactgttaagtcaggtccatgaaaaaatttactttcagtagagaccagttaatcaaaattaaaaacccaatcaggttttagatttcttcatctctcaaacaaaacaatttttctgaaattaagggaaatgtttttgcagcttcttcatttgtactagcagctattgaagctactaaatcagccactagcaaaaggcatttcagctttttttctaaaattactcagtctttccatttggttatgagaaaagcctgcctttgatggctgtgaacttaaaccatgcaggaaaaagtcttcagcaatcttattgacatcgttcatctatttactaactgcacgttggctaatttgtattacagaaacacaaactgcacttacagtgacagtaagtactactccaaagaaacaggttagagggtgtagcaaatgttttgagtggggcacattgccacctccccttatggcattttacagagctcctgccttctggctcctgtcttcccagtttaagttcccgagggaacagactcctttccagcacttgctctttttgcccttttcaggagaaaaaaaaatgaccaaaaataattcctctggagtcaggtctcaagggaaccatgtgttcatacttctagacatctcactagcttaactaagaaagtatttcagctagaatctaaaatggaaagattttcattttagtttttttttttttttaatgctttggatgtactgttttaggagatatatgtacttttgaattattcttgattcatagttttgatgagctgattcctcagcttctaccagtttatataactgaacatgtttttattgttgtaaagacaggaaagatagagactgaaaagagccaaatagattactgggtgctctttcagtagagccccaggcagcaggaccagtgtcccttcttctccctgctgtactgcacatactctccaacgcctgctgagttaaacagttatctcaacaccatattctactgcttggcatcatttcaccaagcactgggcttacgaaagtggagagatttggttggtattgaaaggacttaggtttttgatctactaaagacaactaacccatgtccattaattaagcagcatgaaatttctagtagcaatggtggtgatgggcatttgtcagtcaattcagtagacacaagtgagctctctctatatattatagatatatagtaaacgggtgattctgagtcctgagaacagaaagaatgagagaaatgatcagtgattattcaagtgatgactatcagaaatttgtttagtttttcttctttaatatgttttcttggaatagtaagagcagataaaaaagacccaaaagtatacctaaaagatcagcttcttcaaacatcctcattttaccaactagaaaagttttaagtacttagtaaggcatcacccaactcagtggacatgagtttaagcaaactccagaagatactgaaggacagggacgtctggtgtgctgcagtccatggggttggacatgacttagtgactgaacaaaaacaacaaaggaatcttgctacagctgcccttacgctgctcctttgtcaaatgctaaaatacagtctgcatctttctctccattgaggttcctggatttttcccttcctctgagaaacgttttgaaagtaataatgttgcataaatacaaaacttaacttttcatttttgaagaatgtggaaaaagaaacatttacttcattgttctatatgggtttctttcatggcagccctttgacacaacattactttcttttgtgtaagtcaacaatatacacacaaggctatgttaactgctattgcattttccatcctcctctcaagacaggtttcctaaactgcttccagttcatcatgcttccattctgctcccaatctcccaaacatttctgactacccatgacagcacaaaaacaccctctatttagactcccctggcttctgagatgctacacaattcctgactttctatgtctctcttctctgtcttccatggggctttttccaaccttctgaatatggacatccctgaggtctaagctagctctttgcgcttatttctatagtttcagtctttattcatttaaactgtatatgctgacaatctataagaaacggtgatgaaagcagacatggcccctattttcaggaaacttacatccatttgactgaggaagacaaaaagataagtatgaaaataactgaacaaaaaattacaaattgagataaacattaagaagggaaaaaaagtgcaataaaaaagactaagtggggaatatctacttcagatagagtgatgaaggaagatcctctgaacgcctgacatttactgggatctaaagaaaaagcccattatgccaaagggtgtgtatattcctggcagagaggccaaatgttcaaggctgataggtgagtgtgagaaaggctggctgtgttccagaaactcagagcagagaatgtcataagttgatgctgaagaggtaggcagagaccaaatcatgcaaggccctgtaagccccaggaaaggatctggggtttaactgtacatgtaagaggaagttattgaggagtgttaaaaaggagaaggataatccattctgactctcattttagaaagttcactctggctgctatgacttacagaatggatggataaggtgctcacacatttaggattgcccaagacagtcctagtttatatgtttgttgtcctggtgtgatctgatctgatctgatctgtcctggtgtaactggatttctgcattaactcccagaaaaagccacaatacgcaataaatacatacatatgaaaagagaaaaagaaaggaggttgatcaagacacaggcaggcctttgaggcaacatttatcagatttcctggctcttggtttccatgctctagctgggactctggggtcctcccttggattcttgaccttagggttgggacatggtcttgttcttattatctggccatctcctgtgatgaaataatattcaatatccgttatacagaaacatattgagtggaatgtatctcaactcattcattcctcacaacgatccttgaagtaggtattaccctcatttgcagataaagagataaagaatcttgtctgaagtcacatggagtaaaagtggccaaagcaggactttaagccaggacatctggtctggactcagtgttcttaagccctcttctaaaattactcctcactgcgagagacctggacatgtttagagaactaaaagtagctcagagcagccagcgtgaacatgggggaaaagctggaagtaagtctaaaaaggtagcaaaaggcttcaaatcacatgctacatagcttggccttcaactggtaggagatagggtgcaccccaagacctttaacatatgatgtttatgcttggatatgggcttctctgatggctcagtggtaaagaatctgcctgccaatgcgggagacgtgggttggatccctgggtcgggaagaagccctggagaaggaaatggcaacccgttccaatattcttgcctggacaatcccatggacggggggcctggcagactacagtccatggggttacaaagagttggacacaatttctcaactaaacaacaccaccaatgccttggatagataactctgtggagcacaaacttaggagatagtagaaacagtcggtttcgtgcca

SEQ ID NO: 31366 - DNA, 1346 bp, Bovine  19866881022992
  misc_feature (1)..(1): n is a, c, g, or t
ngttcttatgttgaaatctcctatttattttgaagtgattaagagaggacacagtctcttgtaacacttcctgtaatatattttgttattattccaggaaaaatttttgatcactgttactcatttattacaaatgaaaatactaaacttttggaatcaaggaagtaatattcagttgctttcttggcccgccaccattcatacctttcacttttaccactgccaacattcctttagagccctttgttcccgaaacatttcttcatctcaaccccaagagtaattcttttttatattcaaaatgaacaatcttcatgttggataacactctcaatgttatcactacaaatgggtcaccagtacttcatatgctatcatccatatcatataaagaatattagttaaaattgatgaacaaaggaataaaattatgaaatttggttaaaaatgaagttctaaagtcaagatctgattttaagtacctttatgttaactactcatcagtttcatgaaataattactagtctttattttcaaattttacacctttatgtggtttctattctctaaaaaggaaaattagcatcttttctgaccttttgtgtaaaacctttaatgtaaggcaaattttaaggaagataaaatatcagccaacatattaacaactgatgtttcaaataagtggttaggtgagttggcaaggatgattcctcataaggaaactattttgatggtcagaataataaagccaaagagctctggcacatgatacttttaaaaaatgaaatataacacaaactttcaattgcacatgtaattccaatagcccagaaatcttatggtgaataataaatgtatattaaagcctttgtcgtgtatgcaccactaaaatatttggaatatgaacatcttggaaataattttatgactatttttatttcttccttattttctaactcagctgcataagccagaatcctaggtgtctgacttgatttctccctttttctcgctgcctcacaccttagctccctcagcctcaaaacaatttaatgaatttttaagtccatttgcttatccttctcaaattcatctactttccctaacccactgccagtactcagttcccaaagggctctcatcctgtgctttagatttgcaaagctgcctcgtaaatctttttttcagtgttacctccctccattctaatcgtcacatagcagctagaatggtctatgaatctgagtccatcacttctccgcttaaaagtctcccctggctacttttccatcatcatcatctcgaattctcagctggccgtcaaggctttgtccacacttccagca

SEQ ID NO: 31367 - DNA, 3273 bp, Bovine  19866881031011
  misc_feature (1)..(1): n is a, c, g, or t
nataagacgaataaaaaataattaggaatgtcaagtttataagcacgggcttcctaagcagtgcaatgataaagaatctgcctgccagtgtaggagatgcaagagacttgtgtgcaatccctgggtggggaagatcccctggagtaggaaatggcaacccactccagtattcttgcttggaaaatcccatggacaaaggaacctgtccatggcaggctacaggctcatagggtcccaaagagtcagacacaactgagcgagaaaacacgcatgcacacacacacacacagagttaataagcacttctgcattagtaatgtcccatcagcaagatagtgaccagaatgcttctgttcacaaagtttccagagctcaccattgctcacaacacaaaacatctaagcctttgcatgtctcctcaggcctctgacagcttctgactcatctttcctgacattcacgccctcccattcccaccagactctctgctcttacacacagaacgatttgtaatcctcaaagagggccatgttcttctgtctcttggcctttgcacgctctgtactttctaaaaggctcacccttcccatcattgccacccctcccaaccccacctcgtttagctggggaactgtcactcattcttcggggctcagcttctgagtcaggtcctcggttaaggctttcctgacacttcacgctctgacctgaaagagcccaacaatgccttcacgtcagctttatgcctggtgcctaccttcagtacatacctacctgcctccatgtagagagcttcccaggtggctcagtggtaaagaatctgcctgccaatgcaggagtgcggattccattcctgggtcaggaaaatctcctggagaaggaaatgacaactcacaccagtcttcttgctcctcttgcttgtagctctgaaacagtgggtaatccttagttacatccattttccctatcttcaggaatcaaggtcgtctacaagacttgcgcgtcttccaagtagcacaaagcctaaacagtaagacctttgccggagttattttctaggaacttggagtccgctgcagcatctagttggagttcggctgtctgaaccgtccaggaccaccaaccctccacctgggcacacgagcttctgataagtgaccttttgactcagaggactgaaaattccaccctcaggtggtgttaagcgcctgtgtattttgcagagacctataactgttacacatgtgcacaacaccaacaccactttctccagtcaccgctccccacgctctgcacgccgcccacgcccactatgtgcccatgcccaccaaaccagcccccaccacacccccacattcagactgccttcttctttatttttatctcctgtaaacctccaggctggagaatcccagagggacctggtgggctacagtccatggggttgcaaagagtcggacacgactatgcaactaaacacacacacacaaacctccagggaggcagattttagagttgttcccctgtctcctgggttggccgccttgcgaataaaccctctctttgccgcaaacctgagcatcttagtgttttgatttactgggcaaaataaacctggtccagtaacccttttagtggctagctggcacttaaaagtgttcagtaagcatttagtaaaaggatgggtggatttagtataagaatggtgaagagtaaggatttgtcaaggttttccaaactagcagacacagagatactgtgctaggttttagagaaatgctttttacctgtataatctcagcaaaaaaataaggaatctgaggctcagagaggtataatcacatgttaagttcataattagtaaatagtggcgatggaaaggtaatagtaacaataatagtaagtagtagagtaggttcctttgtctccaaagccaatagtcttttcacaacacggtaagtttttatcctactgagtatagctgtgacagaaataatatatacaacaaggcattttaaaacacaaatgtcctgagaaaaagaatatgggggtggctactatagcttgaaggaaacagttaatacctagctggttttgctttgcatcttttcacaccaataacttaccaaactgtaaggtagccagccttctgaaagacattcctatcgggaggtcatacctgaaaattactggtgtccggtgttaactctcactacaaagtcctaggaatcttgtcaccaagcacatataggttgctagttttttaatcaggtttatttgtcttaatacaaactgatggtctagagggtcatcagtagtgcatgaactgtgggcagaaagaggctaggaaacagagctgcctccatcccaagtgtgcagggttaaggacctgatcgacagtataccacctgaagcctggtctgaaaagtaagctagtgggcaccattctcttccagatgcaaaagtctcttagctctgacaagctggagggcctgaagcagtggtcagctgcacagcagtttgtttctaagatgacaaagagcagaaaatacaaacaaggcaaggttggagacctcggtcagaggccctgggtgatcccagtgttgccaagagcctgaacttggtagtgtaacttctttgcttgaaagccctcaatcaagcgggacctctgaggcatacaactgtaatttcaaaccacaaaagaaaacacaaccctctcaaacttttattttgctgaggaagcggatgatttaaataagtctgtttgacacatgcctatctgacttcccagttcccttaggtttcttgcaagtcagccataaagctattccccacttgttctgacaggatttatgcattctacatctggtattcagcaagcatatttttcttcctttttcattgaacttctgcccgtacacacatacagggtctcattttaatagtgggattattccctgtgtatttaaatacacaggaaacaggaaatcatctaaaagaacacaatgatctcatggttatatcactttcccccacaagtccatttggaatcagagacaaagagaagattctggagcttatagcttaagagtttctcaacctgagaggccgactgaccttaagttccctcttctggttcttaacacagctcaaattaacaaaatgaaatagcacatttattccaagacacggaagaaaaaagggggctttttttttttttttttcaaaataaatctgtgttcagctctcagaaaaggaaagaggcttctcaca

SEQ ID NO: 31368 - DNA, 822 bp, Bovine  19866881037539
  misc_feature (1)..(1): n is a, c, g, or t
ntctctgcctctttctttccaaggatttctttggcgtgtgtccttcccatcttatcctgtcttgatgtctgcttcttggatggtctgaactgacatagggataaatgaacaatagacattcactatttatttgaattttagctgttttactcttccctttatgattccaaatcaatttgctttctttctatgaacagtttcttcctgttgttggatatagagttaaagtgagttggaattttgttaatttttaatggaaaagtaggaatgatcttcctgtttgttacgaaacaactcattatttcagaagaatgatagtttagaatttactgaagaattttaagaagaaatgaatattttaagtgaaagtatttcatatcacttagtcttagactttacatctaaatggactagtaaaatctacattggtgtacaggatcactatatatatatgtagacatgactttgaggagggccagctaaagggtagtagagagagtcaaactcctgtccagcaaaagtccctccactgtctgcatttgctgtcagctcctcctctgtctcttctgctggcatgtccagccagtgaatctcagatgacccaaagcatggaatttcctgcaaggtagcagaagggacaggaaacaccatgtgcttcctggttttggaggtggcacagggatatggagcagccagtaaaagcaaacagcctgaagtgggaagggatttggtgaccttgtcaacagagttttgcttttcagcagaatgatacaatcacttgtcaaacttcaatctgaactcagtgaataactactgggaaca

SEQ ID NO: 31369 - DNA, 1681 bp, Bovine  19866881065105
  misc_feature (1)..(1): n is a, c, g, or t
ntaatgtgatactttataggtaagagacaccaaacacagttccaatgtgtgaatggggcgtaaagtgtataagccttgaaataaatggaagctgtgcacaaacagtaataatatattgtgctctggattatttgtgccttgtttcatacttcctttcccatttaactatgtaacagtcctgagagacaggttagagatgattgttattccacttttagaaaggaggaaaatgaaattgaaggagggttaagtgatttgcccaagaccccaaagtcagtctgaaaatggagattgatataaagaggctcttggttggtaaacaattgcaactgaactatatctgagttgctttcaacctagcagctttctttagctttcttccttttgcaagcaaggttgttttatgtgcaaacttcaagtcagttgtcaagaaaataaattttatttaaaagagttggaatgacaccacttgtccattcttccctcttattctctcctgtccatttccaaaattcaggtgaatcatgagatatccgtttatttgtcacatatggttatatattgtcacaaagtaaaagggtgaggtctccggaagggaaagaattaaggtggtattagtacagtcaaagcctgctttatgtaatgtcagtgcagtagaaatactgtctttactcagcggacacctcctaccacatggcaggtgcttagaatacagaagttagtaggctattgtctcgttccacatgaggcatctcatggaggaaatgtgtcagaaaacactaggcttatcccatcactgagctgtccagtatcagtcaggacccatcacttttttacctaattatcacaagtcaacaggaaatagaatagagacaaggggaaggaagatgaggggaaaaaaagagaacaagctttattctgacttgagctgcagatgttcaggaaacttgttcctgatagcaatgattggtgtaatgattgtagctccaagattactaaatgttcttaagtatgtatagtgtataaaactggagtcaaaaaatagtttatcctcttgattagcagttcagagctatttctctttatttttacaaatatgttatatacccctcttttgtaatgctgtctgaatgcccaaagagtaaagtgttctgcacatatttggcaaggctttatggagaacatcctctgctaatctggaaacttcctgagggtggaggttcatgtcattcatctctgtgttcctagtacttaacaaaaaatagaataaattatgattgaaaatatgacatttttggaaatcagtcaaagtatggaaagattgggcttcccaggtgacgctagtagtaaagaacctgactgtcactgcagaagacataagagatgcaggtttgatccctgggtcaggaagatcccctggaggagggcagagctacccactccagtattcctgcctgaagaatcccatggacagaggagcctgatgggctacagtctatggggtcacaaggagtcggacataactgaagagacttagaaggagtagcaggagcatggaaagattaacctactagttattttctttttttatgacagttttattgatggtttccctggtggctcagatggtaaaacgtctgcctgcaatgcgggagacctgggttcaacccctaggtcagga

SEQ ID NO: 31370 - DNA, 1604 bp, Bovine  19866881181680
  misc_feature (1)..(1): n is a, c, g, or t
ntcttctccaacaccacagttcaaaagcatctattctttggctctcggctttctttgtagtccaactctcacatccatacatgactactggaaaaacatagttttgactagacagacctttgttggcaaagtaatgtctctgctttttaatatgctgtctacgttggtcataacttttcttccaaggagcaagcgtcttttaatttcatggttgcagtaaccatctgcagtgattttggagcctccaaaaataaagtctgtcactgtttccactgtttctccatctatttgccatgaagtgatgggaccggatgccatgatcttagttttctgaatgttgagttttaagtcaactttttcagttttctctttcactttcatcaagaggctctttagttcttcactttcttccataagggtggtgtcatctgcatatctgaggttattgatatttctcccagcaatcttgattccagcttgtgcttcatccagcccagagtttcttttgaggtactactttaatatatctttatgcaatattgaattctactcttttacctcaaggagttgttccttttgagattattcataaactcagtgagtgagtgaatgcttaattccagcaaatttgaaaagctttcttaatctttgtgaaaaccatttggtaagaacttgcatcttttctaatcactagtacgtctttcctctcctttcctttcctcctctcttacttcttccctccctcattcccttccttccttctttctatctgaacccatagtctaagaaaatgaagtttctttcaccagaacaaagacaaggtaatagctttaacgtaggtgttattttctttggtcctgcaaatcaagtggcctacataatttaaaatgtgaaccctgttgggataaagtataccatcactctactctttccatttaaatttattgctagaaatattaatataaaaatttgtggacatataaaaacaatattacaaaagtcatgacatctatagagatgatttattttaatttacttttcagtgttaataatggttctaaagaaataggtaaaaatagtcagttggcttttgaaaaatatcagttcccagaattatcttaatttggtttaaatacttgtgtcaagcaaatattttactttttataaagacaataacctctaaagaaactatatcaaatcatttataatcttttgtacataattatgaggaagttccaaagtgctagttttgcttggagctttggaaggctcaactgattctattttattttagagcctgatggagaacacttttgcaactgaaaggcaatatttggtttgaaaaatgttaggtacataaaagtttgcctatgaaaattctaatttatgttttagtttagattacatgtggtttcttttctgaaagccctattgctttttctttcttttaaaaaagtaaaagaaatggcatcctactagggtaattaaagagcaatatttatgcaaatacttttagaaactattcatatcttcagactattgttttttaaaattcacaattttctatatatcaatatataagtaggggttcagatcagatcagt

SEQ ID NO: 31371 - DNA, 1926 bp, Bovine  19866881182333
  misc_feature (1)..(1): n is a, c, g, or t
nttgtttgaggaatatctatatggatgggtctagtgaagaagaaaaaggaagttaatgataatactactttcatcatggatgtttcctctggatagatggaggggggatgtgagtgtggagaaaaaacagaaggaatatcaaagatgtggtgctgtaatgttctcttcccgtgcttatggagggtaactgagtcctctattaacattctttaaattgtacataagtatttataccgtcttctctgtgtatgatatttcacaataatacatgttatttttccatctttatattttttttaatgttgtctgtataatttttaactgctctctgcagttgctatggaaaatgagatatctgggcaacagggaccagtggtaaggtaagatgcggagcccagggctggtagggataagaatggaagagtcagcatctaaaagtctgcagctgcaccactgggatcctcaacaaacaagcagatgtgatcacaggagtgggtctaggatgagtagagcacatctagcccttcatcctgcttatatatagcagaagctaccaagtatccctcttaacacccttaactgctgacataagccagagcatgtttctgttgcttgcaacccagatccctgattggtgcattgcttttgaggtgtctatgggaacaggtgagaaggcttaatattgccattagaaatacagcttgaaatttaggaaggatgtctgagcctgacgcacaatattcagtcaaaagtgtgactacatatgacttcacaccagggagggtgtgaagcataaatcccaaagaagactcactacaacacctagcaggcatccaacttcacatctgccagtgtcttgtgctgagatgacattggcacagtcttgatacccatgagtcccacttctctacaaaccagggtcacagtcactgctttaggaacataggtacagcctatggatacatccgaatactcactgactgtatttttaaactttatttcattacatgacttctacaccgccaagaatattacttcacgatctaaagaaaatttctctaagaatgatcccatacttttaaaacatatcagagtattcctctgtataattaacctacattcttgtatcagaagcataaataagcaagagttaaaaaataagttattaactaataagttagcatatagttacatactagtaattatatagttgatagcacaaagctctaccaggccagtatatataaatctttacactggacgaaaaatatttaaaacattagaataaaaggaaaaagcaaaaacatttgattgtgaaaaaggattcagtaattgcagtgaacatctcattaaacacagtctttatttgcaagaagattggagagctctaattaagtcataagctgtccctctgagtaattaactgtggcaggaaaattctaggtggcctgttaaatctccatacccacagctgttcaggggaaaagtataagcaagcccagcatgtgcttgattttagtggtgaatttttctccaactggatggtcttgtccaccataggtcatacataccaagaactgggatttaaaaaaggaaaacatttcatgaataattttatatgagttctatgttggagtgatcatttttttaactactagaaatacttggctactagaaattttaaaatttcatgcatctcgtatttgtggtttgcatgtatttatatttaatgaccctttggatttgtgggctaaaagcatatgtggaaatatttttaaaaagaagtcagagtatttgtgctatagaatttcaaactagaagaaacttttaaaagtgaatgatgtaaaatgcttatatgttctcaactgagcccctactttctaccacacacactcacacaagtttgctgtgcatctcaaactagga

SEQ ID NO: 31372 - DNA, 3093 bp, Bovine  19866881236091
  misc_feature (1)..(1): n is a, c, g, or t
ncaataagtaaaggatttttccctgtagcaattatactgttagaaatggagcagtatctgatttacttttttttgaaaagaaacagtttgagtgtcaattttctttgcattcttgtaggaaaaacttattggaagattcatttcaaatgtgagcgtctttaaaaaagcaacttttcaattgatttagcattggtaaatggaaactaatctgtgtacatgtgtccaagcttatatatatcaatagcttgctattcctcaacagttgaaatatgtagttagtatattgactagcacttctagttcctctgctattagtttatttagctattgatttatttaggtagaaagttcttttcttacatttttattgaaggttagcttaaattctgataaatatccagttcttagatgtacacttcattcttacaaagttaacacatccatgtaaaaccacacagatcaatgtagacagcttccctcgtaccacctcccggatattacctcccagagatccagactcactgacttccatcaccatcccctaactttgaaatttttaaaaatagaatcagatagtgtattctttttttcatcagcttctttaattcagcattgtctgtaagattcatccattctgctgcatagctgtagttcattccttttctgtttcttttgctatagagtagaggtcagcaaataacaacctatgggctaagattggcccatcacttgtttgtatataaagttttagtagaaaacgtccatgccctttcatttatatattgtctaaggccatttctacactgctttggtagagttgaatagttgtgttagccagcatatgatttccaaagcctaacatattacagaaaaagatttctgagcactgctatagaatgttccagagcatgtgtatgtgcatgtgaatattaattctagaggtaatgaacacttggctatccctagttttggactattacaaatattaataatacagctgtgaatattcttgtgcacaaaattacacattttctcttgagtacttaccctggaattgcaactggtgggtcataaggtgtgtatatgttcaactttaactgattttgtcaaatagttttccatagtgactgtaccaatttacttcccaccagctgtgtatgaaagtcccagaaataatttaacacgtgataattatcattaagtacaagttggaatgcataattcatcattcaactcaatacaaacaacatttcatgtaacagactttaatgacgatcacaatacatttatgtaaataaatcatccaattcataatagtagtaataaagcaggtatattttattttttcattttcagtaaacatacatgagttgatggagtttgttgcataaaacaaatttatagttattctttgttgaacacttagaattaaatgtcccacaagtgatcctaggaaatgcctccccacccacagtggaaccataaacaaaaccccagttcataaattctcttttctgttgagataattaatttccatttcttattttactaaaataatacacatccatcttttttatagatctgaagttacattaagttataaaataaaagttatgatatgaaaattatagttaaggcttctaattgtgaaaaatcaacaggctagcccctcactatgaaatcacacagcatagtgattctaaacttaaccctcatatgttgtttctgtgggtttgctcacacttgctttaggaatgaagcaaaaagcattttcattttgctctttttagcagtttccttcagtatgaagcatgtccaggtgatgataggaaggtcaccattgctcaatatcagaactgagtcaaatgaaagaattataatttccctatactcaagaaacacttttggctgcctggataatgggatcatagatgatttttatttccttccttttgtctctttatgttttccaagtgttcaacaaagactacacactcattttgcaatcaaagagactttaggtagttttctggtttctgaggatacaaagatttttgtagttgtttgctctactaaaccctacacctgacaagtgtcaaaatttgaacacttactctggtggcaaactagttgtaaatggaggggtattttcaacagaagctgtgccttgggataaccaactgctacactactctgattgctacttcttggagataagttgggtttttgttgaactctctcacagagtcaccttccctcaaatgaatggactttctgagatcggccattccctttgcagaatacatgttacatctgtgccttgtgtcataggtaaaaagtgccacccattgacacacagcccatgaaacagcactgacgttgcaaaacgataggaaagtcaagtaactgaggcttgtggttccatggcaaatgaagctttccagaacaagcgctaagagcctgtcgctccagggatgggagagggcttgttaacaatgtagaacaaaatgctgtggaacttccttgggttctcagaattgttagatgtagtacacacacagacacgcatgcgtgcatgaacacacatacacactcaacctgcctcctccccagagaccccatcaaggtggtacaagaggtttttcaattatttcaagagactgcagctttcattagactaaaagacaactgctcatttccaagttcaagatctctattttgttcctttcttctcaactgggacccaaaaagcacaaggttttaatctaagagaataaaggtatataagcagttgttttgcacaaccagttagtttactttcagtatttggagaaaagaaaaggataaatgtttaatagctctaagtgtcctaaagtgtctcaaataaaggaagattctgctaatgtaaaaccatataaagagctacacatatactgtgttttgccaaatataaaagattgcatatgtgtgtgtaggggaaaatttagcagtaggaaaaaaatttaactttacttgattcatcatattttcctgcattttacagctctcctaccatctacatacattacttttattaatatttttactcttttg

SEQ ID NO: 31373 - DNA, 1423 bp, Bovine  19866881237568
  misc_feature (1)..(1): n is a, c, g, or t
ntgggaagatctgctgaagaagggataggttacccattccgtattcttgggcttccctggtggctcagctggtaaagaatccacctgcagtgttggagacctgggttcaatccctgggtagggaagattccccggagaagggaatggctatccactccagtattctggcctggagaattccatggacagaggagcctggcaggctacagtccatgagtcacaaggagtcggacatgactgagtgactttcacttttcactttcattttctttaatgtcttcctaactcccatcacttaaaatgtgtacaaaataatgttagggcaaagttgttttgcagtgtagcaacccactgattattcaactggattgagtctctcagcccatctcattttcttatacaaatcttccatggaaacttagtttagagaataatataaattctcaataaagtcttcataattgtttcaataaaccattgataagtgtttgaaggactctttcatgattctgagaaggcaagtttagattctaatctttgaacaatgagacacataaaagtataaaatatgtgatgctgtactgggggaaaccaatgttcttcttggtgcacactttctctgacagtgactttaaggtctgtttgatagcataataccgtatttgctctccatgatgatattttcaaaagttaaccgtaacatccctcttataatctattacagatctaaattttgaaagatgtcattgggaaaacttcccaccagtcattccaagttgtaaactgccctttagatagtggcggaattgattgctctcactccccgtcttctgacttgacggtcagcgtgtcctttgcttcagaagttctgtgataccctaactctgctgtccttttgttttgtcaggcactccaatgtttctcagcctgggcactgttggcatttggagccagataattctttgttcagaggaaatgtgctgtgtattgtaggatgttgagcagccttcctggcctcaaccctttagagtccagaaacactaaccccctccaattgtgacaatcaaaaacgtcttccagacattttccttggggatcaaaattaccctacccacacctgaaagcaactgctctattttaatagaaatatatataatatttttatacatatggttatatgtgtttttcctcaaattataattctgattttaagatcttaataaggaaactttgcttttatttccccattgcctgcaagtatgtaagtagtgttgttggagttacatactacacaacttaaaaacaacaacttcacataaagatgtatccaggtatgtgaggctcagtgtgatgaatgtgtataaagtgtgtcaattaaatttatatgtcacttgactaatcttttatttccttgcttaagaaa

SEQ ID NO: 31374 - DNA, 1467 bp, Bovine  19866881239209
  misc_feature (1)..(1): n is a, c, g, or t
ntctcctaaatgaaccgagtcagtctatggtttagaaaacaattcctacccctctgtctgttctaaagaaatgcaacacaaatggatggcaatagtacttcgaaccaatgttaagaaacaaagaacagaacactttcagacagaagtgttgaaagattatacttaggtatttccagctttgatgccaaggctgagagatattccttttgtattgatagaccctcagagacagtgcttgatggatgctcctctagaatgaaggtgacattgtgtgttgaattctctaggtgttcagtaagtcttagagtacctgacctagaaaaccaattcctgtttgccctcaggttttttccatcaccatcaaacaagttattttagaggctatgcagcagagagaagagacactgtcacgcagcccagctttaaaatttccaaagatggtgaacgaggctgcctggcctcatcagctctgtgcgggtgtgtctgtttcccccacaacaactaccagtgtatctcgcacagagttacttttcacacttgtgcacaagaacattagtcacttggggagtcccccacaacaactaccagtgtacctcacacggagttacttttcacacttatgcacaagagcattagtcacttggggagtccccctggaagggctgaatttgtgtagagtccagacagccagccatctgcatggtgttctctccagcagtctctggaacttgcacggtggatggattgaggggttgtgtggggacgagggcagtctttaacaaacaaaagagcaaacattgggaaggctgcacaaatagctttcagaacctccacaagaggttctgaacatgtggaaagaggccaagtgcaaaagaggaattacctcctaaacatcaagcccgcctagtgagaagggaagtttgttactgctgattacaagttagcccttggggagaaggctccagagcccacaagtggacacttctggatcttcagctggtcccgaggcaagggaaaacaactgttaaagaagtgatgctattacggatcagatagcttcattttctgataagtatattataaatcaccttctcttagcacaagaaacctcactgatgaatcttcttgatcatttaaatgcccaaaatacaccataacatgagcacagagcatgacctcaataactcttatagccatggagaaatggtttgacttctgaatggaaaaaatgacatgcagacaactctgacacttcctttgagagtctttgtaaatttccaactattacacatgcccaaaaagcttcccactctgtgtctttggtcttgacatgcctttgaaaagagtgcatgctaagttgagggcatctgtccagatgttcaggtctccacactcaaaccagttaatctggaagtaaaataatcaaagaaaccctgtgacctggaaaccaatctatctcactcataa

SEQ ID NO: 31375 - DNA, 793 bp, Bovine  19866881243301
  misc_feature (1)..(1): n is a, c, g, or t
nggttcctctacgcttgtctgtgcttggttgctcagtcgtatccgactctttgtgaccccattaactgtagcctgccaggctcctctgtccatggaattctccaggcaagaatagagtggtagccattaacttcttcaggggaccttcccgatctagggattgaacccgggcctcctgcactgcaggcagattatttaccacctgagccaccaggaaagccccattccaaatcaaagtatactttggaacaatggtgtttgatatgagacagtattttagaaatcaatgttgccataaaacagacttggaaattttatttagagataattacatgttatggaaatgatctacttaaacttcacgtagaaaatatacatgttactgtgttaaagctttgaattacatatgaatgaaagagatataccataactatctaatgaaattcttaaaagtccagaaaacaaaaaaaaaaacaaaatgaagtgaaaggaaaggagtaaaactttctgtttcagtcttaacttctttgagtaactactgctttcccaggcttatctctactgaaacttgctttgcctttttagatttcctccttcacaatcagatttcagccagatttggcactgagcacctttaaacaagtattccttttcttatcataaagatttcaagaggattttgtacttttctggaccataattatgtgatattattgctggctatatagctttaaatcaagcatgtaataaaaacaagagttaaaggacaaggagactttggtggtgagaggtg

SEQ ID NO: 31376 - DNA, 1053 bp, Bovine  19866881264493
  misc_feature (1)..(1): n is a, c, g, or t
ntattttaaaaccctttgaaaaatgtaaaatatcaatcaaatgctaggcatgacaataaatgttctttatacaatatcatgggaaaagagttgaaaataatgactatatttcataaagctattcactttaaaaactaagcagataatttaaccctattttgggggaatcatcatatgtttaaaaaagttgacctatatcaactataattattgaaataagctttattttattaccacacccattttgaagctaataaaaagcagagccttttcacattattaagccattccacagattgagataaatgttctccactaatgagaaatgccaattttgagagagtctgtgtgttttgaagccaacataattcaaggagtattatctattttactaaaaaataatgattttcccacagtgtagtgccatcacagagaaattaaatttatggttagcatatttctcaattgtgaatattttgccttgctcattaggttatatgtcataatattggcttctatttctggttaaaaaccacgtaccaaatactccatctagtgaaggctatggtttttccagtagtcatgtatggatgtgagagttggactgtgaagaaagctgagcaccgaagaattgatgcttttgaactgtggtgttgggagaagactcttgagagtcccttggactccaaccagtccattcttaaggagatcagtcctggatgttctttggaaggaatgatgctaaagattgaaactctagtactttggccacctcatgcaaagagttgactcattggaaaagactctaatgctaggagggattgggggcaagaggagaaggggactacagaggatgagatggctggatggtatcaccgacttgatggacgtgagtttgagtgaactccaggagttggtgatggacagggaggcctggcgtgctgcaattcatggggtcacaaagagttggacatgactgagcgactgaactgaactgaactgaaaaagactagaattatctaacatatatttttttcaaaacacacacaaaaa

SEQ ID NO: 31377 - DNA, 1386 bp, Bovine  19866881351656
  misc_feature (1)..(1): n is a, c, g, or t
ntatggggcctatgcaactaccacaggcccagtgcccataattcagccctgaatgggacttgcaggaagctgaaagctctagaacccagatttacaaaggataaataaactttgcatccgtagaaggtagatgaactctgtgaggttaatgaacggtgttgtgtgatatgtagcattacccgtgcaggatgactgggcagctgatctccactattgggtggatacagacctgttcggagatctctgtatatcccaggagggactgagaagttaaaaactgcattcaagtggtattgatgctgtgattaaaagtaatactatgtttctacacaggtcaaaagtattttacatcataacatttgatgtaatattacaatacacctaatatactgttggaagactctgacatgattgggaagactgtttttaagactattttgggtgaaacatgtttagaaatgttatttcttattggaatgtccattcaaacatggggaaaatatcgacaaaagtgacttggcgtctataagcatttctgggtttttaagaacttgtggtggcccagaaggtgacgaaatctgcaagtgcacaagcagtgtgggctatgtgttagggagaaaggttctcttggagatcctcactctcaagatgtgtattccagcctcagcaacaagcaaactgctgtccccaggataagagatggtatccagggtctcgggaacatttgtttccatttccaggtggagatatttacttatactaactcaccacaagatcaggtgctagctctactttgcaacaatttggtctttggcaaagaaaaagttctggccttaaatgtcttgaaaaagtccagtttaaacatacaatttcttgcccattccctgtggtatttaaatataaataagacatttggtgtgatgcgaaccaactctgaaaggaggacaatttaaacccaaactgccttttattcagttggtaatatttttgaggaaaagtgttctattcaaataaagaggggaaaaatagactaaatttataccatatttttattattttgaaaaactttaagtacttacatacttttcatatattttaccttttaatatttacagattggttcttctaggatatcacatactggatgccgattttaatttctgcacagactcatggaaaactgcaatttcactcaaaatttctattaattcatctaaaaatatcagagcttatatataaaacattaaattcattcacaattgctttaaaaaaggaattagatgttttgatgctatttagatcaaatgtgctgtgcttaatcactcagtcatgtcggactctgcaaccccatggactgtagcccaccaggctcctttgtccatgggg

SEQ ID NO: 31378 - DNA, 619 bp, Bovine  19866881533077
  misc_feature (1)..(1): n is a, c, g, or t
ngagacataagacatgggttggatccctgggttggaagatcccctagaggagggcatggcaaccactccagtattctcgcctggagaatcccatggacagagatgcctggtgggctacggttcatagggtcacaaagatttgaacatgaccgaagcgacttagcacacatgcatcaaatgtatctccgtgcaactctggttttttcaatgtaatgttttggagatattgttattgaaccaaactggtctccaaattggtggaacaaatttatatacctacatccttctttgtgtattttttaaaaaaaatgtccaggtatttaatactatttatattaaataggaaaggatagagaatcagaactgaaaaataatgaatccattttcccttttatctttccttacttgatctaatttattggggttgaggaatggaaggaagatgactagaaagtgatatcatttctattggatactaaattttctgtcaaattggtgcttacattctttacgttttgttctcaatattgaaacaaaacaaaatcaaacaatgataatgaccaggaatctcataactgaaagtgacatggacatgacttctggtttattattatatttt

SEQ ID NO: 31379 - DNA, 1423 bp, Bovine  19866881610722
  misc_feature (1)..(1): n is a, c, g, or t
natcttgaccttggacttccgtctccctgaactctgggaaaacacatttctgttacgtaagccactcagtctgtggtgattttttacagtaccctgagtagatgatgacagcagtgagtaaagccaggtccaatgatctaacaatcaactgaagagctcaccatctcatgcttattgagcaaagtgatgaggggtgcttttaaacatggcctagcaagctaaacttggtaaatgaaccgggaccaggaattccagctaatctttggacatattttgttatggcacctatggtcattaccctttgcatttgaattaagggcaaacagaattatcattggcttctaacataagaaagcaacaaatcctgccctgatcatgtggtgggggagggagaaaaccgaacagatctgacctaaaaggttaagtggaaaagaagcatgtggctagatgagcatcacatgcagacacatcacaaattgtgtgggctttgacattaccagtagaaggaaaggaaatctgtatatttttataatcactacacaggtgcttattttagattgttttcttgaaagctgttagttattctttttttttttttttttacctcactgccctgtacttgttgcctcaaaggaagcataacatgagataaaaatacagaagctgctctccggagttcaacaggttaaaacagagctgaaaatagcttctaggcatgtcatatggttggctgactatttaatcctctgataagtatgagacatggaagccttcttttatctgcatatctaccaactgtccatgaaactttactgtcctcgggatttttgaggacatggtcatggggaaattgagtttactaagctggtgaaaattacaaagttctcctctgctgatggacaaaacctgtggcagaatgtgtactttctgtttgtggatgagacacaccttgtatgttcagatattgtgattccattcagacagaaaagaagccctgcatgtgtagaattggaattaggtagggtcccagattccaattctatacacacagaggtccatgactgtttgggcagaatcacaatcctggggcttcccaggtggctcagtggtgttgaatctacctgcagagcaggagatgcaggaaacattggtttgatccctaggtcgggaagatcccctagaggaagaaatggcaacacatgctagtattcttgcctggaaaaccccatagacagaggagcctggtgggctacatacagtccatggggtctcaaagagttggacacaattaagcgatagagcacttgccgcagagggtctcagataaaggatgaacacactgggacagttataaaaataccactcaaccctgagggtggtatggagacctaaggttggaacccaaaataagggatctgatgga

SEQ ID NO: 31380 - DNA, 954 bp, Bovine  19866881781868
  misc_feature (1)..(1): n is a, c, g, or t
natgaagataatctaattctgacagaaaatcacctgtggacatggttttatctcatttgatttcttctgttttctgctgaggatcagagtatttatttaaagtgcttcagtaggatatcccagttagagctctgacagtctgtttacagttcatctctgcccaggggcgactcaaaggtacacttgtggataagtaagatgactcgcgggcaagaggaggaggatgtgtggcaagattattaactttgaaatgaattagggtagagtgacatgtctgcaacagcaccatgggttagtcatttaacaaggattcatgtgcagagattcttaccaattctttagtgtaagtgaaactaacatttaaggagagggaataaggaggatgcacaaggatctatttgacagtattaaaaaaaaaaatccttctagcatgaagacatttaatcttcctttgtcaaaactattctgtctgcttgaaaagttggcctaggaccccaaggcttcacggtaaggagggagaaagaaatcgcgagaaggggcagctgcccttttgggtggtggacttcaacatttcttttcttacccagtacttgaccttctgctcttactttgctttcgtgaagtaggtttgtgattgctctgaccagtttttccattcatggttgcaaaaagtattagctttatactttcatgatgcagaaaaggagctgtccactgaatgtgctcgcctttttgttccggtctgtttttcttgcacagagtgggtactgtgtcctggtgtctgtctacactgggagatttaggtgttgcaagtcatcttgtctgctctaggctatgagcctcaggacttaggtgcccctgaaatgctctgctttctgaaatttggatatttcagttaacttgatttatttcttcataaatttcatctctacttgggagaggctgattgaattt

SEQ ID NO: 31381 - DNA, 1412 bp, Bovine  19866880271813
  misc_feature (1)..(1): n is a, c, g, or t
natgcttgaagaagtagtagttggttggtgagaggtcaggtgaatatggcacataaggcaaaacttcgtaaccaagttcgttcaacttttgaggtgttggttctgcagtatgcagttggccattgccatggagaaggcagtggcaccccactccagtactcttgcctggaaaatcccatggacggaggagcctggtaggctgcggtccatggggtcgctaagagtcagccatgactgagcgacttcactttcacttttcactttcatgcattggagaaggaaatggcaacccactccagtgttcttgcctggagaatcccagggacggggaagcctggtgggctgccgtctatggagtccagagtcggacacgactgaagcgacttagcagcagcagcatggagcagaattgggcctactctgttgaccaatgcaggctgcaggcattgcatttttcagtgcatctcaggtgtaatcatttcaccaggattcagaaagctgtggtgcatcagaccagcagacagccaccatgacctttttttgttacaggtttggctttggggagtactttggagcttctcctcagtccaaccactgagttggtcatctctggttgttctgtaaaacccactttttgttacgtcatctgatcaagaaatggttcattgttgggtagagtaagagaagacaacacttcaaaacgatgatttttctgatttgcagtcagctcagaatcccagggacgggggagcctggtgggcttgccgtctatggggtcacacagagtctgacacgactgaagtgacttagcagcagcagcagcagcagaaggcacctgcttattaagctttttcaccttttcaattgcttcaaatgatgaacatctgtagaatggttgacgttgagttcttcagcaacttctcatgtagttgtaagaggatcagcttctgtactaacactatatgttgcagcctgctgcaaaaaacagaggaggaagtgactgaactgtacgttgttttttcccattaagttttaggtgtcattcagaaaaaggagttgaaggttcatggttggcttagttgaatggtctttgtcaccacaggaaggaaataccctcagttctctcctgttcattgtgtaggctttaggtttgtaggacgaagtgagccagcctttactgtaagccagcctctgggaggaagtcctataaattccttgcatttataagcagaacaaaatactgagtaacatgatttctttatgcttcagtatatattcaggaaaagtgttgtgtactcttggtatggtgatgctgctacataacatttgtgaaactgttgttcattatttaccaaggaatggttatctaaggatggggaaaagaagatgggaaggacaggaaagagatgatg

SEQ ID NO: 31382 - DNA, 693 bp, Bovine  19866880434990
  misc_feature (1)..(1): n is a, c, g, or t
ngactgaggccatggtgaccctggagtttctggaaggctctatttccagctcctcccccatcccacaatcaggaaggaaaggaaggggcagccctagcaagggctggactggcctctcccacgatgggtatcagggctccctggggaaggctgtgccgggcagtgagcccaacttaggctgtgaaggatagtggaggtgcaggagggagccctggcccccttcctccaccttctgaagtggcctgggtctcacagagccagattgctaacccatcctgcaataaatagccttggtcttgcttcctcctaaagtttcctggggtggcctggcctcctggaggtcagggatcaagggctgtcagaagggaagtcacagtggcttccacagcctacatctcagcacagcccaggcctccaccccctgctttctctgcccaccagtccagctgtggccctggggacagggctggcccctctcagagagctgggtcaatatttgttgagtgactaagtgactgactcagcataaatgccagcgcccgccaagcgctgaggtatgttctgctgggccaggcggggacagggattgagttacagtggcaatgggcagagcccggccccatgccaagcccagcactgcccacaggcagggtgaaggcaggagcagtttccagcaggtaggctgggtgggga

SEQ ID NO: 31383 - DNA, 1718 bp, Bovine  19866880437391
  misc_feature (1)..(1): n is a, c, g, or t
nccacgctgagggtgcacccaactctccggcatctgcagggtgcgtgcactgcatgagaatgaaaaccagacttgagatgtgacagtgacttaaccctgggccttctcttccctctgtctcagggcaactgtccacgggtgtggccaggagctacctcaggagtcttatgaccatctgggagctgcacgggactatggagaccatctgagccaatctctgaattttcaggggaaggaaacaggcccagagagggaaagcaagtttcccaaggctgcacaccatctggcagtgtcaggaaaccgagaggctggtgaatttcagtctgagacttcataaagcttggggagtaccatgggctctgtggcacagatgggcaaggctgggaaaggcctggaaatgctgtcccttcccaccttcctcactacctgatcctcagacaccaaagggccacccggcgacacggtgcagccctcctgttggagtgtggaaagcagcgaggagtgtttggatggtggtatggaaatgggtgggggttgtctgagatgtgatatgggttgggggcaagggaggatcaaccggcactcaccttcatagcaagggatcagcgtcctgcctttggcctggaggttggacgggatgatgtaacagaagccgtggggcaggatgtggtctgtttcatagtaaatgttcttccagcggtgggcacaggcctacgggacagagagaggttcagagcaggacagtcaggccaggaggtcacaaagcagagcccagcagtaccaggcagttctgtgggagcagagcggcacagactggctgggaagccacattctctcccacccagccccggcgccatgctaggcatcagcagaccgtgggagcttggtcgggggtgcccctgggaggcagcagacaatcaacaaacatataaacaaacaaggagcataacaaatgctggggagaaaggacacagggtgatgggctaaggatctagcagtagggaggacggttttcacctggaggccaggggcggtcgaaaggatgagaaagagccaaacaccctgggcacagagggaatatcaggggcaatggagaagaaggcttgcagagccaagagaaagaaaggcggcctgtggggctgctctggggcaagctaaggtcagagagaggacaggggcagtccccggggatcttgcagacctccaggatgactgtgactttagtggatgtgccaatggagggtcttacacaggtgagtggtgtggtctaactcacaacttggaaagataattgggctgccaagtggtgactgtaggtaggtgaggttaagaggtgagcatccaggtgagagatgctgctgcctggaccaggatgggggcagtggagagcggagaagggggtgacctcaggatgcagaggtggagctaacgggcctgaggaccaaaggacatgctgagaaaaagctagagacaagaggtgttgctctgcccccaacagaccctgatcttcacggcaccacctgcttgcccactcgagcagtcgctggcctccatcaaacttgaggcccttcagagtcacctggaagtctcactaaatcacacagcactaggccccaccctgagagctggcttggccaatctgcaggaccctgagaatctgcattttaaacaagctcccgagtgagccgaggccactgatctctggagcaccttcagaa

SEQ ID NO: 31384 - DNA, 1617 bp, Bovine  19866880470297
  misc_feature (1)..(1): n is a, c, g, or t
ncaacaagagggaactcgtcattctgcatcgttgactcggtcctgaagttccaaataccctcaaaattgctaccaaaggttgtgatctccccgacttgtaaagcccagggaatattacactctgacttaatattctgtcatctcaacagagcataatgtggaaaagtgaaggtggcagctgtgtaaacccctctggagctcaacctttgctgagatttcctgagtacagcaattaaccaagtcagtcttctatggtcaactgttttgaaagaagcaggagtattaagtgattgaaatgacccatatgctcactgtaacttctgcactgccctagcaccttgagggatacagaacatcatctagcaaacccctttatgtacagccgtaacacagggcagaggcctggacttggcacacgcagcaggaaccttgtccttggaatcactggagcttgagaagggctgcaacccgcccgcctcacctcccccagacatcaaggcccacattcacccatagtgagctcagacctctcccatcagcccctggtcccggaattcagtcttagtgtgttttcctgggacaaagagacatctatttcagcagcaagcaaacttcttccataggaagatagtcctgaattaacaaaaaaaaaaaaaaaaaaaatcaaagccaataagaatataatattttacaactaatttttttgaatgtctgctatactgttgatgcatattcttcataaatactatctactcctaatgggctgagaaatttcacaaaattacctttcaattgaacttccagatctttgactaaaagcatccagcctagcctgtgagaatcagagattcaaatggagttaagcaagtaaaatcttaggaccttatgctaactactgtaaggttgccacgggctaccgaattctgttaatacttcactcacgttaccttattcgagccttacaacaacgctacgatgcagttactacaagttctcctcgcatgaggaagctgcagtacagagaggtgaagtcatgggccaaacaccacatacagagctaacacgtggcagagatgggatctgaatccaggcagtctggccccagtgcccacgtcttaaccgctcttcccagaatgtgaagagaatgggaatgggtgagatgttcactttgtgggaaataaaagtttaaagtttaatcagcttacgtttaaaatccattagcgttagttcatgggtcctgaattcccagcaagggtgacttatcatcctttttttcagctccccacactgggggcacagcatcacagccctgctcaagttcacacagccccacgatcaccatcacagaatccctggtggaaaggaccagactttctcgctgtgagaggaattcgagaactggggttacccaccccagcctagttctctctgtcctgctgctgactagaagaacacaaccacaccaggaaaaacaggaagctggtgagcagatacgccagaacaacaggtccactgttcccagcaacgggcaagaagagtggccagggacagtgctgggtgagacctgcggcacggccctcctaaagcacctgcctttgcagggcaaggggaggaaag

SEQ ID NO: 31385 - DNA, 2647 bp, Bovine  19866880562454
  misc_feature (1)..(1): n is a, c, g, or t
ngggtaaactctgggagttggtgatggacaggggggcctggcgtgctgcggttcatggggtcgcaaagagtcggacacgactgagcgactgaactgaactgaacacagtttttagctcacagtgatcattcagtaaaagggaattttctaattaactttttaagtactatttttgtctcctttcgtcttcacagaagatatccagcgatcctgctttaatgaataatggagggtagaaagctgggtattgctaaaaagattttaggattccttgaaaatattatattttttaaaatatctttgaaaatcctatttgcaaaatttatttgcttggtaagcgctcctcttttatgtagaggatgtaaaatttaaattacgccatatttaaatgttctcaagtttggaatgattggggtcttaatctgtctaattttactgtcccttaaaatggtcccatggattcccaagatttctgtaccattttctttgtatcagggggtggccaggcctttaattcctaatttcttctgcatctctcacgacagagatcatttatagagaaggaaataaatagatcccctatttagatgcgaagattcttcttctaatgttgtggcctgtggctccacaggggatacaaatcaatcaaggtccatttacaaatgaaaagcagttgaggttttgttttgttgtgtttttgttttgaggagaaccataaaaggctaagttaatccatttaaaaattcaagaacaagacccatacatttttattaaataaagagctctacatttacataggattttatggtttccaaagagctttaataaacattatctcatttaagtaaatacagcaaattaaaaaaaagcacatgcagccccatattaagggccgttaatgcagagaaggacccttcgaggggaagctggagggtgcccagaggggacagctagagccagacgaggggccagatctcttgcagtgactcttgggctcaaggagccccatcaagcttttccttttgtgtgaagaattcttattttgggcacagaaatattctacacttcaaacatgtttccatacattgtgtggaattgttgaccacttaaactctgtcatctaaccgtttccttatagatattcaaatgttatgaatctcctcttctaatattgcttatctatgtgatggatatcttcagctttattccttttagagacactgacagattgagagttaccaaatatttttcaagcagacgctttctgggttccaggtattctgcttggaaagcttaacatttatgattttactggataatcacatcataggggagtaactattcttatgtccattgtacagacaagaaaactgaggctttttggtttcttcccttaaagattactacaaaacattgagtatagttccttgtttgtatagtaggtccttgttgcttcttatctattttatgtatggtatatgtgtgtgtatatatatatatatatatatatatatatgtatgtataataagtagtgaaagtgaaagtgaagtcgctcagtcgtgtccgactcttagcgaccccatggattgcagcctgacaggctcctccgtccatgggattttccaggcaagagtgctggagtggggtgccatcgccttttccgataataagtaatatgtatgtgttaatactaaactcctaatttaggcttccccccttccccttaggtagctgtagtttggtttctatgtctgtaagtctatttctgtatttctgttttgtgcgtgcttagttgcttcagttcagttcagttgctcagtcgtgtccaactctttgtgaccccatcgactgtggcacaccaggcttccctgttccggagtttacccaaactcatgtcgattgagttggtgatgccatccaactctctcatcctctgtcatccccttctcctcccaccttcagtctttcctagcatcagggtcttttcaaatgagtcagctcctcgcatcaggtggccagagtactggcgtttcagttgcaacatcagtccttccaatgaatatttaggactgatctccgttaggatggtctggttggatctccttgcagtccaagggactctcaagagtcttctccaacatcacagttcaaaaacatcaatttttcggctctcagctttctttatagttcaactctcacatccatacatgactactggaaaaaccatagctttgactagatggacctttgttggcaaagtaatgtctctgcttttgaatatgctgtctaggttggtcataactttccttccaaggagcaagcatcttttaatttcatggctgcagtcaccatctgcagtgattttggagcccctccaaataaagtctgtcgttatttccattgtttccccatctatttgccataaagtaatgggaccagatgccatgatcttagttttatgaatgttgagttttaagccaactttttcactctcctctttcaatttcatcaagagactctttagttcttcttcgctttctgccataagggtggtatcatctgcatatctgaagttattgatatttctcctggcaatcttgattccagcttgtgcttcatccagtccagcatttctcatgatgcact

SEQ ID NO: 31386 - DNA, 831 bp, Bovine  19866880573440
  misc_feature (1)..(1): n is a, c, g, or t
ngtaaacatgacccatccccctgacttaccacctgttcttctaaattcacacgccccttgagcttaaaaacccagagaatgttttgaatgcctactctgctaattcaattacctactgcctactcttgtaacaaagatatcagaagataacaagtcccttctctgtcatagaggctgaacactggccacaatggctttggtaatataaattttaaattgaaacattatttcaatgttcaaaataaaaatagtcctcataaaaggattgagaaatgataactggttaactggctaatttagcagatctaagatgtttactactagaaagataaataaaagctacacttccattcagcaaaatgtaaactatgatagttttctatagtctgaaagtgcccttaatattcggagaaggcaatggcaccccactccagtactcttgcctggaaaatcccatggacggagaggggcctggagggcttcagtccatggggtcgataggagtcagacacgactgagcgacttcactttattttttcactttcatgcattggagaaggaaatggcaacccactctagtgttcttgcctggagaatcccagggacgggggagcctggtgggctgccatctatggggtcacacagagtcggacacgactgaagcgacttagcagcagcagcagcaacagcccttaatattatcccttatgttaatcacattgctatgattttctattaagtgtcttgatattcaccaaagaacagtgaaagatgacaacaatttaataataaatcctaagacagatactttttatgtatcacccttcattt

SEQ ID NO: 31387 - DNA, 1163 bp, Bovine  19866880626195
  misc_feature (1)..(1): n is a, c, g, or t
nccactacttctctggcctgtctcgctcctctctccccgcctctctctgctgccgccacacctcacccacccaagtttgtgtttctgggggagggattgggcagggctgaatccgaagcatgtctggaaagctggcattcttgggttaatctcttgcctccccagggtagtggtggagggaggggccaagggaagtgacttaaggtaggcaccagctctgacggtaggtctggcctgtctccaagtcatcccagaaacttccccttacacccaccctcactcacacatcggggacaggaaggtcagctgggggtgtgagacgcctgaaagtccaccattagacaactcgtctctgggcaggcatggcccctggatctcaggggcatcctgcagaggtaactaactgagagctggattttaggggagtaatttgggcacctggccagggctgggcccacagaggtccctggttgtttagggcagagggaacagattccagcaactgcaattcagtgcaaagcctctcgcttggctcccccagccccaccacacacagacacacagtccccacactgaacacgcttacacacagcagaagtaatcaagtagagtgcctcccacccagtagaagggagggacagacaggagagaagaagagaggagagtcttggggagctgctgacctacaggttagagcagcagcctggcttctctgaacagggtgtggcccagccctcttttctgactgaacctggctgcatgggccaactctgagtcagccatgcccatccggcccagcaactccaggctccagaggaggcctcagcttctctggcctgagccagaggccagaagagggcctgtgtgcgacaggtttgctgtgtgcaaaggaaaagccaggctgcagcccccaccaggggcatcagagggagaggtgacaggtcatgccctggtttcaggcttggggctcagagctgggaagtgacatgaataaataggaatgatgcttaagatgaagccgagccaactgctggtgttaagttttgtggtgtggctacctgggaagagcagggcttgggggaggcccaatgctgagcagaggggcttgcaggcctctggggatgtcagaggtcccaggactcgccccaaggccagtggagacc

SEQ ID NO: 31388 - DNA, 1880 bp, Bovine  19866880642408
  misc_feature (1)..(1): n is a, c, g, or t
nttgcacaattagtttagatcaaatgaggacctgttgaacctttgccccacaggcaagctgaactttctagaggttcaaagtctctcatttttcagtattcaagtgctcctgggtcctggccttagccgcaagtagaaaagttaatacgcgtgcagaaggagccatgcctgcaaagcgtcccagctctgctgggtgtcaggaatgagtctccggtgggcgttcctgcctcttggcgtttttcatcacgttctttagacatgaggcattggtggaatatatttgcaaaccaacacagatttgcctctgttcatggctctgtttttaaccatgtagtttatttactttctcctcagacgcacagtgagaatgtccatggaccaagccctgtcctaggggatgaaagagaaaacagggctctcttgatcctgttgtcagaccctggaggcctccttgtgaggtgttaacagcccccaacgaagccctcagttaaacaaatgagtcaacctctgatctttccaggaacataaaatagcactcatttaaatgaacccactcttgacctgggtggcagctcactacatttataaactaatttctacacttaagctgaaaataggttaattgctatctatttagacttggtaccaaaaatcttacaatattgtgttcaggcaagcgagcgacttctagaatctcatctagaatccattatttttctgggaatttaaatgagcctggggtttattgacacagacaaagttgaaaacatcactacacactgagctggaattcttcatcacgtcttacacagccatttgaaatctaaagaaaaaggctattagtgtaaggactcaatttttaatacctaatttctagtaattttggtagtctgaaaatctttatttttttaatttgttacagagtggggcttagaatgccaaacatataattcacttatattgtcataatctttttcaattcacaaaatgtttttcaaatgacaaaataaaacgtgtaattttataatcctaggactgcccttgtggctcagacggtaaagcgtctgcctacaatgcaggagacccgggttcaatccctgggtcaggaaggtcctctggagaaggaaatggcaatccactccagtactcttgcctggaaaatcccatggatggaggagcgtggtaggctacagtccatgggttcgcagagtcggacacgactgagcgacttcactgattttataatccagtttaaaaactgaaatcaaagctaccatggtcttccttctcattttagaagtataatcctagtacattgtatacataacttactgatttgacctaagatgaccagacattactgggaatgtctgcttaaaaagtacaggtctggctgtgtccatttacaagagagagaaagagcagttccagaagtgaagcatttggtgggggaccctgaggggagccaggttctagatccaatagagacagatgtttgagctctagattcaatagagacaaatgtttgagctcctaggatagcggtgaccctgcattgggatgacagatttcatgctttcctctttcagaatcatgtctccaacctcctttgtgtacggcgagtctgtggacgcatccaacttcattcaactggatgacctggagtgtcatttccaacccctcaacgtcacccttcaggtacccacccatggagaccttctctatcactgggtactaagggacgggcccatgggatgtgccttctatgaaaagcaaccaaagggccaggctttttctaagagaaactcttcccagcctgagtgtgtatgtgttttctgtaaccacacacagaaacaatccctttgctgcctggtactctg

SEQ ID NO: 31389 - DNA, 2333 bp, Bovine  19866880655614
  misc_feature (1)..(1): n is a, c, g, or t
nggagaggctcccacatgactctagagcacgaggctgagagaagccagggaagtagtgcccagggtaccatgccaggctctccctggggcctgccccaacctgtggtcctggccctgcaggtttctcacatccccagtcaggctctcccaccttgctggcgattctgagagctacccgataccattctaatccattctgcttctgctaaaaggagacagaatcagtctctcctgctggcacctagaatctcaacctggtgcccactccacatggcaatgacttatttatccatttgtggatttccatgatcatcacatatgttgctatttcaaagtatcgacaaaatagatttgctctgtaactcacacaagcctcccatatggccaaagaagggtgtctgggatggcagctctcagtagcacagctggtgtgctgtagattcttggtttgcccccagggagtttctagcctcagctgttggcagctctcccagaaaagtagaaagggttgggttggacataataggaaattcagtgtattatattggcaccgtcagcactgaacatggtcactcagacctcatccagaattctcaggtttgagtctgtacaaagccaggtaagctggtgtggttggtcttgacacatggctaacactccgcccaggaagggcacctcaaatgtattattaataaaaaaggaaaatgcctcaaacatccaggacgtatttctagctattcacccgtacgatctgtaaagcactccccataccatggaatgaaaataaaagacacaatgagtcccaagaaaattatctgtattccctgtcagttgaatttatcaccatgtacactttatgtggttaaaaaccgattgctttccttttctcacccacaccctgctcgctaccagctgcaaatacacttcctgttcattccaaggccatacaaatatggtgcctgatctcaaatcttgtgaaattttgcccgatttaaatttggtggctagcctctatggaaagttcccttccgatcgatgattgacagagtgccaggcattcagaagaatcacgcagggaggaacatgtttgttctaaaaaggcaatcctttctactcagaaaggatttattttttcctgccaggaaagttgagaacagattgtagtacttcatcttggctcatgtattgaaaggcaaagtcatggaaaggagaaagatgggggcactgtggaattctgaagggtgttccttttttcttgggagtacgagaaaaaattcagttgaaaatgagatctccttccaaagaactcttgataatgaaaatatcaccacagtgctcaaaatggaagagtagttaatggaagcagtattttgggggcgcacagatgactcagaatccaacaatgggatgtcaggcaatgtcttttctggatccccacagctctatgttttaatcaaaggcaatgcgcccgtgatagttttttcatttacccaggggattccacctgtaggaaccctgttaattacttccgttagctcttaattgggaacagtgtggtctaccagaacattccaaacctctccctattggccacgtatctcatcctataagctttttaactggagctgtgacaatgcgcagtgactctgcattctttttcactccccaggtgaaggtctggactggcagttaaatgcccaaatggcagggaggaaaagacaaaagccaactccagatattttgatctccagaaacagtgagtctaggagtgaaggacttcagcatcattccactccatcccattcatttcctgttatttaaaatgaccaggtggacaatttctcgatgtgagtcaaggaatttaaatctgcctctgacagttctaccctgaactgggcatggaatacccacgctttggggtagctttaacgtcctcacagattcttatttcttctgtgccagctgatgctcttgtcttctgctcaggactgagggttcatggaggtctcagggatttattttctatatgtacccttcctagccaccgttttataagagtctctttgctgtgatccccatcctaacatttagacatgtggtgtctcccttgttactagaaaataaattaacatgtttttctttgcaagcaaataatctttgtgaatttttcacttctgtaaatttgtcacagcaatattgactctttcaagagagggtaaagtcttcctggagagaagtaaattccaggaaaaggagatgcaaaaagctagcattaccgcatagcttattggcaaaatcagttcagaggctgctgttttccctttctatgtacc

SEQ ID NO: 31390 - DNA, 1400 bp, Bovine  19866880683752
  misc_feature (1)..(1): n is a, c, g, or t
naaattagacaagaagaagtacccctactggcctcacaagccaatttagagcttataagctcaagtccatggggtcactaagagtcgggcacgactgagcaactttactttcacttttcactctcatgcattgaagaaggaaatggcaacccactccagtattcttgcctggagaatcccagggacagaggagcctagcgggctgctgtctgtggggtcgcacagagtcggacacgaatgaagtgacttagcagcagtagcaagcttaagtctgggagaaagctctggcccttgaattgcaaactctggacattaaaaatgattacatagcaaaaaagaattgcaaaggttaccagtaaagcagtgcttcataaagtgtggccacccagccagcagtatcagcctcccttgggataatgtcagaaaagaaaagtcctgggtcccactcctgaccctttgaattagaaactcatggggtggatcccagaaacctcggttttaacagactgattaggtgagtctgatgcagttaacaactgagacagtagaagagctaagagtaactacctacctatcaaaactaggaaggtgaatggtgggaggggacctttatgtaggtgagttcaatttttatctatcatggaaggaattcagtgaaataatgtctaaatccgataaatcaagaagaaataggattgatactactaattttctaggaattttctagggacatggaaataaccatccaaagaaacataaagggacataaccacaatgggtaatagtggttcctcctgagaggaggacccagtatagagaggtgtggggtagaaggttattattttaaccatgtgattctttggttgaaaatgaaagaaaaatattgtccttagattgagaagattgtctaggagcctgagaaaaaaattggggagagtgatctttgctttactccttttcctgattaaaaatatatatatatatatatatataagataatttaatgatcttcctccatgtgtcttccagatgttggctcagtttaaggggaagaaacattctgagagctaggcccactgtgggaagcagagctgttttttgacttgtgtatatgtgagaggtccacaaagagcatctgacctctttcacaggaaggagtaagctcactggagctcttcattttgccagataacattaaaatgtaagtgccatagtctcttcagcgaaaaggcaccaaacccatgctggtgcacaggattgcacaatggagcaggttaaattatggcgatcttttagagtcaagagtcttcccccactgatggtctagttcaggtggaataagtgcacagacagtggatataacatgtagtcaggactaaagcatgttaagtgcaggctta

SEQ ID NO: 31391 - DNA, 1397 bp, Bovine  19866880700399
  misc_feature (1)..(1): n is a, c, g, or t
nacttcaggctctttcaaactggaaaattcatgaaatttttcttgaataatttttcagtgatatcttttcttctgtttttctgttttccttttctggaacccccttttacttaaatgttgagccttctcaaataatcctctaatgttctcatcttttctgtctcttggctttttggctctgttttctggaaaatttcctcaactttaccctaaaatctttgtaatgaattttttcattttttctataatgttttcaattcccaagagctttttgttggtggtagtgccattctctaaatgcttcttttcttaaattaacagctaaggcataattcacataacactgatccattcaaggtattacaatccaatgatttttagtatgttcagagttgaaaaaccatctgtacaatcaaatttcaatcatcttcatcactctttccacttcccacaaaacatcccatacccattagtagtcctacccaatcccttacaatctgctcaagtcccaggcaatcagtaatctactttctgtctctatacatttgcttgtcctggatatttcacataagtagaatcatagaatatgtcttttagttagcataatgttttaaaggtacatccatgttatggcatgtatcagtacttcattccttattactgctgaataatattccattgtataggttcatgatattttatatatccatttatcagtagatggacattcagtttgtttccacattttagctatgaataatacttccatgaacactcatgtacgtatttttatgtgtacaaattttcagttctcttgggtatggctaggagtagacttgctgggtcatatagtaactttgttcagtcttttgagaaactgccacaaaagtgaccacaccatcttccatttccatcagtaatgggtgaggattctaatttctccacatctttatcaatacttgatattgactgtcttttttgttatagttattcaggtggctgtgaagtggtgtcttcattgtttctgaatggtgcaaagaaacttcccaactcactctggtagttgcaaacagtgatttaacacaatttagaattaattatgtaccatactttttcattccagttgaaagcggagtactactgaggcatagactattgctaaaagaatatatcaagcatgctaaagaaaagactgaaagaaaatgagtaatattcatactgttaacatagcattagtcaaatacactttcaaaacacaaaagtaaaacttctaatttctcagaaaaattgagttaaatccacatttacctttttagctctttcagaaatgggttggtgctctctgcaatattttttcttgaagaaattctttattctggagaggaaaaataagtttt

SEQ ID NO: 31392 - DNA, 1024 bp, Bovine  19866880737833
  misc_feature (1)..(1): n is a, c, g, or t
ncccctggaaacgtgcacattcccatgtagtatttccccagtgatgtttatcacattcaaatgtccaacagaaatccatgactacccagacaccagcatctccaccccttgagcaggggtgttagaagctctctggagaatgaacagcagcagacaccatcagatttacagtaaaataggaacagaggcagccagtggactgtgcacaggtaaaggcaagcacttcaaaccatccattcttctcgaaccctggcgggccagccgtccatcacagcacctttaaaggcagaggcacaaacatcactagtgtttgaccatagggctgcgtggttctgggtttcatgagaaagccatcttgaatgcacagggctgtagaatgttgccaggttctagacttacagacttccttttcatcccatgcgttcacacgctgcaaccatgacaagtcagtgtcactatggcatcctcctgtctccaagatcatctcagcaagatggcaccacgtcagaggagcttccccaccagccgtcagctacgacgggtggtgtttctttttaggatacagatgcattgcttacagctaatgagtgagaccatggaccaacatgtgggattccagagcaatggaagacagagcagtaaccacctccactgtgcctgggcgcctccactcgaggcccagccagagtccatgacccatggtatcctgttccagatattaaagtgaaaaataattgtccaggagactctattttaacctggtaccaaaaggaccatggaaactcaggaggtcagatttttcatttggctaaagagttgggggtgttttggtaacatgggaagtatatggcacagagataggtttccttaggttttaaagcccacaatctcataaaaggtaataagtaaaaacaatacccgtatttaccttaaaaacataaaccccaaacattcatctcatttcttggccttatgttagaattctattgcttcatttacatgtagatattaaaaatatatatat

SEQ ID NO: 31393 - DNA, 2798 bp, Bovine  19866880745040
  misc_feature (1)..(1): n is a, c, g, or t
nggagatatataaatgcaaaaggaaactacagcttatctttcagtatccggtctagatatccaatggggataactgacctcagtgactttaaagttttctgatggttctccgtgtccttagtcagcatctcatgcagtgggcttgggccctcctgcgttagaactggtttgggagcattctttaaacatacagatttgtgggccacacccagtggtctgagtagattactgagtagactctgagactgtggggcctgagataagcactttcaatacaggttaggtgatacagtaagtgttctgctccacaatgatttggcagccattgctatgagttccccgttctctggtccattctacaggctgcttaaggaatcttcttaaaatgcctttctctactgtgaacagaataaagctcaaaatctgaactctggcatccatttggcccctacctttctgagtacatacatcactgttctacaaatacccttttcttggtatcatttccacaccttttgtctcagttgtttccactatcaggaacacctttcctcagctattcctccatggttttcttctcccatcttgccccaacactaatgggtgataagttggcatatataatatggacatggaacaggatttggaatggaccccaagcatggactcccatgatcagcactgaagatacaggtctgaattactctggaacagaggagccctacatttacttggctttgatctaagactgcttctgattacctgagagttgctgaactaccttatttttgttaattccaaagatgcaagaaaataacattagtccagcatttactgccttattccaagtctctcttccacctactcagtctaacagaaatgaaaattccagttggatactgaggtggagaataagcaaaaagagcgaaaaccaaagacttctgtaggaaggacagtgctcagcatatagtcatgactcaaacactcttggatggtgtcacagggaggaatgtcatggatcacccttctgtgcctgccagcaccagcccagccctcccgtggctatgtaagtcctcctgactgaaaggttttaattctgttctccactctccactgcagcaattagggaaagagcctcctcttccctctcccaccctcagagcatgggcttctacatgtagatggtgcaggtactgcacccagaacccctttactggatggcttccagtccctggttgaatgggaactgctttgtctgagaggttataacatccttcctctgcagcctatgattgacaggggtgcagaaggccacccctttgcctcaaggtgagaccagctgtgctgtgagattcatattccagagccctgcgggaacaggctgagagcacatccctgtttgcccgtgtcctctgccctaggctgctcccttattcctcttctcccaagagcatttctgtactaaatcacttgcacaggaatccccatctcaggttctgcttcagcgaaccggacctcaaacaatactctttacagatgaggctgctggtaccaagagcttctggaaagtgctaggcatctgttcccaggtggggagaggcaacagaaggggaccccccacatgctaatgaatgttgttcaaattcataccaatcaaaggaagactttccaactgcaggttatatagctgccccgattagggaagcatttcactttaaagcccatcagcacctcctttgctctggttttatccagagcaggctgggccatgaacttaaaaaacagggtcattatggagccaggtaccagacccgcccccccacccccagtcccttccctgtagtcaggcaggtaccctgcaggcacaagaagtctcagggaaatttaaaaaatgtatttgggatgatatggctaaattaagcctggtttcagacagcatcaagaatagtgatctagttggggagagaatgcttattacctctgcccaggaggtacatgatgagattctagggaccacacttctccttggctctgactcttttcatgccccaaccattgctcacatttgagaacttcaccttcagcactattgcaagacttatgatgaagagctctcagctaatgaggaatgtggaccagggaactgtctaccctttgtccctgattgccagacagtgtagaatctgattactcaattcaaatgcactgaaatctactgaacccttgttgcaaagctgcaggctttcatgaaatcaactaaagtgatgcacagaaactgctcaaaccacttaaaagtctctgatctatctggatctgatgtagttacttaacagttaaagaagtcaaaattatccttggatgataacactttaagatatttcagaagataaggatttaaaatgaaaagatcaagagaagcctttggggaaaatatactatcataaaaacaagctttttgtgattgtcctcaaaaaaacaaaaaacaaaaaactggcaaaataggaagtaaagaatgttaccttatgatataacaggaatagttatatccaaaagctccctatctagggactcccctggtggtccagtggctaaaagaccccacgctcccaatgcaggggcctgggttcaacccctggtcagagaactagatcccacatgccgcaactaagacgtggcacagccaaataaataaatattttaaaacaaaaaacaaaagctgcctacccagcactcagttacttcttctgtttcagaaattaatgcacttccattttaaagatgctaataaagcaaataag

SEQ ID NO: 31394 - DNA, 1421 bp, Bovine  19866880783713
  misc_feature (1)..(1): n is a, c, g, or t
ncgttctgtagatttatggttttatgggtctggatatactatctcttcatcttggatcatcattatcatcatcttgaatattgctaattacaataataataatgatgactgtcaaagttaaaggctgagcagattaggaggcatggaacagatctcctgcagttgtagaaaacaaacactttgaaagaaatcggaatcctcagataatttaaaaaaatcagatcttacatttcaaataaaaacttgttaaggtcaaagcaattaaactgcaaattcccttgtctggggcctgaccttcagatcaaagggaaataaacagaagcggcagcccaggtgaaccacaaggctgatgctgctccgtgtccttagggaggcgaggagcccctggagcccccagggaggtgtggctggctttgggcctgacagaggcttaactccatccctgagatttctgctggtttccgtagaatatctgcaaggaaaatggtcctccaacacccacatacgacaccccatggcttcctgctgtcttggggtatagactgggctggggacagcagtcagtgggatatattccatggtaaagggttgccactgatcacaaggagagagatgcagacaccaggccagagctggggacaagaaaggcttgaggctttgtgattcagtacaaatgactgacgtgcaagcagcagccatctgggccgagggtgaagaagaaacgagagtggcttgccaccatcagagccatgtcagggctctgtcaacagtggaagtgtggcacaggcaataaaactgtcaccagggccacttgtcaagaagaggaactggatgggtaagtgtacagaatcataatccctcaacctgagctggggacccaggccaggaaggcacttcctgtgatgtaatattctggaatcaaagggtgaccaggggtggttcatgtcgggccctctcccagctccaccctttttaaaaggagagagagctacaacagggaagcagtgccgtgcgtgtccaacttgcccctcatcagtttcccttcaaagcacccagggagagcagaaccgttgacagctctccaccagccagagacggaaagtgggtaaaacatcccatatcccccgtgcctgtggcttatcaggccaacatgttgctgccacgcctaatttaaaaaataaggctggaatgactattctaaggatattcacttatacactgacagttttatacggactgacacacagtttttccaaaggaaaataaagagaatctctgtggataacatgcctattttatctccacatgattgttttaaaatcaatttgttggatgcagcctttcatactaagaagtgcttatgagaaaataaattacagtgaatttgtattattttttttaaccacttttataaactcata

SEQ ID NO: 31395 - DNA, 1387 bp, Bovine  19866880788730
  misc_feature (1)..(1): n is a, c, g, or t
ncaattcttcggtgcttagctttcttcacagtccactttcacatccatacatgactactggaaaaaccatagccttgactagacggacctttgttggcaaagtaatgtctctgcttttcagtatactatctaggttggtcataactttccttccaaggagtaagcgtcttaatttcatggctgcaatcaccatctgcagtgattttggagccccccaaaataaagtttgacactgtttccccatctatttcccatgaagtgatgggaccagatgccacgatattagttttctgaatgttgagctttaagccaactttttcactctcttctttcactcccatcctctctgcaaaaagaaaaacgcaatacacggcaataaaggggtcagtagtcaacggctgaaaccaatctttacaggaatgcctgtgctatgctttcaaacttggaaactctggcacttctttgtgacggggatattctagcctctcaatttacacctgttttatatcatattaactttgcaggatcccctcccgaaacattctctaatcccaccaagaatgtggaaacgtgctaacttggtcttgggtaaagatgtctttcataatgactactattgatctgaaagacatccaactgagaagactttcaaacctagcccaatccacgtggctactcttcactgcattttaccaaaggcttccagtttcatcttactgacttccccaaaggacctaagtggacaatctgagaaaaactgaagttcaatgacgtcacacaaaagccaaggctttgacataatctcagatctgctgggccatacagcactagcttactggccccagttgcctcagggaaaaaactgcaaccttccaaggccccgagacaggtgatcatttgagctccaaagctgagaatggatagaacaccttctctgtccagtaaggttacagggaaggccgagccgtggactgtagaaataacttccgcctagaaaaaagatgtcgtcacggggcaagcttccggttccactctgtcccgtggaccgagaccttttattccagttggcagtcgtccataccccaaggctaccccacccagctgctccctcgggtttctccacaccctgcggggccgtttgcacgtctcgcgagtgtgacggttacgtggcgacgtcacttgggagaacggtgcaaagcgagtagcgtaaccgtgatcttgcaggaccggagccttgtcgcggaacagcgcgcccagcgcgtggaggcgggactaacttatgactgacgtccacacccacttactgccgttctgattccttctcaaataagccaatgaaagcgacgacggagacgacaacgtgccctcgccgccagaagtggctccg

SEQ ID NO: 31396 - DNA, 1055 bp, Bovine  19866880790099
  misc_feature (1)..(1): n is a, c, g, or t
nctgcttggaacaaacttcctgcagataaaccacacactcacctcacctccttcacgtctttctgcaaatgtcaccttctcaggaaggctttccttgacctacttaaaactcatctctatccccaggggttcccatcccttcccctacttttatttgttcttcatcatcaccagattataaagtccataaaagaagggatttctgtctgctttgctgctgttatctctagcatccaaaatagtgtctaacacacaagaggaagtcagtaaatatttggtgaatggattagtcaatcgagtagtagcatacattttccagaaaaaaaatctgctaatttgaggcagaacaaacacagaaatatcataaaaatcatgctcgttctccacacaaagatttcatgggcgtcacctcattattaccgtcataagcactggttaacatttattgagctcttaccttgtgtgccaaatactatgctgagcactctcttcacttgcttttttttttccatctaattctcacaataattccatgagttaggcattattgatcttacaaagcaaggcaaacaaaggtaagacaggtcattaattaccgaggggcacagaagggcctagaaaccacaactacatgatgtttcaataccatgctcttaactggtaggcaactgtctcttcagattaaagctaacatttattaactgattattatgtgtcaggttaaattatttacttacaatgtcttatttattttaatttgaaaaaaccaaaaacaaaaaaacacgaggccaacacttttagttgcctatccagcatacaattttcccttctttaataacagaactttgacctactttgtctgaagtaataatgtgcttggataaaaagtgtcatttcatttgcaaatggcccaatgacacagttctgtccaataaaatggaaatgtaagtcactgagtaaggcttccaggaaagaaagccctttgaaagggaaccacctgagctgtcacagactctgtcctttctccgattcttcggtcggaacacaagcacaag

SEQ ID NO: 31397 - DNA, 868 bp, Bovine  19866880795799
  misc_feature (1)..(1): n is a, c, g, or t
ncccaactaccaaagaggtccatgcacagaaacgaacgatcaaggactttgtcttaacgggaaactacacaatgagaggcaccatccctgtggtttctgaaatgcttcaaagtatgcttccaaagctgcagaaagaaatgctgtgttgtttcagtcttcacagggtatatgaactccctggtctcagcagttaaaaatataccgtccattacattttatgacaggttcaaggcctgagctcaaaatcaccccagggctcctggggttttaagaatttggtcctggataggtatttcaggctagggtacagcagagccgctacgatactgagagttatatgaaagcatctgtttccctgtgtgagcccatcggagggggagggtagcgagagcgggttctctgggctgcatgtagcgttcactgcctttacaaaaagaatcctgacctctctggggcaggcctgctgcttcatgagccccgagagggtaccgagaaagctgagaagcctgccccagaccttggtggtgtgtgaaaagcctgaaccgtgactgagatgaagaagagagtcaaaataccgaccgcacaggatttccaagctcctcaagtcacagtgggcctatctgctcagcttgggggccaactgagccagcacagttgctttgaatgatttgcagcttagcttcacttcattagcaagagaagaaagcagctcccctcaaacctgtaataaaaccaggtcattaaattccagtgaatttcatcaaaactcattgaccctttggtctattccattctccttgccacgctgtttccactggttttggcaaagatcacaaacagctgtcaagtggcatgatccaatggatac

SEQ ID NO: 31398 - DNA, 1137 bp, Bovine  19866880842842
  misc_feature (1)..(1): n is a, c, g, or t
ntgtgccccattccctggctggctggcgcagtggtctgacagctggcctacgggtggataagctctggaagtagtgattcatgctccagagctctctcatgggaccaagctgaggctggacttcttgtgagaccacatccttaactcacttttttccctgccccatcctgtgtccctcacttctgggagcactcttccagcacaggtgcctcagtggttaagaacctgcctgtcaatacagaagacgtgggagatgtgagttcaatccctgggtcaggaagacaccatgcagaaggaaatggcaacccattccattattcttgcctggaggatcccagggacagtccaaggggccacagagagctggacacagctgagcatgcactcatgcttccagtacatctctggcagaaattcccattttggcttctgcttctggggaaccagatgcaggagaccttgtaatcaattccacacagaatttgttggttacaatctcattaaagaggtgagaaaagctgaataaagtgcgagggatgacctagagctcatgtgtgaccaaaacacaagcagatctgagtcattaggggaaaagagtgggaactacacgcagactatcatgttgaccattattctccattacttgcagcttggggttttactttgcccttcttttattcattctcagaaaaacaagagctagcactccatgaattaaagacacagatcagcgctaggcctcctcaaggcaaatctgttttgttttttttttttcgtttcttttttagagctgttcgtgaagcatctttgtctcctgtacatgaggcatcatgttttatagaaggcacagtgcccaaagaagagggctgggaactggccccgaacagctgatgatttattactgcatgttacataaatcatagatttttgttggttttatactttcaaccaaaattatatcataaagccagaggttcttaacctagaagagaattcagggggtctgtgaatttggagaaaaatatgtacatttttatttttattaacctctcactaaaatttagcatttcctttcattataagtgtacacagccaagacatggaagcaaccctaaatgtccatggataggaaaatgg

SEQ ID NO: 31399 - DNA, 2049 bp, Bovine  19866880853450
  misc_feature (1)..(1): n is a, c, g, or t
ntgtgctcacacctgagtgtctaccattcagaagcacatggatcctagctctgacactggttatggagtctgccctttccccattgaggctgcagaactgtgggcctgccagctatcctgtgacactctcaccagtgcatctgcactccttgcaggaggctggtgagcgcccattactgcatttagtcaaagttgcggatggagttgtccatgtctaccgcctaagaatcccaaaaggtgaaagtgaaagtcattcagtcgtgtctgactctttgcaaccccatgtactatacagtccatggaattctccaggccagaatactggagtgggttagacgttcccttctccaggagatcttcccaacccagggatcaagccgaggtctcctgcattgcaggcagattctttacccgctgagccaccagggaagtcctaaatgatttattaaaggacaccatgaaacaagcaagagaatgtccaaggagagctgcaaatgaggtttcgtaaaggaatccatgctctaggctctgctgtgggaagatctgtctcccccgggcaaagtgtgcgctggtattccgaggggagccagcagcactcagcacagtgcctcaggcacagctggggtccgtacacatccgtcctagctgaactctcagggagagctggttcctttgcctgcatctgcccgttgttacctcagggcctccacccctcagtgagaggctctatctttaacttccttctaagaccagcctagttcatacccttgaccctctggcttctgtctactcccatggtcactgggaagggaagcatgatgcattccgcatctgcctgtatcagagtcaactgcaaaaaaacaaagacacgcgtgctccatgccaggttcgcaagcgcccagcactctcatgatttgccaaaactttaggtatctttgcaaggacaggccaagtatgtgtatagaaaaacctgtctcccctgcagttgagttctgtgtcttttcaacaacactcacaggccccttacatgttagcctccagtcaacaaggccctaggagagagatggtcttgtttcttgtttcattcgcatctgatgccatctgtttgtgcctgcggcttgagcaggctgtgataagtctctgaggactctgtcagaccctgttcttagacacatcttccttcataccagatggctttccagcagcggcaacagcagccagggctgctccccgttactgagtgttcaccccaggccaggtgcagcgctcaacacgctacctccaccctctccttgcctttcagagaatcacaccgcactcaaacctggatagcactgtgcatctggtgactaacacggtcaaacagagagcttgcacggtgaaggccatactcggccttcagctccgcaagggaggtgatgacgtcagcgctgtgcccagagccctttacatcgtttctgtgtgcctcccagcttggggtgcagctctctttttgaggactgctcctgagctatggaggctcttttgctggcatgaagtgaaaacatgtttatatgtgccctgaagtgacttccttacgtggcctcctcccctttcctgtcctgcttccctcatgtctttactggtgtgccctggggaaacttccttcataagttactgtgtgaaaatccttgtctcagggtccacttcttaagaatcccacctaagatacaattttaaaaaaaagacaggttgaatggtcatctccgggaaggactctgcaattaccattagctgggacagcaagagtgctggggacaatggagacctctgactcaaattaccgtgaaaaggcaacttatcacagcattcagacacaagtctctgcctgacggccactgatttagtcctggtggtgtgtggactctgatgcactttgtccaggatgagatgccattctgaggtttaccagataaccaactggcactgctccaatctttcaaaatgtcttaatccaagtgaaaggagggtggaatgcctgctctataaggtgatgcagagcaggccgca

SEQ ID NO: 31400 - DNA, 1297 bp, Bovine  19866880861525
  misc_feature (1)..(1): n is a, c, g, or t
ngctcttagggtttcttctagtttggggccttacagacccaatattttgtgcgtgtctcctgtagacgtatgtgtgcgtttctgctgggtatgttcctagaaagcggattgctgggtctgagggcagacacctgtatagctttctatagctgtatagttgatttgttttgcgaagtggttgtgatcgttcacactgtgcccaggaagggtgagggtcccatgtgctccgtatccttgctagcacttggtgttttcagtctttctggttttagtcttctacaggatgtgaagtggtgtctcatttggatttctctggtgacagagttgagcatcttttcacctgtttattggctgcttttctttcgtcaagcatctgttcaagtctttggtctattattcgttgttgatttgggggaattctttatacattctggataggaaccctttggtggtatgtgttcccaagcaaactcagatgttctctaggcacgttaaaatcatgacgggttcacagtaggaggcccttccttctgcctctcccccagccaccaccaccctcagcaccgtataattctggggaatgtctcccagagagcattcagacaacacactcacggctgggtgaggatttagcattgactgcacttgcctggcactggattgtgaccgaacgccctttattcttgatgtgcagggtccttgtgggtgcaccaaaggcggattccaagtacagcacttcagtgaagtcccctggggctgtgtttaagtgccgagtccacaccaaccctgaccggagatgcaccgaactggacatggctcgaggtgggtagatttttcactgccaagatggggatgggttctgcaccctcatactatcctctttttcttcctaactattcactcacttttccatctctctttcattccctctttccctcccttccttccttccttccatccatctacccatccattcatcatgtgctcagtacctattacttcctacgcactgggatataccaaacaaagatcctactatcctgggccttactagttagtaggtaaaaaagacattaaaacaaataaagatcagagaagaggggaggtgagtatttgatctgatctagattggagggtctgggggaagtgactttgacactggaaagatgcacagcgtttagctggggcaggtgctagaggcagaatctccaatgggaggaaagtttgtggcattttaaaatccagagcaagccccagcatccctgagtggtaagcaggggaccaggaagcaggggag

SEQ ID NO: 31401 - DNA, 1964 bp, Bovine  19866880890250
  misc_feature (1)..(1): n is a, c, g, or t
ntcagcctgggagcgcagctcacagtgttcaagtctgacctttctgtttttcagcagagtctgcaaggctcaggcaacaactaaagacagcaactagctgacttctgggaggaagcggtgttctccagctctgtctcttggctgtttcctttccaagggtcagggctgttgctgtctttctattcaccacttctcatcttggccattttttcaaagccacaggatatactttgcatttacttctgttgctttgtttcctgattttttttttaagtaaactttttgttgagcagtaacagccatgcagaaaaatgccccaaatcatctgtatacatctctttttatagttgtttttttttttttttataaaagtttattcttaaatgaacaatggtttccaagacaacacttcattctagctataggtggcaacagatattgtggcaggggatccagatgtttaaacaggaatgcagctaagagtcatcattgccgcaggcataaggaacaacttgctttttgccagatttcttaattccatctgtggccaggaggcctctccccacagccttcacttttagctcggcgagtttcttctgcttctccttggatgccttatcttcctcttccatctccttggcttgcttcttagactgcttcaagggctgctgcttgccccttcacggcccgacgtggctcctgccgccccttccccagctgtatatatattaataaattttcaggaggtgaacattctcagaatgactttcccagaaccccagtagtcgccattcctgggcctcccgggccaccccctcctccatttgaaggggagctgctttggggggtggaatctgtggtatcagggccctgatctcctgcaccccgtcttctcagtggctgacggcctgtctgctcctgactgtgctgggtagacctgaggcatgggaaaagctctggtcatctgtgcatggtgagggtgggtggggtggcgggagagccatctggaggggcccagtacctgcccccctaatccaggaaggacattgtcataccacaaaaaggccttcaaaataaattgcttctttatttccttcttattcttttggtagcaaaaacaacccttgtaacttgaaatatgtcagatgctgagatgtggggtggtcctagacctttcccccttttgttatacttttctggaatctgagttggagtaagtcttgctgtttccagagggtgctctctttttcctgttggaggtccctgtctcctccctgccccccacccttctctctcacagcagaattcatttggaaagattgatagagattttaatgctttggagacagtccctaggaatttttcttaatgttggagtcagattgacatgtgtgtatgtagaaggataatcagggctaaacagtcttttctttctgtaatttatgttcagagacactttttcttgttttcttacatgcaaactgcctttgacactttgatctctgacctcacagaatgccttaattttagtttagtttgctgtgaatgcaatctttggctcttctaggaattccccaagatcactccttaaatagtttatgacacttaaaaaaaaaaaaaggcaataagctggacatgaaatacagaaggtccatcctcataagagtagtgtgcaccatgacaaacacccgcctccctttacagtccctctaacccatacatacagtaaaacacggaaagccctggggctttgccaaatccataaactaaaagataactcatttaccagctaattggatggtaagcgattcaagtttggaagctatcagaatgtagttggaaataaaaataaaaacttagtggaatggagtgattatccactgaatgatagctttgtttagcttcttgcttgacatgattttagtctatcgagatgtgctagaagcacagaacagcacagaatg

SEQ ID NO: 31402 - DNA, 1050 bp, Bovine  19866880926753
  misc_feature (1)..(1): n is a, c, g, or t
ncttatggttaccaggggataagagggtaaaaagacaaattgggagattgaaattgacacaaacatactactatataagaaaacagataactactaaggacttaactacattgcacagggaaattttactcagtactctgtaatgagttatatgggaaaaaaattttaaaaagagtagataaatgtatatgtatcactgattcactttgctgtatacctgaaactaacataacattgtgaatcaactatattccaataaaaatttaaaacaacaaccactcttgttaaatgaaatctctctagtccaaggaatcgaaaactacaggaagggccaaagtttcatcaaacagacaggggcaccagcagagccagagtccactctgtgagacttcacctgcctagcacatgtcctgccaggccactgtgcagaagtggcccagccctcccactatcccagggcccctcattgggggaaatgcctgcttcctcctcccgggatagagcctggcagaggaaggtgaggtgagcaggaagcagaagtgagcagtacagacaaaaggacttcgatgagggttgttaaaagaaaaaaaaaaaaaaaccagaatcctttgaaatgacaggctgagaccttcacaagcacctctccctccaacatccgtcagatcagttcccccaaacctttttgtttcaactccaagtattgtttcaggaccaggaaaagcccagaaatctttcataagcctctctgatcacttcctcagaccttctatggcataacaccaggagcctgtcaccctaacaccggacctgccctcttgagctaatcccagagaacaaacttcctgaggccagagttgggccagcccacaccctggtgggggcgggagactgggtttcatgggctgagatgaaagcagaggggcacccaagggcaacgctgcaaatgcatggagactttaaaagaagctggtggctgcaatgctttttttttaattgaagtatagttgatttacgttagggtggtttcagggataaagtggattcagttaa

SEQ ID NO: 31403 - DNA, 1160 bp, Bovine  19866881043795
  misc_feature (1)..(1): n is a, c, g, or t
ncagttgctttccctcagactttgatctctgcagatgttcatttggaactggtggaaacttttattctgcattatgtacgctctttcaaaattttattttacagggaggagaacatttgtttctttttttaaagcggagtcgggcagctctttatcgatcttcctgtgttggtcttcgcctctgagaatggtgctttctggccttgccttcttcttttgggaggtttcttgtcctccccgctcagtgaggctcagtaatcttttcagaggagagccacaaaagcacatgcctttgggtcagcagtggtgctgcatcacactgtacctgatgcctttatcagcggttcattacctattacctcgtagtcatggttaaggtgttttatagctggtttgatttttctctcttgattactttctatttattttagggctgcattttatggcccctttccccctcactctacataatctttcaaagtgtttttctcctcttgaaattatttgttaagtatactttgcttctagtttccagcagccaggctttgattacttacagagaggcctgtgtgcagacaggtactatcaggttgggagtctggtgcccagtgctgcaggaacgtccagccactgactccctaggcaaagacagacagcatataggaggtggaaggacccccatgacccaaccacatggtcaataagatgaatgtggttttggagtcacacagacctggtgtgtgtcctggtttgacacatgtgtgtctcagtttctgcatctcttaccttgaaaggtagtcacagaattaagattaagtattatatgatgaaatattcttaaagggccttgcacagagtctgccacacagcaggcactcagcattattattatttggttggatcatatgtaattgccaatttctaatgttcttgacttacaaaaatggcagttacatgtagttcaacatgttattattagccagtggctttctggatgatagcaaaaatagtctatggattggagatgaagtgtccctctattattatgttgttagtgccagaacaggagaataacagctgcttctacatgcttctggcttgtagatagagaatgccgcacacatccatggcactttggcccagagcctgagtccttgccc

SEQ ID NO: 31404 - DNA, 1103 bp, Bovine  19866881059816
  misc_feature (1)..(1): n is a, c, g, or t
nttcccttaggaatactccggtatacacatgtgcacacagatacacacacgtgacaccgtgggggcaacagatgaaaccagatttgctggatgcaggtgactaccgaagctgggtgatgggctcacaggggaacgcgacagtctcttccctagttttgtgtatggcctgtgtgtgtgtgtgcgcatgtttttaaatttcgaagcaaagactttttaaaaataaggaagcagagtggggtatgtaaagaaaccagattcctacctcataaactggtccaatttcataatctgtgaaaaatccgatggagggcttagctagaaacactggagtatcagcacaactgtgggaggggaagggagggcgagagaggctgttagtttcatccctgaaagtgattcatggaaaataaatacattcaagccattaaagagattggcgactcatcatcctttgggttttattgttggcaaagcaggtcacaaaacaattttacagcaagactgaatctttgtgaagatatatatagctacacatagcataaggaaaactctgtaagcttaaacaccaatatgttttttttaatttattttacttttacaaacccttgtgttgagggctgactttcaatagatcgcagcgaggagctgctctgctacatacaaaatcccgaacaccaatatgttaattgcatgttttatataggtgctatttttttctcagcaaatcttttcatttttggtttttctcttttctttttggctgcaccaattagcctctgggatctcagttcctcaaatagggatcaaatacagcccccctgaattaggagcacagagtcttactggaccaccagtgaagtctaagcaaatattttctgttttttttttttttaataaaaacatattatttctctaatgctgctgctgctaagtcgcttcagtcgtgtccaactctgtgtgaccccataggtggcagcccatcaggctccaccatccctgagattctccaggcaagaacactggagtgggtcgccatttccttctccaatgcaggaaaggaaaaggaaaggaagtcgctcagtcatgtccgactcttagcgacc

SEQ ID NO: 31405 - DNA, 1113 bp, Bovine  19866881067818
  misc_feature (1)..(1): n is a, c, g, or t
nccaggacgtgcagtccagctgagtccaaggtcaggcggcatccctcgcagctctcacctcgggtggccgacacgtgcttcccccctcggatgcgcagcagtcgctggatattgtacacgttggtctccacatgcttgagggcagaggccaggcctcccttcctgtagctgaggagagcacagggtcccacgtgagaccacagactgccactcgggcagtgagtgcagacacaaacatgggcacgtgcacatgtggggacacacatgtgcctaacatgtatgtgcaagtagatatgaacacgtgtgtgcaagcatatgggggcaggactgtgcatgtgcttatccgtgtatagatatgtagacacacgcatgtgcatatccatgtatgcatgtgggtatgtgtatctatatccttgtgagtatagatgtgtatgcatggaattcacgtaactgtgtatgtgtgtgtaggtggacatgaatactcactgatgtgtgcccaccggtaggtggacatatatgggctggcatgttttctgcatgtgcatgtatacatgtgtgcatgcatttatgtacacactatttacatgtatttgattcaacagaatgatcgaatactggcagtttcctatggttcaatgcatttggtaattaaaaacatgtttgaagcaatttacaacaaaagacatatttatactgggcatggtaacacaaaagcgaactcaaaacaaaactgggatccactcctgggtatacacccaagagaaatgaaaaacaaatgtccacacaaagatttatgtacagtactggatgtgagtaaacttactgcagtaatcacttcacaatacctgcaagtaaaaccattgtgctgtacgccttacactgatagagtcctgtatatctcagtaaaaatgggggcaaaaactagcccaaacctgtatgccaatgttcacaacagtattacctgtaacagctaaaaagtagaaacaagccaaatatccattaagtggtgaaaacaaataaaatgtggtataagcacacatggcattgtctaattctatttaagtaaaatgtccagaagagagaaatctaaacggatggagggaagggagtatg

SEQ ID NO: 31406 - DNA, 946 bp, Bovine  19866881071383
  misc_feature (1)..(1): n is a, c, g, or t
nctcaagaaaaggtcagaaaagcacaaagccaggactctggggatgtcccaaggccacacctgtgggcagccccgaagccctgctcgactcggatcctgagccctgggccccaaacctcggggaccctccagaagccaaagcagacccacgacctgctttctgtgctttcctctgcagggtccgagtctctgagaatacaagtcaggagaagacgcacctctcctccagctctccgtcctggaaggctcctacccgtgctggcttcttgggaggaaagagaagagacttgccccccaacggagtgttaggagggaaaaagcgagggtttctcaggaagcggttccgactctccatcctggcaagctgaagccgctccaactgcctctggggcacccgtaaatggttcatccagtttttatttttcggtaaacctgttttctttgaaatgcgagaaaaggatagagtcaatgagaggccgagggggcatgtgcgttgacatcttgctgatcccgagaccccagatggccaaggacaccctcctgttttgctgtggcttcattatgacgatgtttgtcacctggaaccccttccccttcatcatgaccctgccccccctcccccatcaccacaaactggctttaaactcaccttgatggctgctctggatctgagcttggccttaaaagacgagtcccacgtgaggctgtccatagtatagtctgtctcctctgcagactgagaggacatcttcctgcacgcgggcttcttggtcagctccttctttgggatggaacgtttctcagaactaaacgtcggttttgaatatccagggacagagacacctgtggcaccaggaaaaacatgaagttaccagacccagggggaagaggtgacccatccaagatgactaaatgaaattaccaaaggcagcgctagcttcttttt

SEQ ID NO: 31407 - DNA, 1344 bp, Bovine  19866881075695
  misc_feature (1)..(1): n is a, c, g, or t
ntttccttcaccgccaggtatggccccccaacagcctggctggcgctgccccccagagccctgggccagtacccctcctgatttgagccccggcttcccacaggagctgtgagctgtacgagtccacgctggtggtggaaggcgtgctcggggagaagccgtgtaccctgcggctccggggccgcggctcatatgacgagagacatgcttcaccccagcaccagctctgaggctctgccctcagcccccagtcccggaaataaacgtggcccggagctctggagcggtttactgggcatgggcctctgctgggggacctctgaacggctcctgggatggagggacccctccaggcctgcgccttgtcctcagggctcatccgagggtgggtccgccaggcggagaccagggcacttagtgttcagatggagcagaggcaggaccagcctagtgagaactggccctgcggaagaaccacaggcactgaggtaagaccgcgcgtttactgtgtctgcggcactccccctccacagcgtctgcccccagggaccacacggcggcctcgtgggctgggtgtgcctccgcacccgcccctgtgctggggcatctgttcgtgttttgtgtgctcacagcagctcgggtgtcttgacttgctatccctcctgtggtgtggcactgctgcgggagctgcacctctgccctggccaccgtcagtttccggggtattcaaagacggcggcggctcccatgccagtcccgatgcacatggacaccaccccgtaggccctggggaaggagacacacaggtggggtggaggctcggccaccaagctctcgctgggaaggctgagctgggtgcaccagggcccagaggacgccagacctcggcgtgtgggccccagcctgccccccaggcgcgcacacagggtgacagatgcctactgcaggccaggatcccccgtctcctcagcttggagcatgtgggggtacgtacacctccccctgatgcccccacggggccagcctcacctcttcccgcggcgcttcagctcgttgagcagcgtgataacctgtcgagcccccgtgcagcccagcgggtggcccaaggccactgcaccccccagagggttcaccttctcaagggggagtttcagcttctccacacagtacacagcctgggggggaggtggagcatcagctgtggacccctctctggtcccctttgcccctcgccccctggctccaactgggggccccaggccacactgcaaaacaaaggctcacctgactagcaaaggcctcgttgatctcaaagatgtccacgtatccacggtcagccctgca

SEQ ID NO: 31408 - DNA, 1666 bp, Bovine  19866881127645
  misc_feature (1)..(1): n is a, c, g, or t
nctgtgcagaaaaactgagtctctcctctaaggagaaggattgctaggaggtgatgtctggatgcttaatgtagcctcacacctgctggcaagaagacataaacttaactgggcgttgtctctctcccacccccttgaatcaattccttccataggtctcagagtcaaactgactcctggagaaaccgtccgaacgggggtccaaatgggccagctcaccccctctgccccgtggcctctggccaggaggtgcccccaccagtggcaacatccttccctggatgtgaggaccagaattcacacagagatcaaggatgggaccagggggcgcagggggatcagaagactcacctcaaagggcccctgaaacccccattagccaagaaatgaacacccatgagagaagaggggcccaaacagcaatacccacctcggtgaagaagcccgctatcccggcctggcaggagccgtgctcctctccgtacttcttcttgtactctagaggggcggggagggagagaagcagaccacagcctcgtcagtgtgtgccaggcgtgtgtggagcagcccggcgcgctggccacggccccgcgtgcggctgtgggcagggcctagggacgccgtgcagactggggcgcagaaggaaggtctcaggaatccaccagacctcaaaaatccaggctccggggccatcaggtagtgaggctgccaagtgccccgacggacttcctttgtatgtgggaaaggaggagtggcagccaccataattaagtgggaggctggtgacaattacttcattcagcccagaaaggatggggagccccaggaggaaggaagagctgaaaacatgacccagaaacagaatgatgtggccatcgcagtgtggagtcccctgggagacaacgaagcctcccaaaaagacactacttccagctggaggcaacacgccttcccgccctcagagcccaggcgctgcaggaagagggcatcctgctggaccggccccagcgcacggtgacagcatcactctgaactcctcgtgtggaaggaaaaggggagacctctccaggccagaagaaaacacacgaatgggttctcttcctccgccatttcctcaactcccagtactccaacccaacaaacgggaactctgttgctactgtttcatatttcccttggcattttaagtttagcaggttctgggcactgtaccagctgtactcacatatcatttcatcaatccctcatccctgggaacgcatagggccatttgtaaacaagtgaaagccccagaggctcagagcggttaagtgactcctccgagggcacacagctagtaaatggcaaagccagattctacccaagtgtggcagactgggaaatccctcattctttcacctctgtgactgatcaaaggttttgcaaagtgagtggttataccaaacccagaaggtgactagccatttgaaataatgacaggggtaaagacatggaaatggaatgatgtccagcttaagtgattaattacctgtgaaactgacttggctggacatagactcagggcggcccccgggcaccttcaggtctaagctaccctgtaaaacaacccagtgacccccttccccatgtcactgccctgcctccccaggctcctgacaagtctctg

SEQ ID NO: 31409 - DNA, 1123 bp, Bovine  19866881189559
  misc_feature (1)..(1): n is a, c, g, or t
nccttaactgcctttgtcccctatgcaacccccctacccaccttgattgtttccagcttgtctgtcctgggattccaggcccacacaacacagaaacacactgatccacactgattttaacttttttgtgccatggaccactttagcagtcagatgaagcctgtggaccccttttcaggatcaagtttttaaatgtataaagtaaaatacataagaattcgaaggaagcaatttatattgagatgtggttctatccataggtcctcgaggagtccttggccctctggttaaaaaccattgtgtggtttctctaaaacagaggcttccccttaccctcagctcccttcactgcaaatgaagaacaacttgtctgtgcccatattccagctcaccttcactaacacacgttcccatgctttattattctccaaggtgagaccttaggcaagtcactctgcacttcagtttatcattattattgccatgcttgtctgtactaataactggctttgcgagtgactcactgtcagtgctggtgactggagctgcagtgaggcaaatgaaggaactattcagaggcagcgagtaaaagagaggagtgagtcaggcctctgggtgatgtcctgaccttggcacacaggaggggctcaataaataattgctgggtgaatgaaagtggggtggtaacttacatgaaagatcccactgtaccaagcacactggcagcacagtttcgtatagagttggagtcctcacctatttatcaaagcaaacctgtgttaatggattcatttttaagatcggcattttttcaagaattccattcgcatttggcatcttggagattattccacttcaggtagagaaactccctcagaaggaaacaggcctacttgggattcacatgtgaagcaacggcccactcagtcacaatggattcgttgagtgactgaggtaaaatatttggcgggctccggtgtccggccgagctccatcctcaactctgcctggcctggccccacccggctgtccgctagaccctgcagcccaggccgccgccgggcccgggcttcccttctcggctcaatctcgcccagcccttctggttctccgccaggtctcc

SEQ ID NO: 31410 - DNA, 1619 bp, Bovine  19866881202360
  misc_feature (1)..(1): n is a, c, g, or t
nactttctgaagcctgcagctgtggccaggtccttcgtcctcacacccttcattcctgtgcttaagcacatgttttcaaagcaccctctcccccacctcgggctctgctcatgtgcgtggttgcagcctgttatataactgccaccttaccaaaaccaaaatgctgaactgctgtagagctgttaaattatgcaaggcttgaccttattgctaggaaatacctagcatattttaattgtcttggagggcccaggcagcattttgaagagcaattactacattcttagtcattcctctaatctatgctcatgcaacaaggggcaactgataactcttggactgataacggtggagagcagtgagtctcattatttcatcacagttttcgtgagataattataataaccgcagtcccttactgaacacttactatgtgccaaatgctgtttcaagagcttttcatgcattaatttgttaccttcatcacctatcctgtggggtaggaattctttttatttttttgtaatacaattataattaactttatagtaatttatactctcactctatagctgaggaaacagcagcaaagggatgtcaaaggtcacgtggctagaaattgtagatacaaggcacagacccaggcaggcggcgtgcccagagcctggccctcatcaccgcgcagacggctcctcctcctgccagcctggcccggctgcatgtgccggggcttggagagcctgggcatacgcttgggtttggtttacatggatgccttgtgacacagacagttggcaggccccagagcccgggcatccacgctacagaaggtgctcagaaacaccctgggccagggggatgcttcccaaagaattccactacactcaacatttgccaaggtattgcctccaaggactttgaaaaataacttggctcctgaggccaaatggctgtgcacatcaggaagacaggcgcttgggcccaggccagtttggggcctgagaaggtgaacgggtcacagcaccagactgctgctgtcacgttctagacagggtggctacccaagcctactctcgagatgggaagcttcgggagagcttaacagtgtccacagggaaatgtcagagaacttaacaaagaaagcaaaaccaaagacaagaaagagctctgtttctcaaagggtgcgctgagggctctctacattaggatcagccagagatcctgatgtagatcctgattttgtttatttggttttaatgcagatactccgaggcctatcctgtacctactgaatcagggtctccccctatcaggcgtagcagtctggattctgagcagtctgatatattctcatcactgatatccactgctttgcgtctctggggcttcatgtccaggcatcagagaaaagctttatttagaaagcagtatttaattcagtgaggagtgttcaggtctgagaatcagggttccagtctcagctccatgaacaacttgctggttgactttcgggggcttgtctcttggcctcccttgactcttaataagatcaggaaccaaggttcctcccagctctaaatcctgtgcttccttctaagtatatcagagtgtacttgtca

SEQ ID NO: 31411 - DNA, 900 bp, Bovine  19866881249508
  misc_feature (1)..(1): n is a, c, g, or t
nggtctgtgttacgtggtgctctcaggaccaggacgcgggcagaggagatggcagactggtgcatccagggctcctgagtgtgtgctctgataggtctgggcttatctacgtgtggagacccctgtgcagaaggtgtgctggacggtgggtgtgtgtgggatggtgtgtggaatggtggctgtgtgtgggatggtgtatatgtgctgaatggtgtgtgtgtgatgttgggtgtgggactgtgggtgtgtgggacagtgggtgtgggtgtgtgtgcgcgcgtgcgctggatggagtcttgtctgtctgtctggggagttggcccctgagtgcgtagggcgtggcggggcctggatactaccgatgtctgtgtctgagtacagccctgggagggtactctgttgccatgctgtctgtacatacatgtgcgggaacgtgagaggaaggtgactcccagcccaggagtgtgtgccccccccaggcggggaccgcagatgctgccactgaccagcatgttctcctgtgggtggagcaccagctgcttgcccctcgctgctatctcctcaccctcctgcttccagccaagggcccggtggctgcggctcgccccgtcttgagaaatggagaagggcttggagaccaggagccagaagtagtgagggatttccgtggtgttggtcagcttcaggtggcgggtggtcaccagctcactcagcacctggcaaccgcaggaagggggcactcagactgtgaggctctgcccccagagggctggtggggggcacccgggtgacgcgggagggcagggcggctgcacactcaccccggcgcagggctgctcagggatgaggtcgctggcctgctgccggaacaccatgctgccaccgtagtcccagtccacg

SEQ ID NO: 31412 - DNA, 2375 bp, Bovine  19866881272461
  misc_feature (1)..(1): n is a, c, g, or t
natcacccaccctcttgggcctcagtttcctcccctcttcccagccttgtcacctcttgttgctgcggtagggcgcccggccccccagagcctcccagaagttgggaggctcctgaccctccagcactatctccatatccttcctgcagatgatggtgaccaccgtccgcgccatctcacgctggtcaccgctgcagccctgcaaggcaggaagctgggtcaggccctgcagcgggagagggcctcacctctagcccctcagcccccgctaatgggggcctgggagcgggagtcacgtggggcctgggctcgcggcccagcgtgaacaagcgtctcccttcctccctgccccgcccccgcccgcccccggcttctgtctcctcaggcgatcaaggtcacagggaccctctccaggtcggagcacaggatggagacctctagacttgcagatcattcaggttttacgctgaagatcagctgaagatccccaagacacttggggagggacctggtccctgaacgaggccggaaggagaggaggtggccccggcctggcctggctctgacctgtggacgcccctgtccacctgtcacgttataacttcccccaggttccagaaagcacaggtggctctccgcagcctccctcctggcctgtctgaggctgggcttgcagtcagcctctgctgaggagtggacttccctggcctggtgcccctgccccgggcgtgggctacctttccaaaccagaggtagcagaggttggcttgtcaccagcaggaagacgtcgctggagttgagggctgaggcgcgggctggcacctccatggtccgggtgttgtagctgtcggtgccttggatgtggaagaggctcacggcgggtgctggctgccccttcctgctgtgcctggggtgcccctatgagaggactgggcctcaggctgaggtaaggggtcctgggctgccccctctcccagggcgggggctgtactgcatcagcacccagggccccctcttaaagctacctctattttctgttctctgtgagtgtgtagtgggaaaagccccttaatctggaatagggcactaggccctttctaaatggatccctcaccccatctcggaggggtcagagcaagggtcccccaggctttaaaggtggagagtggagagcagctgggtctgtgtgtgaccccagacaaggccccggctccccttctgttcagcttcctcactgcgcccctgttctgtggttggctctggggatgggggaggaaactggggcaggccggggtcaccctcggagcgcctgggcctcagagaaacaccaggaagctgaggggcggtaggctggcccctggcctgcagagaaggtgctcagcctgggcatggaaaggccacaggcacaccgaggactggggaagccgtggcggcggcagcaaggtgagccctacctggaagatcacgagctggccctggaagatggcgaggaagtgggggggctcgctgcccatggtcacgtgctcctgcaccagggctccacggtaccacaggtccagctcctcggcattgcccctcagggcgctgatctcatgtgccgtggcctggaggccctgtgggcgggagcggtgagggcccgcgcaggtcacaggccccgtccttggctcctccgcttcagggcttgagggtgcccgccacccgactcaggccggcgcacctgccacaggtacaggacgtgctggacgaagcccatcctccggtaggtgtacaggacaaggtagcagctgtcagcgcacaactgtccgtggcgcttggggtccacaggctgcctgtgtgaatcctggatacaccatatctggggaacaggggaccgacaggcacgggtggtgcctccacctaaaccagcccacccacctgtccagccaggaagctctccgcagccagaggccggccgcacctgtgcaggcaaggggctccctccgaggtgtgcacccaccccaggctctgtgctccccccacagacccctggggcctacatctgcgccaggctgctcgcagccaggactctgagttggtgtggagcacctgcaacaaacaagtagggaggactccagaggctgccccggctgcttcaggccaccccagcctgagcccaccagccacagccgagcaagggccagacaggttctgcactgctgattgctgctcaggccaggggagcagaagctgggtggaagcaaggcccaggggttcttggaaaattttccttttctcaagtgtcatttagaaaagcaaagcctgttcaaagactgaaaaggaaacagtctgtcacacttagcatgatttctttttcctgtggggagccaagccaggga

SEQ ID NO: 31413 - DNA, 1305 bp, Bovine  19866881336381
  misc_feature (1)..(1): n is a, c, g, or t
ncccccatccactccataactccaagcccactccggaccacatactgaccagccccacttctgatcccagaactgctaccatcctggatcagggtggcttcaagatctacgtgtggcagggacgccgggccagcctccaggagagaggggctgccttcaggagggctctggtgaggctgggggccctgtctcagagggtcgttgtgccaccctggggtctgaggatgggggacatctgtgttctggggtctaaagggaggggtagtcctgccctggagccaggagggggatacctcgtgcccttggagccctgtctgatggaggagaatataacccggtcccggggtccgagcctggagacccactgccctatctgagggaggagacacactctgaccacagatcccaggggaacacacggcccctctctagggtaccacaggcttgtggtcttgaggtacaaggtcttgtaccttgaggtctgaggattttccagcactgggcccaccttccttttccaggaagggaggcagggttctgcctggggtctgaggagtggtcatagcccgcccttccggaggcccggagtaaggggaacctgcgtgtccttggggacctcggagaaatcggtagtgtcagagccagctccttatatgggtcacgagctcagttaattaatgctgctcagtgcacagctggccccgcagctcccgcggggtagagtggagcagtgggcccctgggccacacgcctcacccaactcccgccccagaacttcatccaggccaagggctacccgagctacaccagcgtggaggtgatggacgacggcgccgagtcggccgggttcaagcagctcttccgatcgtggtctgggcagcagcgcaagaacaagaaccttagtgggatgggtgagagggcgtggccagagagcggggcggggctccgagctgcagtgggcggggcagggcccagaagagtgaggggtgtggctggagggggctttttgtgtgatgggcggggcaagacaccctctgtcccaccctcaggtaaactgcttcaggtgaagctagacgtgggcaagctgcacagccagcctgagctagccgcccagctcaggatggtggacgacgcttctgggagcgtgcaggtgaggagcactggcttggctgggtgaagatgtcttcaggtgaaccatgtggctgctaaagtgtcgcaggtatgccctagtgcacgtctgcacacaatcagggacctcgggggcatgtgtacacatacccacaccgcccctgagccagctcatac

SEQ ID NO: 31414 - DNA, 1240 bp, Bovine  19866881348395
  misc_feature (1)..(1): n is a, c, g, or t
ngaactgattttattgtgttctgctttctccggtgtctcttgtcaacttaatagtagcctcaagtaaaatgcaacccttagatgtttatagtcatcttggccgggccattaagatgatgaatgaacttggtgcttgcccttgtaagagagccctgagggtggatattgatactcagaaaataataagtcttttctgtccctttcctgtttttaatccagtgccctaagccccctggtgctttaccttgtactcctgcttagcgccagggagaaaaaccttacctggatcccagcccatttgaggctctaatacagagcaagctctttctctcacactgttggtctttgccatcctgcttgtcagaggcaaatccctagagcctcttggtgtttctgacttgtttctgttggccctgaacttcctcttggaaaggatgagcatgggtggtggggagcagggaccaagccaggtttgcaagtcctcttacctggggccattgcactagcatttttctggccctaccaccagagccatcctaacctacagtgaagctgtgcttgggaggaaggctgggccttttctgtcacagctggcagtgaggaagcaggggagaaactcggacgcctattttaaatcacactgtggcctcagtgttccatggtagggctcagctttcacatatgtgaaaagctacatttgtgtattcactgcattgggaaggaaggctacgttttgcttgagaaatgtcaacagagctgtagctacgacaaggatctttcacgaaagaggttttccagagctgcagacttgggcagacctggtgggagttggtatgggcgggggcggggcgggggggtagtttagaaaacatatgttaaacctctgtaatttttttttttcttaatgaactgcacaacggcaatttaataatttcctcttttaagaggaaagggggagtcttggattttaaatctttttttataaaggagcacagcacctcttaaaaagaaagccatgaaattaatccatctgctaaatccaacgaaagaaaactatttaaaaaaaaaaatcaagaagaacttaggtgtttcagcctgggtttccctgaagcagatcccgaggtaaggattgtatcaagtggcttaagagggatgtgctactcagggagcgcgtgaggagtggggggtggaggccagggaagggtgccatctcggacaacgtcctagagaggctggcctg

SEQ ID NO: 31415 - DNA, 701 bp, Bovine  19866881406144
  misc_feature (1)..(1): n is a, c, g, or t
nccgtagtcccagtccacgctcagcctgccggcgacagccgggacgggcctctgggcctcacctgcccctggccggccccgccctcccgtgcccacctcttgttcccaaggcctgggttggtccccagcagcgcccaaggaggctgctccccaccacgggcaggaggcgggctaggcggccctgcggactcactgcgccggcctgacgtagccatgcaggtccagtctcatgggtcccatggcaaagtcctgcaggcggcgcctccggcccggaagctccctctccacctaccaagctcaggccccatcactggagtcctgagaggtgaggtggggtggggtggggttgggtggggggaagccctccccaggcccagagtgctcacctcatcgtccaagctcaagaagcccagggcatagccaacacactccaccttgtgcaggacgccagggcccagcaccacgggtgtgaaggagatgtggatggtgctgttgccccccgcagggaccacctggcagacacagcagcctcagcgctggacaaccgccccccctccccagccttgcttgggggacgctccccgaagctcccagccccacccactcaccacctgcttggggctgatggagaacaggtggtcagagggcaccccctcatgccctcgcaggatgactgagatatcttctggggggcgccagca

SEQ ID NO: 31416 - DNA, 637 bp, Bovine  19866881520438
  misc_feature (1)..(1): n is a, c, g, or t
nctaggaaatccactaaggggtttcacagcaccctatgggtcccatggggcatagtttgaaaacctctggccatggaccatgcctgaaggctggacctcagaagatctaggtccaaaacctgagttctggtctgtgtgattgttggcaaatgacttaacctgagtctcattttccatatccagacaaagaactcatctcagagttgctgtaaggctggttttaaagttccttaagtcttactctttcctagtcacatctcacttgcgtgttgtgtgccattgcatctcagtcatttcatgactcagcatccacttttctttagtatttggccttgttgatgctactacgtctgcctttcagattttctgccattattgtctcctagagaatggaccagggtaacagttggctttgggctacaccgtgactacctctgaagggagtccaggctcatgatcttttcttgggatggaccactcatccagatttcttttcattttcaggtgggccaagagaagggaaactgttctttccagaaaaacccaaccccctgcatcatccctcaagaacaagaaaatatcttccatacaatatttgcttttttcacaaagtcgggaagaaaagtctggtaagaat

SEQ ID NO: 31417 - DNA, 1125 bp, Bovine  19866881615585
  misc_feature (1)..(1): n is a, c, g, or t
natctggtttgaataattggcttagaaagtccaaggactgtagtcaactcctattttttcagcctgaggtttctatcaaagtgttaaatttacatttcagattccattggctggcaaagggaaaacctttgcaacccaccaagtacaaagttatacatttctcccagtagtatgagtctaatcaagagtgatggttctcgtccaaccacttcatataccactgttggtcagtatatactaaaactaaacatatctatgacctagtagttccactcccagctatgtcccaaagagaagtgagtacctgtatcccccaaagacatggacaggtatgttcacagtaatctgggaacgatccaaatgtccatcgccaggagaaagtgtaaacagttgcagtgtacccatatactggattattacaagcaataaaaactgccatcccaacaacatgaataaatctcatggatataatattgagtgaaaggagctagagataaaagacagatggtgttttacttacatgaagttcagaaatagcaactctgtcaatggcactggaggccaggacagcagttaattttggaggaatattgataggcaggagcatgagggactctgcttaggtgcaggacatggtcttcatcttgatctgttatgaatgtgtataaagatatgtcaagatggatcctttggatttattctgtttactctatgtaagctacaccttaactttttaaaaagtgcaggtgttaaaggtggaatcagatgcttttccaaagcctcctttctccacatctttggttatatctcttcagttccttattacagccatggcacatctcactaacatttccctcctcttttttttggcggtagaattagtaggactagtggccttttggaagtttgggatatttttacttacataatgctgatgatcaactgttatttaacagctttcagaactgttagatgtattgatatctagtagtttgacaaatgcagctctgtatctggctgaaatttttaccccatatgtgaaacatcatgaatgtatattcacacattttgaatcctataacacaaaagaattcttcctttgtaacttggaacttaggttcctag

SEQ ID NO: 31418 - DNA, 838 bp, Bovine  19866881822818
  misc_feature (1)..(1): n is a, c, g, or t
ncacgactgagcgactgaacctgaacctgaacctgaaggcaatagtagtaataatgaaagtatataatattacataataataatgaaataagactaatggcagtgcggttggaggaaatgaagatgctcttattgagagagattgattttagccgtgagtgcagttattcctcgaacagcttggtccttctccccacctcccaggctgggagatcccctgaagacagcaaggactatattataaaggcatgtgacccaatgcgggacatggagactgcttgataaataattattaagtgggggcgtgaacaaaggaatgcaagacgtaacagaaaacatacgtgcctcatgcataagaattattctacaggagctgtttcccatttaagacaaaataagaaacacttgttgagtggatggatgggcttcctccagggcagcagggggcgggcacccgtgtgggagctggcctctgcctgtggagatagagtccatcttctctgagtcagtgctctgggtgcatggtgggcagggctccagtctgaggactagtagacaaggaggaccataataaaagatattctgacttcaccagcattagaaccccagggaaagcactttttccccttctaactgggtcttcatctcttaacctccaaaatggcagtgaccgtgccagccctcagggctggtgttccagaggctgatatagaatgtttgcctgagcatcaaaatccagatttcctgaccctacttctgctctaaagaatcccactctggaggtgggtcctgcaatctggacccacattaaaattacaacaaatcttcaagaaggatt

SEQ ID NO: 31419 - DNA, 1367 bp, Bovine  19866881844727
  misc_feature (1)..(1): n is a, c, g, or t
naccaatatttcaagtcccacagatttcccaagctgttgcttcttgtcctgcatacaagtttctcaggaggcaggttaggtggtctggtattcccatccctttaagaattttcctcagtttgttgtgatccacatagtcaaaggctttagcataatcaatgaagcagaagtagattttttttttttttctggaattctcttgctttctctgctatctatagaatgctggcagtttgatctctggttcctctgcctcttcaaaacccagcttgtacatctggaagttcttggttcagaactgaagcctagcttgtagattttgagcattactttgctagcatgtgaaatgagcacaattgtccatggggttctccaagcaagactactggaatgagttgccatttcctactctagtgcaccacattttgccagaactgtgacccatctttctttctttctttctttcttttttttttgttatttatataatttaatatgctacaaatgaggaaaataaacagggaacggggatgcaaacaggaaaagtcctgtaaagattcttcattttgattgtattgttttcttgccttcaggggggaagatttcgacttcaaaataaacaaaatatttgagaaggctatttacatctggtgttctagatggtattcttcagctattttctcagcagtccatgtttctggataaagtttatgattactgagaagtgtcaatgcctctaacaattaaaattttgcctttgggaatgttcttaactttcatcatgtcaaactgatgttctttcagcaacctgaactccttaggcttctgatgtgtgccggcatcctaaagaagacaagggatcttgggaatcaacatacacatcttttagtaatgacagcagtttttcatcttttctgtcaatttgtcccttaatttctggatggttgctcatctgctctcgcaggatgttcatggtggaggggtgcctgggagcaggggagggcttcattcctccctgttctgctcggttcactaggttgaaattcctgatggtgtgagccactcagcccccatttcttcacaacatgctgccctaagttataccacacgtagctgaacactggcgcaggcgaattcggggacataccggaggatgcgcacgtctggggtcgacccgcgagggagcatgaaaacatgacccatctgttttgagcgaccctgcactgcttggcttatagcttcattgagttacacacgctcctttgctatgacaaggctgtgatccatgaagctaataggctagactctttctaaccaagttgattttgaatcttttagttattcacagcgttcttcatgtaacaagg

SEQ ID NO: 31420 - DNA, 775 bp, Bovine  19866881974142
  misc_feature (1)..(1): n is a, c, g, or t
ntacagtcttctgcagtttatgacctctggatgctcatttgcacgataagctttatggtttatgcatctctttctgatggttgggccagagatacaactttagcaataaaaaccagcccagagcccactctggcgagaggcatgttgtcttttttagcaactgaggttctcgttaggaagcaatatgcttgaactcttaaaccaggacttcctaaatttcactcacacaccatcatcccaatttttgccacatctgcttatcatatcacctgtgataagtactttgtatttttactgcctcactctttctatttaaagactattttaaagagaagaatgtatatcactatcacagatgggaatccaggatcacttgccataaagaggaggtcatcataaaaagaaataatgaaaacaaagtgatgttgaattctgttgcctgctgaaggctctgagcctcaggtctcctctgttttgataaaagggagataaacaagtgatagagacattgcagcactactggagacttccacctgcaaaaggttaggatagaaagagcattgaacaggtagtagctttctcactgtcagtcaacgctgtttagcgctgtgtccacacatcacctaaaagcatctcaggtgctgccagtagtgaccatcctctgatttggggagcaccttctcaagcaaatggttttcactgtattcacatcaggcaggtgtgggaatgggggaggactacttgggtggggcttatagagccaggctccaccaca

SEQ ID NO: 31421 - DNA, 1621 bp, Bovine  19866880358309
  misc_feature (1)..(1): n is a, c, g, or t
nagtcgtgtccgactctttgcgacccatggactgcagcacaccaggcttccctgtcctcaccaactcccggagcttgctcaaactcatgtctattgagtcggtaattccatccaactatctcatcctctgtcatccccttctcctacctgcaatctttcccagcatcagggtgttttccagtgagtcaggtcttcacatcaggtggccaaaggattggagcttcagcatcagtccttccaatgaatattcaggactgatttcctttagcatgaggttgttacttcctacctggtaggacaggaactgatgagatctatggtgtctcctttagggaacagactactttgtgtgtatccattctggagagattgctgcaagctttggagcccgttcatgtggcccggaacctcagggttgacctgcagagaggactgactcaccctaatgattctgtaaaaatcctcactctgtcccaggtatgaatatttcactagcacgtaatggaatcaacatttagtgaccatctgccctgggccaggctctgtgctgggtgccagaggcagagaggtgaagaaaatgcatgctctctctgtctgtaagaattgtctagtctagtgtgtgtagctgattataaatggggaatgcaagctgaagaggttccagtaagcaccatctgaatcagtttttcgtcaaatatggagttgcttttgtcagacgttttaccataagatgttagtatatggtaaaatgcctgatacaaaagctattaaataaagcctgtttctctcctccaaggagccccaagtcttaaaaaagagattgccatggtaagtcttactacagtggcatgaatgaagtactattataaaggtcactattccaacaaactgacaggtaactcttaccagcctagtaaccaaacttgctgccgtttgggtgaagagctgctgctgaggattatcgtgaagggacagaagctgagcagttagttatccaagagatgttcagttactgtttgttcttttttcctctaaagtatttattcaggaaaaggggaaggtatcaagttacccattaaccatttccttgcagacactctggctttacctatttaagtttcatttaatccttattatgatcctgcagctaagtgttgcattcctatttgacagacaaaaagttaggctcaaagaagttatttaatctgctctctcgattaaccactgaaagccgacagaactcggatttgtactgtgttcactcactgaggcgtctcaaacctcaactcgcctgttttgcttttttctttcaaagatgtgactgtgccatctgtgtgtttgactttaatgaatctgagtcatttggaatttttaatgactcatggctatagtcagtaactcctaaaataactgtacactaaggaaatttgactgtcatgtgtttccatgttgcccagccttggaagagtatttctgattgtttttttcctttcaggttggaaggattgttgaaaattctgatgctgttactgagattctaaataatgctgaattactgaaacaaattgtttattgtattggtggagagaatctgtcagtagctaaaacggtgagtcagcta

SEQ ID NO: 31422 - DNA, 1351 bp, Bovine  19866880358500
  misc_feature (1)..(1): n is a, c, g, or t
nggagaccagggttcaatccctgggtcgggaagatccgctggagaaggaaatggcaatccactccagcactcttgcctggaaaatcccatggacggaggagcctgataggctgcagtccatggggtggcaaagagtcggacacaactgagcgacttcactttcaggtttccattactgccctcttgccctcctgggatttctgttaaaatagacaaggctggaatttcactccccttgttggcgtcagcattaggacttcaaactatggatcctgacgtcccatcccggctaagggcagccaccagaggaccctggaacctgtgggctctccctggagccctcccatgactcgaccttcccaggcccccgtgctgggaactcactgaacctgagtgtcagtgatcactcagcctcagaccccatcctacccgactgcaccaaggctttgtaaccggatgtgactctcgggatgctgaatgggaaatacaacgtgtgcgtgctcaatcgtgtgcgactctgagaccccatggactgtcccctgctaggcatctctgtccgtggaattttcccggcaagaatactggagtgggttgccatgtcctgctccaaggatgctgaatgctgaattttagatgtaatagaaatcacaatagaaaacacacgtgtttgcctcaacaggctgtcagttacgatggccaaagacaaggtccagcccaaatttccaactacagtaaatggataagtaaccataaactcacatactagagcagtacacagcagtgaaaataaacaaaacacggctatataacaccaggtgagtacatctctcaaaaaaaataaatacaatagaaactgtaagagataatttttgtctaccaaattcagagagaattttttaaaatactaacactcaatgctaaatagagcagtcttttaaaaagatcactctcctctagggagcatggtataatctttctggagaacaatttgaatgtatctataaaacagcgttaaaaacatgcatagtctttgaccgagtaattatacctctatcagtacataatcagttgataagtatttatgtacaatgatgtttcttacaggacttgttacaaaatgaaaactatacatcctacagtaaggactagttaagtaagttgtagtgcattcaagcgatgaactactgtgttcacatatttaaaaaaaaaaaaagtttctcaagaaaactcttaacggccacacaccaaaataaaagaataaaaagcaaaacagaatacaaaaatgcattttcagggactctcctggtgatcccgcggttaggactgctgtgcttccaatgtagggggcacg

SEQ ID NO: 31423 - DNA, 1084 bp, Bovine  19866880362893
  misc_feature (1)..(1): n is a, c, g, or t
naaatggcaacccattccgtattcttgcctggagaatcccatggacagaggagcctgttgggttacagtccatggggtcgcaaagagtcggacacgactgagcaacttcacttcactcattctttgtccaaataactcttctggagagaaaacacagaggcagagctgctcagggagagttcgcggtaagaagccgggcggcccctctctccccaccacgtccgcctcctgcctcagtccccaggagccacgaggctctgcagagtgttactggagcaccagtatctcctgctctttctgaaagttcttacatcactgagtttctatacctcattaagattttagcgaagttttcctctgtatgtttaaaggtaaccactgacaagctttctcatagtgaagcctcctgataagatggaaatttgatggatgagaaccttctcattctccacctggctggtgataaaacaaactagctgcctggcgaaggaagtgtgagggcctggcttttcatttctaatgtgattctaagattatagggatattttatttttcatataatccacttaaaaaaaaaaacacatctgctgtaagagagcctctgatatgcaaaggcagcgctcagctcggtgctaggaatcttcaagtcaaagagtgtggcccatgtgggtggaaattgaggccgctctgttgatggcgtcatgaaggcttgctggggccactcatcgtgaagggtggtggtctggtgtagggtaagggggtcttcagattttttccccgcgtctttttgtttagaagcaggtaaacagatgtatctgcagattcctgcattaaaacccattatgaacttgcgtgctttcctccagccaactgactcaatttctggaggaaggcctgggaacatgcggttacatgatgcagacagccggccaggcttccgcactgctcatccgagggctttgtttgcgagctcagtttgaaaaaccacttgtttagtgaaaaggacacagttaaacctggttttgaatctggattccaccacttttctcctttggttaaattgctggagctctctgaactgcag

SEQ ID NO: 31424 - DNA, 3886 bp, Bovine  19866880381508
  misc_feature (1)..(1): n is a, c, g, or t
ngatttcctggccttccactggagcctgcctgtttggagaagcccagggcagcgctgcttgcagatggcccacactattgcagtccgtctcgctgcagcggggcagcgctgggctccaggctcacttccaacagtcattaccagtgcgagttagggcaagctagctaacttctaaacctcctgtatcctgcaacgtgagagctacgtgagaatttatatgaggcaccttagcggtcctcaaaggagaaaaggggcatttactgaaacaagttttaagtggtctaggttataaatgttagcacttaaaggggcttagaaaaggtctgcttgaatgtttttattttacacatgaagaatctggtggtgtgggagagatcactctatatggctctgtccataaagagctcagtgaagataccacagtcatactcactgctaactgccctcccaaatttacagaggccagggggcctttcaagtaattttttcttgagccaaaggggtgtgtgtgtgtgtgtgcgcgcgcgcgtgtgtgtgtgttgggggcgtggttataggaacagatgagactaaatggccacgtggggtcacccaaaggacagagtgtagcagggtcactcgaggggcctgagcagcctgacgagacagctctggagtgggccagcccctgacacgggctgagggacacggcggggtctagggtgagaccctctgtcgaggacgaaccgttctcctctcctcggcctggctacacaacaggcgatcagaggtttccttgggagtttgtctcttacagacttgtttctggcataaaatctagtatttcaacacagcactttgggacttgataaaattttatgctgaagaagtgtcatttttctttcaaaaactaacaagtttggtgaacttaacgcatttcaaaagtgtatcttgggggcattttaaaagtgtatcttgaacaaatactttcttcttgtggcaagttctaaatttcaagactagaagaacaatctgatcactagtctgacagttttcacagagccgcgctccttgcacgagcgcggctgagacgcgccccgcgcccggggctgcgggcgcacctgcttcttgagctccgcgtactcctgctgcatctggctgagctcccgcatcaggcgccgggcccgctcgtggttgtcctgcgccacctgctcgatagtcgccatctccttctgcatggagctgttctcctgcttctgctcctagcaagggaggaggagaacgactctggaggtgggcgctgctgcctggcactcgccatctctgagccttcgtttcctgtctggcctccagctataaagggatgatcggccggcctcctgcagcagcggcggcagagctggagcagaaagcctgaaccctgggtgtgccgtgtcagcacagatcaggcgaccctcccctgtctgggagacgtgaacagcagccaccatcacagggttcctgggagggttaaaacctagacatctgcccactcccgtcacagtcctgttgcacgtcactggctgtgcgtggtatcgccctctgggagatacatccggatgcaaagccacattcacactgcagggcgacatgaacccctccaaagggggttagaaaatcctcttctgggacagtacctgtcgctgcctgttggtctggaggcatctgagtgccaccacccacaattcatctcagggataagagcatgacagattgaacctcctagttttaggataatgattaattaaagctgatgctgaccaaaaagggcatgatgagaaaacctgtgagcacagactgcagctggggaagaggctcttcagaagctcgcccgcccccaaacccctgcacccccgctggagaggtgcgcagaggctggctcgccgagggtgctgtctgagcctgtgatcagcgttccagccagacagccaactccgctagggctgagcccagacgcaggcaaaatctcccattagcttcaggcacaaactatgcacaaatgtacccaaaacaacagttgggttagggactgggttgcccggtcatttattttctctacatggaaggcgtcatggcacaagccacccggggtggggcagggggcacaagccgccagggcggggcgggggcactcacgagaagggtcttctcatggaaggcgtcaaggcacaagccgccggggtggggcagggggtacgtcaccgcacaagccaccggggcagggcggggggcacaagccggcggggtggggcgggggcactcacgagaagggtcttctccagctggctgcgctgggtcttgagcgcttccctgaggctggctacctgcttctcagctttcttcctctccgtcaagaactggtttcgcaagaggctgaagtctgccctcatcgagtccgcctctttctgaagagccagcagctcagctgacttttccaacaactgctgctcccgttctgagagctgttgttctgaaacagcatttcaggcagtttagcccgaggccctgggctggctaagggcagactgcacaaggacgagacgctcactcaggcactttcttccaccagccagttgtctaactctcccctgacccacagcggcagcccagaaaaaggttcagagaagggtgccttttgatgtagtttgttattgaaggacctgattccaaagtgacaggcggccaccattttctgagtctttgagactggagagcaccaattctgtgaggtgcaaggaacacggaggagaccactgagatgctatttatttattcacttgcttatttaaacatctattcaagtccttcctccacttttaaaatttttggctgctccatgaggcacgtgggatcttagttccccaagcagggattgaacccgtgccccctgcattggaggtgcagagtcttcatcactgcacagctaaggaagtccctggaacgcttttttataaacctacttttaaataaagggaggtacatagtatttcttcctccatgggaggccgtgcaggaaaagaacagaggatttggaatggcatgagtcttattttctatagaggaacccatttcctcgtatttaatgggaatcgtgcatgcagacacccagtgcatggtgagtacactcaataaacgatgctcatacacaacagtgatatttaacacagatttttctaatccacctgtgtaaagcaacaccctgcccagatatcacttctcacgcctctggcacggtcagactcggcatatttaggtttgtttcaaaatgaaaagggttgggtctgaatcaagagttcccagggaaaaaggaataataatcctttcaaaacccaagtcctcaaagtttccgcaggggacaacaacattttctgagcattattaaaacctgaagtctaagggaaaaaaattcatttactgacgtaagaaccatcttttgcccttgagtcaagttcattaatatacggctcaaaagaataaacagaccgaatggccaacaactgtatcacagaactgttaatattgctttttgtaacaggttgagatgaaatggatcactgctccaaagctcggaattaaggcacttttatagaaagcctttagggcgccttgtggcacttctttgccttaatattccacttccttgaaaaagcgttctcaaagacagtgacacactcaaggacaaacacctgactgtgtcgagatcgaattccatctccataaagagagtctgctccctctgggcccgcctcctcagctttcacaggacccggaggaccgagtgagggcggcccccatgccgctcctgcgtcctgcctgggccacggccgaggccgggcctcctctacgccttgacagtcagcgggtcccc

SEQ ID NO: 31425 - DNA, 4400 bp, Bovine  19866880478667
  misc_feature (1)..(1): n is a, c, g, or t
nccccactgagaagaataaaatatacatggcagggtttatgtgtcggccctaacctccctccccggcctccgctgtgtccacatctccattctctaaatctgcgtctctattcctgcccttgggcttccctggtggctcatctggtaaagaatctgcctgcaatgtgggagacccctgggttgggaagatcccctggagaagggaagggctccccactctagtattgtggcctggagaattccatggggttgcaaagagtcagacacgactgagtgactttcacttacttattcctgccctgcaaatagatagctgctgctgctgctgctaagtcacttcagtcgtgtccgactctgtgtgaccccatagacggcagcccaccaggctcccctgtccctgggacagctagtgggaagcttctgtgtagcacagggagctcagctcagagctctgtgatgactagattgggggggatgggggatggggtgggaacaaggctcaggagagaggggataagtgtatacgtgtcgctgatgcacttcactgggcagcagaaattaacataacactataaagcaattaaattccaataaagtgtgtgtgtgtgtgtatatatatatatatatatatgaatgattaaatgcaaaaaaagaataaaatacccagaagtcagtctaccaaaacaggcaaaagacctgcattctgaaaagtataagatgctaatgagagaaatcagagctgacacagatggaaagatataccatgttcttggattagaagaaccaatatcatcaacatggctatactacctgaggcaatctacagattcaatgcaatccctgtaaaatcaccaatggcatttttcacagaactagaacaaataaaaagttttttaatttgcatggaaacacaaaagaccctgaacagcaagcaaccctgagtataacaacccatgcagctggctcccagcatccgagtttcgtagataaggatacagaggctcagggagatgatgaagtctttctcgatgttagtcggctggtgggcagaagggcagggcttcaaatcccagccgcctgactcggggtcactgtatgccctggtacccgggctcagtgagggcaggagggtgacaggcaggatgacaggcaggcatcagccagccggcacgggctgcccctcactgcaggcagagcggggacacaacagaagccaaagcccaaatgaaggccgcatgtgacccattcttaggactgaacggcgctgcactcagagcccgggaaacaagaggaaggtacacaggctgaacaaaggcctgggggagccagtgaagaagctggtagtttatctgagggtccggggagctgcagggggaactcaggagccagggagcgccagagtgaccagcggtgtgtttcaggacccaagctgagtgggtccttcatgaccgatgccctgcactgagccaggagcagaggacgcagggaagaagaggccacagccccttctcttgagaaagaggggcagaccagtgtctgctccttatcaggctctgcaaggtcatcttgaagggtggatcccaagctccccctgtatatgggactgaactgaggcccacggcggtcacaggagccacagcctaacagcgaagacaacacaaatatggccaaccacagtgcagggctgcaatagctacagcgatcagcactgactaagcccttcattaagtcactaggccatgcactttcccaatgcatgtcattgctgtttagttgctaagtcatatctgactctttgcaaccccctggactgtagcctgccaggttcctctgtccgtgggatttcccaggcaagaacactggagtgggttgccatttctttctccagctccaaatgcatacgtttccccagtctgctagctattaagagctaatgaccctcaatctacaggaatgaggaaacggaagctcagagaagccaagtatcttgcccaaagtcacacagctagtgagggccagagcaccctcattctttgccaccatgtctcgctgccccgcagcaaacgtgcatccacagagcttggtgaggacagaaggggtttgaccaagttgatgaggttcaagctggacctcaaagaggaggatgaaggaaagggcattccctgcccttgacagcatccagggacagtcaagggcatagtgggttcaggacgtctggtaggaaatttggtcagacagaaactgggtcagaacaggaagggccttgaaggccaggctaaggagttgtgactttatcccgaaggcacagggaggcagtcagaggagctgctgggctcacacggtgttgaagggagcactggagatgctttagggacgagagattggaataaaggagggatggcggccacgatattggctgttacggtcatgattttgatgagcccccaaatcctgagcatccaccatgcccaggcactgcacacactcctctcatctttactagaccgggacaggcaggcatgattgtctcctttggacagatggggtcgtagcctgtaaaagggtgcgctcaggagatggtccctcccaggggagcccaattaaagttgcttccatcccacctccccggtcagcttcctcaatgacccatgatggccctgctgccctccccagagatcaggaactgatgggagcttcatcccttccccctggactcctactgtgtcctggcccctctgggctctgggaaggaatcccagaccagacacgaggcactcactgctgaggtcatcaaaagcaaacaaatccatctgaatccccagctggcaccccgccctgagccgtccccacccccagctcatgtcctggactcgaaacaattacttgcaggcacattagcagccttgagctaaatgctgaaatgcgtgtttcctgctcagagggatcggttatcgctgactctgcaagggttgctctaagtgcttgagagctggggaagggggttggctgccctccccccatacagctcagatcccccatatttaaggagcttaccaaggagagggggtcatgcttaaaagcatttttttaaaaacgcaaaacaccagacaatttttgcaaagccacaaatggagagaggggtggccagggaagagaagaggggtctggtaaataggggagtagaaattggagcggcaaatagaatggagacggtggaagaatgccagagccctttctggcctgggattaaggcgtttctggggctctcaggtccaagggaccgcccaagttccactcatgtccataatatttactgagaatctgcctcgagatcaaggtcacacaggtcacgccaggatcaccttgcagcttcgagagtcaactgacattaagtctgaccccttacctcaccttgcaggtcaaagacccagagtcgagtgcagcctccctctgggctccctgaacgtggaatttcgatctctcccagtctgctccggctcccaccgtgtgtttctgcggctgtgattcagcttacaccctacaagtgctgtcgcttttccacatcacctgcaatggacacattctgacttcctctctctcccttatcagcccctgccccacaacatgcaaggcaggcgttgctggaggcatcttggcaagcggcagaattcacagtaatgcactcccagcgcccacatctccatccaaggcactgtcctggtcccggacgccagccggtttccctgcctggtctgacccgcctctctttccagctggtctcaccctacttgccctcttgcgccctgagatctagccactctcacatcttcactttgctgaacacaccacattccctcctgcctcaggccctctgcacacactgctcaccctgtctgcaaggctctctctgttctttccttgcagaggcggagacggtgcctgtgcaggtctcagcacaaatgtcacttattctgtgagagttctcatgactccccaagccaaccatttaccagtacattctattcttgattattcttttgctttgttgcatacatcactgtgtgtgtgtgcgtgtgtgcatgtgtgtgttaaatgtcaaccagatcacaagctgtatgatgatagggatcaaatgtctagcagatggttgataaagttttgttaaagcaaatgtcagttgaattaatgaatgggtgctgtgtataggatacaaaagcagcctaagaggaatggtaagtaactgtcacgttgagagtggcttcagagggacagccacacctaagaagggggtttgcatcagagagcagggctggccttctctggcgtgaacagcagagggtgcagaagggaatggggatgagggaatcacacgggaatagacggggagacgggcaggagag

SEQ ID NO: 31426 - DNA, 1873 bp, Bovine  19866880504097
  misc_feature (1)..(1): n is a, c, g, or t
ncttcccttggttccaggcagactcccaagagggttccctggagtgttcggtgttccttgtctcctgtaaagcactgagagacagaagctgaggcactgctcctttcctcaagtgcagaaaccccaaaggtaacctgagaaggaaccagatggaggaagagaggatgtggtttggatcatgtcaccagcagcacacgtgaaggaaggaagtgaagtcgctcagtcgtgtccaactctctgcgaccccgtggaccgtagcccaccaggctcctctgtccatgggattttccaggcaagaatactagagtgggttgccatttcattctccaggggatctttctgacccaggaatcaaacccaggtctcccacattgcaggcagacgctttaccatctaagccaccagtgaaacccacatcatcagtggccaaagagaagtcatcaccactttcctttctaatatggaaagttcatagctagatgctcacctggccaaggttaagaccagcttagcccagaatttaggagtacacacaggctttggagccagacagacttgggtcaaatcccactcccactgctgactcactgtgtgatcttgggcaaggcatttcatctctcccagtctcagttttctcatcagcaaaatgggtaaaggctgccacctctttgggctagtgtgagaactggcaccattagtggggcttatgctagtatcagggcacatgggaggtaattgctaaatggcaaccacactttgtactgatgatcaagaccctcctttctgctttgagttctaagtctttctagtccttgaaggaaaatctcgtccccctcctccctgaagcctccttggatcatctgacaaggaactggtaccttcacggagtcacatgtccagccagtaactggggagacaaagatgacccagacatgactcctaccttcaagtggcttatgggcctcagcaaaacccaaactccttttgcaccacttctccacaatgagaagggagcaagcaagttgactttttcccaggtacagctttctcatctctgcaatggggatgatatttcccacctgcactggtggtactaaacatggaaatagacaggagcaaggagggaagagaggaaaggagacgggggagaaaagggagggagggaggaggggaggcagagagatgggagggagcaggaagggatgcagagggaggaggaggggaacgtgcgaagacccgactgcccggagataggaactggtgaaggagtgagtgaaccagtgaatgaactctctttcccctgctgtctccaggtcctacaagctgtcctcctctggctttctggttccaggatgcctgtcccagatctttatcattctacctggagagagatttcatttcccaccttttacagcccaattttcgatatgtgaaacctgtttaaatggccgctgctccccaaaacaatgcattggacagagagcccgtgcgttcatccgtttgtgggcgttaataatacatggcaaaaagccgctgctttattttattttgtcctccaagtcaagctctttaaatcaaatatttaggaagggaatatttaccttcacgtcatcgaggaagcatttctggtcttaaaggcacatgagcactgtggcagctatgagatggtctgcacaacagggagtatactttctaagaagccatcagaaaactactagatctcatcaacgaattcagtaagggtgcaggacacaaaatcaatacacagacgtctcttgcatttctgtacactaacaatgaaaaatcacaaagagaaatgaagggaacaacgcctcgtaccaccccactagaagaataaaatatacaggcaggg

SEQ ID NO: 31427 - DNA, 1245 bp, Bovine  19866880540412
  misc_feature (1)..(1): n is a, c, g, or t
nattatgacagtggaaagcatacgttaggagagtcacatggtgggttgggctgaatgcacacacagttgctgcagttgaatgtatgtgcagccactgctctggacgcacagtgtcaggcagcacagagccagcgttgtcccagacactgaaggcaagcaagggattccagcacagcacagaagttcacagggtcacacgttgccatcgcagtacgtcacccactgcgtccacaaatgactggttccagatccccaagaagacctgtatccatgattctcatcacagttttatagccagctatgacccaccctctgacaaccccgtatctagggaggcaatgtgactgctgctcccttgtcacttgggaggaaagccctccctcctcccgtgagtggtcctcgagtggcagctgcagcagtgtgagacagcagtggtccacagcctgctcctaatggaagcagcccagatcctgttcacctcggtgatgtggcagaaatgggcctcttgtggccagagggcttgggtatgcttcccagcgccgtgtcttgctattttgagaaccagtgtgggcaagcgatgcagttctgcgttttgttgtgcttattttaactgaaggtcatcattagccattcacttaggctccattgccttcataattagcatttttgctgactgtatactatttcatcagataaaagaatctgtcaaaatagctccttattatggactctttaagaagttccattttgcgttactgtaaaagttgcttcaatcagtatctttgtcaatgtaaccttttgcttcagttgaataatttccttaggaaatggggtaagttttgactacctcttacggaagaccagaaggatgctgtgatgacattttttttgtattaccattttgtactagccaaaaatgggatgaccagacctattcttttttaaaaaaattctttctttattgccatgctgtgtaacgtgcagggtcttagttccccaaccagggactgaacccacgccccctgcactgagagagcagagccttaaccaccaggccaccggagaagttccaagaccagaactattcttaagtaataagtgcttaaataaattatgttacatccaatcagtagaatactatgcattaaaaagaatggggattattcataatagacaaaaagtagaaacaatccaaatgcccatcaaataatgaatagataaacaaaatgtagtctgctgctgctg

SEQ ID NO: 31428 - DNA, 936 bp, Bovine  19866880586826
  misc_feature (1)..(1): n is a, c, g, or t
naatggtaacccactcaggtattcttgcctggagaatttcatggacagaagagcctggcgggctacaatccatggggtcagaaagagttggacacaactgaggaattaagatattgttgtatagtttggttagagaattgctcgtaattcatttcttattaagaactctgataactaaaaataactttcatatttactgtttctttatccaagtgaaaaatattgttttaaattctgatataaattcaaaaataaagaaccaaaaaatcaaagacttctagacttggaagggcctctgaggcttattagaccagtgtttctttaacatgagttctttaaaaagagattaaactttgaaattttataaagagctgaaagttagaattacgttgatatttaccattttgagtttattttataaatgtttagattttataattatacaaaagtgataagcacaagaatattatgcttttaggtctgtacatatttaacactgtactgaaaatatttctttatttttataaataacaaaaagtcaacacttgagagtcctccagaatattttatcctttaaaagagttctatatattactcaaatttcagaaacactgatctaaataaattctaaccaaacgtaggaattctttgcttcatgtccttgatgataagtgctctaaccttttagcaaacaggtccacttattaggtttatgaggaaataaaattcatttccccaaagaaggcacttttatctgctgccattagccacaaacatgtggctgttatctttaaatttaaatcaatcaaatgtaactaatataaaaaattcagttcatcactcatactagccatgtttctagtgcttaaatagctacagatggcctgtactgagcagcatagttttaggacattcccctcaccacagaaaacgcta

SEQ ID NO: 31429 - DNA, 911 bp, Bovine  19866880597137
  misc_feature (1)..(1): n is a, c, g, or t
nttgactggttccttcttgttgagtcataagataatcctgaacttcatatttgatgaatacaggtttactttgctagatctttaagtacctcaggggtatttttatgtaagactgtgtatatgtatgtaggtagggttcttttttttttttcccagttgttttctcttttgcagagttacttgagagacatgcttggaaatgtaaatttctattacagttttaaaaatcatcttctctagtctgatcgatgcagacttcaattaagattaactaaaatcactgtggacgcagggctgcagccatattaaaagatgcttgctccttggaagaaaagctatgacaaatctagatagtgtattgcaaagcagagacattacttttctgacaaagtctgtgtagtcaaagctatggtttttccagtagtcatgtgtggatgtgaaagttggaccataaagaaggctgagcaccaaaaaattgatgcttttcaactgtggtgctggagaaggctcttgagagtcccttggacagcagggagattcaggttaaccctaaaggaaatcaaccctgaatattcattgaaggactgatgctgaagctgaagctccaatactttggccacctgatgcaaagagctgactcctttggaaagaccctgatgctgggatagactgagggaaagaggagaggtggcgacagaggatggggtggttggtggtgtcactgatgcaatgggcataagttggagcagatttcgggagatagtgaagagcgggaatgatatgctatagtccatggggtcacaaagagtcggatacaactgagtgactaaataacaacaaatacatcaaaatctgggttgtgtctctgagaaccttgggactttgctaggctgcagtgtcttcaagcagaa

SEQ ID NO: 31430 - DNA, 1441 bp, Bovine  19866880599270
  misc_feature (1)..(1): n is a, c, g, or t
ntcaaataagtacatttgaaattttgataaatactatcaaactgttttcctaaaatgctgtacccatctatacatccactaagaccaaatgagaagatccatttctcacatctttctgaatgctgaaataatctttttaattcttatctattagacatacaagatgagaaatggcatcaaaccactgttctatttctcatctctttgacagtaatgaaactgaatatactttcatgttaacagccatttataatacttttgtgaacagacttatcctctgcacatttaccatttggtgtctctttctattgaatcacaggtgctctttatattatgcggatactgttacacatgctgaagacactacctgccagcttgttgtttttctttaactttttaaaagataataattcgttaaacaccactttttaatctttatgtaagctaaatctgtcagtatttttctttgtggtactagggttagtgttcgattagagggccttcccaactctaagattaaaaacacactctttcctaatactttgatagcgcttttgttggttgatttttgttttgttttcattaagattgtcaatctcctggaattaatttttgtgactggaggcatctaagttcatatttttccaaccaaaaatattaagttataaataataaaaaaaataataaacaaaataataaaataataataaaataaataagaaattatttttattaaaaaaataaaaattaaattccagtgtactcatggtgtatagtttatgaatagaataaagtagtaaacagtttggagcagggatcagtaatctttttctgcaaaaggccaggtagtaaatattttttggctttgtgaggcatatatagtttctttgacaatcacttacttctgatattgtaacacaaaaacagccacaggcaatatggaaataaatgagtgtagctgtgctccaataaagctttattaacaaaaacaagcagtaggcctaacctggcatttagactgtagtttgctgacgctttctagagagaatcactaacatgtagaataacaggaggttatgaatttgaagaagtcacacttcacacttctgatggagaactgtcactagaaacagtaaaagatctgcaacaaatccagcgacattaggatgaaatagtactgtaaatcccatatatatttattttttcattttaaagcacaaaaattaaaataatgtctgtattcagaaatgttggtaacctaccttaaatttcttgccaccatctttggaaagtgaaaggttcagagattttaccaaggccaaattttcctgtttagtaagttttttaacaagggcttctgtaatatatcgaactcctgcatgtgaatcagcttctgaagttatgcaaacagcatcattatcaaaagaggaagacatgaata

SEQ ID NO: 31431 - DNA, 674 bp, Bovine  19866880604761
  misc_feature (1)..(1): n is a, c, g, or t
ncctcagcatgagcgggacatcaagttagcacctatacacatcacattgttgaagcctaacagtgcttcggtggggtgagtgtggcatcctcgtgttaccactgagggggtgaagtctcagagaggtgaagtgcctgtcctaacgtcgtccagctagcggccagttgcacgagaagtcccactgtcctgactacagagccctcagtgataagggctcccagtttagcaggagtggcgtctgggccatgcagagagaggagatcccagttgcacactcggctactcttccttatttttacccagattgaagaacttaactctgaaatcgaagagctcagtgctgcctttgctaaagctaaagaagccccccagaaagcacagacccagaaattccaggtaagtgtcggctttgtttgaagtggtcctccctgtgatccttacccctgtgaggtcaggaccgtgctgctagaaggagcccagggagctccgagaggtcgtgagaacagagttggctcagccggttagaggagcttctcctgcagctgtgggccgctcgccagccccctcgtcagtctgacatgaagacggtgacggctgcgcccagcggtgcgagtgccgggcgcagggccgagtgccctagctcaggagttggagtagactgtgagatgtgtgga

SEQ ID NO: 31432 - DNA, 1461 bp, Bovine  19866880643598
  misc_feature (1)..(1): n is a, c, g, or t
nctgtccatgagattctccaggcaagaatactggagtgggttgccatgccctcctccaggggatcttcccgacccagggatggaacccgcatctcctttggcccctgcattacaggtgtattctttactgctgagccatgggggaagccctacgtggcaacagagctctgcatttccatcgcccacctcattttggagcacttaatgtgctctccctcacttaatgcactctgcctattctgcctcctttcagaccctttcctacctcatgactgcacttgctgcttcttgcagtttttgcagaactagcttcttcttttgatttcagactgaatgctacatcctcagagaggctttccttgaccaccccaaggaaatgtttcccagtttctctttgtcacagaaccctttcttctgctttgtactatttatcgtaggctgtaaatatcttgcttacttacatgctcattaacaggtgttaattggctatctcactcgatatattgtaagcaccacaagggcgaagtactcacccttttttaaaatcttattcactaggatatctcttaatcagtatttaatatgtttctgctgaatgaatgaatgatttaatcctcctagaagcagaatgtataaaccaggcattatatactcactttacagatgtccaaactgaagcctagagggctggattcttgccctgatgacataggctggaagtggtatagccaggccctagatcatgtgcttttcctgctagaccctttcaccctgaagggagatagactctgggtggggaacccagcttgtctgattcataatctaattccccaacatgagaccagagagccaagattccaaagttcctgtctgtaaagaggtgtcagtatgtggctaaggattgcaatccgttccaaattccaggctgcattgacgcatacacccaatacactcaatgatcacaagaaaagtgcagagactgaggaagaaaatcagacccacaggcctgagagctggcctaatctcctaggatcctcttcagagctgttctaatttaggcctgatggaatgggaaagatgttgtttctagttcctttagtttaatgtggcctaatttggaagattttgccattttgaggtctcaactactgcctgagagcagcccttggttattgttatcatctaaaagaatactttggctgtcagtagagagctagcagcatttctttgattccaggagggaaagttcctggtgagggagcctggtgacataagaggccctggaccagacaccagaaaggcgggtgctgtgagcaggaaggccctgggctcccaccagcagactgttggcccctcgccggctcccagcttcctcctctgtaaggaatgatgcaggtctgattgtggcctgagagtcaaggggggtttgggatctgaccccggctctgtcactaacgtgga

SEQ ID NO: 31433 - DNA, 1167 bp, Bovine  19866880655733
  misc_feature (1)..(1): n is a, c, g, or t
ncttttacacatttttcctttttttttttttttttttttacaataaacacacattacttaaataatcaggaataacccacattagaactcatttggatctggggatatgtctgccagccatatcctagatctgcttccatattctctcttcttaagttgatgaggaggagaaaattttaagttgtaaattcagattaatggcaaagcaccttccccaatgaaactaaatgctgaaatcctgcctgaaagtccttctgatgctaaaataagctcagaaaagcatttgctgtccttctccgcgatccactgaaggacgtcattcacagtgggcaccgagtcaaaccctcgctcgtcatcaccgctggctgcagagcaaagaatctgaaccatttgggagaggaatggggtcagggcttcacaaataactctttcccttagcttgctataattataatacaggggattactgacaggtgcagaacacacacggctttcccagtcattgtctcgtttgagctttgggaccactctggagagaaggaggcggggatactagcagtgacaggagtagtgtattgcactaggaatcgttagagtagcagtatactaatcgcagtagtgactaacatttactgaccacttattatacgccggacatcatgctgaaacccttcatgaacattttcccttttaaccttatactgtgaggtagaagtgattgtccccactttctaggtcaatatagttaaagtgaaagtgttagttgctcagtcgtgtctgactctttgcgacccatggattgtggcccgtcaggctcctctgtccatgagattctccaggcaagagtactagaatactggagtggattgcttttcccttctccaagggatcttcaagacccacggatcaaacctgggtctctctcatcgtaggcagactctttaccatctgagccaccagggaagcccataggtcagtatactgctgcttaaaaaagtcaaatgacttacccaggatcaccaaactagtaaatggaagaaagtgaaagtgaagttgctcagtcgtgtccaattctttgcgaccccgtggactgtagcccaccaggctcctccgtccatgggattttccaggcaagagtacgaagtgggttgccgtttccttctccag

SEQ ID NO: 31434 - DNA, 911 bp, Bovine  19866880713234
  misc_feature (1)..(1): n is a, c, g, or t
ntttgctattataagagtactatagttacctttgtgtacacaggactttgttttccttttcttaaatgattttctgattgtcctctgttctttaaacgtgactgaatttgttaaactcacatgtataagccagtcctcagttaaccctgtctcaaagcattggagttacattgtttcagagctttcacaataaggaaattattttgttaagtttctttaacttagtatcagagttagtgacataggaaaaaaacttgcaagtagtcagttaatataccttaggatcagctataaaagtacttgttttagttaattgaggaaattcgttcatggttaggctttaaatgataccaaagaattattttttaaatatgtggtagaggtaattgtgttaaaaaaaagtcatgtttgacattttaaaataaaacacaggtttagaaactctttgaggagggttgtgtcataatggaaacaagcagcagctgtgggccttgaatcagaagagctcggtttgagtcataactgtcttggcaaaacagtacgattgtgattctggacaagttacaattttctcatccttctgtcctcatctgaaaaggagatccaggatcattgacctttcacgtttggtgggaagaattaaataacctgtatgaaaacagtttataaactgtcagtcacatgcaaaaccttggcatttcagagccacctgtatagaaatggtgacatcgctggcctgtactcatcatggacgacagtaccttgctcaagaaggagtcattgatcagatttctaacataattgttggggcagatgcagaccctttctctagcttctatttgccaggtaagaaatacttgtggaaatgacagcctgtgttttgattcagaattaatctttgacaggggaag

SEQ ID NO: 31435 - DNA, 1074 bp, Bovine  19866880733712
  misc_feature (1)..(1): n is a, c, g, or t
nctgaccatttcttttctgattaaaagaaaaaaattaaattgcaaaagtaatgcattcccaatgttgaaaatactgcaaagaataaataagaaaaataaccacccataatgccaccacccacagataaacactattaaggttttatcgtatttccttccagtctttttatgcttttcaaagtagttggaatcatactttataacctttttctatcttgctcttttacttaatgttatatcattaagcatttttccgtgtcgttaagaacacttcacaagcatcatttgtaggggtggcacacgtattctatctgtacagacagttccatttacttagccattcccctaaatccagcatctaaatttttcttcccataatatttcactattatgaaacgatgctgcgacaaacatatttggcacatcaatctttgtccacatgtcagattattttctttggagaattactcagatcgaaaacttcctagtcaatttgctttccagaaataccagatgcaggttttactctttttagccaactgtgaagatgtccgggttctcctgctccctttaccaggcgtgactactatcaggaaaaagaaactttgctaactcgatgcgcaaaaagagtacttattcttatttcaggttgcatttctttccttagtatgctaatgctatgctaagtcacttcagtcgtgtccgactctgtgtgaccccatagacggcagcccaccagaatcccccgtccctgggattctccaggcaagagtactggagtggggtgccattgccttctcctctttccttagtagtatggcccaataaatattgtaatgtttcctggctatttgagtttcctctttttgaattgtcttgtttctgtttgatcatccccttttctctaggtgctggtttttcctctggctttttgtctacaaatgtgagttatccaaatcaattaaaaaaaaataacaagaactcaagagcaaacaaactttaggttgaatcacaatgcgctgtaaaaaagacgtttgtaatctattcctgagtaccagaccactccaaaacgca

SEQ ID NO: 31436 - DNA, 1065 bp, Bovine  19866880752645
  misc_feature (1)..(1): n is a, c, g, or t
ncattaatataaatccagctaaaggcaaaatggtttggacaaatcaaaccccaacctcaaagcaaaggaattcagaaactcttgtctaacatcttgacaagacaggttttatttgtttagttccaggcccactttagatctcaagaggaaaaagaacagaagttgtctctaactttgcttgaagactttcaatcagcaggaagaagagctttattttttaccaggactcagatagaaattggcttttatcaacatcagcaaaactgaacatccccccttaaggaggaaaaaatgggcctccctgcttaaattgtgtatttgcccaaacatactgacttgtaattgaggaaggaaaaaacaaaacaaaaaaaaaaaaaaacggtgcaaggaagggatttaacctaatttataaatgtgctcagcctagatatacacctgtcccaaatgactactgaatccattcatttgcagggaaaacatggattacaatttcttttttcttttggcctcaagtggtctgtactactgtttgtaaacaaaatcctctcaatatcttttccacctgtcacatgcacgtctgatatttacatgaacaaggaaagtggagccttaggaggaatcccttcaatttctgatctattggtcgcaggaggtactgtgctggtttccaaacttccccagatcacccaggcggaggggcacggtgagcgaaccgaacccaaaagtttgcgcccatccagcgcgtctgacaaaggcaaagacagcgctgtttggaaggaggtgcgatgctatccacgcagcagtcgctcccctcccaaggaagcacagcccaagtgggggacaaaaggctttccagattggggactggggaggggggtggggcaggctatctagagcttggacctccccttgaagtcgaaatctggggaacctttgggggccagaaatgctccattccagccaagaagcccaacgctagaaggacgggcagccgcggggagggtccggcggccgaggaggcgctgggactcacctgggggaggcggagagggggcttcggtggca

SEQ ID NO: 31437 - DNA, 1054 bp, Bovine  19866880799111
  misc_feature (1)..(1): n is a, c, g, or t
nagatatatatgtggttctgctttgagaaatttgaatgtaattttaaatgatctactgattttagtcatacttacgtttttgcacttgcttcaaggaacaataaacctaaaaataaaattcagactatgaaacacatttcaaattaactcacaaggacattctcttaagtcacttctgagtaaaacgttcccatcagctttcagtactaccaccacagtattttatgaaagactatgagtctgaaatggaaggaatctttatgtcattaaataattctattgccctcaaaatgaatcccaaatacaaacgcattttgtatttcctcattcttcgatttgagcaatttgcacttaagaaaagaaaaaactgtcaaatcatctgcattgtcaaaaccccacttctccttagaaatctcacatgtgtgaccgaacgccattaaacctcacaagaaacccaccgttttcttcagcaaactgtttggcttcctcatacgtcacatcccgctgagcctccagatctgctttattccctataaggattatcacctggattgtaaccgaaagagagacgtcttacacaaaagcaacctttaaatcagacatgaaaactctaaaatccaaaaatctggaggaaaaaacatgcaggtctacaaaggaaactaaatactaccaattacccatcggacgatgaccacagaatcgtggaaggtgtaactatgaagaggcacagagggtgtctccaggacactgcctggaagagaagggttctgcctttcattagattttcctaagttcctggaatccacagaaagctttaaaactactagttcaacttctgaggctacacgtaaggaaactgatactcaaagcaaacaaggacttgttagaagatcactcaagagtccgtggtaggcggacatcagaattcaggcagaaaacccgaactgtgaccttccaatcctgtcctcccctacactatcccctcggttagacgagggtctgtagcagctgataacaatgactgcatccaggagaggggacagcggggggtggg

SEQ ID NO: 31438 - DNA, 4111 bp, Bovine  19866880858581
  misc_feature (1)..(1): n is a, c, g, or t
ntcctcaatggaggaaggcattaatatagaggaagaggccatccctcttgagaattcccattggctgcagataatggtactgaacagaggctcagagtcccggaaaacatcaaaagtcaccctggtgtggctgggttttatgacctctaagaagtcccaaagctctgcctgcttctctgtctaggcaatggccatgacttcacacagactcaaagcagagccattccagtttattgtacttcagctccatgatgccactgggcagaaagatggaggaactggggtccttttacaggcacagcttaaggaatacaaagattgagcagatgccgttatagccttatttgtcttggtcacgcagcatgccctccctccttagtttgcaacaatcctagatctacatgtggctcaaagcacttcataaacaccgaagccaccaatcttaacacaagttggggtagaagggcaggataggtaagagccgccagagctgaatacaaagcaagtagcatttacactgacaagcagctgtgccagagaaactcagtgaggaacagcaaggaaatcagctctggtttaaaccaaaaaaaaaaaaaaaaaaattcattactgctattatcataggccttcaaatgtgtacagatacatatgtgtgcttgcatgcatgtgtgcacattcagtcctgtccaactctctctgatcccatggactgccccttgccaggctcctctgactatggaatttaccaggcaagaatactagagtgggttatcatttccttctccaggggatcttccagacccagggattaaaactggtgtcagttatgtctcctgcattggcaggtaagatctttaccagctgagccaccagagaagcccctacatatgcatacatgcatttaaaaaataaaacttaaacatcacacacacatataaacacacaccaattttctttgaaacagtaaattctctttcagaaatgacttggaattgggttaatctcttagacctaaaaagggcctcacagatgatttggtttatatgtctgcattatactattttataaatttagtcatgtttatagaggtcctaccgggtgccacaaagcaaatatgtaaagttaccttacctaaggaaaaaaaataacagaaaatgaggcttagaacacagtttcctggctccctactgtagtattctctccattatatcttttggccagttaggaagctgctgctgctgctgctaagtcacttcagtcgtgtccaactctgtgcaaccccatagatggcagcccaccaggctcccccatccctgggactctccaggcaagaacattggagtgggttgccatttccttctccaatgcatgaaagtgaaaagtgaaagtgaagtcgctcagtcatgtctgactctttgcgaccccatggactgcagcccaccaggctcctccgtccatgggattttccaggcaagagtactggagtggggtgccattgccttctccaagttaggaagaaactacttgtaattaatgggagaagtcctccctggagcaactgactgcaagtcactgcctttgacaattctcagagtaggtgttagttcagcagtttaacaacactagggctgatgggattttcccttggtcttttcatcatgcatgttgtgtcaggtcacaatacggctgctgcatctccaggcattataacctcctttcagtgggaaaatggagtatgggaaaaggcaaaagattcttctgcctgtactgcattgatcagaactctactgcacggccgcccaatctgtacgagagactgtgaaatggaatatataaaactatccacattgctgcctccaagggaatctataagcaaagaatggcttcccaggaggcgcaggggtaaagaatctgtctgccaagaaggagatgcaggtttaggccctgggtcaggaagatcccctggagaaggaaatggcaactcacttcaggattcttgcttggagaaaccccatggacagagaagcctggtgggctacagtccatgggttgcaaagagtcggacacaactgagtggctaagccctaaactattatttctcatatctaagagattaattcccagaagtgattgcttcattttctcttttatctagttctcaaccaattgaagaaacagaaattaaataacaggagtccttatctcatctacttggcaggcctaatacagtgtttatattctgagtcttcttgatatacaggggaatccattcaagaatgatttaactaaataacattagacccttttatatataaaatgagaacatgtttctctttactgaattgaatatgagtaatttatacactggtgaggagaaaggaaaattttttcagaactgttttgctttaaaagaagtgatgagctgtggaaatgaatttggactgttctggcaaacaggtgcaagttaaggattcatttgaccatttggtaggagggatcccggtgaccctgagcgcaaaaacgctcgacgcgaaccaagagataactgacttggagtcgaagaaaagtgtaacacgttccagtgacggagtagcttcttttgtggtgaatctcccatctgaagtgacggtgctggagttcaatgtgagctgaattctcctgttaaattttctaggacagtgtgtacttttgactgtgtgtttttgccaatgtgcagaaaaaaatgtggcagattttagacatgagtccagcgaacagttccacaattttgcaaccaaaggaaaaaaaaaaaagcaccagaggcaatcttcaaattaattgaatggtcctttaggaagataaatgtatcagttttttatttccggtggattattttctcttgcattaataagactgtattaaaatctagaagcatgaaataggaatagcagtgaaaattagtgatagaaagtctctctttcccgcttcacagcctttcgtctctcttcagggccacaaaggggtcaagtgtggaaacctctctttttttctagctatgtgaatcactgtatctgaaagttcacttaatagtctcgtctcccagcaaataacatttaggttcccaactccagataaaaaataacttagtaatgtgtgtcaacgacatcgacagcatgtcagcggcacagattcactgtcgtctgctgagcccgtatgaggtgccagacgtcatactaagagctttatgtagaacacactcaatacccatttaatcagctctcggaatcagagaatattgtctttgccattttgctgctgaggaaacagaggcttacctctcttgtggttaaataacttatccagacttaataaatgatggcccttgaatgcaaaccaatgtatatctcaccccaggcattaacccctctgctgtcaaaggccgatatcactgccatgatatcattcctgctccactctgagtttgtaagcccttgtctgtgccacgacttcacagtgaaactgggccagaaagtctgtgtgatgtccattcataactcctgtccccagtcctcgggacctgcccactgctacccctgtaacccataagaaaagaaccccaagcttgccaagacacttcaagaaggatgccaatatttgctccatgagcatcattctgttttcacttcaccagactttcccaccataactcacagtcccatatcatcccagcttctgtccagagcctttgtaaagttatttgataccacagctgtacaaacacattggaggagtggatttctttttctttagcaattggtgttgtgaaatttagaaatgtataaagcaaagaaaggaatttaaaaggtatgtttcacagaaaacatacctttacatcacagtccatgtatctttgtttaacttttgttttccttttcagatcaagaccgaggatctagatcttcccgaagaaaatcaggccagtgaagattaccgagcagtagcgtattcatctctcagccaaagctacctttatattgactggacagaaaactataaacatttgcttgtgggagcacatctgaatattggttgttacacccagaagtccgtatattgacaaaataactcacta

SEQ ID NO: 31439 - DNA, 1689 bp, Bovine  19866880899321
  misc_feature (1)..(1): n is a, c, g, or t
nctcctctgtccgtgggattctcaggcaagaatactggagtgggttgccatttccttccccaggggatcttcccagtccagggatcgaacctgggtcttccatgttggcagacaaattctttaccactgagcctcctgggtagctccgtccaacaaccttgtgactccctgttatcagccagaggtgtccaggtctgtcagtgtagtgtgagtccagctcacctcttcacacagtccttgctctttctttgcctgtctgtgcagcttggatcttcccgcgtcctcgtggggaagccctctgtgccgttcccacccgtcctcaggccagcctatagggtcccattggcctcccactatggttagtctgctgactagcatccccccactgggcctgactcagtgttttgttcccgagtacttcgctgtgcagttcatttggcagttcatcacgtggtaccttttgcagttggcaaaccattagcttttacccttgatctgtacattttttaaaatttaggtgaatgctttggctctccagcaacaatttaagattgagttcttatgtgatgctcaatacggttaatattttaataaatttcatgcattatctcaggggctatgtgttatgaaggggagataacttgaagatgtcagagcactgaggttaagtggaagagcaggtacacacagccctccctcttcaggcttcctgctctgccgtgttctttttcgtttattattaacgtgcagttggtttacagtgttgtattaatttctgctgcacagaaaagtaattcagttatacatatacatacatttttccatattctcttccattacagtttatcacaggatgttgagtgtttcctgtgctcaacaacaagaccttgttttgtgtctcctctgtgtataatgttttggcatctactcatcccaaacccccagttcatccttctcccatcccactgcccctggcagccatgagtctgttctccttatgagtgtgcttctgtctcgtacataagttcttttgtgttgtattttacatttgccagataagtgataccagagggtacttgtctttctctctctgacttcttcacttactatgataatctctaggcccatccatgtggtggctaaaatgatggctgcattcttttgtatggctgtgtcatattccattgtgggcgtctgccacatctttatcctttcgtccatcagtggacatttgggttgttcgcatgtcttggctgttgtgagcagtactgctgtgaacgtagggtatgtggttctgccatattctataaacatccaaagtgctctgagtacagcagagcaggacgtttgatgaccactctgtggttagacatggggagtccttgccagtgtgatgttcctctcctttgcattttaacgacgtgttcttttctctgtggcaaagctcatccaccaacagaaacttttggagaaaattgctcagactcatttatcataatgatctttactcttttaatcttacgcatatatgtgtagatttacgtaatcacgaaacattattttgtattgtgctgtcggaattgtgctctgagtctttgcaattatcataatactttgtaatattcctttattacatgtaatttgctaaaccattcctgtttgggtggataattgggtcatttccaattt

SEQ ID NO: 31440 - DNA, 2997 bp, Bovine  19866880942139
  misc_feature (1)..(1): n is a, c, g, or t
ntgtggtcaggccactgcctgaggaaagcccaaagacgaggaagagagccagactcaacgggccaagagggctcctctgctgcccccggggcggggctgccagagcgacccgcacgcccaggaaccacacactctgcagcgcagacgccaggacttaacccttccctggccctttcagactctcaaatgccgccacgcgagaacttccagaggcaggaagctggacatgtgggcccggggacaccaactgtctgttccttatcgggtccgccgtgggggcagggcacagggggtcccgggtaagtgcgggaagaaagaacatgcatccggccaaagccaggggaagatgcatggcagtgagaaggcgcgtttagagggttaactcaggaaggagatggaaagagtgtttactcgtttgtttttccaaggtaacgggtttgttaaggttccatctatactaccggagtgactggtgacgggacaactctccgactcctgggaccttaccagtcctccagacgtgcccagatgcccgtgacctgcagcccagatcccagggccaggcctggagtgcgggcatcacaaaacatcaagtgcatcctcccagaaacgacccaaacttgcggaaacctacaggcagacctgttgacctaagaaggcctccaaagcccgtccacagcaaaggtaatttccacagagacccccagaacagatgcagccttgacacgtgtgtggggctgttattctttgtgatgagctcgtgatgataagagcattccttcttacctctgtttgatctactgactcaggcttgttgtctcctgggaaacccacgcaggaaagatcaaaaatggttttctttaggtgctggttgtccgcgtacagctccttgaccagctggataaggtcgccgacctgggagatcagagcaggagagacccggctacccacaggcacacttctgcctcttggggccatggttactgagcagacctcccagcatcacagtcatggagagccaggcagcctgactccaggcttcaggctccccccaggtacagtgagaaaaacacccaggcatctctctgttgtagccccagagatcctgggcaagctgcctggtctaagcctccgtttccgcttctgtagaatgggctaccacgagaacggaaggtgaccacgggccacggtgcactaatgccccctgcgcagtctaagtaccccatccatgacagcgtacagcacctctgtcttgcacttgagagcctccggaggaaaatcccccagactgacacttctgaggctgtgtcggaggcttgttctatggcctccgccttcctctctctatgcctatctaccactgtccagaataacaacagtcttcagttccaaagcaattcatggcaactgaaacactccctcgagctttagtcaatcactccttacaaaaatcccacggaggtgcacaggccggtgtgactgtccccatttgacaaggaaaagcccgaggtataaagcagctcactgcccgaggccccagagctgggattcctggagaattcagtgatgtacaacactggccagagtgccaggtcaagcgggcaagggcagctgcccgcacaaagcagagtcaggcctggactcccggtccaaggcccctccttaaggcacaggtctcacaaggacaggtgcataagcagctgatcagacaccacctttatttcctgcaaacttcaaattccagtggtcagtgactttccaaacccttcttcaaggggtaatcattcgcccctgaaataagcgggaaatcccacctcagcacaaagagcaggtgtcccctgcacccaaacgtaacaccaatcagacccaaccctaaaggttacagagggaagaacgagacagtctgaccctgcaaacagccacggagtgccagccaaggggactagctcccgcccgacacacagccacagtagggaccagccgtggctcctaccacctcagcttcctcaccctcagaacacggacagatgcctcagtgcttcctgctgcattcctctgaacataactaaacttctacactcctgttttttatcttttctgtaccttttttcctctccctctctgccgagaaagttttctagttagataagctcctactcattgtccaaaaccacctcaggtctcatttctgttgagacgcttcctctgatctgggaagggcctcccccaccccctacccccaccagacagacaacctctctttctctgctgcgcctgcacctcgcatctctgcctggcacagccctctgtgcactctgcagtaacacggctcggacacacatccatctgctctaccaggatgcgacttattccaagacagaatctgaacctgtcacacacagatgatcattttacaataaaccacagtgtcctctgagttcacacttcctcctcttatcaatggctcttagagccttgaaatactcaaccaccctaaccacaccaatgataacagatgggaagacctttccaagttttagaaaagatttattgaccaaacctgaacctttattctttcaaaaaccatctattaactcccactatatgtgccaggcaggcactgggaaatcagaaataaataagatacactcactttaaggtgagtggcctactggggatatagaagaataatcagataattatagaccagtatagcaaggacatcaatgaaatcaggtacaagaggagaggaagaagaccagagggaaagagggctaattccaggggggatggggtgcttcctggaggagatggggcctgggtgggggtcctcaagcctgagaaagagtgcatcagacacggggggtgggggggcggtctccatggaatgtccgtggagagacgggcagggagagaggcagcagaggcagggagaagggcttttggaacctcacacctctaatcaggaacccaagagacaacaaataactaacaaag

SEQ ID NO: 31441 - DNA, 998 bp, Bovine  19866880983029
  misc_feature (1)..(1): n is a, c, g, or t
ncactgtgctgcactctttcccttataacatctcactgacttctcgaaacacctgaaggaaaggcactgtccccgctttatagaggagggcagcagggcaggccggtgagctgaccgctgaggtcctggagccgatgagtgctggcgccctgggggcaggcaggcccagctcctgcccgactcctccctggaaggaggaaggcgcagggctgtcctttctctctgagagaagctccttttgttcccccgactcctcacgctgtgcagggatcctggggctggggaaacagggatgaccgacgcaggagctgcagctgtgtacttttctccctgccagagagtggagaaggagtgaagcagtcagctctccccagctctcatcgcagaagcttcgctggagcagtctttcttttttttccccctggttaaatgtgtctgcagcacgaccgcatccgagcgagtgctgtgctatgacacctctgtgaggttttccatcagccttacaaattgatcattatgattgtcttgaaatggaactaggtacaagttgctgggaaggccccttccctggcaaggaggctgcctcacaatgaaccatcttcaaagcagcgagcatagaagattagacatgatggtttattttccttccaatagatgttgatttcttcgtgcagttcgatggacggagctggagggagtcgctggaggagaagagggacttgagtccgtggcgctcgtatcttagagcgacgtctccttagcatttggggctgtggacccctctagaacaacccgatgaaagctgatgggcccgctccctaaaaaaaaaaacccacacattgataaactctttcctacattttctaagtgttgatgggccttctcggggaaaaaaggtcacgtgcgagacagagtgacgcatttcttggtatttaagacaagctttctgactcgctaaggcgtttcaggagtcgcaaagcgtgttcgtttgctttgac

SEQ ID NO: 31442 - DNA, 1410 bp, Bovine  19866881020179
  misc_feature (1)..(1): n is a, c, g, or t
ntcccggagcgtgcacaaactcatgtcctcgagtcggtgatgcctttcaccatctcatcctctgtcatccccttttcctcctgtcttcaatctttcccagcatcagggtcttttctaaggacacaaatacccataaaaaagaagacaggctttatttcaattcttaaaaaatctttcttcagctcttccagttttcatctacaggcctccagtcacctccatatccgaggatggggaacttgcagattcagagagccaagtgtacattgagattggaagtggctgttttttattcatcctggaagataacccttgctgtgaggcccagttcacatggggaaatgtctctctgaattcagtcattaacaagaagaaactagggacttccctggtgctcccgtggctataactccaagctcccagtaaaggggacctgagttctatccctggtcagggaactagaccccccatgccacagctaagactttgcatgccacaattaaaagagaagaatattgcagtgaagacctggtgcagccaaatacgttttaaaaataaaataaatattaaaaaagaaactagcacactgggcagtgtcaaatccaggaggtggcctttctagagcacagtgaggaggtttaaaaaaaaaaacacttgacagacgtatacagtttgaatttcaagcattttccctgatgttccctcatgtacactttcctatggctggacgagatttacatttgtcatttgtgagcttctcgtcgtattccttccagcggatgggccagagtttgttcatccagctgtcatttggtgcctgtgtagctctacctgctattatatatacaatcaacctttattaaagcaagacttttaaaccgtctttagaagtacttctttgggataaattcctggaagcaggttgagagcgcaaaggcaggagtagagtttcttggcctttcctgaaggttagatcattctgataaaaacccatgcatgaagactgcccatgtgtccttcctggtctgaaatggaaaagaaatacagaggcagtgccaataaggtaacaggacaatttgctgagccaggcagaactttctggaaggggctggacttttcttttccatgagaacatcctccgctgatatcccagtcctcagttttgtgttgttgtcgttcagtcactaagttgtatctgactctttgtgaccccgtggactgcagcacaccaggcttccttgtccttcactgtctcccggagtttgtccaaattcatgtccatagggtaggtgatggtcctcagaccatcaggctattcaggaccactccccttcacaactacctctgctagaatcgtacctcagcagttagcacagaaccgggcgctctctggaatctcccagaatttcc

SEQ ID NO: 31443 - DNA, 811 bp, Bovine  19866881055693
  misc_feature (1)..(1): n is a, c, g, or t
ncacaggccaaggacaccccgccccgggccctcatcctttccaaagagaaggatcttccagaggctccacagggtgtacgcgctcactgcctccagtggctgctcaacagcacctttgcagaggctggctttgatgctcccgggatgaaacagagccacctggcccccaggccctgtcccctgactcagatgacttcctcctctcatttcattcccacctgccatgccgtgtgtcgtgtgcttactgcacccgtccccgggcagaggaccctggccccacctgctcagcgccctgcggccgtggcatgcctcctgaagcagccgctggttctctctctccttcccgtctacctctctctgcagccgctccttctccgcctgcacagcggccagctccccctggaggtgctccaggctggcagccttcctggagagggccttgcgcagcttctcgttctccttctgtttatctgcacgcacagagaagcgccgctgagaggagacaccgtttgtttttcccaacctcattacgcaaatacagcactttagccggagcacgccaagaatacaaaggagagaaggagatttcatctggcatttgtgattgtggtattccaattatctcatgcattttgggcagataaatctgtcaacatcaaggctgcaggttaaacgtcactgggatgagatgagcccgtttaattttctattaaataatgggctgtgccaacctagttactgtgccttcacagagcaaaaactgggcagacgttggagacagaggcaagaaacggggctcaagactctggcg

SEQ ID NO: 31444 - DNA, 822 bp, Bovine  19866881082813
  misc_feature (1)..(1): n is a, c, g, or t
nccctccccgtctccccttagagcgcagaaagtccttggagttctccagacgacacggtttcatcaggagatgccatctgagatttctcctctttaaggcactgaattaaagcatctttgctcttcaaagacagcttcaactcctcaatcagtctgaaagagaacacaatttaaatattaattctaagctgttccctcagctcagtggagcaggaggtaggaaatggggccagacaccttcaaaggagacatgtgggaggactgaagagttgcattttgcaggtgggagactaagggccagaattcacggggcatcagcggtccccttgcctccagcccactcatggccaatccaccccctgagcagccagactatggccagatcgagtcaccctcctcctcaaagactttcatcagcccccactagcgacggccatggattatgaatttgggccaggtcgggcaggggggcggggggtggagcgggaaatcttctctcccaaggaaatctgggagtgaggctaaagaaacaggaccgacagagctgagctgctgcagtgataatgaaaacaatgagtgcgtcttccaaggcttctcagggcaacgtgtaacagactggctgccaaggtaaagggccagctcctcagcaaggcactcaaggccctggcttaagggccaaggcagcccggcggccctgctgacggccaccctctctgccccagggcctctccagggacctccgtctaccccgggaaccccctcacaacttctgctcccacccccaccctgatggacgcccacccattcaccacccatggtcag

SEQ ID NO: 31445 - DNA, 1134 bp, Bovine  19866881156546
  misc_feature (1)..(1): n is a, c, g, or t
nttatggtctcctccaactccagaatggtagcccaccgaggttactgatcaagtgaggaaagggttgggatagatgacgcagaggtctctttaaacttcagagattataacacatgttatcataaagaagcaaatacttggagactcccattagcgagttaaagcctaccaaggaacagggcctttccttcaagaatcttatccatttacttgtttcatgtcctcatctctactttatttcagctacaagctcagcagtgaggaatcgtcatctgggtcctctcacgcggtaatggatatctctctgcctactggagtcaacgcaaacccagaagacttaaaagctgtaaatgtcttctcttaaatattgttatggatacttgcttttatttactgcattattttacaaagctatttccattcattctatgtcactttcttagactctcccagaatattcttttcaaactgataatctacctaagtttttatttttcaaagtgaaactgaaaaatattcagttttatatttatataaatattcaggggcaagtattatgcttgcaggtacagaatagtgtgcgtgcatgtgatgacatgttcagactctttcaagaggaggagctgctcttcactgtctttaagtagtggattacatccccacggcctcacattccatcactgggtgaacgcacttaaacagaaaggtcacgagttaaatttgagctcctctctttgttcccttagcttgtggaacaggtggatcaattattaactgactacgaaatcaaagatgggcatgttattctgcaactgaactcggtaagttccacctctcaccatttttcatttattattactatttaacagctgctgcctaaaatattttgagtcttttgtctctcatgattttcttaatctttgaatttgtcagattccttccaacgagttcctttgtgttcgattccggataattgaactttttgaagttgggtttctgagccctgccaccttcacagtgtatgagtaccacagaccaggtaatcaactctaaggtttcttccgaagactgctctgtatttattatggaatttgaagaaaggcgctcgaggcctgcagattgtatacatttctt

SEQ ID NO: 31446 - DNA, 1023 bp, Bovine  19866881224510
  misc_feature (1)..(1): n is a, c, g, or t
nctaggatgggtaaggcagggctgctttggaaagctgtttgcagtaacgtgagtgtggtaggcttaagggtgaagaggaaaagaagataaaggaagcattggctctgaggtgtgacgtgaccacatgaagccagagcctcagaatgttcggggcacggccctaaagcagcaggtccctggcgatctggcctcagagagctcctctaaccttccattctcccagaggaggctggtgtggagagaaatccgctcccaaccgccccctccccaccagcaactctccccatagatccttcacagggtggaaggaaatttgtgtggagataaaatcagagaaaagtttgcatgaagtcatccttattcaatttgggctgatttgaaatgtaaatattaattatttgctttgccagaggaaatatcactctaagtatagtggtctggatttatttaaaacaaacaaacaaacaaactttttttccctattgctgtatccctgaaagaaaagaaaaatgatacaatgcaataataggcaaattttaaccatttattaagaactacagcagtctgtcttttttggtgaaaagaactgttaactgagaacattctaaatttcataaatacctgtgtatttaggctttgattaagtgctcaaatgcttgcacagttctaactttcatttagaatatcttagttggagggaaagcaaggaagcaggaacaatgaggaatggctttgttaagtaatcagcattactgtgttttcaaataagcatgttaaatttaagaacgtaaatgactttttcttgggtgttctttagattgatggttctataagaaaatatcatcatgaaggataaaatgactgatgtataagggaagtcaggctgctgttactatttcaatgttttgcgtttaaaactaacggggttatttggggaattccctggcagtccagtggttgggggtcagtactctcactgcctgggttgatccctagtcgggaagtaagctctccaaacccagc

SEQ ID NO: 31447 - DNA, 988 bp, Bovine  19866881291880
  misc_feature (1)..(1): n is a, c, g, or t
naacttctttttccagaaagaaaaaagtatttatgaaagaatttttaaaaagcatatttttcttaccaccactcgtagtgtttttactaagatttcatttccaaccgaagtctccagtgagaagctgaggttgtggaggccgacttccagaggaagcacagtgaaggtgaccaagtggttggaggaaccctcgattttctggagcacacacttggagaatcttctcccctgagagtcagtgactggggttcctgatgaacagatcccctccacaggatgcattttaacacagaactgaaatatcaccagtgaacaatgatttcaaaacactttatgataaggaaagcacgccctgactatgttcgtctggacacaaattctccccggtacctgtcaaataatccctcatattctaaggcggtagagaaagttcatttcagactttctaaaacatgcataccagttgctgcttggtggattacagtccataggatcacaaaaagtcagacgtgactgagcacacacgcattcagcaaatgttgtcacgatagcatttgttacaccatctctttacatgtttataattccgagagtgggaacccaggctcaggtacgctgtgtgtgttattcatctttgtatcttacagctcagcctttcgtgttcagtaagtggttttatgaaatactagaactctatctcctggcattcgaggccctgactgatatgtcccccctagcttttccaatcttgcttctcattaacttcccatttgtatcccattatacatccacactgtggctccaggaagatctaagctcaaatcttggctctgccacgttctgtgtgccaagagcacatgaccctccacttcttcagctttgtaatggggagaataatgatacgtactgacttacggctcaaatagtgaacattttccatctgctctccaaaatctaatgaccgacagattatccccaaaagaataaa

SEQ ID NO: 31448 - DNA, 763 bp, Bovine  19866881338265
  misc_feature (1)..(1): n is a, c, g, or t
ngctgtgaagcacgtgtcgtgatgctgtttggctggctggcacctgtagagtgggcaggcgactgtgagagcatctccatctctctggcttacctgagcatgtggtgaagtaaatgcagtgtgaaccgggagggtggaaacattctacccccgggatttctcgtcgttaccttgaaacagagagcctgaccctggctcacagggttgtcttggggcccgagggagatgtgggtgccaaggaaccgcccgcagggcccattctgggagcctgagcgtcctgccccgcgcggtgctggcactccagaggccagcctggtgggcgcagagggagctgcgggacgagaagcaagcgtgggtctctcctgtgatctcctcctccatgccatcgtgttcgagaacatttccttttaggagtagtcttggaaatggtacatgtgggtactgtttaattatagtctcatttttccagtacagctactgaaggtttgttttttttctttagccacccattcgtttcttcagagttcctcccaggcttcaatttccagagttcggaaatatttttaaaatacagttgttcgtttctgaaacgtgggctccgtgctcctttgcgacggcgtgtggtggcgcgcagggcagcggagtgccgtccccagctgtgtccgcagcctggttttgttttcctttgtcatttcttccggtcacccacctgcggcagacagcggcttcagctgcacgcacaacctccttttcctgggaatcc

SEQ ID NO: 31449 - DNA, 1166 bp, Bovine  19866881350374
  misc_feature (1)..(1): n is a, c, g, or t
ngcctgtctttcccttggcgctccagccctgcgattgggcatacaacaggttattcccattttacagattaaccggagcctcagaatttaaatggctttttaaaaaaagaatttaaatggcttgatcttggtcacgtagaagaggataaataatgtgatgtggatccaggactgtggactttttagtttcaggactttgctaagatactatgctgaggctatgccagaccgtcagtatttatgttaagaatactgtgcttttggcaaaaaggaagactgataatttcagcttttcagtggaccacagtaatctgttttcaagaccacctaacttgtgtctgggttatttgaagctttcaaacttgtcattgtttctatgtttcagaaacattttcagagatttatggacagtcaaaattaaatgcgttagggtcacagaaaaatgaggatgacgagtgaaatggaagcaggtgaggcaggagagatgcctgctgtgatcgtggtcgcagtgctagagacgggacttaacacccggctggtcgttcctggcagcgacagtaaaaagggaaatgtagttacaaggtctccagtgtctgtaaagatgaagacattaagataaagggacagcctttgctggcactgaggcctaagggaagtattgcctctggtgggtttctataaagagttctctgagcagtatacagagccctcgacaataccccattcaataaaagcaattttgcccagggccagatcaatgtcatccaagtcgggtaagcctataagtatttaggctttcagtccctgggactgtctcgctgtttcccagtattctcgtttcttggacaagaatcacaaagtcagcgggaaataatcctgcagctctgtcttgagacgatccctcactcgaagccttgcagtggcccctgtcgagcagcacgggtcgagccagcctctcttggatgtgatcgaaccatcctgtgctcgtgccaaaaccatgtactgccgcctcattgttccccctgctaagcattttggaaggagacagtgcctgtcgaagatgcggcttggatctgaggcgtctgaattcacagtgtctgatggtgcgtgaacacccgagacgtttggccgggagagtcagttcactgtctgtagctttgttttaa

SEQ ID NO: 31450 - DNA, 1203 bp, Bovine  19866881365538
  misc_feature (1)..(1): n is a, c, g, or t
nctcctccgtcctgggattctccggcaagaatattggagtgagtcaccattcccttctccaagggatcttcctgacctagggatcgaacccaggtctcctgcactgcaggtagattctttaccatttgagccaccagggaaatataaagatatttgtatacaatataaaatataaagacatttatgtacaaatatataggagatggtgaaggacagggaagcctggcgtggtgcagtccatggggttgcaaagagttggacatgacttagcaactgaacaaagacaatatacacatatataaatctgtaatacatgaacatacaacagtgtactagatacttctgtcccctttggaagagttctcaacacagtctgaggtgacgggtgatactgtggcaggagacacatctgtccagtggtttgtcatttacccaggagtttatagataaattccctattataagaatcttttgaaatgttactgattgggccttgtaacaatcctgggaggtagaaaatcactttacgggcattttattgacaagggggctgaggttttgggacattaagccatgcgcacaggccatatagtaagtaagtagcccagctgggctcagaggctctgccacccttgacggccttcagcagagggagctgagggcttttctgtggccccttctccttccaccagaagtcagatggggtggtatcggggaagccgaggccagagagatgcagtcacctgcctgagagccaggggtccgctcgccctcgcctcccatcaggagtccctccctggcgcctcctccccaacctccccttctcctccgacccctcacctcactttctcagagagacagacggcgcagcagacagggccgggctctggggggtcctggcaggcagtgggggggcacccaaaggggaactcgttctcatcgggggccgggcgggggctgctggctgagccagaggccatcccggggtcccaggcgggccgggggtgcggggcctggtcaaagctcctcggggcaggggcccagccctgcgaagtctgtgctggagaagtgctctctgctgggccaccggctctgatatgcgggcggctgatgcctttatcttctcgctggcttgtatggtttgacgtcacagctgagtcacagcagggaagagacaggaattacccttggtggtgcaaaaaa

SEQ ID NO: 31451 - DNA, 665 bp, Bovine  19866882117973
  misc_feature (1)..(1): n is a, c, g, or t
ntgctgatcctgactactgatttttcctctaaaaatgagtatttagagaaaggccttacttatgatacaactgcctgtagatgtcactgctgaacaagggcagcgaagacattctttcgagccatcaggactctgataaaatccttctgtgcattcttcacagtgatccccttcgctgttatcctggcaattgaaacaagcacctaaaagaagcaaatcattttaagacgttaaagatttactgcaaaagcacggtaactttaaataaattatatgtacctacaaaccaaaaaaaccttaagaggaaaccagaaaaagtcacccaacacaggtcgcagagttcagtttctctcccatcttactcctacactgaacaggcctacagctccggtccctactagcctgtaaatgctttaggaaggggctgggtacatgactagagctgtaataagcccttgttgattgattgactacataccgaaagcaggccaacaatttgcaaagaaaaagaaaccaacctaaagatctattaaaagaagaatagataaactgtgttatttccttggttgggattctgtagctaaataaggaaactaggcctatatgtatgaatacacataaatcctacaaatattgcatggaaaaaagcaaactgcagaataata

SEQ ID NO: 31452 - DNA, 562 bp, Bovine  19866880411186
  misc_feature (1)..(1): n is a, c, g, or t
nctgcgaggcctgcttagcccaacttctgcaccaagtgtcaggagagcctgtacctgcacaaaggccgctgctaccccgcctgtcctgagggctctgcgcctgcagacggcaccatggagtgcagcagcccgggtaagccggcagggtccgggcgagacagggcgggacccctacggagagcgtgggctgggctccgtgcagggaaagctcatgacgaccaccccctgagtttctctggggacttttatgctctctggactttaaggatgcctctggcctggggctgaggccgagaccaggtgggagaggctcccgggggcgcacgtggggccaggtgaggagccgtgaccccttcctccccttgcttccctcccctcccgccagcacaatgtgaaatgagtgagtggtctctgtgggggccttgctccaagaagaagaagctctgtggcttccggaggggcttggaggagcggacgcggagggtgctccatgcccccgggggagaccacgcagtctgctcagacaccaaggagacgcggaagtgcacggtgcggaaggacg

SEQ ID NO: 31453 - DNA, 856 bp, Bovine  19866880444777
  misc_feature (1)..(1): n is a, c, g, or t
nagctggccacctcttggccacttcctgttcaggaagggcatctgtgacggttcctcactttcatgttgaatggaggctggatctctccaatgcgtgccgctccctcatccctcctccatccacatggcctcggggttagctctgccaagaccccgaggtggcccagcacacctgacaccagtctcatcctggttcactatcacacggaggccacagtaatctccaaacgtgaactgcctacgcgtgacactcaagtcacttggatagcatccaagacctgctatgatctggcctccacctctcctgtccacgacccctgacgcccgtcatggcatgctccatactgatctgccttgccttataatgcgctgcctgtgtgtgcagtgacatcccctcttctctcaagacagtgtgaggctgtgtcccctaccaccccgtcatctttgccggctcccagggctgtgcaactcctcccccaaaaggccactcaccctctaggtccccccagcgctctgtctgcttgcctattacagcccgattgcattgcagtgattggtttgcactctcatctcccaactggccatcagctcctcgagggcacagacacaggattatttattgccgaatccccagcccagctgagggcccagcacatagtaggcgctcaattagtgctggttgaatcgaattccctcaccactcctagaactgattcaatttgaaaatgacattgaatccagagaattgatttctgtctcccccaagggcgtgtgaagatacaattcatctcctcgttggttgctcttttttacagaaaactcctgtttctggatggaattgagcctgcagactgtg

SEQ ID NO: 31454 - DNA, 4341 bp, Bovine  19866880464354
  misc_feature (1)..(1): n is a, c, g, or t
ncttctactcacctagactgtatgattatttcagtgctaatttaataactaactaaaaatcagccacatccactgacccagccagaggggactgtttgtagaatctgtcctccaaaatgtttgcacagatatgcaaagacctttgtttaaggatgtccctcactatggggttaagtaaatcatgctacagctaccccttggaataccttgcaactattaacaagaattggggtagggcttccctgggggtccagtggttaagaatcctcttgccactcgggggacacaggttcgatccctggtctgggaaactcccacacgccgcagagcaactaagcccctgtgtcaccactgagcctgcgctctagagcctgggaaccgcgactgctgagcccaggccctgaagctactgaagcccgcacagtccagagcctgtgctccacaaccagagaaagccagcaagcagcaacaaaggcctaccgcagtcaaaaataaaaacaaataaaattttaaaacaattggggaaagatctacatgtggcattatgaaaagatggtcaaagtatagttaaggaaaagttgcagaaatcttatatacatatacatacgtgtgtgctaagttgcctaagtcgtgtctgactctttgcagccctgtggactgtaagcccaccaggctcctccgttcatgggattctccaggcaagaatactggagtgggttgccatgccctcctccaggggatcttacctacacagggatggaacccgcttttcttatgtgttctgcgttggcaggtgggttctttaccactagcgccacctgggaagccccatatacacatatatatgaacataaatacgatgtaaatgtgtatttctttaactaggaaacaagccgtattataaacagaatacaaatcaaaacagaaacaaaagtgatactataagagtgcagtacgtgtgtgtgtgtgtgtgtgtgtcctgaaggatgcacatcatgctttaagataatggggcttcgagtggggagagaggaggtagggacttgcaagttttccagtgagtataaattactttataattaaaatctatataaacctataaagcgaaatgaatacctgcttgtggtttgagaactggagtcttgtgttaaggtaaaaggaagaatatttaattcccacaactctgcgataaccgctgttgacatttttatgcatttccttatgagtctctttccctgttcatgtacgcatatatttttataataaagttggaattatgctccatgagaaattctgttgcctgctttttcacttaatgttttagtataaggattttcccaggtcattaaattcaccctgcaatcgtgctaggaggccccacgatgggatggccacctgtatgctccctagccctgtgtgtgttggaattacacatgcatgaacctccactctgctctgagggactgatgctcctccaggcctgggaagccacgatcccatcctctgctgcatcaccaggatagtaggctgtcaataaatatttgatgatgagtaaatgaatcaacagaacataaacgaacgcacctccaaaggtacatttttttccaggagtcacgtatggatgcaagagttggaccataaagaaggctgagcgccaaagaattgatgctttcgaattgcagtgctagagaagactcttgagagtcccttaaactacaaggagagcaaaccagtccatcctaaaggaaatcgaccctgagtatttagtggaaggactgttgctgaagctgaagctccaatactttggccccttatgtaaagagtcgactcattggaaaagaccctgatgctggcaaagactgaaagccaaaggagaagggggcagcagagaatgagatggttagatagcatcacagactcgatggacatgagtttgagcaaactccaggagatagcagaggacagaggaaactggcgagctgcagtccatgaggtcgaaaagagtcggatactactgagcaactgaacagcaatggagcccaaggctatgtggaagcaggaggagtgatggggaggtagggcagtcatgtgatctcagacagctgaaaggagagtagttacaagggtgatggagtatgggttctgaagcagacaaagacagcagcatctcagacagccctctggagagtgctgagacagggatgcaagccagatgctcagttaatgggaggcgatattcattagtgttcctctccctgggatggtgggaaagctctgaaaagagtccagaaagagactccagaaagacaagccatcagccacagtgatatccacagagcaatgaaagctaaggacaccgatacaggaggctggcaataattcctaggaaagaaaacccccaccaggcatccagatataagaggagtgggtccctgagattaggaaatgatggaaagaagtaaagttctctcaaactctggaccagagctcacccatgggctccatgctccttcctctttacctgtggcagctgctttcaagtacctgaatgggtttttttctttttccccctgcagaaattagcagagacctggaagttaaatttcaggaaaagcatcaaaaggcaggagaaatccttctgcattctttttgggtttagaacaaagactggcagaatagcccaggctggagccagagagaacagaggctttttacaatgaaatgcttctgtggatgatcaggctgcagagaaggcgagagggatcccctcaattcttgctactaatgaggttattggggaggagggtgggaaagaagtggcacaaagctacccggctttatccaaatcccaccatctccagagccagttctccccacccagagtagctgcaggcttgacaaggcagctggggctggaaccacatgttctctttacataagcgggtctcagggtacggctgagtgaagcacctacttggagagggcacagggattgcacaactagatgtcagtgaccagcgggagcagattaagaagtgttgatcagtatgattatccctgcctctcattgtccattcgccactccagctgcgttcatgggaaaatgatctggagaagcactgagaggtccagagagcaagggctgccgcacacgtggtctgctgagcggtacaacgtggctggtgtctggggccactccccacaggcaccatcagccaccccggaacatgaagacaacccccattgtgcagtcagagtcccattctcgaccaccacccactcgctcaggttgtcttccctcctcctgcttcaagccttggagtcacttgtcacttggccctgaactttctgacaagcaccctcttaagcccaggaaggctgaccctcccccttccaggagccactgtgactccacattttctcaaggtttctgccttttccacatctctgattctgcccttcttggctagaattagacgcaaggtagtagttcccactgctacttcctctcccctcagagaaacgaaagacaggcaagatctcatcagggcttctttgtcctaccaaatgcagtgaccagcaagtgtgcaagttgcccacccttgggcccacatgatgacctgcacccagtcacctcctccatcttccccaagaggctatgacccaccatccaccacggtccgttgtcttcttctcctgccttctaaggacagtaataaaaaaattttaagccatcatttctcaaaggaaaggaaaagccaggcactgtgctatgttttacataaatatctcagataaccttcacaattagcctgggggtaggaactctccccatttaccagatgaggaaactgagctcagagaacaagggtctcgcagctgaaaagtgacagaacaagggttttaactcatgcgtgtttaaccccaaagtcagggctgtgtacccggggctagacgtccaccaatgccctaaagttcccacaaaagggcccccgtgcatttcgacatgtttagaacctccatggccacttcctgccccttcagacctttgactgaagtcacagtacccttcccccgccccatccctaattctcagcagctacattcagcgccagtaggtgccctgcagatatccgagaatggaggaatggatgagttaacgaatcctgagtttccatcccaggttcacacatgtatcttgacctcgccaaggctaagaggactgcgtccagctcctttcacaggtgatttttgtcggaggtctctcagcaccttcttttagtgggcatcctaactccaatgtcaagccagcactcctctacaatttttcaggttttcctc

SEQ ID NO: 31455 - DNA, 1735 bp, Bovine  19866880500441
  misc_feature (1)..(1): n is a, c, g, or t
ngcctgctcctctatccacacccatgtgatgagtcctttcctggctcaggtctcacctctctaaatgcctttgtcataagactgtcgacattcacttagctcagcacctttccagactgggaagcgcttccttcctgaaggcaaaagctgctggcttctaatcccttggcccttcttcctattttccagggcccccagacctatatcccaccgagtacatcctgacgaaacaggctttcattttaagctttgtacagaacataacagtcatggaaattaagttttaacttttttttaatctttaaaatccacacagagcagttccccctctagggaatgaggtgtaagcaagcctcccagaatcctgctcctcccacatttgctctaagcatgctcagccctgtcctgactggtctcggcctaccatccctatatgggcagggaagggaagggtgagactctgggaagtctgtgtctgctgcacacaccctggggctggggtctctatttccagggtgagggcctgtaccaagccatttatagccttgccatcaagaactggccaggagggcaggaacacagagcctggtctgagtttcatcaataaagaagtgcccctgtgagttcctgattccaagggtttctaccttcagctgtaaagtgtgaaagaaaaaaaaaaaaaatcattcctggctaactttttcagccacctgaatatccaataaatgaagaatgaatgaaggtaaaatcagtttatccactagataaaacattatgcaaatattaaaaatatttagtttttactgtgagcatatattaaaaatttaatgatgtaaccaaatggaaaagagctaacgatttaatagtaaatgaaaaaagtcagccatagaagaatttaattacaactccaaaacacaaacaccaacagtgtcaacccccacagatggcggagaccacccagggtgctcttggtagtgctcgccccggctcccctgacgtcctagcctgtaagtatacgcaaaagttaccctgctgttcttgagtaagtgttggggttaggaatgaactcatctgtttgccaaacttgctatataaaagattatactccttataaaatgaaaaaaatgaaagtatagaaaagtaagactggggtcaggcagttccacgcggttcagtggctggactttggcactttcgttgccccgggcctgggttggatccctggtaggggagctgggatctcagaggctgcacggctcagcccaaaaacagactgaattcaacaacccacaattcagatgggggaaggggctttaatgttgtttgtatcgaatgtcaaatctacaaaaaaattatggttacaaacaggaaaaccaagtcacttcgaccaatggaatttgaagttactgggagaagaaaatgtaaactctgctccatgtggaatgagaaggcttatctataaacttcaacgcttccgacgactctcaaatttgtaaatagctggggagttcaccgtttctttcttcacttttaccttctgagttttatcctacaaaacaaaaaagttaccagtaaaggctgtaacaagagagggctgtgtaaaatagaaagtttaataactaaagcccctaattcagcccatctcaacattcaaaagagacaaagcccttcgtcctaaggcatccctgactggatgactcaagtcctcccccaggcttccgtaatgatgctggtt

SEQ ID NO: 31456 - DNA, 1052 bp, Bovine  19866880506787
  misc_feature (1)..(1): n is a, c, g, or t
ntagcactgaatgtccagcagtgtggtgacctcatgtcagagcacaaacaaaacatcgctcagtgcaaaaatcctgaacactgagggttttctgtcctcatggatgactgttacaagtggggaggtgtcatgtccttggggatctatcatatttgagtagccataaatgtgattttttttccccccagcagcaagcatctaaagttgagaaggtgttttttaccactgcagtaccagtggccagtagcacaggtacgtaattctgtgttagctgtaaatggaagtcaactctctgggccccctgaggcacagttagttaatcttgctttgccctggattttaatttcttttaaattacattttaatttcttttaaattacatttatcatgtattgtctttctgttagagtatttcatattcttaaagctattgaaagttactgcacttatagcataaataccacatttaacattctttaactagtaatggttctttcccttttacatgtagcctttaatatagccagaacaaagtctgaatcacagttaatgctaaagagagaagttattaattcactggactcttttctaattacagtaatgaagaaatagcatctgggtcagaaactcctataaagctaaagggtcctttttctcaaactctttcttttatacattagaaaacttaggctctgaaagatgaaacgagtcccccaaaggcatcagtgagtttgtggcaacgccaaagcatttgttctcagacaggccttgcccccaacctgttctcttgccccatggtctctagctcttttgagacacacaaagcctgtctaagttcagagtgtgcttgtgcacaacagacataggaaaaagaggaggaatgtgtgcacaaatgtgtcagagaccatggctgcaaagatgagcagaatgtcctaaaggaggtcagagcctctggggcaggcagggctaaatggtacagtgccctctgcacacgacagtgccctcgggccagccctgaggtataagcctgctgcaaacactgcctggaggca

SEQ ID NO: 31457 - DNA, 1448 bp, Bovine  19866880535260
  misc_feature (1)..(1): n is a, c, g, or t
ntggtagtggcagcccctggctctagagcacaggttcagtagttctgacacaggggcttagttgctctgcagcctgtgggatcttcccagaccaaagatagaacccgtgtctcctgcactggcaggcagattctttaccattgagccaccagtttttaaaaggaaatgtaacaaacccaggttttaaaggaaatgtaacaaaaatgcacaatttggggacttccctggtggtactgtagttaagacgttgtactcccaatagagggggcagaagtttaatccttggttgttgaactaagatcccacatgctccatgttatggccaaaaaataaaacgtacaattcgaaacttatataaatgtcaattaaaaatacatagattaaaaatattaaaacatgacagtaactgcagtctggccaccatctgctattatatagccagtgagctaagaatgattttcttactttaaacagttggacacaaaatcagaagaataatattttctgatgtgtgaaaattatgtgaaattcacatttcagtgtccttaaaaaagtcagagaggaacacagctacgtccaactgtttttctattgcctgtggctattttggtgtcgacagcagctttgaatagctgtgacagagatggtatggtttgaaaaatcaacaatatttactatctggccctttatagaaaaagtctgccaacctctggtttagtgcatagctgtataaaaggctttttcagggaagcaaatgatatcacttgatgatgcttagaattgctggcgcttggtgatgaaaatcagactgaattttagctggttttactattgtgatctctacaactggggtgcccccaatgccccccacccccaatgcctgtccctgggaccaccatggccccctgcactcagtgggctacaggaaattaccttttggcctagaatgcagccaccctggatattcctgaaactacagtcatgagttttgtgctcataagttcagcagatctaatcctcccactccactggctgcaggtggcagaaacctgagtgagcagagatggagcgctggggttactgcctcttgtccccatcttcaggaggctgggggctgctgggcttcgggacactttgctcttatgggacagcctccgtgctcagactcatctctccatgagggaccaggcatcgctggctggcagcacccaggcagcccccagacagcaggcaggaaggggctctggccaggaagcatctgatgggtaagaagatggggatgaggatggacagaaagagcttggaagacagtagacccttgatgcagaagaggaaaatatccagatggccttgagttttttttttttaattgaagtacagttgatttatatgcaatgtgttagtttcaggcatagagcaaagtgattcatattatatatatatattat

SEQ ID NO: 31458 - DNA, 2657 bp, Bovine  19866880565761
  misc_feature (1)..(1): n is a, c, g, or t
ngaatagtgtgtagggagcaggcaaggcagctgagcaggccggtggagggagaagacagaccagtgtgcggggtctcaccctagggacacaagaagctacggagaagccctacccagtaggatcagaacaggacctcctgaagataaatctgtagagcgtggccactacctggaggtagcttcttccttcaaaggaaagaagccagggtcagaaaaacctgcctagagacggcatgcgacaaagggtccaagtgagaccgtggcgcacgcagtggggatacagaagggatctccgagaaacaccacggaaacagaacggaaggacctgacagtggagccaacacccttacaacagcacccggcacacaggaggtgctccgcgagcgcagcccagctgctgctgccacccacgcagctagcaaacagtgggctcgggggacaaccctcaagtttacagactaggtgaccagacagggttgacgctacaactgaagaaaaagggagctgatggggtggaggctggtgggggggatggatctccatccatttgagcctgcagttccatgagattccagttgggaggcagctgcaggaaaccgaagaaaaaaactagaggcaagagtaaatgaaggtagaaactccagccagagagtagacgcgactatcaggcaagactagagagaaaaagggagaggactccaatgaaacggtctttcggcttccacccaagccttccctcagaacacagctgggtgataacataggtctgatcagattactcctctactcaaaactttctacagcttttgtctctctcaggataaaagcccaaatccttccaaagacctcggaggccctcccagccctagccctgtctcctgacagcaccacctgttagaccagcccctttcacttggctcgagccctactggatgccttgctatttcctgaacggaccaagctcgctgtcacctcagggactttacgcttgctgctccttctacctggaacactctttgccccaaacatccacacgattcttcccctcaccctcttcatgtcttcttagacagcactttctcagtgaggcctgctctgaccaccctatttaaaactacaagcccgcctttaacccttgctttccccattccctgctttatttttcttcaaggcacttaatatcatctgacattttatatattttcccttttttaatgcctagttcccaccacctagaataaaggctggaaggtagcatctgctcaataaatgatttgaggaatgactgtacaaaggaatacaggaggaatccaaagagaactgacttaaactacgtatttgtatgtaatctggtgaaaactgaagttaacaagacttcctagaacagctctgtgaaatgtgtgcaaaggatatgaattccgataatgtctctcaatgtcctgcaaccactccaacatttcagccacagaggggcttgcagctgaagcctgcaggacagcatcgaggccgatcgtgtctgcgtgctgctcatagatctgaagcacgcgctccacgtggctgctgaccacatcacgcaccttgaggagggtggctctgcggggggaaagtctgatattaggcaatatgatgagaaaggcctacggccaggttcctcaacctcggtaccaagaacatcttggacctgatgattctttgtggtggagggctgccctgtgcgttataggttgttcagcagcaaccttggcctctacctactagatgacaagagcaaactgtccccacccatctcaagctgtggcaaccaataatgtctccagatattgccacacatccccaatgggaaaaactgcctccgaaggagatctactggtcccaggtgccctggatggaggggtggcttaacaattaagaattgacttaaagatgatgaggctgaagttacatcactctcaaaagctgtgtgatgggcccagctgccaaagacagaaaagaccaagcaggctttctgggactcccataaaggagaagaaatgttcacacgtagtcaaatgccacgtatgtgaaaggaataagcaagagggaactacagcaatagagcagtattgtgctcatgctatatcgtgtcccaccctagtgaattcttgaatgggtaaaatttgggctcttgacacacacagattattgtggatctcaggaaagttacttattctcaatcacgaacaaaaacaagtctcttttgttcactgtgcatcctaagtacctaaaacagagactgacagacaaagcaacaaacgtttgtccaatgaaggaaaaggactgttgtgaagagtaaatacagtaatgcatattaagccattagggaagtacctagcttatggcaaattttattatattatttttacataattattttttaaattattatataattatttaaaaagttattattccattggtgactccaagaggtccagccaccaagacgaaggctacaacttcccaaagggcaaggcactccctagcctagaaccgcagctttcaagtttgactgtgactcacaatgaaaacctaggctaaaaataacagcccaatacccacataaaaacatgtaatcaactgaaataaaagttcgctaccttaaaatgtgtaatgaccta

SEQ ID NO: 31459 - DNA, 3295 bp, Bovine  19866880588723
  misc_feature (1)..(1): n is a, c, g, or t
natgggtttgaatccctgctctgcccttactgagcaggtgaattgaggcaagccattccatctctccaaactgcagtcccctcacccatcaagtggggataaaacaacagccaccttccacagtgatggttacaggacacgtctcttcttgacagcccctatataaaatgttctcaatcaaatggcagatgaatgaggacctctataggtgatgttggtgggtgaccaggtatgtatgtgggaagaagggcaaatggggtggagaccatggagattaagaactaagagcctgtcttttgagaagagcctgcctttgaattgtcaagtactatgcagcctcagtggagaaggcaatggcaccccactccagtgttcttgcctggaaaatcccatggacgaacgagcctggtgggctgcagtccatggggtctcaaagagtcagacacggctgagcgacttcaatttcacttttcattttcatgcattggagaaggaaatggcaacctgctccagtgttcttgcctggagaatcccagggacaggggagcctggtgggctgatgtctatggggttgcacagagtcggacacgactgaagcaacttagcagcagcagcagcatgtggcctcagtttctatatctttaaagtgggagcagtgatccctctgtcatagggttgttttaaagtttaaatgagtgtgtgctctggtgcacagatgcctgtgtgtctgtgagtataatataatatctgacatttactgggcgcttattacatgccagtcactattctaagcagagtgctgtattaattcattaatcacatgaacccatgaggcagacattcttaccccccataggcaagttgaaccataacattaatatactgacaagagttgtcactggtaaggtatcaataacccttccatttctcctctagtactgcttttttcctctccctgatgctaaggggtggaaggagcagatgcagagcccacatcttgccagaggctgagcccactcagccgcagcacaaggactcacctcgtttcacttcccaaggagctcctgcagtcctggggagctccatgcagtgttcgaggtaaagggggaacaaataggacagaagcaaaagagttggcactgtttctccagcatcccagagccctgagaggttatatgtctgtgccccatcctcatctgcgggcaggaccaggctgacctagtctgatttcagttgcatccagggatttgatcaagtcataaaaatgaggctgtcttaacactagggcccagggatcactcccttgttcacaccttagagaagcgcttgccatgtgtgcctggagacacaacaaggatgtccccagtggtggcaatcataactgaatgttggaaaaacaaggtgtgtcacgggcacattctggaactctatgtggccataagaacacatgaacggcagctccacaatcagcttgaaggaatctttaaaaatgggatttttgagtgaagaagttgcaaaataattaccttttttgtcataagaagaaaaaacaaacaaacatggacttccctggtggtccagtggttaggaatccacctgccagtgcaggggacattggttctatccctagtctaggaaggttctacatgctgtgtgcaactaagcccacgtgctgcagctactgaagcccacacacctggagcctgtgctccgcaacaagagcagcctgtgtcctgcaatgcaaagcccgcacatggcaacgaagagtagcctctgctcaccgcaactagagaaagtccccatgcagcaatgaagacccagggcagccaattaattaatttttaaaaaacctctccaaacccagactttatgtttttaagaaaacagcggaatgataaacgcaaattttaaatagcatgacccttgacagggaacaaggatttaccatgagggagaagcacagcagagtttcagtagttcaggaaggttctagttcttgggttggggtggaaacatcagtgttcattttattaccttcataatacacacacacatacacatgcatacttttatttgaatcaggtgttaatttagaaaaagatattattcttataatatcttgtatataaatatatatgtgatatatacaacaacaaatctccctcctgcttatccaatgtgttcttaccatcacagtaataacagcaaatattcatatgacccttgggactgggtctttctctagacgctctacatgtatttgacctccatgaaaagtatcactattatctgcattttgcagatggtcaaactgagtcagagaggtcacctcactgaaggacatgcacccactaagtggcagagccaggatgcaccccagcccacccagttctggacctgtgtccctaaccactggactgagcccgtggtttgcctccattatcctatttagttcttacactggcccttgcagggataggttagttattattccatcttccagaagaggaagccaagccaaacttctgctggcgggagggagcacatttataaacctcttccttcaccatgcccccagcgggcccagctgatggatcatggcacagactcaagacccgccccttgtaggcagttgtcattaatcaattaaggtcagtccacactttaaaacctgtttaccacccctcagcctaaacaacctccacttctgcaggccctagtggtcctcccagcccttctgtctgaaagacctctgccccctcctcagctgtggaccacacctgactgccactggggcactccggacctgagaggttggtcttcccaccatccagtgttccacgtctgttacagatcgaaactgcccttgaacaagcctctgacgccccttgcctcggtttccccaaatgtgacttgggcaaaaggttgcatgacctgtaccgaccctaaagcaacatctgtgtctctgctttctgcctgtcttggagggagggtgagttaaagaccaggaccactggggaccccatttctggagaatcaagactttgggggccctgctggcctcacccctccccaagccctggattatactccaagccgctcctagcagcagcacattgcaatagatattaattgctacattaaattctatgatactgcttaagaagaatgttcatttaatttccctgcaactgtggtcaacctgatctttaatcgaaactgacaggcacaatttaaatcaggtagcaaactcccctctctttaaaggagccaagaatggcatgaatattaaatg

SEQ ID NO: 31460 - DNA, 2917 bp, Bovine  19866880609505
  misc_feature (1)..(1): n is a, c, g, or t
nagtgattaaacaaactggtatgttctaccatgactgtgctaaaaaggaataaactattaatacaagcaacaatttggatagatctcgaggacattatctaagttaaaagaattgatctcaaaagtctcatactggaagatgccatttatataacattcttgccactaaatggagaaggaaatggcaccccactctagttcttttgcctagaaaatcccatggacggaggagcctggtaggctgcagtccatggggtcgagaagagtcggacacgactgagcgacttccctttcacttttcactttcatgcattggagaaggaaatggcaacccactccagtgttcttgcctggagaattccagggacgggggagcctggtgggctgccgtctatggggtcgcacagagtcagacacgactgaagcgacttagcagcagcagcttgcctttaaaaaattatgaagatggaggataagtcagtgattgccagagggtagagatggtcacatataggacaagattaaaggggtagcatgatggagatcttttgtggtgatggagtaggtctgtatcttaatagtggtaatggttacacaaagctatttacgtaacaaaaattacatagcgctatatacacaatttctatcaatgtaaatatcccggttttgatatttacataatgtgtaaactgtgggggaactgggtaaaggatccactagacctctctataccacctttgcaactttctgtgaattttaactgttcaaaataaaaggtgctttttaaacataaataatactgatggtgagtggatctgagaacttttcagactgctataagaatctattaattgacctctttgcaagatacacccgtgaatatttctatgcttggtaacctgaaaatcttgcccaagacacctctttggcaaaattctaggcatatttcctccgtgcttatgctgacatagcttataaagaaataaaaaacataaaccgttgccatttgtgtccctgtatctaggcacgcctgagtgcatattgcgagaccaagggagagaaaataaatgacttggatccttaaattgatggagagtgtagattcattatctgcgatatctattggtggcatcacaaataccatgaaaacaatggtgatccgctgtccatattcctaagtggaaagaaatgctaaatttctgcatcagcttatttaaaataaatatttcttcccaaccaagttcacagggactctgaattcttatcctaagttacacatacctgagtattcttttaactgccttcccaagttttgatttgttcctatttttcattcctgttcagttcaaaatatttttctatttccattgtgatttcctctttgacccgagggttatgtagacgagtattgctttgcatctccttcaagcccccactccctccctatatcccttgcagatgtgctttagaggtgaagctctgcaaagcttggagataatggagctcccctggcaaagctgactgagaagtgcactggaaggttgtcggagccattgctactgcagcccagatgaagtgtttaatgtgcagattttattgctttaaaatgtatcattttttaaaaagagcaataacacaagctcaagcttcaaagatgccatggttgcctggaggaaacctggggcttaggcaaagactgtgaggccaagagaggggtgcccacggttgattgacccctcaaacggctgcctgccaagcttcatccttctgctttgcttccaggtgagaggagcccctgaagactaccagggacagggctggaaacttctagctgagcagaacctgtggcaagtcccaatcaagctgccctacatcctctaaaaccaaagagacacctggggaggcaggagaagtgtaggaagtcaggcagaggagaccactgtggatgccaaaacagtctgcaagagttggggcactgactgtggtcacaccagattgagagagctcgtctccagtctggaaattcagggtgtactcctcaagcttcagttgggtttcgcaagatggataatggctagaaattaaattcaatgggatttacttccatgattcaacttgttgtgtgacagtgagtgatacctcaactttctagtcctcgatttccctatgtgtgcagagaagaggttaaaacaatgctacaaagtccatgatgcaaactgctgagtaagtggcacagcccctctgagcctcggttcattcagatatgcatgcaaggtggcgatgcctgtctgtgcccaggatcactgcaatgaacaggtgatggtgaacaagggaaactgtgtctccaggcaccaactgagatgaaacctgttttctaagccaccccagcctaagaggtaggaacaagctcacaagaacagtggtaagttggtgtttcttggttctgccctccacccactctaggagaactccacactcacactcatacccaaccccacttaaattctcttgcagacttctaggatctcccaggagcatctcacatatagtcaggtgaccatgtggcctcagctacattatgactcgttgaaatgatgcccctattcctggcaagcctgcacatgacagaggtgccacccacaccctcccagggcattgtaccaccctgtgggcgcccactgtctgttctgaggatagcagtgtccagggcatcactcctgcatggagcatggatccatggtttgggagtagatccccaaacctctctctttctttctttcctacttgcagtcccaagtaggagtcccctgccagggtgcaaaatttagggcccagctcactttcaggcttgtgcagagcctgaccctgctctttcataagacccaccatgattgcctctttaaattgtacttcctag

SEQ ID NO: 31461 - DNA, 563 bp, Bovine  19866880611171
  misc_feature (1)..(1): n is a, c, g, or t
ncatctacctatactccactcatccatgcaacccttgatcacctcttcagccacccacctatccacttaccccaaccactcccccatccatcctctcaaccaatcatccagtttaacaggtcccatgttgagaagttggagaaggaaatggcaacccactccagtgttcttgcctggagaatcccatggacggagaagcctggtaggctgcagtcgatggggtcgcacagagtcggacacgactgaatcgacttagcagcagcatgttgagaagtaggaacatggaggtaaataagaccagtccccctgttcttaaaatgctcctagctagcctcttcccttcccctacctctcagccatatagagtaggcatgtgagagcccaagtgagatcaccaactgggaggaaacaatgaagtctattgttacatccatggatcttgtgtgtcagagcactggcaacctccttgccctactcatttcttcagggccttacagaagatggagtcggcatggcctctgcatggccctaggactccccttagctccaaattctcattccag

SEQ ID NO: 31462 - DNA, 1989 bp, Bovine  19866880611241
  misc_feature (1)..(1): n is a, c, g, or t
nttgaatcgcacagagaagcttcatgccatataaattttggttttaaaattcatttagctaatattttatttgagattttacatctgtatttttaattggagggttgacaaaatgtgggaatcaccaaaacgcagcccagagacatgagacgagtaaatgctgctgggaaacggcaccagcagatttgtcgcatgcatggtggccacaaaccttccatttggaaaaaaggcaacatctgcaaagcaaaataaaacaaggtctgtttgtacagatgtcaccggactagtgagggctgagccagatgacatgcatacagcacttagcacagcgcctggcacttcgcaggcacttaataaagggtagcttttattattattagcagaattgttttaaacctgctgtgggtgggtcctggacaggccaaggctattggcagccctgctaacaacagaggctcagtgtgtccccatcggttaccattatgaggctggcaacgcttgagggattctgatagaggggaaatcgattggggtgcaggcacgagggaaagaactacatttgtcagggagggttgttgcccaagagaaatataaagggctccttttagctcattctctttcctccttgagaacatctagtcttattaaaatacaatgaggagcatggttcccaccttcatcatagctagttgggaagcagaagatgctcaggcaaagcagaagaaggaaccaagccatctgtctgttggggcgaatgcataaggcgtctctaaggatcaggatgaagagaaagcgtgtgtgtgtgtgtgtgtgtgtgtgtggtcagcagcaagagcaccccagccagggctcaggtgcagggaacccgtgcacgacgggtcctgggcatggggtaggcttgtgtggtcccagatcatcttttaataccagcacctctcctctcgcttcatgagtcccacctgtcccagccaagtttctcaactcaatgcccccactgatattttcagcccacatttgacagtcccatccgtgggtctgggtccattttttcattcagcccattgatctgtatggatgcctgctgggtgctgggagagacacagaaaatgtaactgattcaaaccttcagggggtgtgtcctctaatcactgagatgtgacatgtgcaccaacatacccagtcacgtcaatccatcaggccactcttctgatgagaaatctacagggtctccaagcacttgcaagatggtatccaaagccttgagcctagcatctgaatcctcacaattagccataagtaaccagctccagccccattcttcctcttcttccatactctgcctcctcttatccagcctgttgaacaccaacgtggtcatgcctctgggtctttgcccctactatactctcctcctttggagaaatttctgcacttccttcaatgtcctgctcaaatacctatttctccatctctcttatcaaggaactccaggaaattttggtctcttttccttctatgtttccaaaacatcagatgcaaatattcatttcagcacttccagagctattatatatatttatacatgttcatattccccattgatctgtgagctctttgaaggcaaggcccgtgtcctaggaatatcttataatacaacagtaggggattaataaatgtttgcctaatataatagaaatggacaataaatataagtaaaaatgctcaacctccctaatagtggggatttccctgatggtctagtggttaagactctgtaactccaatgcaggggacacaaatttgatcattggtcagggaagtaagatcccatatgctgcgtgacaccaccaaaaagttttgcttctctggtagctcacatggtaaagagtcttcctgaaatacaagaggccccgggttttgatccctgggtcaggaaagaccctctgaagaaggaaatggcaacccactccagtagtcttgcctgaaaaa

SEQ ID NO: 31463 - DNA, 849 bp, Bovine  19866880625114
  misc_feature (1)..(1): n is a, c, g, or t
ncactgaagacagatgatggaggaggtgttggtaagatattttatgcccctaaaatgtactgagctaaatgtgttggaattttatcttctatatctgcttgcattgactgaacttttgcaaagttaggagtgcttgctctgggtcaggctcagggccatatagccactagtaatagatctgggactctgatccatgcctatctcactgtaacactcatactcttaatgacaatacagaggctctctctctgaatgggttcccttaacatgaaagagtcagaatctccagcctagggggtttctcagattctgaccttatctgatcttatattctgtatgctctataccaacactaaaaaggtatctcaaagggaaaaggattaagcaaaagaagaataaaaaagaagcaaaacattttaaaagaaaaaaaaatccatccctcttccaccctaccacagtcatttctcacttctgcatattatctttcagtccttgttgacacactgacatattttccatcattgcaactaaagcaattgtagtatttgtattgtatgttccctttgtgtctgatcataaaccttttcccaagttattctacagtctctgtaatgatcacttttaatgtctgcataatgttcaaacaaatggatgcaccatgatttactaaacaaccccctaattgttgaacattaaggttattttcagttttttattttgtagattgtgctatgatgagcatttttatgtgaaaaccatgtggggtgattgaaagagcatgagcatggagtcagacagaatagagttaaaacacagctttgcaatttacctctagtgagttgaaagaat

SEQ ID NO: 31464 - DNA, 1224 bp, Bovine  19866880638051
  misc_feature (1)..(1): n is a, c, g, or t
ntttcaggaaatgatgtgatcctttcaggagcacctgagatttaactggattccattcttggggttacttgcgctttaataaccaggggaaaaatatgcaaacatggcaagacagcagaggctcttccaggtgtttagagagaaggtctctgggtgaggagggcttaggccctgctgctcaacgtcctacgggcaggtttgtgggccatgcagcttttcttcctgcctcctacccccaacacctcctgttccaaaactgttgtttatttccaggataggactgggctctcggtggtgggcatcatggcaggctttcagaaccggctgcagtctcttcttaccctctcctccccagccaaaggtcccgctccctgctcaggcacccagcctacctggaagctcccagttcagtgcctcccagagacgcagcttctatgtaagcactggagcttctgcaggggtgggactgaaagagccaggctgctaagaagccagaaccaggtttgcaggcaagccccagccccaccctgtaattaggcaggtgctggtgaggaaggggaaggggaggagagagagaacaggcctgcaaaaccgccgcatgaagtgcctgccagcgggattctgggttcagacggtctcccgacccagccatggtctcctgagccatccccgacccagatggctatccgtgacctcagagagaaccctgagggggtagggaatgggtagagatgggctgagtggaaaggggccttttcccagcctccccggtggagaattgctctcttgatgaaaagcaggcccactttagagtgagtggctggtctgcgcagtggcgcattcatctggtattcataagcctggcatgttagctctaatggcaaggcaccgcgggctctggctgagacactcagcacggctttgcagctagctccctttcccggcccactctgtgatttcccgttagtgaaatgaacatgcagaactcagatgacagtagcttggactgccaggggtacacacacgtgcacacatgtctacgcacgcaggcacactgggctgggttctgatccaacgtctgggtgaaggtggcaggacagctacttcccaacacagctacacatcgtcgaaggtcggcttgggagcctctgcatcacagattgctagagcgtcggagacgaggagcacaggctggaagccgagagaccaagatgcaagtcccag

SEQ ID NO: 31465 - DNA, 1224 bp, Bovine  19866880639623
  misc_feature (1)..(1): n is a, c, g, or t
ncatgattgcagctgtgggtatatgaataacacatgtgatcaaattgcatagaactaaccacacacacataagtgagggcatgtaaaactggtaaactctcaataaggtctgtgcattgtaacagtggttttctggttttgataatgaactgtatatatagttataaagatgttatctttgagagaaactgaatgaagagtccataggttctctaaatgctttttttgcaatttctgtgaatctataacaatttcaaaataaataaaataaaataataatccaagatgcaatgtccaaaaaagatggtggaatagagaaggatgcctctttaatatctaatgaaacaggagagaagaactctttcccacaaaaaacaaacaaaaattcccagtgttcataccagcacagtttacagtagccaagatatggaaacaatctaaatgtccattggcagatgaacagataaaaaacatgcggtaggtgtgctcagtcacttcagtcatgtctgatttttttgtgaccctatggaccatagcccaccaggctcttctgtctattgggattttcccagaaagaatactggagtaggttgccaagccttcctccaggggatcttctcaactcagggatctgggtaaatttactgcccgtttatctgggtaaatggtaaattttatgttatgtatattttaccacattttaattaaatcaccttggaaggaagacccatgtgatgagggatggggccaaactatagatatagttgaaggtttccatcaaaagaggaaaccaagctaggaaaaaaaaaaatactcttacagactgaactgaaaagtaaagcattttaatgtgttcataaaggcacgtttgagcaacccgtcaggagaccaagggaaagtagggtctttaccttacagtcacgtgactgagcagatgttgatgtttagggcattttattgatctttgttcgcagtgtataacgataacgcctgtaagatgttcaatgcaaatttcctgacgtgaaatagctggttaagaaaatgttaacaagataatacaagcttctgagaaaaccacggtatcaactggagaaagtgaacagatggaggtaaacttctgcaaaattgcagaagtggcaagagcggtcgctgacacatcctggctgaggcagagcctcagtcacagtaacgcttcccctcaacggctctacagcctcagtcaca

SEQ ID NO: 31466 - DNA, 2657 bp, Bovine  19866880646308
  misc_feature (1)..(1): n is a, c, g, or t
ngatgctaggatgaaaggcatcgatgcctggccatctagaggaggaactgcacctgacccctcagaggaaagaaggaggaaatgagccctgacacctgcccggcccttgttggcttttccttccccttgtcaccggactttcacaatgtcctacaaggtgtgggttcacagataaggaattcagatcagaggggctgagaggctcacccacagccccccaccaagggcccattcactgcccgctgctgggctagaccctataggagcagacttcctacacactcctatctgcttgtataggtgatgctcccagcagggaaggggcggggtgacatcttcccaattcctttaggtcctgtgctctgtgcactatgtcatcctgcccccaacacatctgatcacggtgcatgctggacatgctgccatcatttcatctctgcacacaccccctgattagagcccctgccacactcacagcccccaaaggtgcatctcccctgtatctgtggccccacttctacgggcccggtattcaggaatcagggcagactctgacccaagctgggccaatcagaatcccacttttgggcatttgaacataccatggaaagacagtgaggccctggctgcagaatttataagcaggcttggggaggggaggggaaaaggggctgccagcctgggcggctgcaaggtgcccttcctgcagaggaggcggggttggtatggagagaactcagagatgaggggctggtgattcctgccacgcttctggtcatcaggctccatgagacactcctgaaggctttcaaacactagccccttttgtactggctcgtcttttcaagggttttggttccccacaaagtcacactccctatgggccagggagcaaccacccagctcagcactgggactgtatctatgctctgatccctgagtgtcagttcagtgagccctttctaagcaactgctgcctgcctggctccttcccagcaaccttcgctgtggtctccttgacgtcagggacccccagaacccagtcccagccgcttttctcactcatgcccccctcccttggccatcccctcaggtcctttggcttcagctaccatctctgggttgaaagcccccaacttcctctctctctctctcagctctccagatttctcttttcaaaatctgttatctgattcagcaaagaactccctggagtcactgaggagggagtgaagtcctaacacatgtaatgctaagttgaaagcaaagttttgctttaaagaatacaattgtcaccaaagtgagaacagtttaactgtagattacctatcaaattcagacaataaacttaggcagaaagagatagtggatctggacctaactccacttgttaaaccacccttgagctgcaaccataggctgaccacagatacaagaagtcagccaaaatcaagaaaaagtatcctaggagaatcaactagccctacagagtttacaataaggaacattgtatactttctattattatttgtaaatgattggttacacagtctccacatcagtaaaattaaaatttgagtgcatacattcattactgtgagagctgactgttaaacatttatcagtacatcatttatcagcatattatttatgctgagccctggcacaccaccagacctggcaacatgttcccacagtggtacttttccataaaatttgaaacaatatgtttctgcgttctttttcttaaaaagggtgcaaactatgcacagaatccagccacagaaagtctgcatcagcccccaggggaagctttttgtcaactgtgaacagtaggcagtagtggcgaaaatggacacgatgacgggttaccgaaaggagacccgagcaaagagggagagctgtgtgtccacggtgaggaggggccaggaagaaactccggctgggtaggccgctcagggggccagtggagatgtttagaaacaaagcaaggacttatgctgggagggacttgtaaagaaaaggaagccggcaagagagggggacagaccgcagctggtaatgcaacccgaggtccctcccagacccagactcaccttctcgaagtatctgatctcatactctgtgccgttggcccctggggctcccgcggggatgggctcccgccacgacagagacacgctctggggctccactcggtccctgcggatctcatcctcctcccagggcgctgaaagttgagtaatgcgaggttctctggggcaggggcagggggctggaaaggcggggcgcgcggggagccaaatggggcagggcccaaggggctgtgggtggggcaagagcctcctgaggggcggggcctgagggatagcctcttcatgacgctagaggaaagctctgacaccacagctcttggcttccttggttctgagcgggaaagaagtaggccacgtgctgcttgcccaccccctacactccagcttcccttcaggtggctggttctaattgccccaggctatttctacatgttctatggctcggagatattagacagcacagcaggcaggaagacaagctacttaactattctaatagtctggtcaagaggtaatatactcaaataaactaggaatagaaggaaatagttcagttcagtt

SEQ ID NO: 31467 - DNA, 1818 bp, Bovine  19866880662758
  misc_feature (1)..(1): n is a, c, g, or t
nagatcagtcctgggtattcattggaaggactgatgctgaagctgaaactccaatactttggccacctcatgcgaagagttgactcattggaaaagaccctgatgctgggggggattgggggcaggagaagacgataacagaggatgagatggctggatggcatcaccgactccatggacatgagtttgagtaaactccgggagttgatggacaaggaggcctttgtgattcatggggtcgcaaagagtcggacatgactgagggactgaacggaactgaactgaaaggggataatgagattaattctggtgaactcaaggcagacggtggtggcaagcttgtgaatgtcttggggtaggagggatgggtgtctgaggctccctcccccttggtacttgtctttggaggttaggaggtctaggaaaactgggtctggctctgagcaaacagacccctacttgacctctatggatggtagggagaaggccttgaggcaagggctagggatgagggttggcgaggaattcggggcaaggtcccagtcccgatgcttgggatttcctctctaccccttcccaggaggggagcctcacttcatagtggcaggtccccctcttgaactctgatactttagctataaacctattttcatgtgttcattaggtatttattaatacttcttttgaaaattgcttattactatcctttgcccattatcctactaggctgattttcagtacttttttaaagaagccttggtatgtttcttcatttcttcaaatctttaaaaaatatatctgttacaattgacccttggacaacatgggtttgagttgcactggtccacgtatatgcagattgttttcagtagtggaggctgcagtacaccgtgtcctgagttggttgaatttgcaggtgtagaccctcaaatacagagggaccacgtatagggaaaccgtatatacagagggctgactgcagctgcctggaggattggttcccctgtgccccagccccctcattgttcaagggtcagctgcagtaaatttttacaggtttcttcttatataattcttaattttattcctaggtattgagtaatatttgttactgttgaaataagatctttcaaaattactattaatacattttcatttctggcataagagaaaggtagcttttttctttatgtaattatcttggactgcaaggagatccagccggtccatcctaaaggaaatcagtcctgaatgttcattggaaggactgatgttgaagctgaaactccaatactttggccacctgatgcaaagagcagactcatttgaaaagaccctgatgctgggaaagattgaaggcaagagaagaaggggacaacagaggatgagatggttggatggcatcactgactcaatggacatgagtttgagtaaactccgggagttggtgatggacagggaggcctggcgtgctgcagtccaaggggtcgcaaagagttggacacgactaagtgaccgaactgaactgcattatcttgtatgtgactacttaattctctctgtgagttgttttttccctaagtttgcctgtaggtattcttgtttctcaggctctgaacctgggcgtgtgctgttagagctatatttgggcagcagcctgggataccttggagaaggagatggcaacccactccagtattcttggctgggaaatctcatggacagaggagcctggcaggctacagtctgtggggtcgcaaagagtcaaacacaactgagcggctaacactttcactgggtggtagccttgcaagcgaa

SEQ ID NO: 31468 - DNA, 709 bp, Bovine  19866880664055
  misc_feature (1)..(1): n is a, c, g, or t
naacccatgcccctgcagtggaagcttggggtcttaaccaatgaaccaccgaggaagtccaaggcacgtacttattggtctagctagccagttggctttgaggttgccaaagcctgatccaagtagggacaggctctttctataaaggaccagttagtaaatattttaggctttgttggccagagagtccctgttgcagctgctggactatgctgttgtagcatggagcagccataaacaacacagaaatggatgagtgtgcctacgttccaagaaaacgttcttcaccaaaacaggcaacaggccacatttgacctcacacccatagtttgcccatctcctggtctgattcgtggactccctaacattgctgtgattgccgcaagcttctgccctgggggctgtgagatgatagaaatattagttagtgtcagtggccaattacatccaagtcagggaaccatagcccctaaatgaaaacttcccactttttactccaaataaatggtctctgcctgcacttcctgcttttagccattgtaggatgtctactttgccacttgtgtcttcgggagcccatgtaattggcaggtttttttttttttaattattatttttattggagttatttattttataattgctttgcaatgttgtgttagtttctgctgtacaacaaagtgaatcagccacgtgaatacatatatcc

SEQ ID NO: 31469 - DNA, 1246 bp, Bovine  19866880723183
  misc_feature (1)..(1): n is a, c, g, or t
nacttggtgactgaacatgcaggatcttagttcccccaccagggatagaacacatactccctgtagtggacaggagagtcctaaccactggactgccagagaagtccccagaggggatcttttcatttcttttgaataaaattagtcagctgctcctccccacactaggtactagtcaacatttaatgtcgagtacatacagatatgagacctcaatggaaatacaatggtaagcaagatcagctaacgttaatgttgtctagtcactaagtcacttgtgtcccgactcttttgcaaccccatggacttgatagcctgccaggctcctctatccatgggattttctaggcaagaatacttgagtgggttgccatgtccttctacaggtgatcttcccaacccagggatggaatctgagtttcctgcattggcagttggattcttttaccactgagccaccagagaagcccaataatctcattagtttccacccaaggggaccagctagtggcagcactgactgacttgcatcatctctccttcccatctcacaccccatcaccacctgagggtgaggaggcagggacaggtgtcagctggtatgaggcccacgacagataacctgccccaactctgactcttctgggaagaaaaacccccccactgccaactcagaaagcactgctgcttcatcaggaccaccactcaagtcactgagatgtgaagatctggttccagggcaggtgtgggccctatcactcccattccctcgacaccctccacaactgtcgacttctactcccgcaatactgattcaaagatttccttagcaccaaaatatacctgtgaacacaaggtcttctgtgctagcaaagaagtacattttgaaagggggctatatttacaaattttattattttttattccaaaaatacatataaatgaaaacctgctcctcaaatgcagggaggcctttgcctatgatattgtattacattttacgtcacaaaacattctcataggaaactcagtatgcggctctttcacacacaattttttaaatatgtacatatatacatacacacaacagatgtaagcagttgtgacttttctacttccacataatcctctggtggaaaattagaaaatcgggcaattcccatacttttcagccttgggaaggtaaatacaacttttctgaacgttgttttaaaaagatgaaacatgtaaaccacacaaccgtctt

SEQ ID NO: 31470 - DNA, 1099 bp, Bovine  19866880728457
  misc_feature (1)..(1): n is a, c, g, or t
natagaatccggtaaatcccaattgtttgtcaattaaaattttttttctttcacaggatacaaatcactcactttgtctgaggaatttaagccttctgtccacagattctgaatttcaagaaaattccaatacagtaagtgtacctgtgatatggatgttattaaaataaatgcaagaattgagcctccctttagtgggaaaattgagtgaggccagtcttggaagtctttcagattgagttgtgttcaattactagccacttagggtgttttgattttgtttcctgataagagctctcattggagaggttgttctctccaacgcatagtgccttttggcccagatcactcgcttgataacctcctgcaccagaaaataacttctttatttatttagcaaatatttattgagtgcctactccagtcgggcatatcagaccaaccctcccacagaaaacaactgtatatgctgggcaaaatatgaaaacaactacgtgaaggcaccagagagcaacccaaacaggcagaggcaacatttgaacaaaggggccacttggaggatagcagtggcactggatgggtcttcaggctttatggcttatccgtctcagaccaagcccagttgataccaaacaagatggctcaggctcagtaaacactcgctcttactggagtgactaccaggaggacagagttcagggctactgcagcacctggagagtcgagggggatgacctggaaaggagaaaacacacaggtcgagtcccaagttctgtttggagctgtgtccaaacctctaggtgacccctgaactgtgggtgtgtggggcagaccccaagcagtccagctgaggctaaagagctggatgaagatgacagctgccatccactgcagggaagacagagcttggagttagagcatagccaagtcactggaatgttatagcaaacaaccaaatactcttccaagaagtgtaacagaatcctgagtctctgcagcatatcatttgcaatgtctagggttatccaaaattagtaaacataagacataggagaacattacctctactccagagaaaagttcatttatggactatgga

SEQ ID NO: 31471 - DNA, 588 bp, Bovine  19866880757108
  misc_feature (1)..(1): n is a, c, g, or t
ntgggaaagactgcggctccatgtaagctctgggctctcccttctgcacaggtggaacacagccagcaggggtcctgggtggggccgggggctggaggcccccctgggatcctggccggaagagtggggctgctcacacctgcaccccccggccctgcagctggagcacccgggcccgcagggcgctgatcccgctgaggaggtcctcccggtgttccgccgatgagatgcccaggctcaccaggtccctgggaagaaggctggtcagatctagctggctcatccccaccgtcttctctcccttccactccaccccgccaggaaacaacccagaatgaggacaagctgggcctcccatgcaggcaggggcagggccccccggctcctcagactcactgggcagtcatggcggccacggcctccaggctcccatagcccacagcagcgaagctgtctttgtagcggcccaggtccagggcctccagccatgcgcccacagagccaaaggaggggaaggtggagaaggcacggtcctccaggggcgtgggaggcctgggggcgggggggtggaggagctgggtcagtcga

SEQ ID NO: 31472 - DNA, 2003 bp, Bovine  19866880758711
  misc_feature (1)..(1): n is a, c, g, or t
ntccatggggtcgcaaagagtagggcacaactgagagactaatcccccacattccattgttcggatataacacattttgtgtagctattcaccagttgatagacatttgagttgtttccatttttgaggctgttataaataaagcactgtggacatgcacacacacattttttgtggacatgtgttttcatttctcttgggtagatatctaggatattatcccactcttataagctaatctggatccttcccttgttctcttcaacatccatggctggggtgtctctcttccaattacaggagaattcttcagctctgctctgcattttctccttccctattgccttgagggtcttgctccattaattctcctttttctctttcttatcaccagcattctcctgaataaaatggggataataataaggcctgtctcatagtgtttttgtgagaattatatgggtttaagggtgtctcaggtggctcaatggttaacaatccacctgccaatgcaggagacactgaagatgcaggtttgatccctgggttgggaagatcccctggaacaggaaaaggcaacccactccagtattcttgcctgggaaaccttatggacagagtggcctggtgggctcatccatgggggtcataaagagtcagacatgactgagcaactgagcacacgggcacacaaatggtttaatacacatcaaggtagatagactctagggtggcctcatgatccccatctcctgctattcaggcttttgtgtaattccctctgatggtgtagacaggacttgtgctacatttctaatcaacagaatatgacaaagatgataagatgtcattcccatgattatgtcacattatataatactccatcttagaaaacagagattccctcactggcttgatgatgctcacagccacattgggaagctctgtgcatcctctagggactgcaagtggcctgtaggaagtgcaagtggcttctaggacctcagcgaagcctctagccatcagcaagagccaaagaactcagagttgcaaccacaaggaactgaatcctgtcaataatctcagtgggtttaatctgccccagttgagcctccagatgagaatacagcccagttgacactttgattgtaggtgtcaatctacaattgactgtgagactctaagcaaggggacccaacaaagccatgtcaggattcccaacccatagaaactgtgaaataataaatacatgttgttttaagctactaaattggtggtaatttgttatagcgatggaaaatgaatacacacagagcttagaagagagtctggcacagcctacgactattagctggtgctagtggtgattccagattagcaattttcccttagagtataaccaagcaaaactcatctcaaaaatcaatggaaccttctttatttttcgcccctgaaaaatctcttcctagagttttctgtattcatgacttgcttttctgttcactcccgttttgctgaaatttaattcctgtttcctctactccactggagctcttcttctcaaggtcaccaatcatctcctagttactgaatctgatgaatggcttgaatcctttctgtaattgacttctctgtggcctttgatgttggtgactgaagtgcctcggagtcttgtcctccaaagacactcactgaatctaaatctctttcagaggacccaagagggatcagatccttgacagggtggctcctggtaactttcattattcattcatgtattcattcattcatatacttgcacacttctgggtcttgcagatgcagcactaaagaactcaacagcctaggcacagtctccactctcagtggaaattatgttctacacataagggcaccagttaaaataagtcaacaatagtatgatttcagagaatggtaggaattatcatgacagtagatagatagggtgaaatgatagaggctgctacatcaaggggcggcta

SEQ ID NO: 31473 - DNA, 1649 bp, Bovine  19866880803711
  misc_feature (1)..(1): n is a, c, g, or t
ngagcctggtgggctgcagtccatggggttgctaagagtcagacacgactgagcaatatacctttactgccatccttccctaagatcacctaccctgggggcttcagaggaagcagattgaaggctgctggggtaagggcttgggtttggttgcccacttttctttcccacccatccatgtttttaactagcatttattgaaaatccttaggttccaatctgttcaagtaatctccttgccttctagttgaatgacacttccatgcactgggctgatggagaatgcagccataaatcagatgaggttcctgtcctcaaggagcttgccatccaaggagcttccaaagggaaccagacatagaaacagtcaatgaggcagatgttccaacggagacctgagtaaaatgtggtgggagtgaatgtgtggggggcgattcactctgatggagacttttgggccaagttttatgaaggaagtggagtgtaagctgcccctggtagaatgggccgggatttacaagctgctgaagcaggtgaggagagactcagcctgggaaatccagcttgagagatgttcagggacctgatgtgcatggtggtctgggggctgtgagtggacaggatcagggtagagtaggtgggaatatgcctagaaccacgttatcctgaaacccaccatgggttcagtactctgcttaagactttacaactctcattctatccttatagctatctttcaaggtcagtatgatcattcccaatttatagataagataactggggcctaaagaggacaagtgatttgtgcaagatcagacagtaagtggcacagctgggatttgtctttatgagtccagaagtggtgcagccagaaacaggcttaggaatttgggatttatgatataagcggtggggaaggacttggggtcttaaaggttttgaggagaagagtagaacttctcaaccgttgccttaaaaagatcagtttgtaaggatggtgggagatggagggaacaagcttggagaactgtggactgcagggtaagccaggcagaagagcaggaacaatgcaacgggaatggggaacatggcagtggcagtggaggatctgggaagaatgcaaggaacagggctcgatgacagcaggatcgggatggggaggtggcgtttctagaactttccccaccgtttcacagaacccatgggtagggagtgttcacgaggccgtgcagtccactctcctgtgtacctgaccctgatgcttgaatccccttgtaaacaacctgggctttgggaatccagtgaaccactccaccagaattcagaaacacctcagcattcaatcacactgctccagctcaggggtgttcactttcttttgattcttggatgcttccgactattaaaaaggtctcctttcaattgaaatgaaacttgcctctccacactctccacccaatcagtccaattctgtctcttgggacaaggcagaaagggtcatgatgcatatttcatatgcccgatcatcagatacttgatgacaattttcatgtcctcctaaactcttttcatctataggctatacagtaataatggtaataatgtgaatatttattgtgccttttctgtccccggcactgtgccgagag

SEQ ID NO: 31474 - DNA, 1146 bp, Bovine  19866880863554
  misc_feature (1)..(1): n is a, c, g, or t
ncaggtcaggctttgtttcagaggaactctgctccagaaacaaaggctaagagcatgctttgggggctggagtgtgcatggaggcagaggcagcattgtggcatcatctggcttggggtccctgagtgattgacaggactcccaatacttgatctttccccgtcttcccaggagaggtaaattattgtcttgcttttagatcttattagactatctttccagctgtgctcggtcgcttcagtcgtgtctgactctttgtgaccctatggactgtagcccgccaggctcctctgtccatgggattctccaggcaagaatactggagtgggttgccatgccctcctccctttccagctgtatgggaataaaatagtcaaggagaacacaaggctgttgccagtgaacttggaccaagataactgagtaagaggcatgctagagatgatgttaaatgggatggcaagaggaaaagagaccctgagcagtcaagttccttccccatgcagctcccaagagactgagcctccgggcattctgtcagaagcacaccggatagggtgggcgaagcccctcctaatccctgtgccctttgtgctctgtccccgcagtgtgatcttgtggctgggggacctcaactacaggatagaagatccggatgtggaaaaagtgaaaaaactcatcgaagagaaggcctttcaaacgctgtatgcgtatgaccaggtaccagcggccacccaggcactcttcaggcagctgtcgttgccctgccccaccccccagggggcacagaaagcctggctgcccagctccagctccgcctcttcttcctcatcttgggagggttccctgaggagctggcgcccgccatcccttccttccctccatctgtgctccctctcctatagctgtctgccccactggtcctgcccttgaggtttgtctcccctggaggcaagagctgttctctttctctctgtctcgtgtgtgcccattcattcagtcattcaagttggggccaaaagggagccaagcttctcatcaagacgatattagtcctttgtatatttcagatgatttactgatgtttcgagtgggccccctgcgccccctgcccctcagcagacctgtgccgtgtgcgggaccact

SEQ ID NO: 31475 - DNA, 1544 bp, Bovine  19866880893086
  misc_feature (1)..(1): n is a, c, g, or t
nggcccgcgggatgcgtagaggtatctcctcacaaacccgctgtgattaagtcattacttaccgtaatgggatcctttcagtcggaggtgatgcctgccacagccgataaggcgggcgatggccacggcggcccggcaggctgcagtaacacgggccctcccctctgtgacaggttcaagctctcacgctcatcgaaaagtccattttccagcacaactgggtacacttccctgtgacaaatgcctgttcgcctttaatctgttacaagccgaagaggcccaaaggaagcactccatcacaggaggaatgtttttataagcgtgcacttggagggccccgtgaggggccgagcggcactgcgtggctgggatgtctgagcacttaaggggcgctgcctcggtctggagcccagtttaggaggagggggtgtgccggggcgtgtgggtctgtggtgagtggggagggtcacacagatgtgcaaggcatattttcgtgtacctgtgcttagggagggcatggggggtggggtgtacctgagaggactcagtcctttgtgtgtacatctgtgtgactgcaaatgtgtgtccccgagtgagggtgtgtctcctttcctgcagcgtgtaaggaaagatgagtgcccaggggtgtgtactcacatgcgtgcattggacctggagcctccacagtgtgcagcagtagccctgcgtatgagtgtgtgtgcttgaattcccgtgcatctgatggagcactgtacaggggctgtgagcattcatgtgtctgcctgaagagggatgtgtggtgttcagcagcatgaccagcttccccggggtgtcctggagagacgcatggaggccctgaacccaggtaccctcaggtcctcagacttcatgccaagatcatcccaaggcctggaagctacagattcactctgagccagggcttggggaccagggtaggagaggggggctacagaggccagagctaccctccctagcctagattctgggtgcggagacagaggttctcagtttcaggttgaagccagaggctgcaagagcttgtccatcggaggatggcccgggagtgggaggagcaaggaagctttgaggacagcccagagaggtcactggctgagctggagctggaaccccaggctcgaggagccagagaggaggagggagctctggtgatagacaggaaggcagctatgtgcctaggagttactaaaagggaccctccagcctggggctcccgttttctgatgtgagaaacgtgcccctgacactggagggtgacaacgggaaaaagtgtgccctgggcgtcagcacatgcccagcgtcatgccagccacttcatttagtatctgcaccactgtgtacccagcccttggcatgccgaggccctgagatactggtttacaatcagaatcccccaggacttactaagaatctttactgaagaccaactctgtaccccgccagcatgtcgtgtgcattatttatgacgaccgtgagcaggattgtgataaatagctattctgggt

SEQ ID NO: 31476 - DNA, 833 bp, Bovine  19866880902942
  misc_feature (1)..(1): n is a, c, g, or t
ntctcggcacctgtaggctgctgaggttatcacagggtgtggtcagtgagttgctcgggtagttaccctgtttcctggtgtggagcaggagatataggagtcctcacagccagcttcccgtccacttatcctttcacctccccattaatgccgtgacttgaacgcatgcctctcttccaggtgaagctcatccgactggttgggattatgctgctgctatatgtcaaacaggagcatgccgcgtacatctcagaagtggaagctgagacagtggggacaggaatcatggggagaatggtgagttcctggttggtacagggagggccttggtccctaaggtcttgagcctgcttctcatgataccacaactacctgtgtcccagcttgagggtactggcagcacgagatgaactgtcccctcatgctgtagcaggaattgatggaggaggccattccgaaattgtattttagtgacttcctggctgacttgcccagttagcccgcatcctcacggcccgctccgctctggagcccccaagtgggtccttccatttaatgcatgacccatgtcgcagaagctgtactggatcaccaaggaaaagaaagaaagaatgctaataataggtttgccgtttttcttcttgaagttgttaaagtcctccttttaggttctactgtgagagcttagcttcccagggggaagggagagtgtgtggcttgcctgcaatctattgcagagtggactcgccttcgccgctggctgcctggtccttctgtcttcttgcatttgttttcccacctataaatatgtaactctgctttactcatctccc

SEQ ID NO: 31477 - DNA, 901 bp, Bovine  19866880912511
  misc_feature (1)..(1): n is a, c, g, or t
ncgaaagtgaaaatagagctaagttcccgcatctgggggtgtgcgagcaggggctggaagaccaccgctcgactctgctctagaggggcaccctctgttggaatgaagaggagggactggaatgaagagtgactctgactcgtggaccactgttgtgctgtaggttggaagggttttgggcgttgggcatttccacctgccctgcagacactgctgaatcccacggggggttgggagaagggctgaagcaagccctgcagatacgcaccagccgtcagggggcgtgcaggccagcagaaggctgccgccctccctccttgtacaatgcaacagccagggacctcctgggtggaggaggctgggaaattatttatctgcatcctctgttccacacaattggctttcctttgccaactcccagttggggtgggaaggcgcgaaaagcctggaaggggcgtcgagccgtcataaaacacttccaaaaataagcggccccctcccccgctgtggagataaatagctctggcagcccctcgctccgggtcccttctgctcaatcccaggtcaccctgctcaccaaaggaccccatcgctcctggcaaggctccagaacctcccagacactacctgtcccctccccacgcccctccccccacaggagaggcggcaccgcagccgagacaccgtgtaattccggctgtcactagcctaattacaccccatggtcctcccgccagcctcttgcgccctgcgccgcctgaataatgggctttttttctttaaagacactctctccttttcacagctgccttttgaaggcgaacaatctcacacaatgggcttaatgacagcaccactgggtaatcccagcccccagccctcttcctctccctctctctct

SEQ ID NO: 31478 - DNA, 1164 bp, Bovine  19866881007993
  misc_feature (1)..(1): n is a, c, g, or t
nctgacaatttggcctggtaattctttgttgtggggtctaccctgtgtattgtaggatgtttaacagcattcctggcctctgcccctagatgccagtaacatccccttactccctcaatgtgacaacgcaaaacgtttccagtggttattgccaaggtctcctgaggcaataaaaatcaccccagttgagaaccgttggccaaagatcttgtgggagtggcaaagtcaaggctagagcccaggaagtctccacccgaccctctgtttctctcaattcaatgcctattctgagcgtgaatctgtattgttctgcagttcaaagttagggataaaactttaccctgagccttgtgaaatccaatgtatttcatggcctttcacttatgccatgctgggctcactggacaccgggaagaggggcacacactttctagaacagcagacagtcttcccagccctgcatagctcctatccttaggacgggggtgagtcccctcaccttatagtggtttgctagggaaagggcatagattcccccttccctcttaagaatctgagagattcccacttgtactcactgggggaagggatgacctttcaagatctcttctactctggcttttttggattccagaagtggggagggttttggagtctgcagagaaggactagtaattaaagagtcaaagttaattgcccccacccaccaccctggccatggccaatagcctttgcttctgtcaatctcttctcctgcaaagaagaaaggacggtattaaggtattaaattagtagaaccagagagggtttctagttctgtgtcccatcacccctgcccataaacacacacacgtgtgttcagcactgtgaaaagctctgcaatttttttttttaaagagcccctctctgcctgattccataatgaacaggaaaggacgcagtggtgtcattctcaggggaagtgaatccgctctttctaagcatacagtggctacgaggcgctcgctgcttttcgttgtcttctataatcgcgtgtttttttattggtacataaaagagcttcctgtaaaacatattaaagcttccaattctgaatgaaaagcacttgatgtacaatctccccgtgaacaggagcctcaggaagtaaggctgatggcatctgcc

SEQ ID NO: 31479 - DNA, 1185 bp, Bovine  19866881025074
  misc_feature (1)..(1): n is a, c, g, or t
natcccacgcaggggaatcaggggaaatcaaattaccgagttattcactctttttgtacagttgatgggctgattagctgtcaatcacggcctgcattaacatctgacactgtgtgcataacaattaccagtcacattaaggaaacctttccctttctctctaaagggagaggggaggggagagacaggagagaggaggaggcaggaggaggccctgaagagaggaggaaattcaatcagcataattagctcaatcagaggagaacatcacttcaccagctgagcagagcggccgccaatgccaaaggcccccagctgaccagatgctatggagcctatgcccacccacgctgccccgcactaagagtctttcctcttcctgcagccaccgctcgggccaaggcagactgcccttcctgtcagtcaaccacttggccccaccctaaggcactccctgctccaatcaggcaggcccattcctgcctgcttctctgcgattggctctgactgaaaagggagaatgtaagactccaaggatgaggcagagttgggaggtgaaggtgaggtggatggaagaggttgaagacagcacagtggaatccaagtttatgattattttgtggaagagacttccttacattttgtgaaccattctgctgttctgtcggctccttcctaagagcccccgtctgcatcctctggcccccaggaatccttctgaattgcctgaccttctccaagctgaactacttatttcttcacttgatttcctgggatggtgtctctttttaaaaatatttatttatttatgtatttgactgccctgggtcttagttgcagcacgcaagatctttagttgccacatgtgggatctagttccctgaccaggagaacctgggccccctgtattgggagcacagagtcttagccactgaatcgccagggaaggccctccaggatagtttcaagcacccttttcctaaatttcacttctgaaccctctccagtttgtccctgtttctgaaactaaacagtattcctgctatgttggaaccaatggggccttcctggggactcaagccccccatgtgtaaaataggatgcttctatgggccctccagactagctttttgagagactctcagtctgaggagccctcactttgggggctgcagatgccccacc

SEQ ID NO: 31480 - DNA, 1202 bp, Bovine  19866881034067
  misc_feature (1)..(1): n is a, c, g, or t
nctgggcttgcgcccatgggcccaactcctgatccagagtgtggctccggggagtccttggtcctctgtgtttcaccaacactcttcctagaggcagcccaggggtactccgaggtgacccctcttttgcaagcttcagcccctgtaccatccagccctcatgaaatgcctctcccctctgggtcctcttctgcaaggctttggcaggagtggttgcgctgagctgactccagagctcctcatccaggagggcttcctggaggtgggagtgatcatgaggccagggctttcgtaggacagaaggcaggcaactggccctggagagggtcacccctgacataatcctgctctggggtgtggctgtgtgtgggtaggatgggatggggtgggaaagggttcaagggctacaggaaggggtgaaggagacacagccggcccttggaggggccagacgaggcagggagatgagctcaggctccaggaagtagtacacgtcccttactggcagaccttggggcctgagggctggtgggccagaggggcagatgggcactctggatgtgtgtaaatggaggggtgtctgggaaagttccctggctgagtctgatacatccattgaatgggaccttggaggagctgggggaggactcttagggttgatggagggcctaggacaaaaggaatccaagcagaggggcctgcagaggatcctggagggaggaggaggcagcacatccctgggagtgctccgtggtgggggtggggcctcccaacagtgcctttagcctcatcctgccaagcagggcaggagtctcccagccccgctctccatctcctgagcacctggctcggctcagtgtcctgggggtgccaggagaggctgagacactgcttctgcctttgacagtgctggagggtcccttgccagcaccctccagactctgcccccactgcccccaggagagcctggaaaggacacaccagcaccccgtcttggtggagggagcctcgccccatctacagctgcatcagtcatgctctgggggccagggtgtccccccaccaccagctgttctacagagtcccctggctgtgttggcaggacttcggtgtccagggtagacctcccttcctgtgaggagtgaggtcccagcatcctgatgggtcccaggcctcagccccgcacaggttgccggtgtgtt

SEQ ID NO: 31481 - DNA, 887 bp, Bovine  19866881047125
  misc_feature (1)..(1): n is a, c, g, or t
ngaccagggtggcctgtctgaccaaagctgagaacggaattgcagattcttccccttgagaatttaactgaggactaacactggacagcccatgctgggcagtggagtagggagtgcgactacccagaaccgcatgcagacccaaggtagggggaggagaaccaacagcctcatggagaaggtgatattctgcttaggggggaaggacaggtgcaggagaaatgagtgcttgggccccaaagacagaggagatgaaggagctgacgcagcagagcagagccccgtcagcccctggcactgtggtcccactgcccagagggcctggctggccagcacgctccgattctgtgggagtccttggaacaggctcctcaccctgttcctgaggtcaaccgctatgccataacatacagaaaccaactgcccgaatgaagcagagttttgattttcttgtagaacttctgtggtaggcactctgggttggatcaaaactcaacatcagtttagggacagaactgctgctaggtaagcaggagaacctagcgtcaaaattccttgggggaaacagttgtaagtgtaaagcaccagcccagacccaaaaggcaatcctaagaatggctaaacccagaaggctccaccctgtgtgtggagaggagtgtgagacttacagagagcttcttaatgtttcccagggcctctggatccagttgtgcgatatcgatcctctgcaagtcactggccaataaccgcatgctctgtggggaggggagagggttaaagtggctggtccctcagagcaggaaccaccctgccagcagcccagggtgccctggggggtccccttgatgtcctgcacttgtagggggtgggggcaaggcaagcaggag

SEQ ID NO: 31482 - DNA, 678 bp, Bovine  19866881059109
  misc_feature (1)..(1): n is a, c, g, or t
ncatatcgctcagtggaagtccgttgttcccatgtttcacaaataaatttggtaggcttttacataatccaaataaaactatttgggattttaaaaaactttcaaccaagacctctggccaatgactagtgtgtgtcaaaaaaagaaggttgttgtgggtcctgcctctcctggccagaaaatctgagccagagattcagcaaaaccctgtttccagccaccttccccaaacaggaactaggagtttacagggaaaaataacagccaccttgaattccgacctccccacccccatattctccaaaacacaacaaaggatgtagactgttgtgtcaaacggcgccctggggaggcctgaggacacgggggaaaagggcaagacgggcctcttggacctggcaccactatgaggataacaaggatattgcagaaaacacccctgggtttggtgaagaaaagattttatgaaaaatttccccgtaagaaaaagagtagaaactgcattgagctgagaaagtgacatgacatcacccaatttggggcccagcaagcacaccaccaaaagggcagtgtgtggttttaaactttgcttccagtaaaaaaagcttgtactatgtacacaatgacataaagatccagtttaatttgcattttttcagtgcagactagaagccctct

SEQ ID NO: 31483 - DNA, 5033 bp, Bovine  19866881065165
  misc_feature (1)..(1): n is a, c, g, or t
naggagagggatcatccccatcccgcccactgtggcaccttcttccagtgtgaaatcccgagagactggcacgatctggtccaaggagacatcgtcccccagtgatggccatcctccggtgtgtatacaggaagagactgagggcaggaagcatcgtaaggacagggtgcacggggccattcctccggtccactgtggaagcctcagcgtgctcggctcgcattctctccttggtccctgggggctgtgctcatgcttctctgcacaatggtgcccatcagagactgatgggttatcaaggctggacttgcctcactttgggaaccccgctttgttagtaaaacccatgtgtaatcccccccttgtgcattctaggactgtatatgacaagaacagggtaatcctcacctcctcctctccctccctgaacctcagcttttccatctgtaaaggaagggtgatgggttcaaaaatgtctaaggctcctccttcccagatctgagaccctgagggtcacttttcagctgtgagaactttgatcattattctcgctgtttctgggtaataggtgggtgttactagcaacatttatggagccctttttacgtacttcacagcattttaactactttatatgcagaaactcattttaatctttagtttggacacattgaggtttgctcaagatgtaacaaagcctaggtttgaatccaagacagtcaggccacggggtttctcatcagattttgaggattatatgagctaataatacatagggctgggcatatagtgttcagaaactattaactatcattattataattattctagaagcctcagactctgtcctagaaggtgtgaaatccagctggagggatgatggaaaataataaacccaaacaggcaaggcccaaccccatcacttacgcgtgttcctggccaccacgctccggacggtagcgcacaagtcccaggaggcggctctgcctgctgtcgccctcgcacagcacaccttgcaccgcctgccgctcagggtcaaggcaaagggaaaggaagcctgcatcagggtcttgcccaacccggcccgccccaccagccttgccctggcttgccctgccctcacccatgcagtttactgtgtgaccctgggcaggtcacttcacctctctaacccttcatctgtgaaatagggatatcaacccccaacttcacagggggtgggaggataactgagtatttaaagcataaggcagagagtccaaaactgagtacatagtaagtactggtttccttccctccacccccgcgctccccctccccccatggcacagagagagggaggcaaccagagagacacgtagacacctgccattccacttcccaagcccaggcagggaggccctggggctgggagctccaggctgcagggaaggatatgatcacgcaatactccccatcagccagggtctcctggatggccacagattggtccatgctggtgcacaccctggggaagggcagaagggaggttctttaggtcaatatgtcaccggggatgtgatggagttgcctctgaggaccaccggcagggatggggggctctgctgggagaaggcggaggaggccccatcctctccctccccctccccctttgccatcctttgcctctgatgcgaggtacaacttgctatgccggcctctgtcctgaagggcatccagtcgctccttagtggggtccagtctacttgcaggacgtgtggtgccctgtcccattaccggagaggaggctatggtctttactgctccaggacgggggctctgcctctcttttgggggagcagtgtgagttctgctaacagctgtctgggaagtgtcaggggtgtatctgcatgtatcttgggaagggagtgtctcattctggaccaggactccagtcctgtccctcttgccttggagatgggcaagtgtcccgttactccttggccctcccccagcccagcaggccacattgcatcagccaaaggctgggggtgtccggttctgacagcttcaggacagggcacccagctctcagcttgcccagtccctcctgtccagccctgccctggcttccctgccccgcactcactcctggccccctgctattgccgcctacctcctgagctgtcaccgctgctgggtgtgcggaacctcggccgggaccggtcaaagactacatttcccagcagcccctacgccacacgatggtcagccagcctgcaagtcccagcatgcttgccaatgtgggggttggggggctcctccctgcgccctccgccgctccgttaactccttaagtcctgtggtaccctcggctccctattctggaaagcttttcctaaggactccccccgacatcctcagccctcgagcggccagagttccttatccaggacctggaaggaagatggtcactttaagggaaaacgttttctccgtttcatcctcagctcctcgcactccaggcaggccgacactggcctctgctggaacgcttcctccccaggtacctatcctgtcctagcttcaggaagaacaatactatgaagaaccacatacccccattttccaggtggagaaactgagactcagagaggttaagcgtcctgaccaaggtcttgcaactgaaaacgtgagactccagcttccatgccgcggacactgccaccccacggccgcatttcctcccttagcctcagcaggggagtgtgacgggaccagcccatcctgcctgcctcatggggctgtgtggggaaaaaggaggccaacgcgcgttgtcaagggtgtgaccgtgttcatatgcagcgcctgtgctgaggccccattctctctcctcctgaggagagacatcgagggagggcccccccccagctcagctctcacaacagcctgagcctacactttgttgtttccagccctttcccctgattcactggccactgggcaaggctttcctcctttggggcctgcccttctccacctaagataaggaggctgctccagatggacgaagggccagctcagattagggtatccaggaccagtctctcccagtctattggccatttcactaagctgtaagctccctgagaacaggctgtatcttttccttatcactccagtgttgtttctggcacacaaattcaccctgagaacatgtttattgagttagtgagttatcttaatgagtactttttctcttaagctctgacccaaactgaagggtcagtgctggggaaggagtgaccatgtgacttctagtccattccccgtccttttcccctaagctcagagttgctgccctagtgaccaatttgaataagtaaatctcttccagagaaagtaacttcttcccaattttcttttcctggaaatatccacagcacaaatggagctcaagtttatttgaatttggtttcaaagctgagttgaggacgaggggaaaggggattgattcagatccttcgagataaagagggctgaggtcacttcaggaaatcaggggaaccccaattccagcccctctctttgtgtcaaagtctggggaggatcagggaaaagtggacagggacgagcactttttttttggcttctgctttttgtatttttggccacacagaggcatgaggaatcttagttccccaaccacggatcacacttgcacccctgcactggaagggcagagtcttaaccactggactatcagtgaagtcccaggactgggcaccttttacagataaagaaactgctccttcacgactttggggtcctcgaacttgatggggatcagataggagattgttctgttttatcagacaaaactccagcctgcccccttggagggcatcatgttcaggcctaggccctgggacctctagcacagagctgcagtcttgataaatccctttcactaaagatacagtcacaggaatcagagctggcagtgggcctggcaacttccagggcctaaagggtcttcctgcctggttctccctgactcagcctggcctagctaggggagcaggaccaggagcagggcagagtggaggagaagcagctgcagccagggtcccgtgcagggggctcctggtggcccctggtgctgccctgttgaaatggaggttcccatccagctggaggcagctgtcagggcccgaggcttggcagcgctcttggtagcagggctgagccacagccccgtgacacctgggggtccctgctgtgcaggcctggctgcaccctgcagtgtggcctgagctggattgtttcagctacaagaagagacgagactattcgtcctccccttgccttcgtcccccattcatggaggcaaaaaatgttaagtggggggacttccctggttgtccaatggctaagactccatgctcccaatgcagggggccaggattcaatcccttgtcagggaactggatgccacatgccacaactaaagccagatgcagccataaataaatattggaaaaaaaaaaaagtgaagtggggctgtgggctgagttgaacttcactgggctgctggttcccagccagctagtcctcagagaacatccaaggtgatcagaaacaagggcatgtcacggggacttggaggattccagctgctatcctggatttcagcattatgtggagcttagaggggtccagcagcctgggccccagcaggtctagctccagccagattcagctgctgaccccgctctgtccaggcaggaggaggcctgcagttctaagggagggcagcgctcgaccttggagcactccagggctcacctcacagaagtgcaggccctcagtcactttgaagcagtcactgccttggcaggagaaggtgggacagggtttcctctggaagagaaagtgaaagaagagtgagggatggggagctctgtgaattctggactcaggtgggggctggctgcctatctcactgggctcagccactattgcctattcctgcctccaccacctggagcagg

SEQ ID NO: 31484 - DNA, 1262 bp, Bovine  19866881086405
  misc_feature (1)..(1): n is a, c, g, or t
ntgtgtcccatgtgccggcactctgcctttggtaataggcttatgaaggagttactattattatgccgattttacagatggagaaattgaggcacagagtgattaaacaacatggccaaggtcacacagccaggaagcagaggaattcaggctctgaacatgggcagtctggctacagaagaagtgcatgactgtctcttcagtttcatggtacctatttttctttagagcagtgctttcaaagagtcgtccccagacctgcagcatcagtgctaacttaggaacctgttagaaaaacacattctcagtctgcactctgacctcctgaaccagaagctttggagctgggccactgcagcctggtttcttcctctgacttagaaacctggaagtctctgtgacttagaaagtcccttgggtgattctgattcctgctatagtttgaaaagcacagctttagagggttaaaataaaataatgtttataaaagtcttagcacagcattcaacaaatgttggctattatcatgaccagctttatttggtgagaatgaaaatactgttgtggggaatataaaaaaacacctgtctgcttggtaaggtgccatatgaagcaacttaaactggcaagaagaaaaaaaaaaggtattcaggcgaagactgaggggggagatattgacaaaaccatcatggtatacctggcacctggcacctgatcctttctaagtgaacgcagcccaccccaaggggcagagctcattttgtcatttgaaggatgctgctgcctcctccaagaacccgaggaatgtgctggccagctgattcactggctggctttagagctagacgccaccccagctccctcctgggcaccccagtcactgcctgtgcggcctcctgacttaagaacaaggatgagccctggcttcctatgcctaccagggtatcaagaagatacgtcccttcaagcatgacctgcccctgtccgcgtgtgtcaccctcagtgctgatgggccttccctgctccaggatggttgtgtaattggcctggcattacccagcagtctctggggaattgcttctgtcaggagcagaacaagcttatctgtttagcctgaattatgtcaccatgtgccccgtgtaaatctgaccgccttcccaaagcgctgggcctggatggatctgtgaataatttcaccaccacaattattttacaattttgaatcttctctggcaacataatgcatagtttgcagtaagaag

SEQ ID NO: 31485 - DNA, 655 bp, Bovine  19866881088740
  misc_feature (1)..(1): n is a, c, g, or t
ntttaaggtgcttgcgggagccatgccatccgtttgtggtgagccgaattagagccagattagagcggggttctgggttcccggctgcggttggctctccatggtgctccttccagccgaccatgtctcatcacctccgggctcgcttgctttgaggcattgaaatctattttcagacacgattacaaagaacactcggagcttcactctctccatagtcaagtttgtaagcaggagctttcttatcaacatttaggttcaagttgaaaaaattaagactcctgaagaccacattggtgctgtacttgaacgagcaaaaccagagtatatcagcaagacgtacaagattaattcttgggagaacgctgaggactttctggagaagctagctttccggacagggaagttattaaaggtgagccaaggtttgtgagaattcagactgggacctgcttcaggcctgtgtgcacaatgtgtggtgtggacctttttttttttttttggtacatgtgtgtgagcagtgtgaagtatgaaccttggcaaggtggtgacggacagctgggacagcgatgtgccaccaaagcgggaggcggcttggttgtttgaatcgggcatctttctgcaatgtttcagggtggagagcccaacctgcgga

SEQ ID NO: 31486 - DNA, 3307 bp, Bovine  19866881263609
  misc_feature (1)..(1): n is a, c, g, or t
ntaagactcgtcctcatcgtctcctgggtactcctgttcctcctcctcctcattctccgcagaaaggctctccagctcgtcatcgatatcggacatctccagaggaaccaggtcatccccagaaaactgaggtgcaacgttgatcttgccaaagttctgccggacccgcgccagaatctgctgcatttctgaatcgatgccacagtgccggggctcctctttttccttctcgaggatggattccgactcctcacctactgtttccgtgactttctctcctgggttgttctgggttgtttctgcggcaacttccaaagatgaggaggatggaagctaatcaggacagaagggtgggggtggaagagaaatggaatcagaaaatgaaaactcaatttctttattttgttacattggagtatagttgattaatggtgttgtgttagtttcaggtataaaaccgagtgattcagttacacatatacttgtatctcttctttttcaaaaaaaatttcccaatttataatactgcacagaaatccctgctgaatttctgaacttacatatcatgctcttaaacaaggcaggcctcttctcaggaccaagggaaagtgtcaaaaacacgcacgtctcagtcatgttgttaatgtagcgtttagtcaatatgcactaagccctgaacccagcatgggaggatgagaggaatacagctacgcgccaactcagagtactcagccatcaaaaccaaaaccactagacactgtagacacaggaggctgcctacaccatccctgaggactgaaggatcaggggctgctgaggaagcacgtccccagggagcacacacccgggggaagaatggaggcccagcagaatgcagagggccaaggaggcgctggttcagaaagtgctgaggtggaggagaggcaccgaggaagtgctgcgcgagaagagcgggaggaaacggaatgttcagaaccagccctgaggtggtggacactcaggtgccaggcatgttctggggaaggggcagagggaaatgtgggctggcagtgtgaggcctcatgtagtgccactgggcactcagagctgaggctggaagaacccgtgcaattttccaaaggcgaggtggctgcacaaagcactaaatacatcaggaatccataaaattcaggaaacagtatacaaaattcctacatatgttttcatatgtttttctgttgaggtagatttttagttttgggattctcaagggagtttctgccaccaccaaaaggagagaagggcaagtcacagagtggggaaaactgactgtctcaacttaacagctagacatggaggaagagttacagaaaaccccaccgtttccacacagggtcacacgggggcaaagatggtctccttgggccagaggcctcggccccaccagccatagtgctgcccaccccgtggccgccctccagaaccagggcacatggggctccccttgcctcaggtgttagggggtaccgctcccgacacctggaacctctcctgtgacatccatggagctcctgcttcaggttaccaaggtctcccctaaaaggccccttccccagaggccatccctaaccacctcacttacaaagcactcctgtctcccacaaaccctcaacctgctttagtttccctcacggcaatcggtacatcctgacatcacgtatttatctgtgtactacgtgtcttccaatagtgtaataaaaatatgcatttggcctttgacccccagttcctggcacaagagctcctaaaacctttggtgtctcttgttattcttagtaagtccctctgccccaaatcagttaatgctagtgagacgactgtgctaggacccagcttcagactaggagctggccaccaagagcccaagcaactgctgacaaggctggaaattgagttcaatcactgacggctaatgagcctgtcaaccgcacctgtgtaaggaagcctccaggctggtgagcaccctgacgtgctgagagtgtggcctgcctggagagggtgtggacactccatgccaccctccaccccataggtgccctatgcacctgacatttggctattcctgtcttatatcttttacaacaaaccagtaatcacaagcaaatcactttcctgagttctgtaagtcctttcggcatatgatcacacatgggaagccctgaattcatagtgagctgggcagatgtgtgggtagccttagaatgccatctatcctggcacgtgaagtgggggcagtcttgtgggatttcagtccttaacctgtggggtctgcactaactctggcagttacccagctggtgtccggagcttgcataacaggtacagaaagatgaagcctatctgggatcagaaaacaccaggtactcctccactggcacatggacatggacatgtgtgtgcgtgcgtgtacaggagggcagggccttgtcctgcagtactggttgtctggtggttttagggggagaggagaaaaggttgagtaacatcagtttcaggtatgttgattttgaaatgctggagaaaatattcaaatggaaatttctagctgacaatggaaactctgggactggagccaggtgagaggatatcagagaaatatggaccccaaagactggcatgaagcaaaacttaaagccgtctcttcaagagacttggctgagctctgaagaagaccctagaaatagaaaagcaaagtgcccaagttggagtcttgtgcagcccactgccaggagagagagacagaacggttgggaagcttctcagggtagctcagagcccccagacctaagactttccctgagcatccactgtaccactctcctttcccgcctgatcacgagcttcctgagggcaaggaccatgctatctaatcccgtgctcccagtgcccagcacctggctgggcttgtgaaacaaaacaaaccttggaaatgtctctgttcttccagcagaagacgagacactgaagctgtaagcgagcactcgcatgtaatgagctctcctctttcaaagccctgaagactggcatttacacgcagtctcctatcacacctctacttccaggtaaccccccacaaggtcacagccagtggcacctggggagacaccacagttcaaagttataccccaaaggaagatggctgcagtccaaagacatgcgggtcagtaaccccacttccagagaggtgggtccacccttgtcttacctcgggggctgctgggggttctgcattgggcggcttgacaaagaaaggaatccggcccctctg

SEQ ID NO: 31487 - DNA, 1456 bp, Bovine  19866881290643
  misc_feature (1)..(1): n is a, c, g, or t
ncaggcacctgcctctgggcctgggaaggggccagagtaagcccccccctctgagtggcttaaggcttgagtgaggtgatgcccacttggggcagagaagggaggtcatcctctcacgttacacaagggctggccctgtgacacacagcacgtgcatgctaagtcacttcagctgtgtctgactctttgcgaccctgtggactgtagtccgctaggctcttttgtccatgggattctccaggcaagaatactggagtgggttgccattccctcctccaggggatcttcccaacccagggatcgaacctgggtttcctgcattgctatctgagccaccagggaagcccaagaatactggagtgggtagcctatcccttctccaggtgattttcctgacccaggaattgaactggggtctcctacattgtaggcagattctttaccagctgagctaccagggaagcccctcaaatcgtctatacagtttatctaggccagagattggcatgttttttctgataaagggccaaatagtaaatatttcaggctttttatgccttttggtctctgttgcagctactcagctctgccgttgtagcatgaaatcaaccatagacaatatatattataaatgaataggtgtggccgcgttccaatacaacttcatttactaaacaggtgatggtctggatttggccaatgggccataatttgccagcccttaatctatatcaatcccttcacttttcaaaaagaggaggaagcccagagtcaacaggtcacccatcccatggtggccacatcactcagggactgaggacagacaggcaggcaggaagcctgattctccagcttcttccctgaattattctcttcttgttccacgtgagttagctttctctcccctgttggtttgtcagttgcacatatgctagttactcattaaatattcatttgattggcttcatataacaatacatctttggcaacacatataacaatacatttcttggaagcttctgcgtcgatcctttggagagagctgtgagatcagagaaagggaccatgagttggttcaaagttcccaggtgatgagcttgcctggtggtccagtggttaagaatctgctggcaaaagcaggggacatgggttttggttcccagtccaagaagataccacatgctgtggggcaactgagtccctgagccacaactactgagcccgtgggctgcgactactgaagcccacgtgcctagagcctgtgctccgcaaccagagaagccactgcaatgagaagcgcgtacctcacaacaaagagtgacccccacttgctgcaactagagaaggccctacgcagcagtgaagacccagtgcagccaaaaatgaattaaataaataccaaaaacaaaacaaacaccgccctaaaaccttaaacaaagcaaaacaaaaacagggt

SEQ ID NO: 31488 - DNA, 1226 bp, Bovine  19866881309073
  misc_feature (1)..(1): n is a, c, g, or t
nctctcctcaaagctgcacgttgtccaggtcagaaccttgtgtcctcctgacctaggccttcctgtggccttgactcagacacatctctgttgttccttttccataacctttgctggccccacccctggacttttcaaccaatgctccagggagctgcaaagaagctatcccctagagtgctgtcagaacagtggcaggaaaaccaggttgatacagtgtatggaaaccaaaggaggaaagagtctcaaaaagggggtggtcagtacagagagggtcaatggtgtaggagttcatatccaatcacagtagacgctgcagtctgggtttggaacctgaatcgtctgctagatgtatatgaccttggacatgtcagaagtcctctgagccccagttcccattgcatacaatgatggctcccacctcttaggcgggttccatagtgtaaccatgttgtaaagtccctgacacactcaaaccattcaacatatgatagctctacctctgaatattaatttacccagcaaactcttgtgagcacttgcaaaatgatcctgccaatgaggatgctaaatcaagacaggcttcagtctcaaagaggagatgacatcaatcactgaattccaagagagcaaatgctgagtggcctaaaagaggcccagagggtgactgcaagagtcccatgaaaggaaaatccctgttgttgccagagtgtgtgttagcagagccccgagcgctgaagctcaccatagaggagagaccctctaagccaggccttgaaggacacgtggatgaacagctggaaagcgggaacaatctgggcaaaggcccagagggaggaacctggactgccaagagagcttctcagggctccctgctgccctctggtgccaagctcaaaggaaagtggcctcaactccagaaggtgaattcatggcagccacgttcccaatcctgctctccctgtcacaagtgccaggacacgatcattaggtgattatatttttaaggcccaaattgttttatttgtttccctgccagctttcatgaggccatcagtcattctgcacacagataacatttcttatgtacattgacagaataaattacatggttctcatccggcaaatcaacattacagaggaacattatcttttgcaaaacgctgcctgggcacatcataaatcctaaccaggtttattacatctgtcttgtcatagattcattt

SEQ ID NO: 31489 - DNA, 1924 bp, Bovine  19866881312374
  misc_feature (1)..(1): n is a, c, g, or t
nttgccgtttgtctttggcagtgaaaatgcaaaatgtggtgtgcagagaagaggaggggtgggtcgtgggattggtacatccgctgaggttctcctcccttaagacatgtatcagtggacagcattcttctacactgatggctgacgagctgtttctttctttgtttctcagcctacatactttcaaccttagaacattcaagaatggtctcacgtgagtgactgaggcgctgactcacctctgatttattaatgaggatgtgtatgcagcccactcagaataggctggtggtgcatgtctgggctttaaatcaagtcgcatcggtagttttgtactgtattcttcatggcagcaaagtaacacaacctgtttgtctcaagacactcacaccaggtgtgtgtggtgtgtattcttttctttgaacagttgcacactgacaagaagcagatcagcgtggggttcattggctatccaaacgttggcaagagctctgtgataaacacactgcgctccaagaaggtctgcaacgtggcccccatcgcaggtgaaacaaaggtacatctggctcgaggggccttatttactctgacttatttcccacggagggtgctaattcaggacacggagatgtctgtctgcctctctcggatgaagatttcccctgggagtttggtctccttgtcgcaggtggcgatgtcctggagctgtttctgcccttttgagaagactgagggtgctctgtgtgccactgcctgctttgggcatggtttgctgtgtgccacttgagtcctgttttcttgtcactccaaccttttgctttgataaacaaaactagagaaaatttggtgtctggcttaagaaagaaaattcaagtttaagatagactgtgttgggtagggggcctaccctggaacacggagtgtggggtgcagcatggttctgctgaaaagaactggggccaagcagcatgaagcttccagaagcacttttagagacgtcagagaaagctttactggacgtcattgcacaatcctagatggagagcctgcctctgcattattgttagacacttagctgatggaaactatagtttatgccttgtggaagtgcctcgtgcatggcatacagaggaggggctttggagcttcattacctagtaggctgctccgctatgaccgcctccataccccgacccccagccccagccccagccccctctctcactaggtgagcatcagggcttcgtgaaacccctccgggactgacccggagcagtcagaaatggaagtctctgcttttaggtctggcagtacattaccttgatgcgtcggatcttcctcatcgactgtccgggtgtggtttacccctccgaggactcagagacggacattgtgctgaagggagtcgtgagtattttggtcccgggaggctctttgtttgccttcgaggggagcgtgctgtggggagctctggagacccctgctttttactcattcagcaggcagcttggggtcagcctgtctggccagactggaggaacatgacactgaacagggcggcctctctgttccacttcagcctgtttgaggaggctgaagggcatatctggtcaacgtcatcccacaagagtgtttgtcgtttacacacgggatccagagggaagcagggcctgtttatgtttagcaataattcatcttcgtgggtttatggattgagtcattttggaactcggtcatttcctcacttgttcctgaagacaaccgagagctttaaatgattccacttaacctttgccagtgtttctggctatacacatcctggacggttcctccctccttccttaaactatttatccccttctctttgtgtcctggaatcggcagacttttaaccatttctgcaagtcagtagcacaaagcattc

SEQ ID NO: 31490 - DNA, 710 bp, Bovine  19866881375456
  misc_feature (1)..(1): n is a, c, g, or t
nctcctcgtaagactgttgagaggttatccgtgttgttgctttatttttcccaggttcccttaaatgccttctggctttcattttgcctttgtactactgtagcaaatcacttttgcttctttgaatttgcaggtgatagattcatcagatgttgtggttcaagttcttgatgctagagatccaatgggtacacgttcccctcacattgagacttacctgaaaaaagagaaaccctggaaacatctcatttttgttcttaacaaatgtgaccttgttccaacctgggcaacggtaagtacagctgctaatgcggaacagataaccaaggccacgtggctcgttatccatgaataagtaggcagcgtgatcagtaggatttggggcagcagataaagtgttgcactgttgaggttgtagtcactgaggtgtcttcactgagagcaaagctcaaatgggcttcattgatgatgggcagttacctttgatccctgatggttggcagtggcacagctgcagtgcccacaggaggactggtgtgggccctttagaaggtgcggcagctgcagcccctggcccgtttcacattatgttaggttaattgcatttagtaacagtgaaggcattttgggaatactgtttttgtgtttataaggcaaaaaacagcatcaactgtcatacttgaaaaaatatttcaaagaagtacagctag

SEQ ID NO: 31491 - DNA, 1361 bp, Bovine  19866881416923
  misc_feature (1)..(1): n is a, c, g, or t
ntcactgctgcccaccagaggggacttttatgtattatgactctttttttgactctgacaggcaaagtcagaacctctgtttcctggaactccttgcgctgttgtttagataagtttaaatgagctgtgattaagctaattttgaggtaattaacttggggaaggaatccttcacttcttaaaattctaagtgactgttcattataagagggagcccttgcaaaggagccacgcggctttcaggagccccgcttaattaaaacatacggaactcagccacagagcaagagtttaccgtcattaatgaaaaatgaatattctttatctaattacatggcataattaattgctgtctccaaccacagagacagggagggggcagaggaagccataggctcctgttcccacagactcagcaaaggttcaagcctgattctagggtcctctggaagtcccttcaaagcccagtgctcagggagaccccagtccagggtacagaagggccaggcagagagtgactcctcacagcagtgggtgttggcacctgctgggtcccagtagatctcttttgtggcagtttgagcccacatcagccatccagggtcctacttggagattcaagtttaatgagtgcctactacgtgcttgattgtcaataaaacagactgaagtcttgcccttaggaagcacgtaggtttgaatcgtggttctgctgtttactagctgtggggcgctttgagcaagttccttgaccttctgtggctcagttttctcatctgcaaaatgggactaacagtagcgtttatctcatagggttgctatgaggattaaatgagttagtgttcatgaaacacttagaatagtgcctggtagatatacctgctctgtaagaagtgttaaagtaaataaaaaagaacacaagttgggatgtaacaggacaacagcacgggaggaggactggtgttcgacttggtgttcagacagaggtgggggaaggggacctgacttcttggccctcttccccttccctcgcctcacagcttcgctgttgccacgaggtccccatgtatattctgctgtctctaccttcatctccattttcctcttggggacttcctaggtcacccttactaggatttgccctccgagaacccccagcacatttcaccgggcagggggtgctgtcaagacgccagctctctacaggtgaggtgatcacagagagtacctgatgcaggtcttggagatgctcccatccagctcgttttaccaatgaggagactgcggcccaagagacactgtgaggtggctggctgcggggcctggagaccaggttttctgactggcatcctagcctcttg

SEQ ID NO: 31492 - DNA, 1199 bp, Bovine  19866881509287
  misc_feature (1)..(1): n is a, c, g, or t
ntgccaatactgtgctaggctcttcacacacaccatttcagccctctgagattgtgcttttactatcttcaattacacaaatgaagaaactgaggctcaaagaggaagtgccttgccccagatcacacagctaagaagtgatggagcctgggaggtcctattagagtctgtgtgctgaacaactctgctagttattgtttgggtttggagagagaaatgaacaaacccttcaaaccttccagagggcccttttcagccacaaattgagcaaatgatacaaaactgcgacaagcaacacagaaagactgatcaataaagcaccatctccaagaagcagagcaattaggtgaggaaatggaatagctttcctgtctgtaaaataatgggctcatattaattttaaaatattttcacttcattgtctagaagaaattcaactttgattccttctacttggatcactcctccttgtccccttgcatggctgggcttttttcatccttcaggtctcagtttgaatgcccctcctcaaaggagccttctatgattctccaaacataaagtaggtcaacctcaaggttcagtgctggccctttgctccatcatagcaattctttgcatggtcatcatgtacaattatgtgtatgtttgtgtgtgtgaaattgttctatctcctctaataggctctaacttggtgaggctagggactatacttggtacattcaccctgtagaccctgcacccagcaatatatcatttatgcagcaggtacctagctagcatttgttcaaaagatagatgaataagtgtggaatattcttatttgcaagagttcagaaatctatttttatgttctctgatcttatttagtaacaaatcacttaaaagcagtttgatatccattgcaatatgtaaactgggaaatcatgtaaatacggttatcactttctggttgtcaatgatgcccttgtattcctggaagggggagaaacagtaagagaaagagcaatgcacagggagttgggggatctggggatgggccttggatttactgttactagctgtgtgaccttgggcatgaccttttccctttctggtcctgagcttcctcagctgtaaaatgagcttggactggcaactctctaaggattctttcagcggaaaagtttaaactctaaaattacataaatgaacttgcg

SEQ ID NO: 31493 - DNA, 764 bp, Bovine  19866881527413
  misc_feature (1)..(1): n is a, c, g, or t
ngctttatctaaaatgctttatataaagtactaaagtactttcatataaaattcaattaataacagcaattgttaggccaaggccctgttggttctcactttcagcttgtcctagagcagaaacagaataaataaatgcaactgaattgtttaagagagtgtaaatcctagttaatcaatacgtaactaaagttttctttgaagcaggcctaaaaggcaaagtagacatttgtctgacaggcaagaggccagccagggtggcaaacatgtagctggcatcttgtcctccttgcaccccctactcttgccgcatctcccctgcctagggcagacatcattaatcaatcatagcatctcatcttgctgaacctggattctgccctatgatagttttcctcctgtggtttttctgtagtaaaatattctaaagcaaatcttaaatatcatgtcattatgatcctgcaggatacatttctaaagaaaatggctgccttcttacataacaacaaggtgttgcctcacctaacaaaattaacaacaacaaaaatcctttgtgttgtctgacacccagttcatgataatattttcctgattgtttcagaatatttaggattatgtttaacacagctgtggaccagtagtcagagtcttttaagcgtgagtcagaagcatcttcaggctgcccttgaggaatggaaatgagggacttctacccctagatggctttgtgccttcaaaggctttttcctaacgggggggagcat

SEQ ID NO: 31494 - DNA, 744 bp, Bovine  19866881587205
  misc_feature (1)..(1): n is a, c, g, or t
nacacacacacacacacctgaaactaagaaaggagcagaattccctgacacactgccaagcaactgttccatttcccacaacaccctgcagtttcttcaaacacaaagacgtttgccacacggtcagtgaaatcatttgggaatgcgtcaaaagaacatccatggcactgggatgtctgagagtcacaggatttccccatgcctcgtaaccgtctcaagggctgtcacctgtctccccagctcagagctccctggggagtggtccctgtgagagtggtccctaagataactccacagccccatcagaccccacattcctgaggagggttgccactgagggtctgtgtggccttgggggcaccttgggctctgaacaattatcatttctccttcctggagggtgtttgaactcagcagggtcaggcagtgtttggaaaatgtgtcatctcctcctgcctgctcacagccccgactggctatgtcaccttgccccagagccatggaacaaagcggaccctcagtggagcaagacagagatctcagagctgcagagacaggcagattcaaagagaccacacaaagacagaacctggagttggtgagacagagaacaaagagaacacccagcaagaaggatgccttgggcccttgggtggggccaggcctggagacagctcagcagaggggagtgcattcattcattcactcatggaaacacagtctatctgctaggcactgcactag

SEQ ID NO: 31495 - DNA, 967 bp, Bovine  19866881656931
  misc_feature (1)..(1): n is a, c, g, or t
nacctgctgtatggcacatggaactctgctcaatgttatgtggcagccgggatgggaggggagttgggggagaatggatgtatgcatatgtgtgactgagttcccttgctgcttacctgaaactatcacagcattgttaatcggctataccccaatacaaaataaaaagtctccaaaaaatttaaaaaaaaatcgaacaacagaaaaaaccccagtgaattatctgaacactggtattgctttctttccaaaagtagttgccgggatatttctcttttcatttcagtagcatgcacagtacatagtcattttgtggattgtggctctctaattgctattaaagctaagtagaaatgttcaaagtgggtctctactgtctgaagttatcacaaaagcaacaaatgtcatggcagactgcaggtcaccccttggtgccacagtcacttgtctaggacagctgtgacatttcttaagtcttcaaattccagcccagagagactgaaacctgccagaatcagcatccagtgctctccctgtcatgtccatagtcctcccaagtgaccagttgattgtctttggcaacagattttttgtaggaacgtacaatgtgaacggacagtcccccaaggagtgcctccggccctggctcagccacgatacccaggccccagatgtgtactgtgtggggtgagtgcttctcttctcgttgtctctgcattttccagaatgtgtagctgtggttgaagggatgggggcatgaatctgtaactgagacttcgcagcaggtgaagggattgaaaaacgagcatatgctcaataacagctgctcctctgttctgtgtgcttcctcatagtaaacagatttctggcactattaaagtgatgtgcttggcactggaatgctaatagttaattttgagtgcaacccctgtgttaaaagcatgcaccctcgaactgaattttatta

SEQ ID NO: 31496 - DNA, 1109 bp, Bovine  19866881666502
  misc_feature (1)..(1): n is a, c, g, or t
ngggcctccctgctggcagggctcccgccgcccatctccctgggtctgtctcagcagaactgcggggaagaggcagagagcagcctcggaactccaagaggcagtttccttccccaagcccagtgcgtagacttaggaggttcgagaggctgcccagttcatgcttctgcttgttctccttccctgacttctctggtcagatggaaaaaaacctctcctgcttcctcagactccctataaggaatctccctgttccttatttccagatgcatcgtcagtacttttgggaaagtgcagtctaatctgtatctctcctaactgaaggggctacctcgttctccctgcccagttttgtctgcatcccttgatggccctggtaatggccatggccctttcctctcttgtgcgaggcgagctgactgggcggggcggtggtgctgagggtaatggtagaggctggttcaaagcagagccagggacctactgtttctcaccaagaggagtttatcggggggctgctctttggggtaaagggtggaaaggaagccctttcctttcctcctgtcgtctgtcacctgatggccaagcccagatcataagtgttaatgaattgtggtgccccggaggcagctgggcagcccccgctgccctgaatcagcctgactcatttacagctctctcccagttcccccaaaggcttctttctgaggtgacaaatgggggggtggtttcaggtttcatgtgttcacattactggatggaaaaaaaacaaaaaacctttccaaaccaaaaaaccagcttctacagcagaaacatgtcccgagagcactgaaaatttccccatcttctcttctcagctgctcagtgacactgaggccagtgacagaggggttaagaggagggggttggagccaggctgtgtagaacgttggggacagtccctttaaaggtggcagcacctgctttcctgcataaagacaggggaggacctttgcggggccctctagttctggagtctgtggccagctgtggattgccaggggactggcatgggcaggggctggggaaagggtggacctcttgcatttcgagctaattgatcccagggg

SEQ ID NO: 31497 - DNA, 1757 bp, Bovine  19866880362484
  misc_feature (1)..(1): n is a, c, g, or t
natagttaagtttgggggtactacaaagttattttaggggaataagaaaaactctgcagccttcttacctcacaggtagccaggctgtcgtttttagtcaagagaccacaagaggcttttttttttttttacttaaagaaatctgaggacctccctggtggtctagtggctaagactccctgatcccactgcaggagtcctgggtttgatccctggtcagagaactagatcccctatgccacaatgaagactgaagatcaagagggctgcaactaagaagcagtgcagccaaataaatttaaaaaaaaaaaaattttttttaaataaatctgactaagctaggaggaaaagtctaaatatacagacaacaagagctccctgtgccagacaaggatctccagggaagcagagaatcaacaggatataggtatatttgcatgaagacatttatattaagggattggctcatgcaattatggggaccagaaaatccaacatctatagggcaggtcaacaggccagaaagtgagtcaggatttctttgttacagtcttgaggaagaatcacttttcttaggaaacctgtttttttgctcttaagggcttcaactgattagatgaggtccatccacatgattgagagtaatctcctttaaagtcaactgactgtaggtgttactcacacctacaaaataccttcacatcatgtctagaatagtgcttgatgaaacaactgggcactataggctaggcaagtgaaagtgaaagtgaagtccctcagttgtgtctgactctttgcgaccccatggacggtagcctaccaggctctgcggtccatgggattttccaggcaagagtactggagtgggctgccatttccttctccaggggatctccccaacccagggatcgaacccgggtctcctgcattgcagacagccgctttaccgtccgagccactagggaagctaggctacacaaattgacccagaaaactcagtcctcacattccctgaagcaactttccatccagatgggcccaataccaaagcccaccatcaacaaggcccacttatgggagaggcctcttagtccccttttctaaatgtcccatgctaaagaaagaacagtcaaccaagaatcagtagacatctgagcaaagtcatttgtggaaacaaagataattcaggcagaaggaaaaaactgaaaaactaccagggatatctttggggagataacagaagacaagtctatcatgaaacaagaaagaagctactggagaaaaaatgacttcagagatcaaaaagaagctcttagaaattacaaacattataacacaaatgaaaaacttggtaagaggattataagataaagataaggaaatctctaagaaagtaaaacaaaatgacagaaagatggaaaacagataagggaaaaagagacagagagatcagtttgggagaactgatacctaaatgaggttttcagaaagagagaacagagaaaatggaggaggggaaaatatcaaagaaacaattcagaaaagtttccaagcattaaaggtcatgagtttccagattgaaaaggtttacccagttcagctcaggggttaaatccatatctacatgatagctacctcatcatgaaattgaagaaaacagggagtaaagcctgggtgagaaggagggacagattacatacacatgatcaaaaatcaggctgacttcagacttctcaacagcatcagcagagaccaat

SEQ ID NO: 31498 - DNA, 1365 bp, Bovine  19866880365120
  misc_feature (1)..(1): n is a, c, g, or t
naaaagggaagctctccttagaactaggaataggaaataataagactgactgaagttcaatatcattagttgaatatctactacctgttttttaaggggacaaaattgcctaggcggtgctcttttatgtatcaatgagggcacagaagaaggccagccttaccatggaccctcaccaccggctcaaaggtgtatttatgtaactttattgtaaacaaagagcaaatggaaagcagcaggagaacaatttggttcacgtttcaccaaagatatttttcctccaggttgaaggtaaccagagacttctaagtcattgcaaacatgtcttaatccagcaattacatataggcaccatatgaatctttggaaattagataaaaagaattctaatgtaacacaatagcaacatgatagtttagaaaccatgatgcctcactgatgcatacatctgctggggaatgagcatatggtggtgcccagtacagatgtaaagaaaacctgcagttatggctctttagtatgataattgattctgagtaaacgtatgagttttgctgcttgtctaattttcagttgttgggtttttgcttttgttcattttttttaatggcagacgttcgggaggcaaaaagcctctatgttcctggtgtaactaaatctagcaatattactagtaagaccagggaaatatactaaacttagcagaaagcggagacaataacaacatccaaaagtgttctttgaggctacttatcctctgacaaatgacatgatagccaacagccaagcactgaaaaaaactatgtctgtatctcatatgtttaacattaatcaattttattctatggcagcccattatctatatggtgacagaacattccataagcagaaaaactagaaagggggattatgtttaaaaataaataaaagcaatgttatcagactcacctttaaagctttgaaatgaagtttttcgttcctttttatggctaatattccattgtgcataagtaccatatcttccttatccattcatctgtcaatggacatgtaggttgctaaaacgaaatttttaaaacatgaactggagtcccgttttcaacagggaaacaggatgagagcagaacctgaagtctattgcacaaattaaagtgcattttgatcagtatttcagggacagccactgcctgattatctgcatatgcttgtcccctgagcagtttgcattcttcaaccatcacaaacctcccagtcaaccccactgggttcccccatccccacactacaatgtgtgtgtgagggatggcaaatcatttacaatttggtctagaccaaaagagaaaaagtctaggcatgtaactctat

SEQ ID NO: 31499 - DNA, 1657 bp, Bovine  19866880563003
  misc_feature (1)..(1): n is a, c, g, or t
naaaacgaagatcatagcatctggtcccatcacttcatgggaaatagatggggaaacagtggaaacagtgtcagactttattttttgggactccaaaatcactgcagatggtgactgcagccatgaaattaaaagatgcttactccttggaaggaaagttatgaccaacctagatagcatattcaaaagcagagatattactttgccaacaaaggtctgtttagtcaaggctatggtttttccagtggtcatgtatggatgtgagagttggactgtgaagaaagctgagcgccaaaggattgatccttttgaactgtggtactggagaagactcttgagagtcccttggactgcaaggacatccaaccagtccatcctaaaggagaccagtccttgggtgttcactggaaggactgaagctgaggctgaaactccagtactttggccacctcatgcgaagagttgactcattggaaaagaccctgatgctgtgagggattgggggcaggaggagaaggggatgacagaggatgagatggctggatggcatcaccaactcgatgcacatgagtttgggtgaattccggggtgttggtgatgaacagggaggcctggcgtgctgtgattcatggagtcgcaaagagtcggacacgactgagcgactgaactgaactgaactgaactgaattgctttacaatgttgtgttagtttctgccgtaccacaatgtgaatcagccacaagtatgtatatatctcctcccttttgaacctcccattggctatctgttttacatatggaagtgtatatatgtcaatactactctcaactgatcccaccctctcttccctgccctcctgctgtgaccacaagtctgttcactacacttgtgaacacttgtgaatactacacttgtatgcgtgtctattcctgcactacaaataggttcatcagtactattttgatttttttttaaatgttgaagtctgttttcctttgaggaaaatacatagagattatcatatcatagagttaaataaatttgttattatatatatatggacctgatgtatttaaggaatgctagtaaccttaaactggttatataattttgtacaaaatacatactttcagaaaagcttatggtatgagaaattctattttaaaaacatttttatttcacatctttggtattagactgatcatgccaatgatgtctggattatgggaaggaaggagcctgaatcttatgatggaatcaccacaaatcaaagaggagtcacaatagcagctcttggtgctgactgtattccgatagtttttgcagatcctgtcaaaaaagcatgtggggttgctcactctggtaagtgtacttagttaagcacctaggatttttaccaatttggggggaaagttataatttttctctgatggacattgtttttgttcattctgtaagtaatggtctgactctctgtgacctcatgggctgcagcactccaggcttccctgtccttcaccatctcccagagcttgctcaaactcatggccattaaatcgacgatgccattcaaccatctcatcctctgtcattcccttctcttcctgccctcagtctttcccagcatttaaatagttaattactacccatggtgata

SEQ ID NO: 31500 - DNA, 5170 bp, Bovine  19866880663714
  misc_feature (1)..(1): n is a, c, g, or t
nctggcctttcgcgtgatgtactctgcatataagtaaatagcagggtgacaatatacagccttgacgtacttctttcccagtttgaagccagtctgttgtccatgtctggttctaactgttgcttcttgacctgcaggtttcttagtaaacaggtaaggtggtctggtattcccgttttttgaagaattttccacaatttgttgtgatccacacagtcaaagggtttagcgtagtcaatgaagcagaagtaggtgttttcctggaattctcttgcttttctatgatacagtggatgttggcaatttgatctctggttcctctgccttttctaaatccagcttaaacatctggaaattcttgggtcacgtactgttgaagcttagcttggaaaattttgagcattactttactagtgtgtgagatgagagcaattgtgcggtaaatacatgtgtgtatgtgggtgtatatggtgcatatgaatatgtttgtatgtatgcatatgtgtatatatgtatgtatgtgtgtatatgtgtgtgtgcatatgtgaatacatatgtgtgcatctctgtatgtgtatgtacgtgcatatttactcaggcaactgttaggggttactgctgtaagtgatcatccatagttataacacgtttcacgtgtcacttacaggaaagatgtcccaatgggatgatacctcctcctataatttcagctaactttggggtgacttggtcactcacaagggaggtaacgtccactgatgcctttgtgaagtccctgaactggaaggtcggtgaggaaagaggcagagctccttggcggggtccttctgaagtcacaccaggatctttccacaatgaggtgaaccctggggcgggtggttgagaatgacacttcaggaccccaccccgcccagttctcctccgggagctgattcaaacatcatcatctatacacatgttcacacgttactgagggatgtctggactccagcccattacaatccatcatccttgaagccctgtgtccacagctggaggcagaaagcacatgaaattgtacactggaggagaaaaatgcatcaaatctcagaagcgagctctcttcaggtttcaaaggtgattgggaaatctaaacaatttagaggttggtttggtaaaacccaaagaaccagtcaatgcagttattaaaaaaaaaagaaagaaaaacagacacatccatgattgtagcaatgctatccgcaaattcacacctcctccccagccaaaaggtggaagcagctcaaatgtccatccatggacacagatgaatggataaacaaaatgtatatgtgtgtgtgtgtgtatttatgggagaaatatccataacctcacatattcagatgacatcacccctatggcagaaagtgaaaaggaactaaagagcctcttgatgaaagtgaaaagaggagagtgaaaaagctggcttaaaactcaacattcaaaaaactaagatcatggcatccagtctcatcattttatggcaaatagatggggaaacaatggaaacagtgacagattttattttcttgggctccaaaatcactacagatggtgactgcaggcatgacattaaaagacgcttgcttcttggaagaaaagctataacaaacctagatggcatattaaaaagcagagacattattttgccaacaaaggtccgtatagtcatagctatgctttttccagtagtcatgtatggatgtgagagttagaccataaggaaagctgagtgtcgaagaattgatgcctttgaactgtggtgttggagaagactcttaagagtcccttgggctgcaaggagatcaaaccagtcagtcctaaaggacatcaatcctgaatattcattggcaagactgatgttgaaacagaagctccaatactttggcaacctgatgcgaagagctgactcattagaaaagaccctgatgctgggaaaatttaaaggcaggagaaggggacgacagcatatgagatggttggatggcatcactgactcattggacgtgagtttgagcaagctctgggagatggtgaaggacagggaagtctgatgtgctccggtccatggggtctcaaagtgttggacatgactgagcgactgaacaacacttttccatgaaggtgaaagtattagtcactcagtcacgtctgactctttgtggccccatggactatagcctgccaggctcctctgtccatggaattctccaggcaagaatactggagtgggttgcatttccttctccaggggaatcttcccaacccagggatcaaacccaggtctcctgcattgcaggcagattctttagcatctgaactaccagggaattccatacatatatgtatattattcaaccatgaaaaggaaggaccttctgacacaaactattacaattcagatggaccttgaggacattatgctctgtaaaataagccagtcacaaaagaacaaacgctgtgtgagccagcttatgtaaggtacctagttagtcaaattcattgagacagaaagtagcacagtggttgccagaggctgggaggagggggaaatgggaagctgtttaatggggagagagtttcagttttgcaagctgagcttctggagtctgattgcacaacaatgtgtagaaacttaacacgtctgcatgacagattttaaaatgtttaaggtggtcaattttgttacgtgtgttttaccacagataaaccaacaacaacaaaacaaaaataaggcaagataagtcagttgcataacagcagagctttgttaactggttgtttgaacttcctggaaacgaagccaggagtggctagccagggagtggggtcaaaggaggtaatgagctcagcggggagggaagctgccctggggaacatttttggaggagggagtaggaacgttctgtgccctttgccttcctgagagttgacccctccatccgtgacttctggagaaaagtcagcgtgaaagtgtctgtctctgatctctgtgttttactctaaatctctgttttacactgtcctgggcagggacctgctatctcatcaacattcctggagacgggggtaggtttgtgtttccttggacacagatgaccagactggtcagacagattgggaaatgctgcctgggttggtggctgatctaacataatgtttctcaaacacggggcttcccgggtggcccagtggtaaagaatcagcctgcccatgcaggagacgcagattcgatccctggtcgggaagatgccctggagaagggaatgacaacccactccagtatccttgtctgggaaatcccatggacagaagagcctggaggactatagtccgtgggatggtgaaagagtcagacacgacttagtgactaaacaacttttatgatataaatataatttaaaattatgcatttaattgaatagttggagcatccggatgagcaacttgtcactagtatgatggtgtaattccaggtcccacatttaggattgtcatcactccagtgaagggcaagtgacatcttgaagctttgcatgaatggaggtgtagccccaagtcaacctgaggaaagcggtgggggaatggagtcaacccaccacacaggatggcgtgagcctgccgcactcacgaatgccaatgtctcaacactgtcattgtatttgcgctctgagttagtttcagcaaaatattactggtgccattactgtaatattgtttttagttttatcgacttttgaggtttggtttccatttaatttgtggccttttgctgcttttcagttatatttgcgttataagcagaaagcatttctgtctagactaatcttggtgtgtatttttaaatagcttcataaagaggttaatttataataaggtcaagttaaccctcagggtccaagttgccttcttctctttagaagcgtctatagcttctgctgttagaagcccgtgacatggaaagtcaagaggctccacttatatttgatcagatttagaggaaggaactcaggactttatgaggccaacccagtgacttattgaggatggactaagttgtgtttaggagttctacgcattgtctccaacactgatacataaacgcctacgatataaataatagcttccggttcctgttggtgaagaaagcagtgctctgagtgtctggcctattgtttcagactcagttgacgctcttctgtgtttcacccctttcttgtcctttctctttggaagctagaagttggctgcttcttttgttcaggatgcttgttttatgtaccaaagcttcggccagcaaaggctcagattttattaaaaaaaaatatttttttattgaagtagagctgatttacaatgttgtgccaatctctgctgtacagcaaagtgacttagttatacagagatgtgtattctctgaaatattttttccattatgatttatcacaagatatccaatatagttccctatgctacacattaggaccttgttgcttaccacagctttcatctttctctttttattggagtgtagttgctttaccatgttgtgttagtttctgctgtacaacagagtgattcagctatatgtatgcatatatcccctcttccttggatttccttcccatttaggttcagtcagttcagttcagtcgctcagtcgtgtctgactctttgtgaccccatgaaccacagcatgccaggcctccctgtccatcagcaactgccagagcttcctcaaactcatggccactgagtgggtgataccagccactcatctcatcctctgtcatccccttctcctcctgcccccaatccctcccagcatcagaatcttttccagtgagtcaactcttcacatcaggtggccaatgtactggagtttcagctttagcatcattccctccaaagaacacccaggactgatctcctttagaatggactggttggatctccttgcagtccaagggactctcaagagtcttctccaacaccacagtttaaaagcatcaattcttcggtgctcagctttctttacagtccaactctcacatccatacatgaccactggaaaaatcatagccttgactagacggacctttgttggcaaactgatgtctctgctttttaatat

SEQ ID NO: 31501 - DNA, 3124 bp, Bovine  19866880663915
  misc_feature (1)..(1): n is a, c, g, or t
nagaaaacttacatgaaggtctagagaaacgtagttttaaactagggtttaccaagtcacttttagacctttatattaataatactgtcaaacgtgccttcagttcagttcagtcactcagttgtgtccaactctttgcgaccccatgaaccgcagcatgccaggcctccctgtccatcacgaactcccggagttcacccaaacccatgtccatcgagtcggtgatgccatccagccatctcatcctctgtcatccccttctcctcctgcctccaatctttcccaggaacagggtcttttcaagtgtgcctactacaactcaataccatcactatttttgtagagtctaatgaatcaggaattgattttgttttatactagaatcattcaaaagttaataataaagggcgattccaaggtgtcagctagacaaagtagccatggttttgtgaaaaactggcagaattgtaggatctaggttgcaagctctgcttctggtgccggaacactcagaccctgccctctcctgggccttcccttacatttctttatcatttttggctgctttgcagttcctgcttggcactaccattcagttgtttaacacagatccactcagaaaagaatttaaggaatgagtaaaattcctggaagtaacctgtctatcctccaacctgttgaaagattgcacaactacaagcctgcctaactcattactagtttccactgacaccattcagattttatgagaaccccattgttcaccccaagcctgccttgagtttatagggtacaagctgccttatttacttttctcaaggcattgctattttctgtggcactttttttgcaataagaagatgaagggttaccctctgccctgcctgtctctccctccctctccttccttccttccctcccttccgtctctccctcctgagaagccactacccagcctgcctttggatagttggagagagagccagtagaagcatggctgctctctcttgaccagtgagtgtcatttctcgctcttaggggtacagaacttcttggagcacaaaatgtgttctccattcctgtttgcacaacctcccactcttcttcttttaaggaggaagggacttctccaggaaggggctatgcttcttgcatggggtacaaactctgactctgttgacaaagatccaaaaccaccattagaacaaggtggtgttagtggtagggtcttcaattgggtgctggtgaggaagcacaggggagacgtggtcccggccccactggaccagccgaagggccccattgcagagactggccactcagcagacgcacctgaggggtttctacaggtcttaacatcaggatttaggagtctgatgacagttctgagacccagtggagaaaggaagggggtgaggaagagaagagaaaggctttaggaagaaataggctggagggttagctctccttggggctgcagccgccacacacagactttctcagctcacatgccagttgatcctcagtctaacagtgagaccaggaactgatggcatcactgaagtttctagcacattcatgaaacacttaggcccacagtactctttgcatgtctgtgtgaagagtccagtgtatttggactggggtctataggttgggaactcctaatgaggttttgttagggcctctgatcctgaagtctggtgccaccactggctgcatctgctgtgtgtgtgtgctaagttgcttcagtcgagtctgactctttgcaacccagtgggttcctctgtccttgggattctccaggcaagaatactggagtgggttgccattgtagtcactctctaattgctcctcccacacccatgtctgaggactaagaagctgctgtagagcttctgtgaattcctggctcgaggaattctcttgaagcctcatggtctaaactctgactccatctctcccgggttccactcagcttctactccagcaggtgtcacagtgtgacagccccttcctgtgctgtcccttttggaaataataattgggttctgaacatgtactgctggtctgcaatccctatagaaaactgacttgcacacttttctttggactccattctctgttctcatgacaccaaggaccattgcccaagacaccaatgaccaggcaaggaaagtagacacattgtatgttccctaaacacaatggaatctgctaattggctgagtggcagaaaaatgtccaagggggagagaagcttatacaaaatagaaattcatctacattcaaggggtatgcattccatagtggacaaaaccttgagaacgtacagcttagacatccttcatgggcctaacatgtagtgatactgattgaaattcagaaagttctgagggagagggatagggtgggatgatttgggagaatggcattgaaacatgtataatatcatatatgaaacgagtcgccagtccaggttcgatgcacggtactggatgcttgagcctggtgcactgggaaaagccagagggatggtacagggagggagtagggaggagggttcaggatggggaacacatgtatacctgtggcagattcatgttgatatatggcaaaaccaatacaatattgtaaagttaaaaaataaaataaaattttaaaaaattaaaaaaaaaagaaattcagaaaggcacattgatcaatctgattagccagtaccaacaaatttgatgaaaaagactactaatatccagtcagaaacaaatgtatgctttattgtagattttattaaattatctggtcagtttggtcaacacatttaaactgactaagtatatgggcgtattctggaaagatcaatttggttcttcagttatcatctcagccaaagagtatcctaagttgtttagcttgtgtcattcatcactgaccagttagccatttaattgctcttgtcttatgaagaaggagaatgatgggaagagtacaaagggagaagtttctggaaatggtgtaaaactttgacgtaacttcccaaaccatctcttgttctcagtgacctggtctacagagtcaagtgcatgcatatgtttaggaggccagcagtgccaaatcccctcag

SEQ ID NO: 31502 - DNA, 611 bp, Bovine  19866880793630
  misc_feature (1)..(1): n is a, c, g, or t
nattatctttctgaattcactaactcctacataattaaagttcatttaacctcactgggatattcaaagatagctgatagcgaacttctgagattcacaggcaaaccatatttagcccagggttagttagcttgattaaagtatgatactgatcaacccattgctctgatgtttataacacatcctgataagcctcacttttccatggactaaacctggcaagttatcttcacatggtcacattgtggacttagttttaaagagagagagattgaaagaagggaagtatatcagggtaagactgccacctggactatacatcccacatcccaacacaatctccctgcttctactcttcttctagaatccattttttcccacccagtagccagtatgatcttttataaaacacacacagactatgctgctcactccactccagcttcacttagactccttcagcagaattctactcacagtgcaacaggaacctaactcctatagggcccacagtatctggcccctgcatctcacaccaatgtccttgggctcctcacacccagccaccaagctgcccttctgtctgctgagaacatcaagttccttcccca

SEQ ID NO: 31503 - DNA, 760 bp, Bovine  19866881024874
  misc_feature (1)..(1): n is a, c, g, or t
ncttatgaagcaaaaaattaagtttggcaacatttttcagtaagccatttaaaagtgcctaaaagagaaagaaaaatgagaaaaaataacatctctgtgaactgtctgcattcttacccattcctaatttacagactatggagaatagagatgtgatagtaatcatactgacacagtctcgagggaagtgacagcctcctcaaattagcgtgaccaaaatgatgcgacaagcctgttgaattggcccatatatagccaaatctgaattcccttcttcctgccaaaacccacagagaagaggtaaccataaatcatgcaggagatgccatggttgttactaaatgtcctgtgaatttcaaggaaatgtggctctttatgctatgggttctgggggaagccactcaagtcagaaagatcattccactttatgttgaaagaggctaagggcttggtctgttccatatgctctttggttttgaaggacattgaaatctaagaaaggtccttcatagtattccagagtcattactatagcatagaggaaaaaataatgctgatgtaaccaacatactcaactcagatggccctagcaggggatgtgggtggagcatagtaatctccaactcctctttcctacctcctccattcagcatactcttggaccaaacctaggatgagcagtctgccagaaattatcctcctgcttaaacaggggatacaggcatccctagaggtatacctaggacatgcctacttataa

SEQ ID NO: 31504 - DNA, 1005 bp, Bovine  19866881197160
  misc_feature (1)..(1): n is a, c, g, or t
ntatacctttccgttgctgaaattctctgattttccaaacatggtggctctgatgaatgccagagacatgttatcaattctctaaaactttttaatgcatactgctatgccatgtatgcaatttctaagattttagcttatctcatatgttgcattttattatctcattattttcttatatgagttgcacatagagggtggtaacttacttaaaactttcataattcacagtatagagtgtatattccttagaaagctcctatagataattaatctcaccttgttttctttccttccttcttattgtcagttctttagatttcaagagtgatgccagatgtcctggtctcttggattggcagagtgggataggctgagttggagttgttttactttgggaacttgtgctctgtacaattaacaaatcagcaaaattatgagcattgttacatgtttcattaacaatgatagcttcctaggtaaaacaatgagtatgctcagttgcaaaagcaggagattcttttggaattacagtcagcatttgtgtcttgaaggactgtttatggaccctgaaaacaaaataaaacatacttcccaaattttgcctgcagcagttgacgcaaaacatgaactcaaataatttacctcctggccaaccttctgtataaccagtagatggtcactccagtgaacattctggttacttattgaaatcaagaatctttcctgttccatcagggaattcagtaccagatccaaggtcagtgctggaccacatcttgggggtgggggttaagtaatgcaaagcatccacagaatggctagaggccaaggagcagggcttgtgactccagaatacgtcagctcaaggtgagatgaagtttttaaagggtcactaaaaagtgctcattgttagatgtgttcaaagtggggaagtacaaaggaaaggtttcaaggatgacttggtaaaatcccatttaaaggacttgctagcaaagaaaccat

SEQ ID NO: 31505 - DNA, 594 bp, Bovine  19866881204223
  misc_feature (1)..(1): n is a, c, g, or t
nccctcacaatgcccagaggaggtcaagaaccgggagagtgctgatttgctcatgaatgcagctgacttgagtttcagagatcctgtgatcttttttttcctctatgtctagctacaggccacctccctttgaagcccccaatgtccctaatgtataggagtcagacatgtggcccacactgccactggctactataaaagtagcaaggattaaatttttctttcacaacctttgcatggattttgggggaaaaaaaaggcaaaagataaccaggcactccaatgtagcctgctcgccctcaagataaatgtgtccagggaggtaacctcacagttgaatcgacccctgaatttcaatgaagcaggagcagtttggggctggggtcttggctggagagttaggtggagcctgaagtgtgtgcacatgtgtgtgtgctcagtcgtgtctgactctacaaccccatggacggtagcccaccaggctcatctgtccatagggtttcccagacaagaatactgagtggggtgtcatttcctcctccagggactctttccaacccaaggatcgaactctcacctcttgcagctcctgca

SEQ ID NO: 31506 - DNA, 1368 bp, Bovine  19866881215108
  misc_feature (1)..(1): n is a, c, g, or t
ntatagtctagtaataagcctatcaaagatattcatcatttctcttatggtgtttttgatctgtagcatttctttttggttctttcttagaattttcatctctctgctaacattacccatgtgtttttgcataactgtctactttattcattaagcccttagcatatcatcagagttgttttaaattcctggtctgataattccaacatctccgccacatctgagtctggtactgatgttatgtttgtgctctctcttgaaactgttttctgcctcttagtgtttcttgtaattttttcttgatagccagacatgatttactaggtaaaatgaactgcaatcaaccatcctttagtaatgtgattgttaggtgtggggtgcagaggagcattctatagccctgtgatcaggtttctgtcttttagtgaacctgtgcctctagactgttaacttcacatgtgctttttagtctgaaacccccacccttcacttttacatggtatagaatggctagagcttgctagggttgggtacttctctttcccctgctcagctgatttctgataaaatctgagcaggttagactggttagtttctcctgagggcagaatttaagaagaacaggatgctgtggcatattcaaaatggttccttttccctgctggaagcacaaggggattttcctcctgttttcactgtgaggattaggactgctcctggaggtaacactcacaaaattgtggagttttttgtagatccataactggattcccctttggagttttaactctcagagttatccacacccgagcttccagcaattggtcaattacagttcaggtctccctatcctggcaatggttcccacggaagttgctgctcctggatttctgctctggtaacttggaattctttgtatttgcctgcctttctttccaatttgggggacagccatttggcttgtgacctcacttcttttgtggacctaagagatttttcagttcagttctttccttgttgtgaggatggagtggggacttccaaagcttttcacgtaccagatcagaagaaagaagtccttcatttcctttttattgcatagtaatattctgttgtatggatatacctcattttatttactcattcatcagtggatggacatttaaattgtttccagtttttcttttcaattgttaaaaaatagaagtgtagttgacttaaatgttgtgttagtttctaatgtagaacaaagtgattcaaaatacatatattcaggatatgtgtattctgtatgtatatgttctttttcaaattctttttcaccatagtttattacaagatattgaatatagttccctgtgttattgt

SEQ ID NO: 31507 - DNA, 932 bp, Bovine  19866881242113
  misc_feature (1)..(1): n is a, c, g, or t
nattggctgtgggctgtcacttgagggccagaaaccctatctgcctagtgaaatagatcttgttttagtagacattaatcctctccaggggcatctgtgggtcactggtgctcaacactcagagctggtacttttaccatacgtatcatgactggtaaaaaatagtatgggtgtgataccaatagtgtctccaggaaatagatagtgtgaaataatgctgattgtagttatcgagcacctactatgtgccatatgctgtgctaaatgctatatatacatataaaacatatatgtatatatatgctcatataatctttggaatatagctattaggtaggctttataccatcacctattagtcccatttccactggactgatgaagaaactcagaaagcaccatacttcatgcttagaatatttcctgtcggtgtctacatttttatggatagaatcaggatattatacatccaactggcctgaattctatgcattcattcaactcatgaatcctaccagtgctttggagaaacttttgcgtgccatgcatagctaggctgggctagggacatatcagtgaactgaatggcttggaccctgctctcaaagagtaggactcaccttaggcccagttccaatacccctgtgatgcaactaaaaaatattttagaacacctgttgtgtacattctgttctgtgcatgcaccctagggtcgcttcagtcgtgaccttactctttgtgaccctttggtccatagcctgccaaactcctctgtccatgggattctccaggcaaaaatactggagtgggttactcttgtcctcctccaggggatcttcccaacccaggaatcaaacctgcatctcttgtgtcttctgcattggcaggcaggttctttaccacctgggaagtccccacatttccatttgcat

SEQ ID NO: 31508 - DNA, 1195 bp, Bovine  19866881307619
  misc_feature (1)..(1): n is a, c, g, or t
ntcctcatagtggaaagctagtaaaagtgtaaacagctcaccctgactccaaggttaattgcacccccaagcccagctgtagtggctgctttccaaaggagctgcccacattgggggcaaggaagcgccgttgcactgagggaggtcacgagggcacttgctgaatgctgacactggacattcttgctcagtgctgattgcttctttggttcctgtcttgtgctttggctctgagctttgctaactgtgacttttggctctggttccttttgggtttctgcccgctggcctccatgttttctcagtagccgaccttgcagctctgaccatcagctgtgtccttgctctggcttgttgcattcattccctttaggcctcctgctctcttttctccacagtcctgggctgaggtcctaaggccatgccacaatccaaggtttggtcactgacagtgtgtcctgggaaggagaagggaggccagaaacattcgttttctattattcttcatgaaaaacagactacaaagagtctgcccttctggactacataggtatgttataaagattaacatccgtgaagcctgtgtggattaatgtaaaaagcagccatgtagaagattgccaagctattgccttggcaacatcccccacgttaggaagagacctaaaacataagctgtcattataaagtaaggaggcttgttttttcccctaccaaacgcatcaaactgtatacttgtagataactcttgtccctttcaaattaatcattgtggggaaatggtcacttattacagcaactaatgcccactcaaaaaaattttttgactcaacttttggtgtttcctttaaggacagaggctttttatctttccctcaaatctccttagtggtaaagtgtctttattttatcaaggttgtcctgaatttaaaacaaccaaatctggaaggaaagtcagccatgagtcagggaagcattggagagagacagatacacagagcgaaattgattgattccacctgaaactaagaagaaaaaaagacttgactctgtagtagtaaggtggatgtgcatgtctgcaggcatgcatgtggatggtggaatgattgtgtataggaaagtcagagagaagaaccttggtatttcaatttgttggtaggactttgcatcccactaacaaagaatgcaaatcgaa

SEQ ID NO: 31509 - DNA, 1376 bp, Bovine  19866881472885
  misc_feature (1)..(1): n is a, c, g, or t
ntagtatcctgctattcaacctgatctgtaccttattttattattattttttcacttcatgtatcatggagattgattcacttcatttgatctaagtgtatatcattcttttaacatggttgcatgatatttcaggtgtgaagaaaccataattgatttaaccaatctcctattgatcgacatttagattgtttccagtttattgctacaaaaatcaatgaatagctttgcctatatatttttgcaaaaatacatgcatatatttattggaggacttcccagaagtgtgattactgggccaaaagttatgtgttgagaagtgtatggagattatcaaattatcctcagagatattgtatcaatttgtatacttccttcatagtgtatgtgaatgggttcagggtattttttccttagttacatggcactggacaagcactcttgggtgagtggcatgacttctttttgtttctttacaggctttcctagtgagagtgagtactgtaatgaggccacaggcatgaatttgtccactctgcagtcagttagctttgttgtctctttcatcaaggtttcctgctcagtgagtcacaatagggaccagaggagaaaatggacagatgggaaatattcctgaccatttctggatttccttagagtctactttcctaaaatagagaattataaaaaaattgaaatgtttaaaaaataatattattttgtttgttaagcttcactgtcacaagacatgtttatatctagtacagagctctaacaatttggagataaaggacttatatttatgcacaatccttattgtacagaaattgctttcagtagactgtgagctccttcaacacacagaccatggatgttcattatggtatccccagagggtgtctgatgacagattaagtgaatactgaatgagagaatagtgaatacagaaagaatttgggagatgtggatattaattacaataaatatctatttagtgtattatacagtttgtatttcattcgttcagagtacatgtcaacttgtgttagatatgcagagcaagttcatactccaagctgtaacccagccatctatagacaacagtaagcctctgttttcgttgcttatgttactttcctttgatttaaattcaaagttatatcaccatttagaataatatacatgttttacttgtccgggtcactcactcctcattatagttgtgatttttatctgtcacgttgaattttttttcccccaaaatccagtcctttcaataatgtcatcacacagttgtttcaaaggagctttgcggatgatgaagaatgctctcggcctttctgaatgtcagcacattcaaccaagattcccagctt

SEQ ID NO: 31510 - DNA, 960 bp, Bovine  19866881503358
  misc_feature (1)..(1): n is a, c, g, or t
naaacagcaacccatatacccttaacagtacccttgttgtatccacccactcagaagcaatggtcaggaaacactgaattctgttagcacttttatacttaaagagttgagaaatccacatcatcgattttttgctttttcataactgagaagaaaaaagtcatggtataatttcaggcagtggaaaagcttctattcaattcagctttattgtagattagaggaaggaagcatttttgatgtcaccaaagagatcttctccttccaggaggcttttaaaaatatgtctcccagagggttctctggtttgcagtcatcttatagaggtaaagactctctgcttgcccacaatctggaataatctaagtcaagcccagttagcatactgtaggagcaaaaccatgctaaaccctgtctaaattactatatatatacattactccacatttccagcttgtaatcttcacaatgtttgtgtccttgggatggctgtatctgaaagtgctaacagtcagcagggacaaagacatcagggactcttgttctgtctcctcccttccatcctgtcctttgattagttggtgctgtgaaaacaaatttacatgctgaagggcacattttcaaaggaatgaagaatgccaagacaatagctatctgcaaatgtggtgcaactggcagatgtgaaaggtggagaaaggagatatttagcatgtttacatttattaatagcttagagctaagcaattacatattttgttttgatatcttctgacctcattcagttttcctttattcagtccaaacatgtgcaataaataccttctcagccagttgcagataccagtgtatttttttttttcccaatcagggtccttggttctctagtagcagtcaggagaaacaaggacatcaggtgtcttgttcttctctccttttattttccatgcctgctctttgttg

SEQ ID NO: 31511 - DNA, 727 bp, Bovine  19866881802545
  misc_feature (1)..(1): n is a, c, g, or t
nttgtaaatcaactgcacttcaataaaaaaaatgttaaaataggtttatattgttattggatttatgtttggaaaagattattctagctgtggcatgagaatcagttgtagaaggtgaagtgagaggaagctaaaccacccagcagtttttaccaggggagatgatggtggtggagacagtggagatggagaggtgtcagattcaagagacatgttaaaatcagcaggtcttggagaaggattttacatggtgactgaagacaagggagacatcaagggtgtcttctcaggttcttgcttgtgcaaatgggtctgactgacagtgatgccattctcggagacaagaaacacggaagaaggccaggttttggaaggaagataataaattcagttttggacacattcagattgaggattttttttttttctgtaaaagcttgttctatagaatgtcttttcaagattcttaattgattattctctgtggtgtttgttttacttatttttcttacctcctccagtctaacacttgaagaaatgcaatcacaagttcagaccatggctgtttatcatgtctctgcatccaaatattgatgcttgcctaatttgaaccttcctggggagtaatgaaaacaagagagaagatggaaaatttgtggagattccccaggagtgcttgcaggatgtcagacactgaccccagttagactccaaatgtgtcagggaa

SEQ ID NO: 31512 - DNA, 754 bp, Bovine  19866882005980
  misc_feature (1)..(1): n is a, c, g, or t
ncctggaatacgttctcactgtcccatttgttaaaattgttaatctgtgttctcttgctgttcatgaaagtgacaatgaaaaatagctgtccattaacatgaaagcaaaatgtgatgcagtaatgattcttgaagcttcctgcagtgctggaatttttagaaatcattaataataaattttcagcaatgccatgagcaactgatagctcttctctttagtagctagaactctccatttataaatgataatataccaggtcaatatgtcacagccttcagcagttttcctaaagttattttatgttaacaccagcattgccaacataaaattcattttacagataggaaaatcaaggttattctaccaaatggttgttcagaatgaatcagagtattacatctaaggtcaccaggttagctccagatttaattaagacctctggcatatttgttaatatgggaggcataagtagaattctttggttaatgagtaggggatggagtggagatggggttccattaatcacaagctctgggtcatcttttttatccatcaagtttaagtacaagcaacatgataaattattaaaaggtagacttggcctatatatctcaatatgtgactgggggccacatggggagtaagccagtgttctcttagaggaaaggaaacaaacagaaagcttgagaatgtgaaagcaaaacactcttgttcaaggtccttgtttatcagctcaagagcggcatactctgt

SEQ ID NO: 31513 - DNA, 861 bp, Bovine  19866880368452
  misc_feature (1)..(1): n is a, c, g, or t
ngaatttttctattttggaaacaaggttggagaaattagctgcttcgagaagcccccgttccttcacctgtcctcatttataaagacgagttattaaaataaatagaaagcttgcctggctttttaaacggtgaggctcgccaccctccataaaagacgttagaacacacatcaccgacagggtagaaggtgtttcaacttcatcaaaagccttgaaaaggaggacatcctttgtatccatgctttcggaagttttgcaggactggtatttattttaaatcagaactgctcacaaagcgaactccctttacaaaatgcataggatgaagccatcctagagatgacctctaccgttcgagcctggacagagatattatttttatagaaaaaaaaaaaagaggatatctttaatcagctttaaaaaaacattgtgaacagtcacttctcttatttaaaagtttaactttactttcatcaatttataatcagagttcctctggtatgtttgattcctgacaaacaaggataaaagtcttgtgcccccattgctaatgagatgataaaacagcagggatcaagtttttaattactacaggcaatgcactggagaggtagcgatgatattttctattgcatgtctaagttgtaacttcaggcttatgacagtcctgctgtgctccactgcctttgatgatcagtcatttttgtctcctgagaacacacaaaaatttctgagctgggatcctggggggctggcaattattggcgtaacctggtgcaggttcccctcttcaaccaggatgctcagtaaggatccaggatcttaatgcctgcctttatcccgaaagggaaatggacatt

SEQ ID NO: 31514 - DNA, 1785 bp, Bovine  19866880513170
  misc_feature (1)..(1): n is a, c, g, or t
ntttttcatcatcccaaaggctcaggttgaagctaagaaagaacatgaaggtgcggtgcagctgctagaggtaagtgagccagccctgctggctttcttcccccgggggtgggtgagctcagggcatgctgtgttaatgctttgtagaagtcgtaaccgaccttttactgagtgcccactgggtacccattactcctgccgtttacacatccttcccgtgttgtccatgcaagcagaccatcagatcagtatcgttatgagtcccatttttacatgtgaggaagtggggcccagagaggttaagcagttttcctgtggccacacagccagcatcagaactgtgagtctcagaggtgctctgctctcctctgattgaatgggaagcagggagggtgagcctgcttccttacaggagaaagggaagtggatcattcctacgggtgtcaggtgaatgggggtattttaaaggatagcgccaagcctgaggaaataaatacctggcatccggggaggcatttgcagatttagagaaaggacagcgaagggagtcgcagcagtgaacacggtcaaggcgcggccacaggtactgttcccgtgagcacagcaggagtcaccctccccagccacctgcaggccttaatcactggctctgatgctgggggcttggcaggaggcaggtgacgtgtcagaatcactcttctgcccccggttggtggcctcccatatcctcgggaatggaggaaactcctggggtcccctggggggcctttgcagtctgcatgcctcatgtataataaatggacataaggaatctcccttttgaagacagaggtcccccaattactgacccctcggtcaagacataacagcaggaggggtggctgcacagcgtggggtggccccacaagcgctcctcccctagttctgttctatccagaaaggccaggagggcctctcccctgggcctgcgtctctgcataagggaagcgcctgtcctctttaagatgaccttgtctcttgtcccccagggcagcttcgtgaccacttaaaacagaatatgtgcatctcttacattgccttttaaaatctattcctcccccaggaaacggtttcatcattatcatcatatatattaaaattgatttttttgaaagcctccattagctaatgaatatctggagggctgggagtgataaatagcaggtgggaaaatatataacctgagagagtggaaacagacgtcccaatggccatacatctccctgaaacagcatttcattcccctcgcaggatcgcccaccgcagtttgatttgcatagtctcctggctggaagtccagcttctttccttcccttcaccccaagcccatcgatctgatggtctgtgttgttttaatctgccttctgagctgctgctctgtgacagtcccgctgaggtcacgtcacccggcgctggtgcggggtgcaggccctgacacgtgggggacgggtgtaacgtgctttggttgggaaaacagagagggccacgcagatgggctgagaacctgggttttcttttattcaccacgtcttcccgtcattgtgttttgcttcgctcttcacccagaacacgctggacagcatgcaggtattttagcgagtgatgtcctcccctcccatgtgcttggtgaagttttttcccatgagtggaccggccgtgcgcccctgggccagctccatctccctcttcttctgaacatgggcagcttctgatgcagtcgtgggtgcccgggtctccctggggtgg

SEQ ID NO: 31515 - DNA, 971 bp, Bovine  19866880544038
  misc_feature (1)..(1): n is a, c, g, or t
nttcactctgtctcaggagaccctttcccacccgacctgcccttggcaaacctggaagttgaaacgtttctgagctggagccaccctgagttctagagctgcaccaggcttcatggagcattagcacatcttgggttctctgaggccatggatctaaatacacacagtccgtcgtttctcccaacagtcacagacagcctgggaaccatcctagtgagttgacttctgctcttccccatcaggattttcttattcagtgatcgtagcaagagggcacagtagagcaagtggaaacattctgtccctgcagaacagcccacagcatggtagagcccagccaccgtggctgcgtcctcccccacagtagctagtacaagctctcgtctaagctggcctaattattagcagtcagatctcagtaaatcaggactccacagagctgtcttaaactgctcccttggactctgcttccgagctgacaaccctaagcgtttcctcacactgtttaactcagaccacgtttggaggtcttccctgcatccacccagtcgcagacctacatccgtctggtttaaatctactgtcctggctggtctccttgattggactttgactcagtattggctcaaataattgtttttttctctccgctttggtttgtgattttcctagataactatggctgttcaaatggccgtatattgttaagactttttttttccccccaagctacattcatcagcagtgagaagctttaaagttttattagtatcataaaaacccttctcaaatgaaactacttttgataactgttcattctgacaatgagaatttgttgagggctgttggcaagtgggaggaatttgtttttgaaactgaaattggcaggaagtaatgaccccaagtgctttcttcctcttgatttcagcccccacgccctcaacgcactcctctctccccaggccctaccc

SEQ ID NO: 31516 - DNA, 1027 bp, Bovine  19866880682774
  misc_feature (1)..(1): n is a, c, g, or t
ncagaaatgtccgttggttgagaatgtttgaatgaactaagcctggatggtagtgatttacagagctgttaaaatttatgtgcaggcctatgtttgctgccaagtcgcttcagtcgtgtccgactctatgcgaccccatggactgcagcctaccaggcttctccgtccatgggattctccaggcaagaacactggagtgggttgccatttccttctccaataggcctatgtttattggcatccaaaaaaaggtacacaattcacttgctggaaaaactacttctgtgtaagacaatccttctttagtatctctctcttcctctcctttactctccagaatctcattctatctctctctctccgtatacttagagctgtatcgtgtgtgtgtgtttaagtccacaggtgattctatagatctggacagatagatgctctggatactggaaatatgcactatttctattctctactgtacatatttttgaaccatttgagtttgtgtggacatacattcctttcaaagtgataagaaaaaacagcagtttatttctattaaaataaaatcagacaatatctgcagttgacattaccctagaggatcaaaacatttcaaccgcagtttagttttcattatcaaggtcagaaacagaccccagcaaatcatgatcttggtgaccctttgaaagcatgacatttaacatgtcaggactgagcttgcaaaggggttatggaacttctcaacactaatttttattacttcaatatcaatatagatgaatatttcatcaaaacagagcacagttatgcaaggcatgctctctcatgattagcactgagcttgccctgggctcttcccccacagtggggaattttattatatagtagcctgccgagctctcctgggggtcagggggttaaagctacagaaatatgatttgtgaatcatctgagctcagttttgtcgcaaagataaacaaaaagattatcaaagccttttttacagtattatttaaatgcccttcca

SEQ ID NO: 31517 - DNA, 1512 bp, Bovine  19866880712097
  misc_feature (1)..(1): n is a, c, g, or t
nctccaatgcattaaagtgaaaagtgaaagtgaagtcactcagtggtgtccaaccctcagcgactccatggactgcagccttcgaggctcctctgtccaggggattttccaggcaagagtactggagtggggtgctattgctttctccaagtggtcccacctaaccttccaattcctagtcctcctgcatctcagtttaaatattagttttgtcgcagacagacctcttcagtatgtaaattagttcctgctttcctctttgtaagaacattctttgttccttgttaaacttaaatatttgtggttatgatttttttctgccgtttccacaagggctcacatgtgttgaatgctcatggtatgccaggcactttgtgctctctgtgtgttcgcattgagttgttctcagttgacctgtgcggtataggttgttattgactattttacaaatacagacgcgagtcgtaggttatgtgatttgcttcacaggttatgtgaagaagagccagtctggctctgataataacttgatgatactgctttctactctatagttgggggtgagttggtagagaaccttttatacatggtaatatatttgatgcctgatagatcctagcttacattaggtactcatttacagggtgctgttgaaaaaatgtggggaattgttgatcatgtgtggtaggagcagtaaaggagtagtttggagatgaatgactgtttccttagagacagagtggatgccactcatcaagaatgaaattatggggcgtaaatgatgtggttaaaaaaaagattaagctacatgcaactgtggaatgatccaggaagatacagtagtgtatgtataagaattacttaaagggcctggcataaagcttaccataagagccctctttcatagattacatatctaggtgtgaaagaactattcaccaatatcttaagactttttataattaattcaattgaaagatgacatactacatgaaaataagtcttctacttcagtgctgtcacctagcacaggagcacttaggttttgctgaaggtggggatactgccttaagaggcaatattggatagtgccttcagaggctaggaaactctgtgattacccaggagcttattttagaatcttaaccaaatcagtttaaagatagcattgtagaaacactcaaatacaattgcaaacattgagtattgtcttcatgattatttcctcttaagaaaaaggaaaatgactgggagagccagagcgagagcaagaggaagggctcgtggtcaggagatggtgcagcatgtgggcgcctctgcggtgagtatgtcactcttttctaactgcagggagagtccttgagaaacaaactggcaaacgaagatcatggcatctggtcccatcacttcatgggaaatagatggggaaacagtggaaacagtggcagactttatttttttgggctccaaaatcactgcagatggtgactgcagccatgaaattaaaagacg

SEQ ID NO: 31518 - DNA, 571 bp, Bovine  19866880786294
  misc_feature (1)..(1): n is a, c, g, or t
ncgagcaggtagcagttccttttaatgctaaagcagggtgccctggggttctgcagtttaggggcagaagcctacaccagaaaactgcatcagtggagttagcaactgagccatccccaaagctgggctctcaccacctcctgctccaaatttcaagcagctacagtgaggcgtgccaaccacaaagtgcccgggctgcacacagagccgagaacaatccgctgttggctgagatctgagtgtttgcagggtttcttggcacctgtgctttcccacgtttgccctgtgagagaatctggctgacggccaagctgccaaccgacaggaagcttgatttgctcagccaccattctcacgtggaggcaggaggcagcccccccccccccaccacacacatgcacacatgtgtgcaaacacactcaggcctacacgttcatatgcacacacacatactgtcatccacacatgcacacacaacagtcttgtacacacacatgcaacgcacatacatgcacagacacacacttgtgcgcagacgcatggggccccagaagcccgggccaccctctaa

SEQ ID NO: 31519 - DNA, 1421 bp, Bovine  19866880789365
  misc_feature (1)..(1): n is a, c, g, or t
ngaatgactgtaaatgcacatgaagtcttcgctcacctccctctgtacagcccagttgctgaggacccctgcctgaaacaaagacaggaagctctggagacctttcttggccagaggctacagtaataaagtgctgcctctttaacccatgtccttgatgttgtatgtggctgaaaggatcactgcaagcttctggtaggggcttcactagtggctcagtggtaaagaatccacctgcaatgcaagagacataagagatgcgggttcgatctctgggttgggaagatcccctggaggagggcctggcaacccactccagtactcttgcctggagaatcccatggacagggcagcctggtggggctacagtccatagggtcgcacagagttggacatgtctgaagtgacttcatgcatgcaaacttctgtagggattatgtcatactcatttgcatactgaacacatagtagccgctattggttaaatatttaactgaattaattaatgtttctccaaagaggggctttctgaacaacaggatccagttctctgatcttcccctttgggactcagggctgtggagtatgtttttgaggaagcagatcaataactgtatccctggttccacaggcataaagaacccaggatgaatcatgagtgactttgaagataagcactgtgtgtgtgctgggagataattgtatttcagagctcataaacctctccccaaacaccgaggcctctagactgggctaaacgatgcctgggagctcagcaccactgtcataacaaaactcaattaaggcatcaagctgaaagccaggctggacagtaaattaatttttaatccatggatatcacgcacttttcagcatgatggatgtgcaacaacccagcggctgccaatccaacaggaaataaaatagataatcacattcgccacagtgggtctgtctctccccaaccttagcatgagtggtggccctgggactccaggcagctgggagggtttgtctgagccactcaaggtcaagaatcctggtgacttgagctcactctgttcaggtagtgatcttaatgaatgctagtggttctcctagttagttaaaccacatagtgaattggctctgacagtaagagggttttgtttgtattgtttgtcgctaaattgtatctcttttgcaaccccgtgaactgtagccctccaggctcctttgtccatgggatttccaaggcaagaatactggagtgggttgccttttcttactccaggggatcttcccgacccagggattgaacgccagtctcttgcattgtaggcagatttgttaccatctgagccaccagagaagccccattaagagtgttgctgctgctgctgctgctgctaagttgcttcagtcgtgtccgactctgtgtg

SEQ ID NO: 31520 - DNA, 1481 bp, Bovine  19866880867705
  misc_feature (1)..(1): n is a, c, g, or t
natatggacctagaaaaccgaggaaatggttatctaccaacctggcttagcaaagaggctaacaacccactatccgggtggtctctgcccggggatttgagaggtgcctcctgggagtcggcctggggactcatcttcctaaacaagggtcaccttctggctcactcacttcagacttctagctgtgtgtgtgtgtacatacacagacatacatacaggtatatgtatacatacatacacacacagagacacttatatacacatacgtatacatacatacgtgtttccctggtggctcagatagtgaagaatctgcctgcaatgtgggagactcagattcaatccctgggttgggaagttcccctggagaagggagtagcaacccattccagtaatcttgcctggagaattccgtggacagaggctacagtccatggggtagcaaagagtcagacacgactgagtgactaatacaggtatacatacatacctacatgtagaagtgcaggcacatagatatatttgcctgcctgtcactcaaaattgcctgggtcctggggagggggagtatttggatgacagtgggaccacatcccaggtgaaatgtgcgatgagatggaaagttgtaggaaacacccgtgaaaggatgcaggcagcagaggtgcagctgaactaggccatgccctcctcctgcctctctctcccttgggtgaatccgtctcccagggtgcccagttcatctgctccaagccggaggtcagggcccaaggtcaggtggtctctgccctgatgcctcccctctcctctcccaagttagagaaaaggagcatcttcctggagaggagcagtggacagtatgcaaactcagacgaggaggacggctatgagtccccggacgtcaagaggaggggcgcatccgtggatgagttcctgaaaggctcggagctgggcaaaccggtgagtgctgcccacccccctcccaccatggtggctcccggtgggaggggttcaggtccctgcacgccctgggtctgtgagaaagataaaggaatacagacctttatcttgtgggtgacaacaatcacagtcagtctggagagtttagactgaatggtgcctgtgcatttgtgacctcactgggggacaatttcaaaagtctgtatgtgagccttttgccctcccaactgccctgaggatccatccgtgggctgattttgtgcctcagctgagtctccaggtgactacctggtctcaatgtagttaaaacctaacatttgtttctttacttttgttcatcaggcagatgtgtgatgtgcattggctaagtgctaagcatcatgggagattcagaaactgaaaggtccatatcccatccttggagggatgaaatgtcagggcttctcctcccagacaaggctcacaagtgacaaatccatccaagatggggttctgtctccaatttctgatcatgcctattctaa

SEQ ID NO: 31521 - DNA, 1599 bp, Bovine  19866880873004
  misc_feature (1)..(1): n is a, c, g, or t
naataagtcttcagaggctaattgatttcattcttgggaaaattattctgacaatcagcctcaagtttcctttcatcctctggtctctaatcctgccttcgcggaccagcatgaacaatgggcatccctccttgatgtttgtcttgggggatgtttatcacatcgctctttgccatcagccgccaagcagctttaatgcttacagtgtaggagacatatctgccccaaaggctgttaagcttcattggtggtgagaatcgggaggaggctgggaagctaccaaaagtcattaaaagtaatttcattccaggtaacaattacgccccagctgcatggctttcttcccacccacccagacagctctaggcactctccctgctgttctaggagtagggtccaggaagtcccaggggaagaaactggcgggacagagaatgacggcagaagcctagagcagggatgaaattctgaatgtgaggtttgtaatcctcttgcccatgctcgaataaagcaagcagaggtgagaagacagggatgcagggttgatggacacctccatggaccacagtggatcctgttactcctggattcagtcaggatccctgagtgtgtgccccacaaaaccacactaggggttacaatgcctgatttgcctaaagagggtgctgttacccagcccctgccaaaagttattctaaaatgatgaaggtgcaaagtagcagaatattggatttttttcaagaaaaggaggaagtcaaaacatttactttacatttcctggttttttaagtatggcagtttaaataattcaaacactgtgtaaatcaaccacatatctgaggacaaatttggtccacatgccaccagcagataacctccacccaacatccatcatcttgatttaggacatttgtgtcctggaatgtctttctgctgcagctgaagtttttttgtttgtttgtttattttttgatatcgcattttgttttactatttcaagttctgattgacttctatatgtttcctactggttttactttaaagcaaaaatattttacatatggctaacatttatgcttttaaaaaacattaaagacttccctggtggtccagtggttaagaatctgcctgtcaatccaggggacacaggttccatccccggtccgggaagatcccacatgttgtggggcaactaagcttgcaggccacaactcctgaagctcttgtacgcctagtgtctatgctctgcaacaagagaaaacacctcaatgagaagcctgtgtaccacgagagaaagcacacaggcagcaacaaagccccggtgcagccaaaaattaataaataattttttaaaagatgttaatacctttgaagaagacgttaatatctttcagcacattcggtcttcacaaaactggaggtagagtaggttatcccaccgccaaataaaatgtaagcaactttaatgacttagataatgctcaataattgcaagatccatgtctaaacccaaggagttcgtctattcctgaaaatagaattgatggacttacaaactactttccaagttatcctaagacttatagtcctgggcccttt

SEQ ID NO: 31522 - DNA, 1393 bp, Bovine  19866880882782
  misc_feature (1)..(1): n is a, c, g, or t
nccatatgttaagcatatttcttctattagacataatatttttagctgtgagaatagaaaatacgcccccattccctgctttctgagaactttgaagaacttctaagtgtatctagaaactccaatatgctcatagatgccatgcacacaatctgggacttttgagccacaaacagcaagatgttgtcctctgatgaaaacttagttattttttctgatggacacaggtgaggggggtcccttttggtctttttaaaattttctatttttttatttatatattttggccaaaactcacaacatgtgggatcttagtttcctaaccacggattgaaccctagctctctgcattggcagcatggactcttaaccactggaaagccagagaagtctccattttgctctttcatttgggatcttgggatttgggatgtcaccaaatatcttagaccacttgaattcttattgccacttttagcaaagaaaaaaatatatatataaggtgatgagggtattaagcacataaagatggatagaaggaatggtttggagctaggtgtagcctagtctaatgtaaccttcttagtgagatcatgaagtccctgtgattattcccattttgcaaatgtggaaactgagcttggaaatgatgagaatggacgataaatcagccctgtttatttccaaggtctctgttcttcctccaccctctgctctcctgttgtggagtttggcttggtggtgtgccctcggttgctaccaaacttactgccatcccagcattggaaaggaaaggtctcccgtgttggaggcagacgctttaacttctgagccaccagggaagccctgcaaaggaatacggaagaaacaaaaagcaaaaccaggcaactcatgcaggagaagtaatcactgtaggctcctcttccaatttcaggagctctgttgagactactggggttttacttaatattgtctcccttaacggattacaagttgatacatgaaaccacagggaagtctttgaatcatctgaacaacatccccctcgccacccccgaccttaatatattcttaagttaaaggaatgctcttaagaggtttttgtccccagggttccatccttggctcacaaggcctcattccaaagctccacccagctccttccctggagctaaggattcatttatgggaggtgtctgccacagctctccaccttggatgtcctgcaggcactacagctcaacaagtctgaatctgaacccctcttcctcttgtattttcagcttgagggttgatatctctgtctccccaagcccctgggctagacaccctggaatcttgcccactccatcttcttaaccctctcccatgcaaagctccaaaccctccattc

SEQ ID NO: 31523 - DNA, 2431 bp, Bovine  19866880900057
  misc_feature (1)..(1): n is a, c, g, or t
ntttcacatctgcaaaatgattcaggaaatgtgcccccagaaactattacttagttaattctgagaggagacaaagtggaggatatggtggaagtcttgtccccctacccccgcctcaaaggccccatggggttctatgctcgggttgcattttcttcctgcactttgagtcttctagtgtaaagtacacagaggtggtttgggtgggttggtgtgctgggcattgggatccacacgggtataaataatgtcctacaagcagctccaaagagctgttaacaagtcagagaaggtggatttcaggggacagagggctgtaagcaagatctcagacacctgagcatggagccacccccaccatctcccgtctttgtcacagagctcaagatttggattcggaaaagagaagatctgatgcatttagcctgggtcacaggcctagagaggccacatgcaaacagggcctgggggtggggtttggttctcccaaggagaacaggtacggctcccagaacaggtggaaaatgccagatggacacacaacagctggccactcaggtccttctcctgctggtcccacatggtctgaatcggaggttccaaatttttggatctgaatctcttcatgtcacttgcaatctcctttggggagaagatggttaaaatatgttcacattttgatgctgagggcaataatatacaactatagggtttttatgtatcatgagtttcattctcatttatacagaaagagcactgttcttatcagcaacagtgcaaagccgctgggatgggctgaactgtgcactcctccccaaggtcatctgttgtggtcctaaccctcagtacttgagaatgtgactgtatttggagatagagggtctttataaaggtaataaagggaaaatgaggccttcccagatggcgctagtggtaaagaacctgtctgccaatataggagacataagagacacggattcagtccctgggtggggaagatcccctggaggagggcacggcaacccactccactcttcttgtctggagactcacatggacagaggagcctggtgggctacagtccacagggtcgcaaagagtcggacgtaactgaagcatcttagcacacacacatgcaaggtaaaatgaggtcatatgagtggtccaatccgatatagctggtgtcctataagaggaagaaatgttttgttgttgttgttggagtatagctgctttacgatgttgtattcgtttctgctgtagagtaaggtgaatcagccacatgtatacatacatcccctcttccttggatttccttcccatttgggtcactacagggcactggtagagaagaggagaggagaatagagaagaggagaaaatttggacgcagacacacagatggaacaccatcaaaacacgtggagaagacggccagctgaggagaatggtctcaaatcaattctgttgacacctggatcttggacttagagcctctggcaatgtgagaaaattaatttcttgtgttactttgttatggcagccctgacaaactaatacagcctctgtaattcctgtctgagaatagacagtgcgtcctattatagaagtttggggaactttcacatgtattaaaggttatttttgttcgtttttcagaagttctctcttttttaactccagcaagcaggcagaccacttgctttttgaacctgtctgtaagattaattgtccagaaaatgttgtgaattaattgcttacatcattaaaaggtcagtaggaaacaggtgatgcttttttaaaaaggtggtttgctgtgcaggtttcattggctgctctggtgtttcactgagctcagagttgcagaagtgcaaacagaagttcagtgacactgacaagctaccatgtaagagccagaactaatgatacctattataaattaatttatatgtatgaggaatatatatataatcatatcaatcctattattatctagtatagcatattttaattatttataatataaatagtttgttccccaataattatgtagtatattatattaatatatacaataatatatattataatataattaatacatataattaatttttgacttcttattttttagagattaagaactttgcagaagcaatggtgaaattttctactttcacgctcttttgaggtacaggaagtcattttgatttggctttctggacccctaaaaatatcagtcaaccacaacccccaatttcccttctatcagttttagcatgagtggtccaggcaaccaagcacagcatcctccaaatgagttgattggctcaagcacaagcaggtgatctaagctggtccaatcagaacaaagttcagggctttgtaagatccactgaaaaagaagactgctgatcaccctaacttgaat

SEQ ID NO: 31524 - DNA, 1503 bp, Bovine  19866881132442
  misc_feature (1)..(1): n is a, c, g, or t
ntcaagcctccaatgttgaacctgagcaaataaagaccagacagagaatcccttaatttagttattgctgccttttaaaaactctgctatgaggataaaataatttaggatgtagaaatctgagcataaaccacttctgatcatcaaaattggccggtcctagtcatcattttcagttagctctgaaagggactactagggagtatctgcaggtgttatatgtttcaagtaaactaaaatacaaattttgggggtttcttttcttttctttgtctttgattctggtgtttttgtactgggatcactatggaaatgacttctagaaaatccattatgagacctgtgtgattaaaacatatttatttagcaaacatttcaaaattctttccgaacttagccttcaagcagttaccgttttgtggacttccccaggggtacagtgtcccctgacagtgcaggggacctaggttcaatccctggtccaggaagattccatatgctgtggagcagctaaagcccacgtgccacagctactgaagcccacttgccctagagcctgcgctctgtgaccagagatgcccctgcagtgagaagcctgcatactgcaactagagaaagccccagcgcagcaaggaagacccagcacaaccaacaaataaatattaaaaaaaaaaaaaaagattacactttggctaaaatttctgtgctagcaaaactagagttagtcacatatgtacccaccctgaatggatgctttttaataactggcagattctcaaaccgtgtatcttgttggcatatctggcactgctatgtttcaaccacacgatgcctgtctggaagtggcatctaagccgactcatcacagccctgccccaggacagttgcatgggaagtgaggtgtgggggaagccgtctccctacatgatgcaagactgagaagccactggccacgcttcccgctccaaacaatctggaggaaagcaacacgaggagaacagatttaagagacaaaatctgtctgctgttccagtcccttattctgatcatttctaaccttctgtgaaatatcttagtttcacataaactcaaaaaaatacatttatttttttgactgtgtcaggtcttagctgtggcacatgggaccttcactgcgacacacaggctctcaagttgtggggcacaggcttagttgccccgcggcatgttggatcttagttcccagaccagggatcaaacccacatcccctgcattgcaaggcagattcttaaccactggtccaccagggaagttcccgaaccccaccttttaaagctggtctaggttgagttggctcctcattactagatcatctctcatctctcctctaacctgacccactggttgagctccggcttctcccctggtcgaggacagactgaatcaaccctcgccactcttcaatcattccctcccatggctcccatcccagtgaaaagctcaagtcccaacagtgcccttca

SEQ ID NO: 31525 - DNA, 1110 bp, Bovine  19866881176297
  misc_feature (1)..(1): n is a, c, g, or t
naccactctctgctttggaattttgcggcccctccttcctcacgttgacccccgtggaaagcggaagtggaagtgagtcctacctttaggacctgttctaggttctccagcttggcttggagctggtgtttctccttcacggccaaatcacgttctctggtcactatggtgagcgtgtgtttaagccgagcatactctgctttcacctaaagtagcaagaatggagagaaggggtgtttacaatatgcacgggagctgcagtgggtatttgtccccagctgtcatctgtcacttcccctttaagttctttttggagacttcccctccctcatcctcagtcctggacttcgtagtgggtccactcctgctggggtgaatacgtgtgaccaagggctggccaatcagcacacagcttctgtttgcatcccacccatcctcaccacagccacagtgattggatcaggtctggagatgtgaccaaggcgtagccaatcagtataatcccatcccctggatgtgaggattgggagagaaggggcatagaacccaagtagcatccacagagaatgagatactagactgtgtaggaatctgggaagagattccttgggaagagattcacccactgtacttggaaagttaaagacaaaggttggagctacactgctatttgcattcatgagggaagaactcatctgagaatagactctggagatgtagaggaagaagcagggtcctaatgacattgtatgagcaactagatcaagctgtgcctgaagctaatgctttcctttctagttacttgggccaatagattcccttggtttacttgtgtccatttgaattgtcttctgtccctttgaactgaaagtgctgacagacacaaaatgttactcaaattgtgtagccatactaaattcttttgcctaaaatttcacctctgtcataaaagtggacaaaaatggcaacaaagcaccacatggatttggatgatggatgctccaataacctcagaaaccatgtccattttcagcccagaacccctaggactcccatgtttaaaacttatctgggaggctctactatcctcaatctctcctcagctttcca

SEQ ID NO: 31526 - DNA, 1723 bp, Bovine  19866881190808
  misc_feature (1)..(1): n is a, c, g, or t
naaacgacttttttaaagaactgacagttttaattgttcttaccaagtaacattgtgtataatgcaaaataattttactagtcttaagatattgtgccttatagttctaaaacattaaatgagaaagtaaggtttaaggttgagaagttggaatagcataaaaacaggggagggatacttataataacctttcttaagaacaaaaggtgttggaagaatatactcatctgaacaggagaaacagccaatgctttctatcctttttagttttaattttagtctctaatagtaattctgcaagtttctaatagttacttccccatccatatagcataagaaattacttaagctttaagaaattcttttctctttatgtttccattatattgcacattaccaagtcatttcaaagtttacttttttagagagtacttttacttttttatatttttagtatatattttagtatatatttttagatttttagtatatattttagtatttttatattatttagcctttgttttaaattgatatatccacacattttaatcaaataccaataggtataaccataaagcatatggagtagatgatattgactgggaccagaatccaaacagcatctttaggaaagcagatggctctgaagtcagcttcttagagggcgacaggtaggtgagactttaatgttgatttttacctttttaatgtgaactgcttagaccttagaagacatctgaaatatcttcagtagaattgtttaacaggagtacatatggaagaagttgctcttaaagctgtacatattaataaatgtgctcatcggggctccctggtgcctcactagtaaagaatttgcctgccaagcagaagacgctggttcgacccgtgggttggaaagatctcctggggaaggaaatggcaacctgctccagtattcgtgtctggaaaatcctgtggacggaggagcctgacgggctacagtccacaggctcacaagagtgagacacgacttagcgactagacgacaacaacaagtatgtaaaacattaggttttatggtaaaatgtatatacagtaaaatatataaattttaggtgtacaattcaatgaattttgatagatgcctgcatccatataattcatatttctattaagatgtaaaaaaagattttattattgtagaaattcccctctctcctcttcctgataaatacccagttccagtagattagtgttttcttttctagaaatctatacaggccaaatatatttcatacatatgaaatcatacagtgtacagtgttctgttcctggtttaattttcttagtatattttttgaaaacttcatgttgttatatgagctcaatagtttttcatttttgtagtctgtattcagttgtatgaatatatcagaattatttatctatccttttcttataagcatctgagttgcttatactttggaactattacgggtaaatctgttacaaacatttccaatatagtctgtgcgaaaatatattctaattttccttgagtaaattcctaggagtgaaatcattagatcacaggaggatatattctcaacctgaagaagaaaaaaaatacctaacagttttccaaacgattgtagtgcattacacccctccatcagtgtggaaggaaagggagagtaaaaagtcggcttaaagctcaacattcagaaaataagatcag

SEQ ID NO: 31527 - DNA, 674 bp, Bovine  19866881236500
  misc_feature (1)..(1): n is a, c, g, or t
ncgccccgccgcccccccgcccccgacaaactgcaccaagctctaaaaattcacatgtcaccatggcctcgtagcttaataaaccacatcaaaagcattttgcaatgatgcttcttcctctatgaaacctgaagccataagtggacctgctattaggcgggtaattaagccgctccctgggcccagtggatatgcattcaagctgccaaaagatgatgaaactcgtgccttcctcagtgggatcctcggggcctgactcccatgttcccccagataccttgctccaacaatgagtgcagtcagggagataccagcatgtgaaacttggtttcaagcacaccctttcaaaacccaactgactccagcaagcagcttaccaaatagccatggaggagaccaaaaacacggctttccactgtgctcctgaggaaaaaccagccactgtagtcaaaatgctgcctgcctcagctggcctctgagaaagcaaaacagaccctacagatgcctgtctgaccctgtccatctcctcccctgcatccaggcagagctctgcttgggtaactgccctccttcacaggactccagggctgcatcctggatggtctatgccaatcactaggctcttaggtccccagcctctgccaaagcatcaccctttgaaatcccagatagag

SEQ ID NO: 31528 - DNA, 1678 bp, Bovine  19866881416716
  misc_feature (1)..(1): n is a, c, g, or t
ntgtggattttcctggtaagtttttgaagaagtaggatacctgtacatttctatgggttcctgtacttcttttaacacagcacttttcattttattgtttctgaaagtgcagcagcaaaatgttaaggtccaacagaactcccagactttgacaactgaaatgccagcagtgacaaatgactctttggttccgtggtgtttcccatgcatctgtcaaatggtgttactcttgtataatgattggaaatattcatctttaggaggagcgctgcgatcattcaagcctctgatttctgaaaagtgacatttttttcatttttatgaattgccatcttatggcatgacacacacaggcacatggctggctaattttataacataagaagaaaacacacacaagaagctataggctgccttcctctgaggatttcctggttgcctcagtgagattaatttccatggccaggctgggtgcactcctgcctgggagggtagaggcatgtataattttatttatggctgtgctgggtctttgctgatgtgtacaggctttctctacttgagacaagtgggcgctaactctaagttgcagtggatgggcttctcactgctgtggtttctcttgttgcagttcctgggctctaagctcatggccttcagtagtcgcagctcatggacttaggttgccccttggcatataggatcttcccggaccagggattgaacctgtgtcccctgcattggcaggcaggttctcatccactgtaccaccaggaaagtccttttttaaaaaataaataatttcactggatagaggcatttaattttggaggacagcttatacctgggcaactcttagaaagtctgagatttccaccccctaatcagaatgtagacccagaccttttgaatttctactctgtgattttgatcaccttgcctggttttacattagtgatgaaaatcaaaaatttagttttttccctagagactctgacagcatgattgcattcaaaatgggaattagtggccaataattgaaatgtgtttgagtaaactctgggagttggtgatggacagggagacctgacgtgttgcagtccatggggtcgcaaagagtcggacatgactgagcaactgaactgaactgaacagaaataaaaagacaacaattgtctaccctttatacaatgcagcccagctgggtgagtcctggaaatatacattttgctttcctaaaatatctagaaatcagtggtgctttagaaaaagaatcagtaatctgtgaatagaccagatcagggcccctgcttgtatctgtaaataaagttttattggaacccagccatgcacattcacctaatcacctatggctattcttgtgctacagcagtcagagtagttgtggcagagcctgtgtggcctttaaagcctaaacgtgtgctttctggccctttcaaggaaaagtttgctgacttctgtctcagaagaaactttgctggctttctctactagaagcagagtacagctaccaagtgtcacagaccacgacaccctacacagcctctgtcctggcccccattaggctgtggtttgccactgtcattgcaaataccaaaacttctccatcatctgtgcaacaaataggcggcgagatgaggccagggtccgtcattta

SEQ ID NO: 31529 - DNA, 898 bp, Bovine  19866881503519
  misc_feature (1)..(1): n is a, c, g, or t
natttgtctatgactgcagggtcaaatttaaaagtagtactttgagatttgcactatgcccatggtagaattattgaagaatttttggctttatccctgagaacttaccaaatgtctctgaactttcttctagtttgaattacaatccacaatttgcagattggtcaaaagaaacaagaggtgcaccattaattagtgttaagccactagataactggttgttgatctatactcgaagaaattatgaagcagccaattcgttgatacaaaatctatttaaagttacaccagccatgggcatacaaatgaaaaaagcaataatgtaagtttatcaagtcatttctactctgaaaattgactcatagtcatttggaaggtgggaactcaaactgttaaaaactattaaaaacattaaattatcttaatttaaagatctgataaagtcccttgtagggtggacacagaaatgtgttcgagttgctaagaatgagtgagacaaaaaaaggactgtttctcaaacaattgctgttgggtgtgtgagaaatccttttgactacatggcttctcctggtgttctatttcgttatttcacccagaagtgttgcttgtgttacaatctgtgggaaccttttaacacatagtacatttttttggttaactttttctgaatgttgaattacgtatttccattctaggattgaagtggatgatagaactgaagcctatttaagagtcttacagcaaaaggttacgtcagatacccagatagtaagtagctagttgatatgtaggcagctgacctggaatcagttgttgtaaattgggcgctggtaaaccttggaacttgagctcagtgttaaaaatgttataattaggttcccaaacaagtcacaagaca

SEQ ID NO: 31530 - DNA, 975 bp, Bovine  19866881585333
  misc_feature (1)..(1): n is a, c, g, or t
ncgcacatagtccctaagaatgccaccaatctctccctttgaggacatctgctgtgagagaccacctgttgtcagagaccccctgagaacatcctctcccatcattacgaaaacccctgaagacaccaattgcaaaagttcctttaggtcaggtggaggtgggtgtgttccaaacatggtttttaatgaatcccttcctataaactgaagacccctgaatgccagcctggtaccaaaaaaaaaaaaaaaaaggcttaaaataacaaagtgaaactcggtgacaggaaaagtccgactgggtttcggccattgtgcaagatctaacagcatcaccttcataggggtgggactgtttaagtccccaattacgaccgctcacctcgacaactgaaacttattctttgcacatttcaaacgcatctccttccctcctccctccagcttggccttcacactcttaataaaacattaaaaaacactccacactatgttgccggagcgtgttccacgagcttccctgaagtctggcgtttttctccatctccatattacagccatcttcatccatttgcgtacagaggtgtccgcacatgaggtctgatttcctgggaagttggctatgatgtgattgtgttcaaagaaaaagacagagaatattttccactgctgcagaggcactgtgcctgccttttaaacttgaaagatcagcgggtattctgtggaacctgaacacgggtattggaaaaagtgtttctctaaggggaaaagagaaaaaaaaaaaaaaacacctcattctgtttaaagatcattactcattagcatgctgggttcatcttttgtggggaggggaaataaacataataataacatttattgaacctagcttaatggcaacagtcttcgaaacactttatacataagattttatggaatcctatctcctgaactggagtgagggacagatggattaacaca

SEQ ID NO: 31531 - DNA, 1454 bp, Bovine  19866880256044
  misc_feature (1)..(1): n is a, c, g, or t
natgttggcatttgatctctggttcctctgccttttgtaaaaccagcttgaacatctagaaggtcacggtctacgtattgctaaagcctggcttggaaaattttgagcattactttactagcatgtgagatgagtgcaattgtgtggtagtttgagcattctttagcattgcctttctttgggattggaatgaaaactgacctttttcagtcctgtggccactgctgagttttccaaaattgctggcatattgagtgcagcagtttcacagcatcatctttcaggatttgaaatagctcaactggaattccatcacctccactagctttgttcgtagtgatgctttctaaggcccacttgacttcacattccaggatgtctggctctaggtgagtgatcacaccatcaaacacagaaaatttcttagcaaattctagttttctattgctgcctgccagacttctgttaaaaaagagtgttggcaattgctaggagaggaattaaagacagactttgttgttgtttaattgctaagttgtatccgactcttttgcaaccccatggactgtagcctgccaggctcctctttccatggcattctccaggcaagaatactggagtgggcagccattccctttctgacccagggatcgaactcacatctcctgcattggcaggtggattctttaccactgagccaccgtggacgcccccaggctagtgcctcactgaactctttctctttatctaattctaagaactggaggaaaaattgaagcaggaatagcttcccctgagcaagcctatattcttgaatgtcacttgccagcactggggcacacacaaaagcacctttccaatcagggtaagcccactgcctccgtgtgtctccaggctggctctgtggaccacgtgagaccacacccaccagtgcatggcaaagagcagaggttctctgccgatggggtgtatcatcatcaccatatcagcactcaaagcaggagctctgggctgtggcagtcactgctccccacaggccctcagtaccctctgtatcgagtccaccgacttgtccagccctctgaaggcttagatcagaaagaactttaaaagcccaaaccccaaacaacaacacatgaaatcatccctcataatccaacctctgtatttgaggcaaaatcagagcctcttcccggaatctggaggtggatctgtgaagccacagtcttgtctagagacacctgtggtccaagctggtcagcaccctcgtgcggctgagatcggtcttccctccttcgttgtgacctgtctactcagtaattagtcctggcagcctcagattggctcttctgttttcataattcatttacttttgatgatatcataaagagtgtatgaatttcatcctcctcccctaacatccggccccacgcccacatccactaatacaaaga

SEQ ID NO: 31532 - DNA, 1696 bp, Bovine  19866880437543
  misc_feature (1)..(1): n is a, c, g, or t
ncttttagataacatttgaaatcatttctaatctctcattgccaccctatgtagtgctgggcaagtgagaacaccgtagggcatgcagtgtccagccctctgagaagtgagactcaatttccttctaccattgactcccttgtagaagggaatggtaacccacgccagtattcttgcctggagaattgcatggactgaggagcctggcaggctacaatccatgggatcacaaagagttggacaggactgagtgaccaacacacatacttattgagtccccagctcttctggggtctatcacctctacccagtttgggataactttcttgcttctggccacacctacagaactttctttttctcacttctatgccatttatcacactaggagtgactgtttacctgttgtcctcttgcatcagccagggagcaattcagaagcaggttcttatcgctccctgtactggggctcagcacagaccctgacctggagacagtcttgggaaaggcccatctcattgccttacctgtgggaccatcacacgcaagaaagtttccatcaagataaatggtgactctggagtttctgctgtgacaggcgaacacgtgaccccaatgcaggggatgggcctggtgagctctctgggttttgtattgccttcttggtcccgttggacaacttcacttgggtggggaacacagcagagttttattatgagatcatgctctagtcagaataaatccgcagcaaaacaacagttggaactagagatttgttttctcgctgctgcttacacagctaatggattttgacatgaacttcctgcaccatcatgggaaaaagtgcccttagctgagaggggtgacagaggataacagagcaaggggcaaccgggtctgggctgtacttggcagagtcagtcggagggtcaagggggataatctccgttatcctgagaaaatgtcttggaagccctggggactctaagcactgatgggtgactgaggacaaggcaactactggggattcaagacaagaaagatcgcaaatcactgcacagatgcccaaaggccttgcaatgggaggaaggccttgcaatgggaggacacaaccaagccaccgaaggcttattctgccctgggatcctgctttgctgtgtgaccactgtgtttccactcttactacctgttatcttctgagtctcctcccgtgccagcagcaactaggacagtgtttcccactggggcaccatcggcattagggcagggtcaagcttttgctttgaggaactgtctcatacacatggttggaaattcagtcaccctggactctggtcactaaaagctatttataacaatgcccctccccaagtcatcatgacaacctccttgtttgtgcccaaacaccttctagggcaccagagtccttctaaactgcggcctttcctgttacctgccaaaggggagcatggttacagctcagagtgggaggaaaaaaggtccatgtttggggtctttgtttcatgaaaacttgtcttttaagctttaaaaacccaaatactcaatgactagggctgcatttacatcataaacccgggtcagctgttctgatccacctctgcttgccacatccggccttcacctgactttataagtaaagtgtggtaacacactcattcaggctcattcagtctgt

SEQ ID NO: 31533 - DNA, 2642 bp, Bovine  19866880537330
  misc_feature (1)..(1): n is a, c, g, or t
nttggtagctgtaagtttgtttcctatgtctgtaagtgcatgtttgtattctatttctgtttgtaaataagttcatttgtatcatattttagtccccacatttaagtgatattataagatatttgtctctgtctgacttacttcccttagtgtgataatctcgggtctattcgtgttgttgcaaatggcatcgtttcattctttcttacggctgagtaatagtccactgtatacctgttccacatctttgtccgctcatctgctgatgaccgtttaggctgcttccatattttggctattgtgaatagtgctgctctatcacaccagggtgcatgtattctttcaaattacaggggtttttttctggatataaactcaggaatgggattggaagctcatatggtactctagttttgtatagaacctccatactgttctccatagcagctgcaccaattcacaaggaatataacttattttttccctatcacgtcgcaaaaaaggatggacagagatttgtttattgctcgaatgctagtgctggagaagacaataattatatggtgctggctctgaactgcaagctttgctgactgttaactgctgccactgccttgtagctgaaatgggacagatcagcatgaatgaaacaagaatccttttggagatgtctctactcctccaagcatgcaggttccaaatttagacacacaagaaatgattgaaaatcaaatacacttagcttttgtcatttatttggaattacttgagagttggaaatgagtactgcaagagaatacaaataacaaattaccatgaacctatcctcgggggatcctccacctctcctaatggaaccaggtgttaatttgctgactgtcagagttggaaaggagcagaggcattatctagtctagtgactgattgtcaaaaattatttggcaaaagaactctttttttcaaaaagactcattcaggtacctgataagttattcacattaaaaaggaaattctctagctgaagcaagagttagagacctgaggcctcatgcttatgaatatgaccccatatttggccctcatcttccagccctggccctcccatgaccacaagccagctcggcaaagtctaagcttacacaaaagaaaaacttctaggaccctgtgtgccaggctctgggaagcccagagcagcaagtaggcagcagggcttccctggtactctagtggctgagaatctgcctggcaatgcagggcacacaggcctgatccttggtcggggactatttcacactctgctgggcagctaagtcccatgtgccacaactgttgaacccacacaccctacagcctgcgctcaacagctagaggagccactgcaacgagacgtctaagcactgcgacctagagcacccctgctcaccacagctagagaaagctcgtgagctacaacaaagacccgacacggccaacaataaataagataactaagtaaaaacatgaagattaaaaaaggcagcaaatagaggcaactgcagccccagctttcatggagcaatcaatccagtgccagaaaccatttcccacttcctccacaagatctgcaaggtcagttttgttttttcttttttaattgaagtatagttgatttataatattgtgttaatttctgctgtacagcaaagtgactccatcatacatatacatatattcttttttatattcttttctattctagtctatcccaggacattaaatatggtcccctatgctatacagcaggaccttattgtttatccatcttatttataacagtttgcatctgctaatcccaaactcccagtccatctcttccccaccctccaccttctctcctgacaaacgcaagtctgttctctatgcctgagtctatttcttcttcctagataagttcattttcatttgtatcatattttaggttccacatgtaagtgatatcatatggcatttgtctttttctttcttcacttcactttgcatgataatctctagttgacccatgttgctgcaaatgatattatttctttcttttttatgactgagtagtattccattgtatgtatgtactacatctttatagccaagacatggaaacaatctaaatgtctatggacagacgcaagttttttttgtaacaaacctagagtagactttgtctaggctcaggaaacccaaaagatcctagagcaattttgcttatcttgtgaggaaagttatagaactcgtaatggcagagtcatttgggagtgtgaatttaccatttcagagttgggtcttggcacatgcagataagagtaggtttatttaagagtctcaggtcacttacgaagtctctcaccctgtcactttagcatccaggaaaggagggcaagcaaaaaataggtctaaccgtgtactaatttgttcatttatttattcactcattcagttaatatttcctgagtgatgacctggtccttgggctaggggcttagtctgatagggacagaaaactaaaatgattgcaatatatctcgtgtgatcaaggctttaatagagagacaaacactgtatcatggggacactttagagaaatgaacaaatgactggtgggtaaaggtgga

SEQ ID NO: 31534 - DNA, 1404 bp, Bovine  19866880537982
  misc_feature (1)..(1): n is a, c, g, or t
nccccgtgccttgccttgtgcctggcacacagtaggtgctccaccatcattactggatgctgagtgaaggccacagagccgttaagcatcaaagctgctgttgggatgtgtgtagggtgtctccatgacttctccccttgctttatcctgattcacactggttatctgccttgaaaatacatactcttgtgtttataaataaccctctggcctgtgtagcctgacatggggtaagaatttcctcccagtgttgcttgtctgttcagtcccctcacagaaggcctaggttttggattctgggctctggaacgccttctggcattttctgctcagtgagcccatccattcccattttcttcagtggagctgaagatataaattgcaaaaaggccttcttgcagattgctgggagagcgcatgttcctggccaggaattcctttgctgctgctgcaggggcagcggggcaagctccactgggggcggtgcaggctgcactgtttgtcactgctctgtgtgactagggatgggcagaacgggggcaggggcagctgccaggcccagctctggggccggcaagcatggatggatgagtggcggacagtcggggatccagagcacagcacacagaactgaaatgcaggacccagtgtccatgctgcttacggtctagcagtagggagtgactcaacctgggttgaccatgagctgcatcaggggtggccagatgggaggtgcagcaccatgagaagtgtttatacataatgggagtctggcacgtgctagtggtcctggaggactgggcaactccaggagactggcaaaagttagctggttacccaagccccaggttacagtctgaggttaggaaggaaggactctaagatatcagatcttaagttcggaaacagaaaggccttagcaggagtattttgtttgtttgtttttagttgaagtatagtttatttacaatgttgtgttagtttcaggtgtaagcaaagtgattcagttatacatacatatatatcatacatacatacatattatatataaatatatatctacttggcatccagtcccatcacttcatggcaaatagaaggggaaaaggtggaagcagtcatagatttccttttctcgggttctaaaatcagtgaagatgttgactgccaccatgatattagaagatggttacttagacctgggtttgatccctgggttgggaagatccctggagaaggaaatggcaacccattccagtactcttgcctggaaaattccatggacggaggagcttggtaggctacagtccatggggtcgcaaagagtcagacatgactgaggacttcactttcacttctggaaggaaagatatgacaaacctagacagcatattaaaaagcaaa

SEQ ID NO: 31535 - DNA, 2280 bp, Bovine  19866880581846
  misc_feature (1)..(1): n is a, c, g, or t
nacacatgtctgtggtgaagttagaatggggtaccatctatgaagtacccagctgatgctcagagctttctggatgctgtaggtcattagaagtccggtttcaaccacgtagaactacaacttctctcctctctcctctattttcctgatcgccagccagactggaggcttaggggattcagagttggggagagggtataagtcttctctttgattccttctttccgtcctgaacttcttggacagtggactgctaccgtctgtctctgacacccttcctgtctgctccctcttccggggacaagaaagaggaggcatagggaagaggagccatatctgctcactggcttctcttgtcctccgcctttgatcatcactgctgctctggacaacactgatgggctttgacgccctctgtgtgaaaggaactggacacctgtgcgttcacatgggcacacatttggatcccggaggagagggatgaggccctgccttctgcactcagatgctgactcaaaattccaaagatctcctcctccttgccttcttatctttcacttatgtagcccaggaggcatgggatgggcttggggtggttttgtgccgatcagacttccttcttagtgatgcctcaaaggccgtctcaccttgtccatctaagggccctggcgagttggtctatttaagtgccctcctaaaccctgagttctgaggtgacaaggaacctgcccacttcatctctgtgccacatggcatggaacagatgccagcatgtatctgttggatgactaaatgaggccacttagtgactttacaaaggagagagatcaaaggaagatggactgggttggatccagggaaagagaatgggtaagaatccatcatctgctcaagttgttgacaaaggatagaaaagcacatttcagtgacgtacagctgaaagcagggatgtgagaaaaacgatagcttcgtgtttataccccgaactaagttcagaatatattttaaaaaaccacatgccatacattatttagtgtacttcctgcaaccaccatctgggggccgatgtgaaaatcggggtcaaggggcaaagtgcccgcccaaggacacgcagatggtgggtctgctgcccctgaccttgcatgaccccaagatgccaccagtggcaagaatcactgaagtcacttaacctacaaagaagactcatcttggcagctcttctcagctattccaggaagtcaggaaaggccagggcagctgtgtcagaaaatatctctgcctcaaggtttgaagatccaggagttctctgacctcaaaccttcagagcctctgaaatgacttaaagagacagctacaagcttctccaacagagagaaggtgtttcttagatgctcttttttctcattaatcttacatcttacttgactgcttcctactccccaccactggcactcaattttttctcttaagttggtcttaagaacagcagaaaagtggtggtgaagtagtagttgaaatagagatcaaatggcaagccattcctaaggctagctggttctttaagaatatgatggtgacggtgatggtgaggaggatggcgatgctgatggtggtgatggtagtgatgatgatgatgtaactgactgacttcaggcaaggccaagaaacctgagagcttccttgggccagatgtggcctcagcagtagagaaggctagctgaaagcttacctcctgctgaaaggctctcctggaagggactgactggagggatggccaaggaacccaggaggccaagggcctgaggagagacaggtcatctaaatgagagacatcaccagcactgcaggtgtaaccagagggttcccggagaacccacagagaccccctcgtagaaaacgtcattagccccctgcctggccagagaatgcaaagccatcttgtcatgtctaaactattgcttcaccgcccctctccccactcgcctcacagtgtgacacgaaagagcagctggtgttcacacggactggtggacacttagtttctgaaccgaggctggggcagggggctcgggtggcgtaggcctgtctctatcgcctaggagggaggcgtaagagaggcacggggagccctctccaatgcaggagacaaaaataaagttgtctttgacactcctgtaaggcgttcttgatcaatggtagcagttacagcaaaaacaaccctatcagttaataacagcgacatctctgctgacagcggcatctcctccctacctgtggacc

SEQ ID NO: 31536 - DNA, 1230 bp, Bovine  19866880658659
  misc_feature (1)..(1): n is a, c, g, or t
ntgttgcctggagaatcccagggacaggggagcctggtggggctgctctatggggtcgcatagagtcggaaacaactgaagcaacttagcaacagcagcagcaacctcccccctagagtaggtcttagtgccctctatcataattttcttttactcccagttctctccagaagactatgggtaccttagaggactgtcttagagtagaagtcaacaacaggagggtaggagggaggggagaaagaaagaaggaagaaaagaggggagggaggtgacaggtgggtggttgtatgagttatgagatggttcacatacatactgactccaacactttgcttttaaaaagtagagtcattacttgacggaaatgaagaataagaatcctgggacagatgagcataaggaaccttcaggacagaagagctaagagagctaaaaccatgttgggggagggaaggcaggctggcaaagaccaacctgggaaccccaccccaaagccacaatcagtcctcagctcaggaatgcaccctctgttgaagtgagatatcgatttttcacattgctgctttacactcttcctagatttgggactgattaactccaataaaaagcactgccagctggtgaaaacttaaaacaaagggtctatacaaaagcatcgtgttccccctcactttcatgtatttgaagcaagcttaccctccctagtcgcctatggtttctgcataaattactctgcaagaccagcctgctgtgagcgtgcttgcctgactgcctctgctccccttcaaatctgtcagttaagctttaagcatcttgaaaacgtattgtctggaatgaaacaaccaattatgctttcaggttttgtggcataatatcgcagaaactagcaattacagaatcagagtggcatcaaatggggtagaagggagttagcacggattattctttaaatagcagttacatgaactcataataaataggtattaagtgttaaatgtatgataagtaattcttgacaatgcaattatccaaacaggagaggggaaagtggcaagatggcattgtcaaagtcttttgtgcacggcatgctcagttagactgaaatggggaggaaatttgtctctgttccaaccagcagtggaggtaagagtacagatgtgggcactgaagggcatttggctgggtcctaagagctgctatgtgttcaaaagagcaaagccctttctg

SEQ ID NO: 31537 - DNA, 1811 bp, Bovine  19866880678987
  misc_feature (1)..(1): n is a, c, g, or t
nacagcacgcataatgcccacagggtactctggcaaacagtggcacctgagcaactctcagtcctctcctggtaccagggagtccaggggctggtgagaggggtgggcccctggggagaaaaccggagctggaactgaggctggtccctgaatcgagctagaatttgggtatacttgattcccctcaccctccaataaagaccctgctcccaccagttcccagtgactggctgtgagtcagctccgctgctgcctttgttttgatgggtgccggatgccgcctggctccacaatgatgcagaggctgatgctgttgctaggcaactgagctacagcacaagtcctgtgaggcctttctgcgactcacccctcaacccagacctgctgacagtggctgctttggaacaggctataaaaatggggagagattcacctgaaatccaagggtgtattagagtagtgggtgtttacgtgcccaacagggaggaagaggagcaaagtgataccttctgattaccgctcacttgtcccgtgccaaccactgtccatagatcaactcatttaatattttataacagctccaagaggcttcccagttggtgctagtggtgaaaaacttgcctgccaatgcaggagatgttagaggtgcaagtttgatccctgagttgggaagatcccctggagaagagcagggcaacccactccagtattcttgcctggagaatccccatgggcagaggagcctggcaggccagggtccatacggtcacaaagaattagaaacaactgaagcgactaagcgtgcacacacacacacgcacacacacacacgcaagtgctcaaagatgaatgttacaactactctcattttataggtgagaaatccaggatttagagagaaaaagtgacttagccacgtctgcctaaatattaatctgagatttaaactgaggccccttctgattccagggctcatgagtggaagagaaattcagctttgatttcttgcctgatttcagcaattcctgctccatctactgtccttaattcattctctgcaaagcaaccagaaatcagacctgtgctcctgctaacagcccacccacgtggtctgtaccctcaggacactccttaaattgaatagcactgctgtgtgtggcctaaagctgccaagccctctgtgaagggatgggatggcatgcgaggcctccccccttttatgcttcctcctccctcctttttgcaaatgcttcctttcctctaggcttcattgagctgttgattgcctggagtaggtgacattccccatcttgcctttgggagctcttccctctcctggtttcagctcagacacctatcctctctgcagcctgtgcagaggctgaccggggcaggggggccctttgactcccaagatccccctgcagcccactctctgcccattcacatgactttcctttgccaagatttgggattccctgtctcactcacactccatctgctccaacatctggcccaggccctggcacacaggacaggcctcaggaataccttctgaatgaatgaacagctggagagtagacgtttgaatctcggaagtgagcttcctggggcctgtgcttttacatccatttgggagaaagctgagcattaacattcaatctgctgctcttctggtccagaccttctgcctgggtctagggcctgtctgagggtaaacacttaggctgaacaagtagtccattttgtaggtgagcaattgaggctcagagactggaagcaacttgctcaagactaacaagatctaagcc

SEQ ID NO: 31538 - DNA, 2573 bp, Bovine  19866880683819
  misc_feature (1)..(1): n is a, c, g, or t
nccactatacttagcactcacatacttaggatgtctaattagccagtgcaccctaagcattaggaaagcttagttttaccgggttactaacaaggccacattattctctcatcctattaaatcatagcagtgtctcatcctccagtttgaaatcccttaatgtctgggcggtgcagccccatgagtcagaccactggctccgctgctgtgatcatggacaggagcagggccctgaggacctgtgagggaatacggctctaaatatggtcctgaccaggcccttttctaggcaccaggaggtattcttcctgaggaatgaggaacacttggagagagttcagaaagaagcagcctctctgatcacagggtgggaatcaaagaaaattacaatgctcagaaccagcttatcatcccctcatgacaccaaggagaagataggcccaggagggttaagacactcacctaaggccacacagggcattggtggcagacccaacactcttgcataagccatcactttaattttattgaaccataactgatttacaaagtcatcttaacttttgtcgtaccctgaagtgactcagttatgcatatatgtatatatactttttcacattcttttccattaaggtttgtgacaggatattccctgtgctatatggtaagaccttgtttatccatcttatatataacagtttgcatctgctaattgcaaattctcaatccctccctcccccttgactaccagaagtctgttctctatgtctatgagtttgtttctattttgcaaataagttcatttgtatcatattttagattccacatataaatgatatattaaatttgtctttgacttcacttagtatagtaatttctaggtccatcatgctgctacaaatggcgttatttttttgtatttgagtaatattctattgtatatgtatcacatcctttttatccattcttctgtcaatggacatttaggttgtttgcacaacttggctattgtaaatagtgataagccatcacatttttttccctcgggtataattctttcatttctcccattcagatccccacacttggacccccgtgcccctcatggagggctcccctgccaggaaggaagctgccttttgaggccccacctccttgaaagaggctgaaactcaggtggagtgcctgccaacccaccacaaaggcatccaaggccgtcaccacagaaaaaccttcactcttgacatcagcctttgggcaaaaataatagccaagaagaaaatctcagaagcctcaactaactactgaggctttatatgcctgcctccaggttagctggagatggacatatcaacctccaaactccatggtggccccaagggtttccttttaagagttaacatggattgggccagaccctctgtgctgcatctcacgtctattaccctcaccgtcacacttagtagccacattttaaagaccaagccactgagattcaaaacaaagaacacttgaaagttagggagtaagtgagatgggcggtcagacgagctttccgtgtctcatgttgcctctcacgcaggtcttccaaagttctcggaggatgggagagtgttgtagaaaaccattagccgccatcaccaatacggtcatcttaggattttccgctcccctttggacttcaattctgaatacacagacctcttcactgccagcttccagttgggagagcacctcaggttctcagatggaagaaggtagccctcatctgtttagttcaggagctggccaaggttttctgcaaagggccagatagtaaatattctaggctttggaggcacctgttgtcaccattcaacttttctgttgcagtaggaaggccgcgatgggcaatgtataaataagcagatgtagccgtgctccagcacaagtttatttgcaagaagaggcaacacattagtttgctgcctcctggcatagttggttccatatctagcaaacagactttttctgatttagctttgatgtagtcctcctctttgcctgaaactcatctcggcactgaagcacttgccttagtactcttttgtcttggggggagggtgaaggaggctgtcccagagcccactgagatcccctaaaccctcttctaaggaaaatgcaagtgtatgcaattctgcatgcaatttcagtggggcttgtagacacagattctctttatccttgagagaccagtgaatgcatcttggctttctggaaactgcaagtgttggggacagctgattggcatgagaacatcagtctgagaatgctgtagtctgaggaagatttagtggtgtgccaatgtgctggttcttgtggaattctatctcaaaacaagcccccctggctaatgcctatatgtcccagccctcctggtgggctaagtctagccacgtgatcttgttcataccattgggtgagagcagaagtgataggcaccactgccagccctggccctttaagactggctatgtgctttccaggctactttctccttctcactgattgaaggcaagtgagaatgacacaat

SEQ ID NO: 31539 - DNA, 1477 bp, Bovine  19866880794308
  misc_feature (1)..(1): n is a, c, g, or t
ntggaggattgaggggattttcagtaatttcagcaacacaaggtttttatctattaatattagtgtatgtatttgacaaatatttactaagtgtccaaacttgtgctgaggatggtcagtgatacatgctgaagatggagcagtggaaaaggcacagtcccttccttcaaattttcacaatttattgcaggtaattaggaaagagcctggttatctgttcactagacctgtctgattttcctcctgggtgcacagctggacttggtttcccatcctgccttgcagctggggtgaggccacgtgaccaggttcagccagtggaatgtgagagagagagatctgtgccacttcaaagctcaccccatgaaatttcctgcatgcttctctaccccatctctttcactgtctgctgattgggtctctatacccaggatggtcctgggagccattgtgcagagggcagtacttttataagttgggtccttgaatgactgactgcatggagcaaatcaccctcccagccctggctgctgattcaattttacaagagtgaggagtgaattcctattgtgttaagcagtgagatttggaggtacttctgttgaagcgctcccttaacattagtattaacactacttttgttaatactctgggtctttccaggtggagctagtggtaaagagcctgcctaccagtgcagaagacctaagagatgcaggttcaatccctgggtcaggaagatcccctggagaggggcatggcagctcattgtagcattcttgcctggagaatctcatagacagagaaagcctgtgggctgcagtccatagggttgcaaagagttggacatgactgaagcgacttagcacagcacaaaaaatactctagacagttgcaatgcagttaggaaagtgttgtcatgtgggtatatgcaaaattttgtagaatactaagtggaattacctccttttgagaccaaaggatttgaaaatttttctgttaaatgaaggagttgttggtggagagggtgtgtcagagaagactcctcaaaagaaaagatgacatttaaaatgtactttgaagagggaattgtatagttccaggcagtgaccgggggaagggcattgtgagcagatggaacagtctttgaacagactttgtgtctgaaagtgcatggcatgttcatgaaatggcactctttcctgcaggactagaattaaatccgcccagttgagacaggagggaaagaggctagggaaagaggttgagactatataatgcagagtcatggatggcatggaaagtctatctgaaactaacgaggaggcagttaaaacaatgaagagggcaacaaataagactggtatttcatctcagtaagataatgctaatacttgggtattgtggattaaagtagaaagaagcatttaacgaaattaaattatcttaattcagcactttactttttccatgtcta

SEQ ID NO: 31540 - DNA, 739 bp, Bovine  19866880897860
  misc_feature (1)..(1): n is a, c, g, or t
ntccagcaaagactctcacattgcccagtggaaagctgcccattcatttttgagcggcggcagcagcacaaacaaatttctcaagaatgatttctttactagctccaagtagagctcaaacacttagcccagatgaaacttatctttgatccagatttaatgacagcacagacatatgccattgggattggagacacactcagggaagtgttagcagagcaatttgctaagactaatgaatggcttttggcaaatgggttgtgagccagggtcagaatgagctctgtgagaggaaggggtgagcctgactgtaaaggatctatgcgaggtttctatgctatattcacgtatcagcccgtctccatcaccagacaagggatgtgggtgataagggctagatggaagccagcataggatgcaggcgctatgtggatacacaggaggcgctgagagtcagctgggtagtgagggaagcatcacaggggggcagatgaatgcgggtggctcgaacggaggcttaggtgtcctggcaaagaaagtgccagatagatgcactgggagccaggggtggagaaagacctcctcatctctctttatacccttttgcaacttagattctggatgctctgcatgcatgtgatatgcatgcataaatatacactgtgttgtgtgtttagtcactaagtcatgtcccactctttgtgaccccatggattgcagcaccctaggcttccctgtc

SEQ ID NO: 31541 - DNA, 1041 bp, Bovine  19866880946583
  misc_feature (1)..(1): n is a, c, g, or t
nctggcataaacacagcatagttgagagaaagagtgtgaatttacactgtttgtcaataaacagtcctcgttcaagagacttttgccacttctgggtcagtagcttgatctttgtctactgccataaataaaagtgattgcttaaatgtccttgtcaccagaacaaaatgactttccctacatttaaaaacaagtgctgacaactccaaaaacagattatttctaacaataatagttgagcttttccacatacgcactgtgtcctgggcactctgctacctacttaatcctcagtgttttcaatattcccattttatagatcagaaaactcagagcttgaatggcttgcctgaggagttgcaattagtctcttgtggagcaaagattagtgcccacgtctgtcttcaactacagtgaaagcttttaactatctcgctaaaccaagtctaaaaataaatcaattaatccaaatgaaggggctggagaacattaagaagttttccctgttctcaaattctaagattacttgaaaaacatgttctgaaatattatgtaatatattctgaagtcaaagaaccatgcctttgtttaacagccactgttctggaagctccattccttagcaccccatctagccagccaaatactcaaggttgcccatacagattacatgctactgagacaaaaacaaaagtccaaaatctatggttataccaaaagactgtgtgtccccgccatcgaagcacatgtgacttcctgctgttttctccttgccagatgtagaaatgaatgtcttaatcccaggaaatttttataattgctaaagatgactattgcagcttttttcagaaacatgggctcatttttagaaaagaaaaaataaaaaagattgcataatggctgagtggaaattcacaagcagatagtcaggcaagcatacgttggatacacattcctactgtagaaaaagagaaatgcatttcagcttaaatactagttttgttatgtttctaaatagagatatttttaaggagttaactt

SEQ ID NO: 31542 - DNA, 1402 bp, Bovine  19866880962638
  misc_feature (1)..(1): n is a, c, g, or t
ncttagtaaatttcctggtcaatgtgctatgtaacccataaaacttggggcaataattgcctttgtcttttatgatagacagcattctaagatagtccccaaacttcccagcctatccccacccccatataatctcctttctcaacagtgtggacaggacccatgaatatgatggcacagtcactcccatgagtatgttatgctatctaaaactccatcagagcagactggagagagatgctccttctggccttcaagtaagtcaacatgttggagagggctatgcagccaatgcctgagggtggactctaggagctgaaaatgacccgggccgatagtaaggtcatgcaagaaaatggcacttcagtcctacaaccacaagtaactgaattctgccaataactggcatgagcttggaatagggccccaagcatcaggtaaaatgcagcccagctgaaaccttgacttcagaactgtgagaccctcctgagcagacaacccacctaaattgtgactggacttctgacctataaaaacctgtgaggtttctgacctgtgaggtgttaaatttgtattgttttgaagtactaaagctttggtaactggttacataaaaacagaaaaaccaaaattcctccccacattatcaagtccatctcaaccatctcttaactagacttgttcatttctagatccttagccatcagactcatctcaagcatcacacatcaaatttcaagaagtatttcctacttagtcttctcctctgcccttctattttatagatatctttctcaaaacttctcaaaatgttctagaccatttatatcagtccatttaatttaaaagacctcacgcagcagtcaacatgttgagacaggaacaaagctaaacaaatattactgctgaaataagacaatgaataaccattacaggcatatcattctgctataaatgccataataaatattttgtggttgtttctctagtatccattcccttcttcaatcaaaagcccctagtcctccttttaagagccctgtcctatgtaacagccatgtggtttggtggaattgttgccttccttgagggcagggatggtccctaattaagttaggccaatcagaacatactgttctattgatcacaaaatttgattgactcagagatgcacatgttacccaatttggatcaaagtatatgagacggttgggaacacggagccattggagtttattcaatggggttccagaccaggcaatggagcaggtaaatgagctcaacaagaagggcaacgaggtcctgagagctggcaacactgacgatgcgctacagtgctactctgaagccattaagttagacccccagaaccatgtgctccgcagcaatcgctcagcggcct

SEQ ID NO: 31543 - DNA, 1001 bp, Bovine  19866880974569
  misc_feature (1)..(1): n is a, c, g, or t
ntctctggggacttaaaggtggaaaattgccctgggatagcttctcgaaggcgccttcctagtgtgaacagcgcgaatggagcaggagatcaaagtggggccaacctttggttacaaggagagtgacgggcagggtctgctcaggaccgagcagagggtgtgactgggccttgggggcgagcctgaccttgaaggctctccagaatccagcatcagaggactgtcggactcttctcacctgtccccctctttgaggaacccagaatctctggggcagggatgatgctgagtaagtgtttctcaccatgtcttctgagctcttggtcttttctttggctctcttaggcctcatcaggcacacccccgtctgaggaagaggaaccactcagtttgacctgctgggagcctgagattgcgtgagggcagggcagccagccaagtgctgaaaaatctcttcctcttgggaagcgccaggcagtgccccaaaaggggaagtgatctgtgggctgatctgctaatgatttatccccgggtctttagacctggcacctgtggcaccagctgcagccgaactgtctggaaaatcttcccagcgggcatcagggagcatgaggtaggaaatcaagctcccagggccagctgccagccactgctgcaccggcccctgccctccttgcccagaaagggctgcttttgttttttttcaaggcaagcacaggatgtgaagctgtggcctagcggaggctctggggatggaccagccctggacacgttggagtgatgtgctggcacttgactcggcctgtgtatcgctgtccccatgacctggaggcttagcccctgatctcctagaccaagagtaggaggccagcgctgacccctgctcatcgacttctcaccacccaggttccagtactaatgaaataattatttacaaaagggataagtgcccgtagtaaacatttcaaacaagctaagataaaaataatccccatttccaa

SEQ ID NO: 31544 - DNA, 842 bp, Bovine  19866880993798
  misc_feature (1)..(1): n is a, c, g, or t
nctctaggagtttagagggtgaaataataacccacaagaaagcaagtgctggaacttgcctcgtggtccagtggttcagactccaacttccactgcagaggacataggtttgatcctggtaggggaatgaagatccccacatgctgcatggaaaggccaaaatattaaatttaaaaaaaaaaaaaaaaaagcaagccagtgtataaagacaaaacaaaatcacagcacgtaattccccatgaatttcccccccacgaatcaaggagacttttggttcttattagactttagtatcggagaaggtgatggaacccaactccagtactcttgcctggaaaatctcatggatggaggagcctggtaggctgcagtccatggggttgcgaagagtcagacacgactgaaatgacttagcagcagcagcagcagactttagtactggcgtccaagcactagagacccccaggttatatctgggttacatgcctattatgttactatttctgatgcctgtttctgaaccacaaattacactgggctctctgacccaaactcttccaaaatttgggcccctaatccgtcggcggtcttctctctgagcgccgtcactttttgttaatctgcctcacactatagtcaatacaacccacgtgtaccagcccctttgggaaaagcaaagcttccaatattcttaaccttccagtgggaacttttcccaccttgcttgcagctgtttctcttatgcctccatgacatggctgctcttagactgttcagcattttgaaggtttcaatatagcctttcctaaggaaatgccttcctagcagaagttcccaacgtg

SEQ ID NO: 31545 - DNA, 1877 bp, Bovine  19866881063330
  misc_feature (1)..(1): n is a, c, g, or t
ntatctgtgcaggtggctttagacatggccggccatctcaggatgcagcagtgaagagctggaagacactggactgtaccatctctaggttatttcctgctctaaagttttccaaagggactggtagaatcagtcacctggcctcttgcaggcctgtccaaccaactctgacaatgttcaaaacaacccccagtttttcactgactgctctgtgttatccaaaaactccactctgcactgtagctgccatgtgccacatagaagcagatccatgcttgggggaagagggaatgagcatgatccaggaagcctttttaaaccctttcaggtcctgcaagaatgtattgagcacttgctatatgctggtcgacatgccaaatccttgttcatgatctgtctctttcaaccctgtgaaattttacctgaatttttgtcactagtggggactttttccagtttttaggtactaggacccattttatcttcagtaaaatggagataatgaaacctgtgttgtgctcctcattggattagcatcaggatcaaaagagactgtgtatgggggccactttgggagctacaaagtcctgtccaaagagaaggaaaagatagacaacaacgacaaaagagaagccagaaaacctcttccttcttccttctcttctcttctttaacaaaacccactctgtgtcattagatcacccgtgaggtcctacgacatcatttgtcacaggtcttgtttctccagccccttctcagatgtaatcactggctcctgtgaccagtcagtaggcatttaagttctaacgccctaaggtctgataaactccagtttgaattccactctggaacttgtgagcactgttccctctgggcctatcctcctgctgataaatcaggggataatggccgttgttgcccagtggtctgttgggaagacgtgacgtgctgaactatgtaaagcactgggcacaaattcttggcttgcaacacgtggtaaacgtgtacagtcattgttattatctactctgtgaggtctgattgttattatttccatttaaaagacaaagaaactgaggctcagggaggtgaagctgcttgttcaaggctacacaatgagtaagcagtggggcagagacttgaggccacctgtgactcgggtcatgcttgtttgcaatgtgtcatgaggcttctctatgggaagggaaagtatgtgtgttagtcactcagtcgtgtccagctctttgtgaccccatggactgtagactgctgggcttctctgtccatggaattctccaggcaagattaccgggggcaggggggtgggtggttaccattctcttctccaggggatcttcccaacccagggattgaacccaggtgtcctgagttgcaggtggattctttactgtctgagccaccagggaagccctgggaagggaggtagtgttcttataagagagaagagagagagagaaagagaggtagagatagaggggtgcttttgatctggatcacatacagttctcttccttttatatgctgcttcctgatttcagtagcgttttcattcattatctcataaaacctggctgatgtgatcattgccaagcctgtattatacttgaggctcctatctctagaggctcagttctgcctaaaatgtccttcagtttcataatctgcagactgaaaattgggagccatcactcaacgcgtcgtttttgttacagaatatctgaaataagcctgtcgcagaaaacttgttttatttgatttctgcacagaaatagttcatctgcttgtaaatcatgccctcccatctccagcctgtcgtgaattctgagctggccacctgtgctggtctgtgatcctta

SEQ ID NO: 31546 - DNA, 880 bp, Bovine  19866881110986
  misc_feature (1)..(1): n is a, c, g, or t
nggtctgtttaccaagatcgagggcgaagcttttgttgttagtcaccttttcccttatttctatggcaactgtgatacaggaggcttgtttctatgtgggctgtgctgtttttaatctggcaccactttagagctattcagctagggttgaatttttgctgcaacaaaattcatgggatgaggaggaaattcaggaccagcaaaagcacagtagggaggaaaattcagttcacttcagtttcagcctcttggtgactcccaagcacgagggaaggagaacatttctctacttctttcccttaattttctgagacttagagatagaaaagaaccacaggatgtaagatattttgaaaacattcccaaccttagaagtatatctcagtcactctttatatatatatttatttacttacttacttacttattatggctattcagcgatgtgggtcttagctatggcatgcgaactcttagtagcagcatgtggaatccagtttcctgaccagggattgaaacacgggcaccctgcattgggagtgcagacttagtccctggacaaccagaaaagtccctctcagccactcttgaaagacagctggagaagtgattttggagtcagatatatataaaaaaaagaatgtcccttgtatgagcattttaggtgctgagcactgtgctaaggagccatgtatcagttagctattgctgcataagaagtcagtccaaagcatcacgccttaacacaatttatcatctcagtttctgtattcaggaattgcatggcttatcttggcctctacatcaaggtctctcacaggagcgatcaaggtgtcacccagggctgtagatattttgaggctctatggagaagcatcag

SEQ ID NO: 31547 - DNA, 914 bp, Bovine  19866881165832
  misc_feature (1)..(1): n is a, c, g, or t
nctgggttaggagcagagtcattatctggcatgaagagaatttgcatgtgagtgcttggtgggaaaaaaaaggctgcaagagtatttgatgtttattattgcacttctggctagggctttattgaaaatcagaacaaagatgcaagcctatgtttatggctgggtgctttctcctggcctcatgaaattgtactattggagtaaccttgagaaacatatattactgagaattgaaaagcgaatgtggcttatttttttttttttaacaaaacatttccctgggagagaaaacgtctgtggtgctgtctcaggcggaatgtgcgcagggtgtgaggctcgtgcaagccctggatgactcggtgacagctccactccagagcctcatgcctgggctgctgttattgccaggttgtcattctcattgattcaaacactggcacataaatgctttaatcaagcaaattacttgttagtaagtttggtatagaagactcctagaatttagtgaatattcttatttcctgtgggactcctgagggagttggctgatttaaagtctgcacaccagttgttaaactgttagaggtatgtaaccaagctttgggggaatatttataccatggcaatgagcaaacactaaatcatgcatcaccctcctttccgagcccagggcagttaaccagcacgcttgtgtgaagagcagtacagaaaaggggaattctgtgggttggaggtttggcactgtgggtttatacgaacgacagcgagtcatttcatgtctctgaacctgcatttcccaagctgtaaaataagacaatgctgtctgcaccataggcctggcctgaggacaaaatgagacaacataagccccacagaagctttaaaaatgtgaatctcctcctgtttcatttctg

SEQ ID NO: 31548 - DNA, 1528 bp, Bovine  19866881174447
  misc_feature (1)..(1): n is a, c, g, or t
ncattatggtttattacaagacgtttaatatagatccctgttctatagagtaggtctctgctgtttatctattttatatgcagcagtgtgtatctgggcttccctggtagctcagttggtaaaagaatccgcctgcaattcgggagacctgggttcaatccttggattgggaagatcccctggaagagggcatgacagcccggctcccattattcttgcttggaaaaatcccacgggacaaagcaagcctagtgggctgcagtccacgggatgacacagagttggacacaactgagcaagctaagcccagcacagcacagtgtgcatctgctaatcccaatctcctaattcatctcctcccgcctcgagctaactgtaagtttgctctccacgtctgggagtctgttttgtttcataaacaagttcatctgtatttgtattttagattccgtatataagtgatatcatatatttgtctttctctgtcctacttacttcacttagtatgataatctttatgtccatccatgtttccacaaatgggattgttttgttctttttcatggctgagtagtattccattgtataccacatcttctttaccctttcatctgttgatggacacttaggctgcttccatgttttggtcattataaatagcgctgctatgaatgttggggtacaagggacctttttgaattagacttttctctgggtatatgtccatgagtgagattgctagatcatatgataactctatttctagttttttaaagaacctctatacctaaacataacttttatatgtgttgggaaaccagaaaatttgtgtgactcaatttattgcaatgatctggaaccaaatatacaatatctcctagatatgcctgtacacttttttgcacgaactcttggaaatctggtatcctgatagtacatctcaatggggacaatccacatttcaagtgctctttgagcatatgtggctgggagctgccatgttggacagtgtggtctggattctcaataaccagcaccaggttggagcagaagttcaagctggtatttgctgcctgtctgcaccttccccccaacatagaaaaccaaaaaatacccagaaaaataatctctggttaattaaagatgccagacaaatcatgtcaggttaacgctcacagaggagtgaataataacagtggttccactcaagcaagcaccaaataagcaaacattctttaaataaacagaaatggagtatatttcaggaatgaatttactctgtgggtcacagaggaggttaaacaaaaatttgttttaaaaacgtctcccaaaggacaccctgtgctgtgttcccaacacatgttgttaggagaaggggagggtcttggtggtgggagcctggtgggctggtggactgagaaattgagtttgtgtggatagcagggcctccagacacctctgtctgccattgccactcccagctcttacaatcaaacgccaacatcacatgcagatctgcaggaagagt

SEQ ID NO: 31549 - DNA, 1053 bp, Bovine  19866881213999
  misc_feature (1)..(1): n is a, c, g, or t
naactcagaggctttccaggacctcctccagggcccagggaagatagaatggacaaaaccccagttcctgccctggggttacttgcaggcctttgggcgctcctggggtccgtgttcactttgtctactgagagaaggagttatcttctgtggcgggaggagaggggatcccccccaacggtatctttactaaactcagcagtaggtcaccatcggagaccccaaaaccctccccatcaaagtctccacccatcactaccatgtggtccaggcaagtcatttccccatccgagcctcatttttctcatttgtaagtgatgatacataacatttccttcttagcgttgttggaaaaataatgaaataactcaggtgaagtttctggcatatagtagtcactccatatgtagttaactgctgtctatctatcatcattgccccttttatcctcactcttaccacagtgctccatctgagaagagcttcgtgttcagactctgatttccacaagggggctcctgggtcaccttctctgggacccagcttcagagcaggggtagggagactccagcccgcctcctttttctgtaaataaagctttactgaagcagagtcacttctgtttccctgtgtactgtctatgctacaataacagcacagagtttgtagttgtgacagaaactacgtgacccacaagacttatgtattcaccatcttgccatttacagaaaaagtttgctgacctctggcctagagctatatctaatacctaaaagagagatgctcatacatatttgtttggagaataaaaatgaatgaatgaattcatggttgcaatataactatgtcctacagtctgggcaccatggtaatagattagctcaactggaattttcctttagttaggttttttttttttttttttttttctttctttgcaagtaggttctcttcattgagctaactggtatttaaagctgacaccctgattattaacttcatcagaacgtggctgtgtggggtggtgaagccccagggagaagaaaacaagag

SEQ ID NO: 31550 - DNA, 652 bp, Bovine  19866881294543
  misc_feature (1)..(1): n is a, c, g, or t
nccaagactgcagctcatgccagcagcaagtgcaatgtccactgggaagggtggccttgtcctgggcaggcagagtgcagtcccaggagatagtctgggttccaagagcttcattcccagctctctctgtagacccaggcagtcaggcaagccctggtaaacctggtctccaacaaagaaaatgtaaactgcatctctgaaggaaaaaatgccatcattaggcaaaatctccctttctattttggtgtcaacaagttaggaacagtaggctctcagcccaagaaaactatgcttgtgctgctgctcctttatcgcaattcatctttcagcaaataattactctccctccaggctccgtcatctcaaccttctaattatactattgttggttttgatgtcaactgaacaataaatcaaatgtggagcagaatgtatgatggaaaaacatactggggagtaagttgcggggagcacagggcataagggaaggcacagagtgggggcttgttctctctttttctaagtttcgcttcagaacaagcttcccttttctctgttaattctgttaactttagggtcctgatctgggctatggaggtaactgcatttgtaatcatttccctccaaggggccttgagagaatttaattaat

SEQ ID NO: 31551 - DNA, 822 bp, Bovine  19866881384994
  misc_feature (1)..(1): n is a, c, g, or t
ncaaaaccacagttagaatggattttgtttcctgagccagcctcatttcctcagaaaagggcttcattttcccaggaagtggtttctttcattgaatctgaagatgagtgcagctttctcacacaccaggctttccctgtgcccagtcctgatacccacagctctcacttcctggccgaacaggcagacaactgcatggagcatcccagtcctgcccccgtgatttctagaccgtggatggaatgcagacgtgaggctggctatgccctggagcaattcgggggtccctaaaaccactggttttccaagaaggaatgcatagaggaggcatatggtttttataactgacaagacattctgattcattagaacgaccagaactgtgcatgagtgaaagctatgccgaggactccccctgaatttacagccatgaccacgctggcttcgggcgcctccagcaaatcatctagcttctccggctgagttatcaaatctctgaaactgaaatgaaattgactccgaggagccagtgagacaagggctgtgagatggcccagcacgttgcctggcacacagggaggggccacagttcccggtccccttgaaggactggagaaccagaggggcaactccccgctctctgccaacccatggcagtcgacagtcaaattgttctttacgcgccacttttcctttaatcaggctgttctttactcgggctgttttaattaagggtccgctgtcaacacaaaacatatgttctgaagtcttgctttggttactaatgaagcccgggattattaagtcggaaggaatttccag

SEQ ID NO: 31552 - DNA, 1113 bp, Bovine  19866881424003
  misc_feature (1)..(1): n is a, c, g, or t
ngatgtcctggaaccaatgccccatggataccaaaggaagctgtatacacaaaaaaattgaaagaagggtcttgaagaggtatttgtacacccacactcatagcagcattatttaccatagccaaaggtgaaagctacccaagcgtccatcaacaaatgaatggataaagaaaatggtgtgtcgaaagaataacatttagtcttaaaaaaggaaagaaattctaacacttgctacgtcctggatgaacgtggaggacaggatgctaaatgaaataaatcagacacaaaagggaagaaattgtatgatctcacttctataaagcatctaaagtaattgaactcttagaaacagaaaatacagtggtggttgcctaggagctgggggaggggtgaaaaagaagttagtatttaattggtacggagtttagttttgcaagataaaaagagttctgtggatggatggtgggtgatggtggcaagaagtgtgaatgctcttaatatcgctgaacagtacacttagaaatggttaagacagtacattttatgtgatgtgtattttatcaccattaaaattttttaaaaaaactttctaaaccttccatccagaaaactagactctcagaatgttagcactggctggggcctactctgagaggagaagcgtcagcatttttttcccgacatgggccccttctactcacccctcccgcccctggagtgtaacagatgtccaggtgacagacatgttgtccccaccctgagatgctccgtctggcctcactaggctttgctctggcccctggctgctggataattgatgatgactcacagaacaggccagaaatggaagcagcaggctccagacactaattagatcttcctactccccaaaggttgtactggagcctccttcataagacatcaccagtgaagaagtgacatgggacaaatggaacgaccacctctactgagctcttgctgtgagccagatccttaatgcatgctgtcaccttgaatcccccagtcctatgtaacagatgtcagccttgtggcgtcttaggaatggagagcaaagcctcccggttgtcacggccagggccaggaccacgtgcg

SEQ ID NO: 31553 - DNA, 1224 bp, Bovine  19866881636074
  misc_feature (1)..(1): n is a, c, g, or t
ntttctctaaaatccttttcatatctctcctgcatgatcaagtttagttagaatccaggtacccatttcagaaaaggttcccttgcctgtcggttgaagcatgtgtagtgggaaggcctggagatcgcatgctgccactaataaccttgactttatcatcgctgtttacaggtgtgaaccctgagtttaggagggagcatgccatttgctcaagcttaaccaactgttatctagttatagtagttttcaaacttctgagttttcttataagagaacttacctataaccctaatttgtaagttctcttacagcccaaaatacatccctttctaggaaggtgtctccttccagagtttcccaggcaatatgggaatcaagacagtgatatttaccccactgcctctaacataaatctgggggaaacactaagagcttgcaaagggggcaaacatataaaaatctctctgtttctttcaatctctctcacactaggagtcaaccaagcattttcattgttgaggaaaacccaaatgtcataaaagcgatctggatagaaaacaaaaactctagtttgggaaggaaagcaaatattcctcattaccaaagacaatgcctcttcagataaacatttacctaatccaattcttcttcctttctccccgttcctctgactttctcaggagccacagtggccctgttagaacagacggcgttcagcgtttccatcataaggcatgtttttctggggtttattactcagctgtaaaaatgtgctctaggcaaaaagttggcattaagtctcatctccgaggtaattggtggggatttaaaaaaaattttttttttctttttacagacagtcttggaaagggcaacaacaacaacaaatcaagaatttactgttggaaactatgaggtttcacccccatgggttttcctctttagtttggtttattcggtactaattttgttctcctctaaccagatacttgggggcaaatttataaaggctataacctcagacattcattgattcttctttctgcaaatatttacccagtgcctcctatagcccagacactgttctagactcaagatacaaaatatccatgcagtctaggcaatcatggggctggtgtacacacacattcatgcacaaacctcacgtgtttccagagtgggaaaaaaaaaattcaatttgcagtaagtggttggtgtggagga

SEQ ID NO: 31554 - DNA, 1461 bp, Bovine  19866880139047
  misc_feature (1)..(1): n is a, c, g, or t
ntttcatcaagaggcttttgagttcctcttcactttctgccataaaggtggtgtcatctgcatatctgaggttattgatatttctcccggcaatcttgattccagcttgtgtttcttccagtccagcgtttctcatgatgtactctgcatataagttaaataagcagggtgacaatatacagccttgacgtactccttttcctatttggaagcagtctgttgttccatgtccagttctaactgttgcttcctgacctgcatacaaatttctgaagaggcaggtcaggtggtctggtatttccatctctttcagaattttccagtttattgtgatccacacagtcaaaggctttggcatagtcaataaagcagaaatagatgtttttctgggactctcttgcttttttgatgatccagcagatgttggcaatttgatctctggttcctctgccttttctaaaaccagcttgaacattaggaagttcacggttcacgtattgctgaaacctggcttggagaattttgagcattactttactagcatgtgagatgagtgcaattgtgcggtagtttagcacgagaaggcagtgatatcccttatggagaaaacacctgtgttaggtaagcttccttcccgcatgagttacagtgctgttggccccaagttcaaggttaatgaatcaaaatgcattttaaataaggtgtctttcaacagaataaaaagttccctattgatcagttgaggaaaatgtggcccgctggaggttggcaggacctaatgctgtgtgtctcccctgagtcctggttcagtattagctaattctgtatttgctaggacattatagaatagaagctggagaagggaatggcaacccactccagtattcttgcctgcagagtcccatggacagaagagcctggcaggctgtagtccacggggtcacaagagtcagcgactgagcgactaaaccaccaccatagaatagagcctccgcgaataacggggccaagtgcaaaagcacccacggtggctggtccagactcccagacggggtttcttgtggggtctcgggcctcttacgtggccagccggcctcgggtgcagtcagcctctctttgctaaccctgggcttccctgttctttcctgcagaggggcacagccgagcccttcctgaggctccacaacttgtaccccacccctcgctgtgcccggcaggccgccctgcccaggctgagccgtcgggtggtcagccagcactcctacccactcaaccgcttctcgtcggtgcccctggaccccatggagcgccccacgtcgcaggcggacctggagctggattacaacccgccgcgggtgcagctcagcgacgagatgtttgtcttccaggacgggcgctgggtcagcgagaactgccggctgcagtcgccctacttctccccgtcctcttccttccaccaca

SEQ ID NO: 31555 - DNA, 1859 bp, Bovine  19866880466718
  misc_feature (1)..(1): n is a, c, g, or t
ntacgtagtgaatatacatacatttgaagagtctgtataatttgggatctggctgaaagataaaaacctttttcaaatggtccacccatcttcctcaagttggtatcagttgtaggctttgatcaaagcttccctagttgtgtttcagtattcagtagaaaaaatacttccagtcaaggaatctcatatgaattccagtgagttataccaggaatctcaggtatttaactatttgctatttcctttttattatccttttaatttttatgcccagaaatttccaaagtatggtttgtaggccaaatccagaaagttgcctgtttttatacagtcctagagctaataatcagagaaggcaatggcaccccactccaggactcttgcctggaaaatccccatggacggaggagcctggtaggctgcagtccatggggtcacgaagagtcggacacgactgagtgacttcactttcatttttcactttcatgcattggaggaggaaatggcagcccactccagtgttcttgcctggagaatcccatcgatggcagggcctggtgggctgctgtctatggggtcgcacagagttggacacaactgaagcgacttcgcaacagcagcctcagttttgcctcctggactgcaaagagtgaaatatttataaactggttcttcacagaagaagtgtgctgactgatctctactccagcctttagcacatttgcgtttaaatatttcattctccacagttctccactgtgctttggctattgtgcccttagcctgtcggggttcatttggtaaagggacaggagcacagcccataccagctgagggcagcagaaggaacgatcatgagaccctcacaaagacccctgccacctcagaggacaggcctatgccacagttctcttaacacaatcaatgcagcttacacacttgagcaaattctcttgcaccatcactttaaaatcataaatataaaattaattacacatgtcaaattgaaatcacgaggtaatctgtcagattgtctagagtatagctgctatttttactatggacacggtgcataaatagcagacacatgcagattgtcttacactttaaggctggtactaaaaatattagtactatgggtttgatttagttcaccatcgctatatttaattctaaaccttcttggggttatgtaatcatataaggtgcccaaataatagcaggtttactagctcacgtcagctgagcaatggcataatgaaaagaatcaggaccttgataacattatcttgaagtgctgtgagctacactccagctacgtgttccctttttatggagcagctgtgtctgatttgtagcagggacttcaagtctaagtctttcttttggaatttagtttctctaccctcatccctcctcactgtcccccaacaaacccaatttgtttgtgctccatttcaacttttagggactgattaggtggagagagagagaaacagacagacaaagagagaagcaagtgacatttaaagagaataatcgtaacttcacaacagcagtgcaggaaactagaaaacaacggagcaaggccttaaatttgagggaaaattattgccaaactgtaacatcatatctaacaaaaaaaacttttaaagctacagacaaaaaggtctcaaagaactggcctctcatgtatgtgtcttcagaaaagttaagagaggatatatttcctcaaaactaaggaataaacgtttaataaaggaaaatatgggggccaagaaataggggctctaacacaggaaggtgggggaaagggcttcctaagatgaccatgaaaatcaatctcaggacaacagcaa

SEQ ID NO: 31556 - DNA, 1800 bp, Bovine  19866880521050
  misc_feature (1)..(1): n is a, c, g, or t
ntcattttattacagtaccaggaaagccataaatgtatttttaacatcactggactaggatcatagactctgaaaattagatttggagtaaataaaatataaatggccactcttttcaagactggtttagagggtacaagtagtatttcaacctttctacagttaaaggcataaacataacgcctcactgaatctgccctaaatttttattgttgagaacttctaagaacttaagtaaacaagccaagcacgagaatttagcgagtactaagagcctgccaaaggtgaagtgtttgatcagagcccagcaagtttagttgtagccccaggacaccacctattgcgtttatttttggcacctctgaaagtgtattacatttattctgaacaagtcagtagtgcctgacggaagaatgaagacaataacttgcttgtgtaatgaaccagctcaaccccacaaccaagagaaaatgtttcaagacagtactgaacattcaccaagtcggtccaagggaaaccgaagcacgcccgcaggaaaaaggaagtgagcatggaacgaccaccttccggtcgattaagtgagagcccctctccaccaatccacactgcccagcacccactccaaaaactgctcctcgtcaattccgagctaacttcttatcttttctcctgaattaataaaggggaattgaaaatatgcagttttatttataaatgactagtggataaaacagaatctgcaacaatattagtgtggagactgttcatctcattgtttaaacgatgatatgccaaaatgtagaagcaccaaaaagtacaatacagatgactaaataatgctctttagaagcatgagctcatttaacgcttttgaagtatcaccttcattattaattacaggtgataataccaaaattcaagagaatctgaactggatgatccctcaggtaacagaacaatacaacagccaggtcaaatttaaatcctggctacctgactctaaatcccaagtattaactagtgggctagaatatctcctacagatatataaagtcctctgaaaattaagtcatcctaccaaactctctctacggtcaagaataatgccaagaaatgtctttcagctacagcccatttctctgttccctttcatagcaaaaccccaactatttatataattcaccagggaagtcgcttgggcctgaaatttcctacaactatctgaccttctagaatctacttcaatctgtctttcaggctcaccacaccagtgaactttttcttccaaggtcaccggattcttctgtgttgccacgtctaaaggtcagttgctggtgttcatcttacttaacctagtgacaacatctgatagtgcgaccgacccttgaacaacgcaggcttgaagctcacaggtccacttacacacagctatttttcaatacgaaatactactgaaaccaacctgcaattagctgaatccatggattcagggctgtggatgcagaagaaccacattacacgaaaggcaaactacaggttagacccgagttttcaagcacgtggggggctggcgctcctaacccctgaaattgttcaaggtcaacgggagaccttcatgtgacttccagaaccctttcacttggctctcctttcccagaatttagtctccctactaaattctcttcattgaccaacttcaaaattcttgagttgtccctgggtccaatcctcagcaagctttccctctgtgcctctttctcctcttatgatttcactttatctcaaatcttaaagtactat

SEQ ID NO: 31557 - DNA, 5040 bp, Bovine  19866880638080
  misc_feature (1)..(1): n is a, c, g, or t
ngattagtttgagcatgaagttgctttctgtttctgtttctgttaaaaaattctgctgtttatccttaatatagagctaaggaaatccatcttctgtctatagatatctttccagtacactttggcttttagaatcttgttgtttagtcgctcagtcatgtcctactctttttgcgaccccatagactgtagccccccaggctccttggtccatgggattctccaggcaagaatattggagtggttgccatttccttagaggaaagtaatgccctagatagtaatagactaagattcttgacctcctagatcaatgtcaagtgtgagatcatagctgatgcctgacatatataggaagcatttgataaatagtagttgtaccgtcatgactctggcaagtatcagaaactcagcacattgtgcaaaataaagaatttgttaaaacagggtatcttctagaaacccaaggcaggaatgcagcctattttgaaatgcccaccctgcctttgcctctctgtataatgtaaccattcattgtcattcattcagctcctacacaccacgcatagtgtttgcagctggaacacaataggaaacacaaatggatttttaaaaaatgtttttacagtgtaagtcccagagcttacagtctagtggagaggtacaaatcaatcacacaagtaaatataaaaccacaactttggcaatgctgagaaaggcaggtacatggtgtgagtatgtgaaaaaggaggacttgacctacttggggaggccagggaaggctttcctgaggaagtgagggctgagcagagatccaagtcaaagcaagcaataataagatgataggagaaagggaagaactttccaggcatggagaggagtaaaggcctcctggcaggaggaagcatggctggagagcagagagatcaggggccgaaggtcacaataaaaccaaggtcaaaaatggggaatttagcccagagccacacattccattctactaccaagccatcccagccaacaaacatcaccttctctccactcagaactttccacagagggagttccctggcagttcagtggttatgactctgtgcttccactgcagggggtgtgggttcgatccctggtgggggaactaagattccacagcctggccaaaaaccaaacaaaaaccacaaaatttttcatggagacaaagtttcatcagttaacactcacacaaaaggatacaaatgaccaagtagaacacaaactgagaaccttgccacagaactcaatttgttgtttccttgttgagtttgaccagtcggggactggggagccctggggagtagtctgtcagtggtactcaaagtgtggtccctgggccactagcagcagcagctcctgggaacttattagaactgcaaatcctcaggacccaccaacgggtttccctggtggctcagatggcaaagaaactgcctgcaatgagggagacccgagtctgatccccaggttggtattatcccttggagaagggaatggaaacccactccgatattcttgcctggagaatcccatggacaaaggagcctggcagactacagtccatggggttgtaaagagtcggacatgactgagcaactcacgcacacacaggacccaccaaagacctgtgagtcagaaacttgggaggtggatccagcaatctgtattggaacaagcaagacatcctgcaggggcttctaaaacacagaatggtctgcatgagatattttcaaacctgtccaatcatccaaatcatctgaggaacttgttaaaatattcctaggctacattcccatatctacaaaacccagaatctcagggtgggaacctgtattcaggtgatcagcctgatgtgggagccactggtcgacatcaaaagtcattcagcatctggcatggtgagcaattaatcttcatatgccacttttccttgctaggtggattaagggcagtaagtatcacaaactctacaagccaaactcagtacgtaatttgattcgtatcttctatcttctcagctctttgattttaaaacagtacctttcagagagcttcttctgatgctttttgatgaatgtctccttgtctgtctcatcatcatacccaccaaaaaccacatgagatctaataggcgcttaccaaattcaaacattgttaccttagttgtggtcaaaaaactatttcttgaaaacgtccccaacattccaaaatattcaaaagaaaagtgcccagcctagtaacacaagtatggatctaaatcagttttttctttttcctgcttctgtaaggaaatagatttctttcacagtgatttggcagtgttttaaacatacaaataaatatgggaagaattgagacgaagtctaaaaacaaaaactaaaaaaaatatttccagagttgaaaccataaatgtaatcctagatttattttcaagcaacagaatttttaagaattttcctatctttaaattcttccatatcctgggatttatgcagttcatctgccaataacattgactggtctattgtaggtaattttacatgtctcagaaactctcaaacaagataatgatatatgacttcagttcagttgctcagtcttgtccaactctttgcgaccccatgaatcgcagcacgccaggcctccctgtccatcaccaactcccagagttcacccaaactcatgtccatcaagtcagtgatgccatccagccatctcatcctctgtcatctcctcctcctcctgcccccaatccctcccagcatcagggtcttttccagtgagtcaactcttaacatgaggtgacttacttcactcaagatataaggccataggccagtgaaaagggacaaaaaaaaaatgagtggtcactaacgttaaaaaaaaaaggcctcaattattagttatcttcagatagtttaatggttaggggaagcaatctctgattgtgtaaaaccagaatttgtgaagtggctgctgctatcattcccaataaaacaaggaagtgggacttgcccagtccagtggttaagactccatgcttccactgcaaggggtgcgggtttgatccctggtcagggaactaagatcctgcatgccatgcagccaaagaaacccccccccaaaacaagaaatttcagtagttttaagaaattggagaaaagtgcataggaaggaaaaaaagggagccttgattaaataactgtgcctttgaagatattaattcaaataaagcctgtagtttggctttacaaattaaagcacaaaaataagcagaaaaacatgcggatactgaactgcaaatattgaacccaggaaatgatggtattccctcctaataaccagaaatcaagttgccagaaactggaatgtggaaaccttcatacaagggttgcaagatcctgaagcgaagatgtcatagtttttccaggatttgtacagacttaggtaagtcagctggatacagaggaccaattgaagagacttgctttttttaaattattatttatttctggctgtgctgggtcttcgttgctgcacaggaattctctagttgcgaggagtgggacctactctctagctgtggtgtggaggcttctcactgtggtggcttctcttgttccagaggacaagctctaggcgatcgggcttgagtagttgcaacacacaggctcagcagttgtggctcccaggctcgagagtacaggctcagtagttggagtgcaggggctcagttactctgtggcaggtggggtcttgccagactagagatagaacccgtgtcccctgcattggcaggcagattcgtatccagtgtaccaccagggaagtcccacttgatctctttatgagatgacccagcaagtgtcccaaacattagccacaccagtgcgtgtttcacaggacacactgcactgcacacacagtctctaggcgtacagctctaaagaacagaacttcgaggtggggtcttttgtctgtgcatcagagtatttgtcttctttattattccgtttaaccatacttactgattttcccctcttccaattttgagaaagaaagaatccttcgtttgctaggtcactcccaagctgcctccaggtctgctaacaagagactgttcaggagcaagtctgccctccagagctcagcttccattagaagtggcttctcttctggcgatctctcggtccatttcaggcttatacatcaagcagtcaccagacaaaggaagtgaataaggcaactttcaaatgctaattcagactgtgggctgtgaaaattagaaaaccctcagaagaaagactgccctggcctgtccatcagtgggggtcttgcctcccctctccctgaggactcactgaccctagcacccagcagtggggcagagctccacagagcaccaccatcttcacacttaaattcaaacacactgtcctcctcagaatttaactctcattttgtaatggaaaagaggaaggtgttagtaaatacaagaaataggttgagcttttaaatacatccaaaatatattttccacttctcatacacaaaatgaggcacaatatgaaatatacaggatgatctcaactatgttatcataaaaagttatagaagcttatctgattgtaaggagttaatttataaatgatagttttgttttttttttcaaatccctatcttctagggatgtatactaaaatatacagggataaaatagtaagattcttgagcataagcttcatattagcctccagtggggtggggtgacgtaaggtgggctggcatggctaaggcgtaactgaacatgaccggccacggacagatgaagtgctgacgctgcagggcgggtgggaagaagggcatcactacatcactctctttctatacgtcacatacttttacgtgtgcttgaaattttccaaaagaaaatgctttttaaaaaagccacagggacttccctggctgttccgtggttaaaactccatgcttccaatgcagagggtg

SEQ ID NO: 31558 - DNA, 1755 bp, Bovine  19866880656910
  misc_feature (1)..(1): n is a, c, g, or t
nctggatgactgagcatgatctcatcttaagatatttcaattacagcagcaaatcaggtaacattcacagatgccaggggttgggggccaccattcaaccatcacagagggcatcattcagagcatctctgggaagaacacgaactccttcgtgaatgaccatgatcccagtatctttcaagtcccatcacccactacttcccctgacttcaacgtgattagttgcttttatttccacaagtgatggatttcccatacctctatgcttttgtaaatgttgtttcctctttccattttaatgaatcaagttggatgctggaaggaaaatcaacaggatggaatggttgtagggagcaggtttagagggtaatgtgaacaggctccgtggttccaaatgttcatatttcattttttggctgcatgcacagcatgtaggattttagttccctgaccagggatcgaaccctcactccctgtagcagaagggtgggatcttaaccactggactgtcaggaagtccccaaatattcatatttcaacagtaaaagtttcctctggacaacctagctctgtcctggaggtccctttaccactttgtctggctttacgtaagttgcaattaaaaggtttatttgtgtgacatatgacaagttcctctctgaaatttgatttcatgtttactcatgaatagcagctgctctcaaaagtgattcacttttaagtaaattaaaagtttgtctctgaggatatacatatcctaaaggtttattttgttttgtgtctcaggagaagtaagtggggaagaatgagctggatattcataaggctgcaggtaacttgttttgaacactttcagtagactgagagaacagcagtcaaggggagaaatgtttgaatttcaatgggaattgtcaacatggagtgaatgataaggacaccagccacaagatcagtgtccttatatctttcttttattgcttcattgtaattaaagcctaaagtgaattatgaaaatatgcaatccaacagcttctgccttggatttatgcctggcacgctgtgaaactgtggtgtgatgattgctttgtattatgcatgttgtactataaaggagggactttaatatgtaatacggagtttccatatgatagaaatgtatctaccaacacaaaggcagtttaaaactgtattgcttatagaagatcataaatagatgaggagaaattaagaggcagggaggaaaagaagccattgtggggcagacacagaaaaggtgaagaatatctggtgcataattaaacacatattttgggcaggcaaaattctaagatgatgacccaatgaccttgtataatccctccctttgaaggtgggcaggatctgtgactatgataggtgtcattcctgtgatgaggttgtgtatttacagcaaaggttaagggatttttttcccatcagttgattttaaattaatcaaaagggaaattacctgggtggatctgaatcagaggaaactcttgaaagtgttgggttctcctactggacttgaagaagccatcatgggttctataactgcaaggaaatgaatcctgccagcaaccaggtgaggctggaagagcacttggagcctcaggtgagaccatctcatagcactgatgcctgactggagctttgtgagacctggaacagaggacccagctatgccacggctcctgatccagagaaactgggagctaatgaatatgtatatatata

SEQ ID NO: 31559 - DNA, 2475 bp, Bovine  19866880685931
  misc_feature (1)..(1): n is a, c, g, or t
ntattttagtacaggccaaagtagaaacttaagaggaaaaatagtttagcaagttagggatcatttgttagttctcaagacatgtccaagtagctactcctgaaaattaccctaaactccaatggatgatgaatgacaaaaatatttgtttcatttcatttttaagaacttttatttctcttctccatactccaagaaaagtaaaaagcctaaatattttgctatgattcccggagtggtgggtaaaaaggacgaggaactgtatttataactcaatacagccggccttctgtagctgaggatgcaaatcgcgtggatagtaaggtccaactgtattaataccactttatttaagggacaggcacatctgtgaatttcattttgtataagggacatgcacatctggaattctgttgtctgcagggggtcctagaaccaacgtcccatggatgcccagggatgactgtattcaaaaaagcaacaaagaaatacctttttaattcagattcatcctgaataatttcccattaaaaataaaaatcaaagatgaaagcaaacctatggcacccagaatggctctgaacaatgcttagtttagagaatgtaccagacaccatgacacggcaggatctaaaaccagattctgcttttaaggtctagttctactactaagtgctaccgtggtcaagttagccggtctcttcaacaccttggcactctcatgagaaaaaaagataattatagcaacagaagtatgcgagataatctttaaacacttaaacgtggcttgtcccaaagtacaattcaatacattctattattattttccttactgtaatcattcaaatagtcacactaaacagaaatgtacggaagttatgtgaataagcacaacttttaataataatctgcttcaccaattagattttaaaactaagatttatggaaactaagttcatcctttatcctgataggggtatctagctacatcagataaaaagcactttctttcattgtctttgatgtcttcaaggataagaacatttctttctaaatgtcattcagctgcaggtaaaacatgtaatgttcataaaagtgctaattagaacaaattaaaattaaacagcatcaaaagacatattaaaaatatgggagcttacagttttgggtaactgtttatacataagaattttttttaatttactgaattttagatgcagtcaaagtatttttggagttaatccttagggtactcaaatcagtctctcatagatgactgtcaaccagcagtgaccagaacatgagtctgagtttaacaaaagtagaaaaatgcacttgagcagaacatcttaagttacacagataacacataaccatttaaaactaaatagtttttgaaaaatcttttcccgtcttcctcatataaaacatgattacagaaggttatatatttttcctcccaggagatggggagaccaactgtagagtggatacaactgaacgaagtaactgttcccctccttccctttatctatttctcttggccctcttttacactgcctggacatttttagttggttttctctagatttttttccatacagctttagattatttcacacgtattgtttcacttcattggccaaagaggctaatgctttcaggggacattaaacaataactcttgggcccctttctgcccataatgtctaatgactggcttagatttttttgtcctttaactgcttggcccaacacttatgcacactgaccctcatagacttctgtgtgaggtggatccacgtagataccgtgtagaggtcttgacaccatcacttcactcatgccactcagatgctgccatccacctcttctcccagaccactctcctctacagagggcaggtgttgcctcagtactgattcgaggaactcctgcctgagcttcccccacagctcaggaactgactgctgcctcctgcttcctggtggagcccccatgaacaacaagggctcatagaaccccacagggatgtgtgaccgagacgacgggaggagggaactgcgggctaagcagtcactgtggcagctcagagtggggtcctgggcaccgccaagcccttgaatattctcgaatcatatcatatacatcttgattaaaaacaccttaatagtcaagtatttaagaaacagaatacaaaagccttttcttctcattacgaactgaaatatattcattaatttaaagtaaacaccttaataatcaagtatttaagaaacggaatgcaaaagccttttcttttcattaagaattgaaatgtattcattaatttaaagttgaatttgcttttgagagcttaaaggctcacacaggttctacttttgtggatagaatgctttaaaaagtagaagagaaactgctagagatgaccgttcatataataaaactaactcagtttcctaacagaaacactaa

SEQ ID NO: 31560 - DNA, 3485 bp, Bovine  19866880697031
  misc_feature (1)..(1): n is a, c, g, or t
ncccatggacagaggagtctggtgggctccagtccatggggtcacaaagagtcaagacacaactgaagtgattaacactttcactctcagatgtcacagcatctgttttatcagcacaaatggtttaactgcatccagggatggagagaaatttgcacagttttcctcccctggaaaaactgagagaagcaaatcttgtctcttaggaatctagaaatgtttgttcttcaaagtaaagctttactgtaatgaagggacaatgtgggtttcctgtaaaaattcttacttttgatccacagtcaagaggattcttagctataaggaccatagctttattatcttgcaccatcttcagactttgaagaaggacatggcaatccactccagtattcttacctggaaaattccttggaccaaggagcctggcgggctacagtccatgtgattacaaagagttggccacgactgagcgactgagcacatcctaagccttaagttctgttaaatctctgttaagggacttccatggtggtcctatggttaagaatctacctgccaatgcaggggacacaggttcaatccctggtctgggaactaagattacacgtgctgtgggacagctaagcctatgtgccacaaccttgagcccacaccctagaacccaggctccacaacaagacaagcaactgcaatgagaagcccgcaaattattattatttaaagaaaagccctattcaattgaggacagtctatggcagggctgagcgtggatctgagggtggtcttctcaaggtgggggcaaatggaaggcccttggaacctggttgttctgtctgtctacttgcttgttggtccacctgggtgaatagtgaaccgcagtgtaaaataaagagcctttgaattattatctcacaatgtgaacagtttttatagcccattctaggggatgatgaactcatcaagggaagaaagttgcctggctgtgagagagccgggctgtgattgggtgtctgtttcaatgatttatagtcccttttaatgcagttgggattgggagcaaaggtcagagtgggtctttcaggagacacaggagagtggattttagatataaattatgcaacccttaaagttcaacacagatacaaactgagcggctctttcatggtgtttggggttatgactgatttgtggtctgcttatgaatggagataggtcaccttccagttctgaaactattttttcacattaggacacccataattaattaggagttcatgcagtgaggtcatgaatgggattgcttggtgctttgacccactaaatctgtgttcctgcccacagggccccagtgatagatctctttcagagttcacagaggaattatgagggcttgtctctgagtccagcacgaaacacttttatggcaccattaaaactggagcctgttcaagttgcagccaggaagcttcttttgtctaagataaatcatacggcatattttatttcaatctgagatttaactttgagactcctgggtgaggcttttgtttttcaaatattttggatagaattggtttacttttccatgagagggtaagaaggaattctaagcagctcagccttcacccagtcgagctaatcaaatgaaggaagacttagattcatttgcttcatcgctgtgtgacagctggaaataattcacctcctggttactgatttgcacccctctctgatgatagcatggataccgcagagctttagcttgagatgtgtctgaaatctggaggaagccccaggagccagggttgttacttttaccttggttttgatgctaaacagtaaatactctgaggggctggggctctgggaaagtggagattttattttgaagccccagaggctggctttctacatcccattagagggaaagtcaccacaggggactctgccaacactcgttccctgctccaggcctgtggggtcggtgctgtcgcctcgtagagaaccctcgtttctagtctctgagtggcagtgcctacacgttccgaccatttgttcctgaaatgtgagatttcatactaaagttttccagagcagattggcgtaccccagggcataatcatcctgtaatgcagtggacgtcttgtgattttcagagtctaccgttaggatttgcaggttcagtgtgatctaaaggttttaaatcaaaatcctctcttcgtgtgggtgtcttccaggaaatgctgcaggatttttttttctcctcagcatcaaaggaatttctttgtctcttcttataacccacccgcacccacccctttcctcttcttgtccacttgctcccctttcttgcttcatgactctcgtgagcacttttttctccttcttctgtacaggagaaatggaccaagtcagggagagctggagggaaggagggacggggaataacagctcctgtctactgggtacttcaagctgagaggcactgcggtgtcctgtcactaaaatttgttgagcagaagtgaccgccatccctgtgttcaacagggaacttggactcctttgagggtaaggaaatggagagtgaactggctcaagcttggccaagagtgaccttgggtcagcctggggcacccagccgtatcgcaccacggcgccccctagtggatgcaagactgacctgagcggtaggaaaggaatgtctgttccttgagaatcaccctgcgcctatagcttgcgtgcgctcagtcactcagtcgagtccgactcttgaacagtatcccaccaggctcctttgtccatggcattctccagacaagagtcctggagtgggttgccatttccttcttggtgagatgttttcacttatgtgatctcagtcttcacagtatgttcaaagtgggtaatatttcttccattttactcatgagaaattggaaactaaggtaaaataagttgccagtggctaagctatggctacattttaaaaaaaaaaagtaaactctatgctctttttttttttttttttaattatttttactgctccagatctttgttgctttctccagttgcagtgagtggggcgccactctttgttgcagagcatggacttcagtagctgtggtgcacaggctgagttgccctgaggcacgtggaatgttcccggaccagggattgaacctgtgtaccctgcattggcaggtggattcttaaccactggacccctgaaaagtccctgtgaacacatttgaattgaggacactggtgcctctaaaccatggtgactggtcctcattctgggtgagtgaattctctgagaatttggtactttttgctggttttgggaatttctgctgtggcgaggtagagcatgtttataccaaaaccattcctaggcatcagctcctgatcctgttgtttcgtatcatctattcttatcctgaagtaggttctcatagacagaaaattaagatacgtaagtactt

SEQ ID NO: 31561 - DNA, 1507 bp, Bovine  19866880805945
  misc_feature (1)..(1): n is a, c, g, or t
naatttctgccaaaagtagaaattagtaaatgagtgaataagtaatcagacctctgtgtgagatgtggcccagcacttgagagaatagcatctcaggaactatgccccattttactggtgagtggagaaggaaatggcaacccactccagtattcttgcctggagaatcccagggacagaggagcctagtgggctgctgtctatggggtcacacagagtcggacacgactgaagcgacttagcagcagtagcagcagcagtggaaataaatggcttgcagcgacccccaagggattaaacgccagagcaaatttaggtcactgcttccagctctgtgttgagctcacatctttacccaaggcattggttgatttttaaagtacaatttatgtgtctgggaacttcattatcttttgtggaagaaattgctgccgaagactcttattattctctggagggaacaaagctggcaagagtttagttttttccaggaaatactatctgataagtcttattagttaggttgtgctggtatgtgaaatgttaaggaccagttacatgtctttggtaatcccctggaagatacgtctcctccacttgttttggcaaatagtagtattaacttccttggttcttcatgtttaaggaggctgaatctgttttcagcgactcgtaatacaattgccttttcttctttctaagaataatattcagcaagtcttccagaagttccacgtcttgttaaaggaagagtttagccctgaagatgttcaaatcattgcttgtccttcaatggaacaggtaggcgatccgtgttacttttataaccttttagttatctcacttgagtagatagggtcttttgagttaccatattttgttgtaatttttaaaattacaacacatttggcaatggtgttcaaagtttcagttgcttcttttttgttttttggccacactttgtggcacatggggtcttagttccccaaccagggatcaaacctggccccttgccatggaagcatggaggcttaaccactggaccgccagggaagtcccctcagttgctttttaatgctttctgataattgaaagttgctctgtttaaaataaactctttgtggaaaactcaaatagtggtatttaggttgctgcatagttttgtttgcagtatgtatgataagaggcccatgtttcaaagatgttagaaagaggtcctctttctctcttcttcctaaattaaaaaaacctgaatagagagctcagcctgtgtttactgtcatcatttattcagttctgtcggcaaactttgattgagtagaagtagactggcgccacagagggtattttgtttatggttttaagaatcattgaggagtttagtgtatggtaaggactagagaggagagcagtaaggttggtgagcgtctgattggtttgcgttgaatctgcagggagagagactggaggcagtgagtgtggtcagtctttgaagagttctgctgtg

SEQ ID NO: 31562 - DNA, 1322 bp, Bovine  19866880809393
  misc_feature (1)..(1): n is a, c, g, or t
nacttaggaaatgcttttataggatcccattctttattttggaaaaaatacatatatgatgtccacatccatcaagctttcagggctttttatgacccttttaagaccacatcgtctggaaccccgcattatctatctcaaggagacatcgggctccgtaactttgtcacctgcctcctggtggggactgatcacccttctccgatctgacggttgtcactacatcattttgagatcggtcagaattccacaggcagattcttccttcggacagctccgattcctcctgtgatctgaaaactaccctttccagccggcggcattttaagagcatatttctaatagatatcttctgatttcttctcaagttcccctcttttgaatattttctttgaagtcttttctgaccctaaggaatgccaggacagatcctaaaatcagacatgatttacttgactccaaaaaaaacacatctgcctcctattttaaaagtccaagtgcagttctcatggtcatgttggagcagttgcttcactgtgctcagtcacgtctgactcttttcgaccccatggacagttgcccaccaggcctctctgtccatgagattctctatccgtggaattctccaggcaagaatactggagtgggtggccattttctcctccagggaatcttcctgacccagggatcgaacccacgtctcctgcatctcctgcattggcaggtggattctctaccactgtgccacctgggaagccatgttggagcaatagcactggctaaacagaagcttcaggaactaaatgagatgggatggtgtctgggtcaggggactggaaagccaaagcaagagaataactgaagaaagataacgcgaagatgtagttccaagactcattttgggtgcaaaagaaaaacatactctacttagcactctgctttcagtgtggcatcaatgaatgccaagaaagaaacaccatttcagaatatctgaaattcaactgcaaacttgcattaacacttagcaaaaaaggaggggaacacaaagtgacaaatttgcttggagtcttgtgggctctcttgtagccaaatcgctgcttcaagacagctcatcatctctgtaagagcagcaactgcagacttgtcacattccccgatctctgctaatacaagctgagtggttacgtccgctctccccggtcggcagcttgagtcccgttctctgcaacgcagctcgagacgaagagccctctcaggggactaatgaatgactgtcgtcagtgctctggactggagacggggaataagcgttaacgtaggaa

SEQ ID NO: 31563 - DNA, 1650 bp, Bovine  19866880875026
  misc_feature (1)..(1): n is a, c, g, or t
natttccccccagctttcatttggttctagttaatctcactttttaatttttcaaaggttgccaaaacagcgtgttaaaagttaccttatattttcggaaattctctctgaatcccagcccacactgatggccacatcctgccagatatccctcatctattattccagcatttatagtttcatggagtctctaatgaagtagccatttgcttgagttgcttagtctccatagcaacagtatcttggttcgtgtatgcctgggtagcttcttacagcttgacatgatatgcagctaatatttctgatttttcctcagaagcaactggaaatttgcagaacgatattttaaaatttgctgaatagaagttgtttgattccactgttgtattctcttggcacccatcacatagtcataggatcatagacactttaatttggaaaagtgattcatacttgcagtatatatcacagggactggctagagaaatgctgcgtctatcgtcataagcagcttacttaatccctgacctaaataattttaggagtaaaagaaagagagccgaggttagcaattggggctgcttgatgacttggatgcttagctttaaacatcttaaataattctggttataagtattcaagttgcagtataataaatatgaaaatggggaaagtacttatcacagtactttttccagtcttttattgtgagatttctgttaggtcagcctctttgaactgcattacctcatttatttcccctcctaaacacccactctaagttccttccatcactactgaagctaacagttacataaatctgttttcatttttaaaatgggttttcttcagatttcacatagtgaaaacatgcaccttgcagaaaatacacattctctaatacacattatttggacaagacagtgtagcctgttgtgatagaattcatggtttcaagaatctgatctcatcttaaatgataaaaaattattgctgtaccatctgttgtagaatatgtaaaagctcacttaaaaccaccaagttcatttcacacctcaattgcttttatcaaacacactccatactttaacccctacctcatatatgaatgaatgaaacccacagatgcccccttccctttagttatcatcttgatctgtatatatgcagcaaactcaacaaattctgactaatttctttcttggctctgaatattgaacctgaagaagcaccagcatattttagaatgtgttcattcaaatatatatatgtacatatacatacatactttttttttttttttcactttttcctgcccaactcaattactgaatgaattgcactaggagaccaaagttgctgtctgagagtgttaccttggatttttccgtggacactcacttcaccctcacctttagctagcagcactggagggacctaagggcttccctggtggctccatggtaaagaatccacctgccagtgcagatgggagatgtggattcaatccctgagtcagaagatcccctggagaagaaagtggcagcccactccagtctcttgcctggaaaattccatggacagagtagcctggcaggctacagtccgtggggtcgcaaagagtcagatgcgactgagcacagatgcaca

SEQ ID NO: 31564 - DNA, 1574 bp, Bovine  19866880916197
  misc_feature (1)..(1): n is a, c, g, or t
nttttctgacatttcactaaatgtgatctgtactaagacacatcagacaattcatatctgatatactgaaaatacttgatgtgacataagatggggttttttaaatttttttgatgtttactgaactcaacacttgatattgcattcagtttgacgatgtccctttaatatatctgttatatttctttgctaatttcatttcctccattttctctgttctctcttttttgatctattagaggttgattcctagattgattctttaagggtttaaccatttctctcaatttcctacattgcctttttatatatatataattattcatttggctgcgctgggtcttagctgtggcacgcagggtcttttagttgcagactgtgggatctagctccccgaccagcggtcgaacccaggcccctttcactgggagtgggggggtcttagccactggaccacctggaagatttcctcatctttattttacaatccttcaggataagattttttaatcacagtttttccatctctaaaaactctgaatattgtaattagcctccaattaaaataatttttaaaaaaacgtgatttttcatgtttctcagcatcttcttctttctcaggtgcgccccctttgtggctttctcttaggatgctaattagagggtattgttgctgtcgctcttttctataccctgaattacgtctgttttctgtttcttgtgaactacatctttctcttttgtgctaaaggttttcctaatgatgattgcttatttgttcacattttttgaacaagggaattgcatgtttgataggagctctgtgtgtgtgggcaggatctttgaactaacagacttccctttgtggcaagcaggtggaaacctggccatggttcttggagatcctgaaatgccagcatgtggagaacctaaatatggggcatcacctgttctcactgcccccgatgttccccagagtttattcagtttttttttaagagaaaaaatcctatataatgtcatgttatgtttcagacagtgagatcacaactacccaggaaagtaaatatcatctcagtgtttcagagggatacatttagccttgctgctgctactgctaagtcacttcagtcgtgtccgactctgtgtgaccccatagacggcagcctacaaggctccgccgtccctgggattctccaggcaagaacactggagtgggttgccatttcccttctccaatgcatgaaagtgaaaagtgaaagggaagtcactcagtcgtgtctgaccctcagcgaccccatggactgcagcctcccaggctcctccgtccatgggattttccaggcaggagtactggaatggggtgccgttgccttctccgacatttagccttagagaggttaaataaaacatccagggtctcgcagccaatgtgaagtgaagggagaattaaactcaagtctctctaactccaaaagtcatatgctcctaaccacgagaggtgggtggttttggtggagcttggcttacagccctcccccacagatcgatctttgttctggtcttatacagat

SEQ ID NO: 31565 - DNA, 1306 bp, Bovine  19866880987759
  misc_feature (1)..(1): n is a, c, g, or t
nctcttgcaacctctatccgtgagctgtgggatcctctgctacaatttgtgaaaaccagtcctcaggagaatgtgaaatttctccttttctctacagaaaacctttcttgatccatcattccagctgttgtgagcaggaaatcatttacaaaaaggaatgctaaacggaaaagcaattttaagaagaagtgtttaatagccttcaccagcagttccctgcctggccagtgagtgagggcagggaatatgagatgagccctgtggaatgttctggtgaatcctgtgaccttgaacacttagccatcccctcacataaaagccagcagagccaatctgaaagaagttgctgtcagccccagatgactgagaatttgaacatatgtgggaatcatgtaccaatgggtggaggagttaagtttgaccaattctaatagtatttcacctatattatatatatctcataacacgtatgtgcacagcttatacttaaacacagtgttttagcttttctaaagcagtttgatatctaattatatcattaaaatcagcacgaagacttactggtcactgcttaactgaaactttggtttagttttagcttgtaggtgaaaagagtttcattgattaatgacatcgtcatgctgatgtaataatgagtaataatgagttttgaagaacggacagtggaggcatatgttcccaggctccaggccgtagaggtgcaccacgggcactggttttgcaaatgccagcctggccgccacagtggtgggggagaggaacccacctcttgctgctgccctctgtgaaccaaaagcaaggatcaggaataaaacgcagagcgagttagaactatcaaaccccgtcacctttaaaggacattttgagacttatttagttttagtgttttgttttaggggcttcccttgtggctcagctggtagagaatccgcctgcaatgcgggagacccgggtttgacccctgggttgggaagatcccctggagaagggaaaggctacccactccagtattctggcctggagaatcccatggactgtatagtctgtgggggttgcaaagagttggacacgatgaagttttgttttactgtttatttttaaagaaaaaaaataccaccacaagtaagtaggacttgatacaccaaaaccaagtttcaagagttggtttgcagggatttccctggtgatccagcagttaagactttcgttgttccatttgcagtgcaccttggtttgattcctggtcagggaaataggatgccacatgccacatggccaaaataca

SEQ ID NO: 31566 - DNA, 1035 bp, Bovine  19866881018828
  misc_feature (1)..(1): n is a, c, g, or t
ntttcctgttgtctttagtgccttcaactgatggggcacacttaagtttcgtcagttcatttcattccttctgtcttatcagcaacattgactttaaaatgggtttagtcttcaaaatgatctttgaaatctagtcttttctttcacactgaccatcatccttgccacatggtaattttattaggatttagcccatttttaaggtgctcttggccacgacatcaaaattgatgttacaataaaaatgtcataagcttttggataacatgctttgctgatgcctaaataatttctactggctatttcaatgagtccaagatactcagacacgcaaaaccagcaattaaaatttgcccggtggttttagtgatcggctcgaaactgaatatgttagctgtcttagaaaaacattgcttttaatctggcctttgatatctccacccgccacacctcccagtgataacagaagttaatagagtttgcacacttgttgtgtattagagaatgagaacactgtctcattggttgtttgttgttgtttagttgctaagtcaacatccgattcttttgcgaccccatagagggtggccctcttggttcctctgtctatgggatttcccaggccagaatactagagctggttgccttttccttctccaggggatcttgctgacccagggatgaaacagcatctcttgcatctccagctttgggaggaagattctttaccactgagccaccagggaagccctgctgtctcatttagctgtataaaaaatctataaggtgaacacgattattgtcctctttttacagaatacttttgcagtgattttgccctctgcccagtgtcccacactcatatgcaacacagctgggatgaggccctttctaagagcctctgctctcaggcactgtgctctgtggtcaggtggccttgaagtcataaaggagcaaaggaaggagaaattggattgctgaccagcagtcagcctggccagtgtgactcctaagggtgcaggatttgtctcctta

SEQ ID NO: 31567 - DNA, 2382 bp, Bovine  19866881021011
  misc_feature (1)..(1): n is a, c, g, or t
ntcatgctgatcatgctcagccacctttccaatggactctgaactctgtttagtgcctatgaaaacaacaacagaaggataagaccccctccagacagagggaatcttaaagatcgtatctaggttactcatcgcctaagagaaaacatatactaatcaccccttcctccagagaggccataaatttttctgtatctatcggagtgtaacctcgggtttactgattattggctaattgtttgactgtctgagcacatgagcacatagcacgtgaatgatggggttattgggattgtattttccttggtttatgtaagtcttaaggaatctggagtggtgggttcagacacgtacacatggggtataaaagattttcacacatgctggtcggggtccttggctaagaggagactttgccttgggcccgctggtgtaacaaactgcactccactatctgcattgtccttctgagtgagtttgtttcccgaaacgcgtggctacaacaactgatcctcaagaaaaacaagacagagaggtgggaacctagcaaaaggctagtgctatgcttttgtattctcagtatggagccacagttgtaccgtattctttcttctcttccatcccagctttaatttatgctgaaagaagatggaaaaatttaaattcagggaataggaaacagaagttatggcaaattcagcttccactcttagccctctcttcctcatgtaaaatgactcgagaagctaggaagatgaacaggaaaaaggttttcaagtaacaaaacatgctggtaaagcaagataggacttccctggtggctcagatggtaaagcatctgcctgcaatgtgggagacctgggttccatccctgggtcaggaagatccctggagaaggaaatggcagccaactccagtactcttgcctggaaaatcccatggatggagagcctggtaggctacagtccatggggtagcaaagagttggacacgactgagcgactctactaccaaagcaagacagtccactttagagagggcatacagtccagtaggcagtagagaggaaaaacttaagcgtctgttatcaagttgtcccaaccctaaaagccataggtcagacccaaaaggactaaagataagaactgagaataaattagaaagaaacttcaaaatcaatactgaaggtattgattaagagtcagattaggttgtgatttgtaatgttaatgagcagtgagaaaagtaccaattctacacagaaaattttctttttaaatcttggtttacatgtttcaatctcaaaaacactgcatttaacattggtgctctcctcctttaaaatggggagaaaacacacaagacctgtatgcttatctttctgcattaaccacgcctatcaatggctcaataaaatttttgtagtactgcattatttaaatctttttttttttttaaataatgttcaagagagatccatcaccccaattctgctctgtggtatcaggtggttccaaagtacatataactataaaaagggactaaaatgatcccatgatcatgaaattattagcaacaaattatactcatgccaaaactaagatcccctgaggtaacttctcttttctaagctcatcagtgtacaaatggaagtcttaatgttgtacttataactctgtactaaaaattaatttcacaaataaacaacacacgatatgcaccattctaggaaaagactactgtttggatatactgctatttcttctcctcttagctctttttcctttgggcattttgttttgcactggcagtatcaggaaacgacactcaaagcaatcagatttctaacttgttcgcagccacaaaatactactaggctagttattagactagaaatagcttttgtgttatatgaattttaattactgatatctgcccccagtgaccattaactaaggcatcaccagctgcacagaaatgtcaattcagaaagaactttccatctccaggcacaaatttttataatcccccaattccatcatatacaattttactttcaaaatataaaaccaattattcaagaatgaactgcaaccaaatgttgaacacccattgtggatgtggtatagggctgttcaactgtcattactgaaacaataatccctgactaaaattataaatgccacccacttccaattaaaatattataatacagatgtctgtaaatttctagattgttgtttgcagaaatactttgattgctttgtcaagacagtctttgtggaggtttttaacttttaaagtgagcgtgacaggtttgaatatcatggtttgcattttaaatccttatgaaagattcccccaccccctatgcttcttttt

SEQ ID NO: 31568 - DNA, 1789 bp, Bovine  19866881024646
  misc_feature (1)..(1): n is a, c, g, or t
ntgagctgaaagaattctgcttcttgtgcagaagttgattttctcgaaacccttcgggcagtagaagttctccatttcgtaggaagtttagaacatgcctgaagaggagtccatccctgtctatgaaataatgaccatcggcatcaaacgggcagagaatttttccattgactataccttcaaggaaagtgtctgggtacttggtcagtgtttgtttctgagtgatgtataagtatccaccaacgttgagggtcatcagagtggatttgcagttctttccctggtcagcatcttccaggctgttgtgtttcccttcatagtccttttctttttctctcctgtttattttatgctccatttttgaacacgctatttcagcttgttcttcttggcgttgagatttttaaaaaagaaacactaccacacaaacacgcctttattcagccccagcctggtgatggaatggaaatgctggcagcatcgcctgcgctgtcagctcggttttgcagtaggtggcgtatcagctatgtatgcaggagctttctggagtaagagggaaaagagataatttgcatttaaccgtatcagggaaggaacctgctgtgaaaaggttttcatagatattcttagacataaataaaagttactcagtgaattgaatttcctatgggcagttaagcagttatatatatttaattctccagctaagtgtgaatttttattcacttctcagtgtcaaaattaagtaggcaggcttaatattgaacaatactgtgacctttcagagaataatatatgtggaattgctatcatattttaaagtaaattataagtaggaaacccaaagagaaaggacctaggtgtatagaattttctctcctgtaaaaagtcacacattccacggtggtggtgtcattttagaaacaaaaatgagaatacttaaacccgttatttgtgacattgtacttaagtttaattggatttgcatgtgattctgatttggggaatcagtaagtgagaagaaattttcttaatgtctttcagcaaaaggttctgttattttggctttttaccctacaagtaaaacaagtcaaataaacaggctttacagtatttttttttttttttggttaagatttcttatgaaaaattcataagcttgtttcaccctaaacacactgaacaaagacttggactgctgtggaaaataccgtaaccgtgtgtctgtgtgtctgtgtgtttgtgtgtgtgtgcacgaacgagtgctccctcgagaagatgacagaggcagtttcaaaatacctgctataaaataatatcatgggccagattagttgggtttcttttgctgctgctgtttttttccccccagtgttcacaaaaagagagagaaaagaccaaagcctgttgccttttttttttttttttttgagctctaacagtgtgagtatggtgttttcccccgccccctttcttttttttccttcttccctcgtaaattgctttccaaaacatgttagggatctgagttttcatttcttgagtttaaagacccagtggtaagaaatgtgaacatggtccccagtacactattatttggctgatctacctgctaaattattctgaggaactacagaattagactttagattttgtcaaatttatttacattttttttacattaaaggtatttaaaaattttcaactttgatagaagtgggcttcccttgtggctcagctggtaaagaatccacctgcaatgtgggagacctgcgtttgatccctgaat

SEQ ID NO: 31569 - DNA, 1515 bp, Bovine  19866881078363
  misc_feature (1)..(1): n is a, c, g, or t
nctccagcagttccccgctgctgtcaataatggtaattataattatagagccagtcccctgaggagctcaaagcactttctggatgctgcggcattgatcctcataacacgagtggaacaggggaaggagcaagcgttgtcatcactttatagatggaaaacgtcaccaagggaggcagaaatgattgtctgttcacatggagcaggttacgatgttgaggttttatggattcagttgtgtgcactaattgctgggttaaaatgcagcaccgccccacccccgccccaatcagcctttgcccagaaggatgtcagcacaagcctatcacaaggactttgctctataagtgttagtgatagtagctcagtcgagtctgactctttgggatcccatggactgtaacccaccaggctctgtccatggatttctccaggcaagaatactggagtgggttgccattcccttctccaggggatcttcccaacccagggattgaatccaggtcttctgcattgcaggcagattctttaccatctgagccaccagggaatttgctccgcaatgcaaagtcattaaaagataagttagttctttttcttttatttgtatttttacctaacaagctatagggcagcttgttgtaaaagttatatccaagtaaagataaaagaacaaaggccaaatattatgtaatgggcatgggggtgggggcagcaatgggatgggggtaagagagtggtgctggaaggtatgtgtcaaaaccagttagtgccactgaacttagcatttagctgtgggattcctggctgctgctgctgctgctaagtcgattcagttgtgtccgactctgtgtgaccccatagatggcagcccactaggctccccggtccctgggattctccaggcaagaacactggagtgggttgccatttccttctccaatgcatgaaagtgaaaagtcaaagtgaagtcatgcccgactcttcgagaccccaaggactgcagcctaccaggctcctccgtccatgggattttccaggcaagagtactggagtggggtgccattggcttctcctggcagccaaggctaaaaagggaagctaaagatgtatgaaggttgtgtgcgtgcttgtgctcagttgccaagtcgtgtctcactctttgtgacttcatggactgtagcccgctaggctcctccatccatgggatttcccaggcaagaacagtggagtgggttgtcatttctttctccaggggatcttccccaaccatggatcaattcttcactgaaggcggattctttactgctgaaccactggagaagcccatgaaggtctctgtatgtgatgaaataccctgtgatgcgagaagaatttaggtgtgtgagctcaatcagataagttagcctaggaacaaaggtttcgttctgcatcttatgagggagcaccttgaggctagatcccaaagactggctgctcacacaccatgcacatgcacacacacgcccaccctca

SEQ ID NO: 31570 - DNA, 1712 bp, Bovine  19866881122194
  misc_feature (1)..(1): n is a, c, g, or t
nttttattttcaaagaatacataagagtgtgagaaataattcagtactatatgataaataataaaaaagattcagactatttctcacttaaactttttctttttaaagaaaatacttaggaaatacatcaaaacgataaaagtggttctgagtggtggaattataaatgatgggtgatttaaatatttttctttataaatgatggattatttaattttctctatttaggaactttattattgaatgcctcctaaatgcttggcattggactgggaactgtacagtagtgaaaggagataacaaggtccctgcccttgtggagcttatattcaggataaataatcagtaaaggaataaattaatcaattaaagattgtggtagatgctaggtggaaaattagctgagtgttaggttagaaaataagagtggagctagataggatggtcattgagcacatttctttcctaaaaaaaataaaaccttaaaggtaatacattttattttttaagcttactttataaaaatatggaatattttcttgagctttcagttcagagctactgatttttgtattgcatttcatcattcacattgctcttagcttacagaacagattgtatgatttttctattttgcaaaatttttaattttgaaaactatggtacttactatgtgttagtgctttatatctgagctctgtaaaacgtttgtgcatatgttttgtctccatttaatggatgccctgtatctcagagaggttaaataatttgaccaatgttctacagtccgtaaatgactgtgaatctgaattcagtcttttttactgccaaaattcttgacgcataggataaattttaattatgaaaaggagagagatgcagctccacacaattattttatatgtagcaataacaatatttagtctttctctctgtaagcttttggttggtatataggccaagcaggagtcatatgacatggtttgtgttatattttctgaataattttttgtttgctaattacctgccttctctgtcttccgccttgtgtctttaggatccttcatctgtacctaatgcagacaatgcctttacactattttatgtgaaatttcgagctgctgcccccaaagtcagagtaagtctattgacataaaaaagatactgctatgaaatttatttagccagccctttggaaacgctaatgtatgttaggtccattgcttataccagaaaaatgagcatgaatgaatggtaggctttgtccttccacattacagcagtatatgttgaggggctttaagcccacagagcaggaaacacctagctcttctgtgatgctcaaggaaggtttccagatgaagctgatatttgagcttaaaaagcttgaatttagagaagacttggggggattgataaggatgttttttacagagagagcaacaggtacagggaaggtactagaagcataaaagacatgtctttggggagaacctcatgtaatttgttgatgctagaacacagactttagtcgagtgtgatgataagtgagaatggtggcagagaccatctcaggaagggtgttccatgtcatgctagttcaggaaaagcagagaaccagtacaatattttaaaccagtgtcatcccagatacagccgactggagctgggttgtgtatctttttttttattgttgtaagtttctagaaaga

SEQ ID NO: 31571 - DNA, 973 bp, Bovine  19866881223734
  misc_feature (1)..(1): n is a, c, g, or t
ngagggtgaacacagacagctctcctaccactcggcctggctgctcatcagaatgaattctgagaaacatccaacccaccgtgttctgccattatttcgaggattctgtttccacccttctttttacaacatctgcatcactgacgtgcacagctcagacaacatgaagctcatgggctgggcacattggaggataagaatggaaatgacattgagtaagcggtgaagtaattagaaaaaaaaagcaatgggtttcagcgaggacaggacaaagcaatctacccagccaagaaaaataaacttcataaataaaacatgattaatgtacaagctataaataaacataagaggaaaagaccaaggtcataggagataaaaatctgacagccagtcagcaccgaatgactccactttcagaaagcaaatacaaggactccagcgcaggtacaagtgtgaagtcctcctctcacgacactcaaaagtgatcagaaactctcagggagatacagccagctttgtactgctgaactgaaaaggaatgttgaggaaaaatcaaacttggaagggattcagaagggactcacagatgattaacaggatgaaaaataaaaacctccaaagaaagatgaaaggaactggaacaacttgcagcctttaaaaggagaagaagtgacaaaaacaccgcaatcttacagagaagacggccgacagctgttcgccatctgaagacaaactccacacaagcagcgatgatgagggaaaaggtgatgactttcacaggccccacagcgtctacacacgtaacgcacagctgctcaacacttctcacatctctgaaattcacttattcttactgcttgtatttccataacacttctcttctgagtactgcagaccaaccctgacttaacatcttgggctatatgctaaacccaaggacttggccctacagtgctgcctgaataagcaagca

SEQ ID NO: 31572 - DNA, 984 bp, Bovine  19866881231575
  misc_feature (1)..(1): n is a, c, g, or t
naaatgacgtctttataggggtacttggcaccacccccctgctttggccgtgctgcttggtttatgggatcttagttctctgatcaaggattgaacccatgccctcaacagggaaagcctggactcctaaccactggaccaccagggaattccctggcgcacatgcctttttaaaaaatcatgggccaaatgtggtattataatcctttttaaattaatatcatacttcgcaactgaccatgtatactcacactagtatttttgtgagagttctggtgtgttctctgatcctcagccctctctcttggagggtctgtgcatccaagagattttagaccctagtgtgtttcctggggacaccacacatgaagcagactccagtcggcccagatgtcccaaggctgaggttcaggaaggttttacccaggaagtcgaggtgcgctttctggccacatcagttttcccgtggctgtgtcactgcctctaatcaccgcctgtttctgctgctgtccccgtcagtgccggctgccagtctggccaccgtcgtctccctcgcctgcctctgctccaccagggtgacggtcacgctgctgttgcctccactcggcttctaccctatctccccgcaggccccggggattctgtgctgctcacccctgcccttctcttcaccgggactcttctacttcccctctgagctgtggttgtgatgctggtaaagtttgctcaggtgctgctgcctcgcctctgttttggatttcagcacccagtttttcatttatgcagtttctctgtattctccagctttttgaaataactacttcaaagccacagacctttcccattagaatataatttactcaggaagacagttgcaagggaaaaacaatacacagtatctcattatcggaaaaaaactatcatttgttggggacaattttatttcaagactgtacaattcagaaaagaattcaaataaataac

SEQ ID NO: 31573 - DNA, 1165 bp, Bovine  19866881287693
  misc_feature (1)..(1): n is a, c, g, or t
ntgtttttatgagtgacatttgactgatctaatgtcctcagggtccatccatattgtatcgtgtgatagaatttccttccttcggaaggccaaacaataccttattgtatgtgtaaatattttatttattccccagtggacacttgggctgcttccacctttgggataatatttttaaatttgtttcccttgacttcttgactttttttttttaaagaaatttaagctcccacactagacttacagagccagtaaggactggcaaattatatctcccacataactttcactacacattcccaaagagtaaatatatgtttgaactactgtttttaaaatatttaccaatgttttctctctctagtgatttccttgcctctccttgctttctctgtttgaaaaggtcaggctgtgttcattgcccctggacaccacatttccaaggctctctctgatggctgttgttcaacaccgaggggcctaaggaaacagaaccaggcaggactctgggtatcttagcagagagcttcagggacagatgaaactcaaggcaaaataaccgccctcagcacttcctttccccgctctcctctctccaactataggcctttgcatgtgctcagttgtgtcagactctttgtgaccccatggactgaaacccatcaggctcctctgtccatgggactctccagccaagaatactggagtgggttgccatttcattctccaagagatcttcccaacccgatgatcatactcacagctcctgcattgcaggcagattctttatcgctgagccagcaaggaagccctatagccctttagcccttcagaactactgaaactttggggacccccaagttgactgcaactgtatttctaccaccatggttgaatgggatcttgaaatagacattaagtcatatttctggctcacttgagccgtggactatctctacacctatacacaatgaatgattaatttttttaaatttatctatttttacaactgtggctgccctggttctttgtttcggcgtgcaggattttctctagtcgcagtgcagaggcttctctagttgcgcctgtgcggggcccttagttttcagaccagggatccgtccgcagtcccctatattgcaaggtgggggttttaaccactgga

SEQ ID NO: 31574 - DNA, 1360 bp, Bovine  19866881397172
  misc_feature (1)..(1): n is a, c, g, or t
ngcagttgcaaaggaaagccaatattgtacttacaaggcatttgactgtatttcctccagtcacccatggcagatatgctgtctcctgatatccttttctttgtggttgtagaatgttcacttgggatgtggccaccctggttaaaaaccacatctcccagactcctttgcactgaggtatggccatgagacaaagttctggccaataagatgtgaatggaaggtatgtacgagcttgtaacgtgagtgtctttccccttctttcttttttctggtctaaatacggatgaggcagtgaccctcatgcagatgagggcagtattccaaagatggcagaacaaaaaaagtggaaggcaattgggtcaatgactccaccactgccttgcaagccattagtgctttaggctcacgtgagagtttccatgtgacagaacacttcttatcttatttaactgactgttatttggggtctggctcacaaagatgacctgatagtctcacccgttcctaccttctccactaaaaatgtcagcagtaccatccccattttgccaaaggtaaagagcgggtatgcctacatcattcaataaaaccagcagaaatgctcgatttgagccagtacctcctgagacttgcttttctctgcctcctctgctacccaagcttctctctcctccctgttcttggccttttcttagctccttccaacctgatcttgctcatgagaattcatcaggaggtccaagatgatctgagtaaaggatattttgagggaccctgagaaggcttaccttcagtcagcagtgctctttatgttcccagagggaacccaccccattcccttttctcagcttccccggaggtttcatttactgcacccagacagagcaccattccttcggacttaagggtgcttccagaacttgtgatctgagcctgtcgctgtggtttgctttcagcttatcagagacccctgaagcatgaatactctttgccaatgtcaaagcgcattcagtggtctccactggccttctccctttcttcatttgttgaaaatagatgtccctagtgtcctgaaggctcccaacagaagcagccaagaaagaatgtgggcaagtcagctcattcagacaacacgtgtgtgtggagcacctgctcaggtaccttcccaggcactgaggatgcatcagagagcaagacaaacaagttccctacctcccagagcttccattttaggggagacagatgaggaagggaaacaggagcaaccaggaaggagagagagaggaaaggggacctagaacagggagaacagagagtagattcatattgggatgaaagcatgatgaagaaaatacaa

SEQ ID NO: 31575 - DNA, 831 bp, Bovine  19866881579707
  misc_feature (1)..(1): n is a, c, g, or t
ngaattaaatgcatttcagaaatgattttttagacatgttcaaaaaaatcagtgacagatttcctagagtaatggtttccatcaataaaattttgttataacagttaaattttcttttgtgaactgatgcaaaagcctcacttataatacttctaaggagatttgtacaaactatatctcctgtaaaaaggtgtgtcagggctatttttattatctgaaatgaaaccttgttagagaaaatcttactttgacattaaatcattaccgtgtttttgtttttgtgttttacattacaaagtccaaatgccaaggaaaagtcagctcataagctggagaggtatgtagacagttcaattatagtgactgataaaatagattttagtattttttttctgttttcatagttcttttgaatcctgattaagcctttttaagtacataagggataatttgatgttataaactttttttcttgttatacaaaaagaaaattatgcagttgatgtagagatttttgtttttaacatggatttttaaaggacttttttgtacagtaggttttaaaatatttcttttagtatgtacagccaacttttgtattaccttagatgttgtaatgggaagtcagttacagttctgagtgaatattagctctcctgagtttttatgtataagcaaactttttgcatagatgctaacttctgtaacctcagttaagattttcagaaatattttgttaaagtttattaaagtcaatatttaatgaccagttttaatggttaaattttaaaggagtgaattaagatgttattgtacttagaagtcagagaa

SEQ ID NO: 31576 - DNA, 678 bp, Bovine  19866880416757
  misc_feature (1)..(1): n is a, c, g, or t
nctccccattggcccccaaaataaatggcatgctcttcagtatggtgtctctgagcaatctgactcctgcctgtgggggccccgcccagaccctggagggcacttctcatcattagtcacacagctctgggtggcgcacttgccctgcccctgcttccccacttaataaacgctttcataaaccacagtcgtgcccaccatctcatgaggcttacactagctctgtgagctctgccactattcctctttgaaagagaggacttggaggctctgagaaatttggagcattttcttggttcttgtctgtggtggaggcagaactgattggccttcacatctttttgagggttccttttttgcggggggctgtgagtgtgtctgtgtgcgtatgtcatataggtcctagcagtatgtcatgctgctggggtgtcatgaagcttaactctcagggtgcaggcctgaggcagggagaggtgaggtatgtctccaagggtttctcctcccagttcctctcaagcgatggccagcagactggctgtgttagcccccagcctaaccctgagcccaaagtatgaggagggagtgggctgggtaagcatgcagggctcacctgtggtattgtgtagcatcttgtagtagggcctctggcaggaatatctgatctcagacttgtatgtg

SEQ ID NO: 31577 - DNA, 1407 bp, Bovine  19866880437975
  misc_feature (1)..(1): n is a, c, g, or t
nttgttccatgaggagtaagatgagatgatccctaaagtcctgaaaattccagaattttaatcttaattctcctttccagggctttccagatgatctcactaaatcctcattatcctaggtaggataatgccagaaaataataatatggtacaacagccacttctccaagttccttggccataagcactctggtaagagaccacagtctgctggagttgccttagtgacacatcatttaaagagaacttgtaaatatatcattctagtgctgttctttttccacggaactgtgaatatcacacatttccttccagtgagataatactcctgtcctggggatctttcactctgtgactgaattcccctggcaggcctgggagtgggagtaaaggaccctccagttcacaggaatcctttcttcccagccacagttccacagactgcccttcccatcctggcccatcagggtcatgatgacggaattgctgacactgcacatcagcagcttgaagaagagcaggaccccaaggctgtggtccagatactctcactttatgaaaattcctctccagcctaatctcccacagtccttggtcttcaaggctcatgagcatctgcacgatagtatttgcctccttggaatgtggctgcaatgtagggactcctgcagtgcacaaacaagcgtaggagtcccatctggttaatgccacaggcgaggggcagagcacagacatggcccagggaacaggaggcctggattcttgtggccattctctataactaagaaaccctgggcaagggattcctctctcacataaaggagttaagccagatggtctctaaggctcatctagccctgatagtctatgtatcaaagaccccaggaatcatggttcaacttcatgatcatcacactgaagcccagggaagggcaattcttggaccaaggtcacactaggaccagaatttatatctcaaaacattcagtctttttttcctttaaaaatattaagtcatactgaaatcccccatcatatggatgcttacgcttttaagtgtaatgtaacacaagtgttgtatggatgtgagagttggactataaagaaagctgagtgccgaagaattgatgcttttgaactgtggtgttggagaagactcttgagagtcccttggactgcaaggagatccaagcagtccatcctaaaggaaatcagtcctgaatattcattggaaggactgatgctgaagctgaaactccaatactttggccacctgatgtgaagagctgactcatttgaaaagaccctgacgctgggaaagattgagggcaggaggagaaggggatgacagaggatgagatggtttggatggcatcaccgactcaagggacatgagtttggggtagg

SEQ ID NO: 31578 - DNA, 635 bp, Bovine  19866880444394
  misc_feature (1)..(1): n is a, c, g, or t
natgaggattctccaggtaagaatactggagtgtgttgccatgccctcctccaggggtttttgccaatccagagatcaaacccaggcctcctgtactgaaggcagattctttacaagctgagccaccagggaagccccagaggtgtcctaacaaggtcagacttgacctctgtctcaataataggaaaacttgttagaaaaaaaaaaaaaaaaaacaattgcaaatgaattgagagtgaattcttgcagtggagggatgggaaataatgaaaaacaaagtcattgtcatagctaaagaaaaaaaaatttgcaattttctgtggtcttgaagcctcaattactaataaaggcaaatgtttccactggcaaaatttctagatgtttgacatgtttgaaagtagataaaaagcagttaggaagttcacatctagccttgtctaaatccatggaatttactcttgtattaagcaatgtttggtcattttccttctgctaagttcactttccaacctaaatatctgagaatacaatggtggtacagccagcattagctaggggaatgggctgggggattccgctaaccaaatgccccttacccataatacatctgggatccggagttggttcttccagag

SEQ ID NO: 31579 - DNA, 3603 bp, Bovine  19866880452433
  misc_feature (1)..(1): n is a, c, g, or t
ngaacactggagtgggctgccatttccttctccatgcatgaaagtgaaaagtgaaagtgaagtcgctcagttgtgtccgactcttagggacctcatggactgcagcctaccaggctcctccgtccacgggattttccaggcaagagtactggagtggggtgccattgccttctccgttaatatagtaggtgaaactgttattggggcattctttatatattaacaaaaatgcttctaaaatatttggtcaagttcctcaatgaagtttattcactcaaacattcaaccattcattcattaaactttcattgagcccttgctatgagcctgaaagtgtgctaggcattgaatccttgtctttaggaaagtcataatccatgaggtgatacagacctatgaataaacacataccctataaacactgttgggagaaatgaactaactgctaaggagcacagggctaggcctgaccaattgcctgggctgatgaaggaggacttcaagttggaggtgacattaacacttcttagaggagttttccaggcagtgcaggggaatgacggcacagcccctcatagttctcgccatccctataccccagactactcttagcctgacctccacacctgtaatgacaaaacacacaccacactaatagtttgagacaagcgaagagcagaatgtttcttcagatccaagatgccatgggattcaagacacagacattgctggaccaacgtgattatggggaagaaagggcgtgagtaggcagaactgaggatccatctgggcttcttgtatgagacagaaactccacccacgctttgtcagtcatgtgttcctctaacaatagaataaagcaaagtcttctatatcagagagaaggacagaggaccggtatggagaagactcagccaatgacttgttgactgatagatggtcagctgaccacttcctcttcctcttgactacagttcatacaatatggaactgatattgccaattgtgatgggattacagaaaaaaaccttttctttaaattatttttactttttctgtattttccatattttctgcaatgagaatgttttaatttaccttaaaatgttaacgtatttattaacctttaaaaaagtgaaaatgaagaggttgcagtaaatgacttctgagacccactccaactaaaaatctgattttaacctccaattaaaataaataaatttatattaaaaaaaagaaacttaaaaaaaaaacagtatggaaagcctcaataaagtcaccatgatacttaagataaaaaaaaaaaaaagagtagaaatagagaaaataagtagagactattgacttttggtggcagtaatacattatgctgatgatgcttctttatagcagctctcatttactgagtgccaagtcttatgtaaaacactttatgtacatattcaaatatatatctagaaatatgtagtatatactgctactgctgctaagtcgcttcagtcgtgtccgactctgtgcgaccccatagacggcagcccaccaggctctgccgtccctggaattctccaggcaagaacactggagtgggttgccattgccttctctattgtgtgaaagtgaaaagtgaaagtgaagtcgctcagtcgcgtctgacttgtagcgaccccatggactacagcctaccaggctcctccatccatgggattttctaggcaagagtactggagtggggtgccattgccttctccgatgtagtatatatatctagctatttatatatctgtagacatggcatatatctgtatatagatattcacataggtatctatatatatatatatcatatatctctagatagatatttatatatagatgtagatatattcttgggataagaagaagcaaaatagtgaagtgcctggggtcctttggacttggagttaagttctggctggatctacacagtccttatctgtctctgatcccagttctaataaaatttaaacacagaaacatttcctctttatgtgagcgtcagcagtatctcttccccaggtccagactgtctcaagacccactactggtatatcagtccctatctcctcccttcagtgctagagctgcaagctgcaagagtgaatgcctttagatcaggacacctctgagtgctggggctgcaaagaagggcagggtctgtgatattcaggagcaactgggagctcccacatccagaaatctggctacaggtgcagctcattgcctatagcacatccccaccctccactacaggactagagtcagattttggtaaagaaaaagcattctcagctggccttaaaggcaacctctaataaaaactgagcatgttactaagaattgctaaagatttaaggaaaacaaactgataagaaaggaacaaaactcaacagacagaaatactggcaccctaggaaagacaaagtggactagacgaaaatggaaaaatgtaattaatacttacatttatgaaacatgaatattatgaaaaatacaaattggagatttcaaaaatgattaaaaaaatgcatgttgaaaagaaaaagtgaataaatgaggtgcagagcacattagacataactgaacagaaacgagtgtgttgtaatacagagctgagctaactgcctgtttttatttaatttatttacttatacttttagtaggaagataattgctttacaatgttgtgttggtttcttccacacaacaactcaaatcagtcatgagtatatatatgtcccctccgtgttaagcctccctccccactcccatccaacccctctaggtcaccacagagtgccaggttgggctccctgtgttatacagcagtttttcactagctgtctattttacacatgattgtgtattatgtgccaatgctactttctcaactcgtcccaccctctccttcccccactgtgcccacaagtccattctctaggtctgcatctccattcctttcctgcaataggctcatcaggactatttttatagatttatttatatgtgttaatatacaacatttgtttttctctttatgacttatttcactctgtgtaacaggctctaggttcatccatatcacttcaactgacacaaatttgttcttttttatggctgattaatattccattgtatatatgtattcacagtgtttaaaatagaaggaccaagagccaaagcatacagagaaagtaaagatatgttgaggacaggttaaaagtccaatatatagataataaaagttgaaggtggagagaaaagacaaaacaaaagagagaaaaatcaaagtaacaatagcaaaaatatcccagttctggagaaatatgttttagatggaaagaatcacaccttgcttctgagtagaatgaaaaaaacaaaacaaaaattcaaccttagatacatcctgataaaattttggacactgaatggaaaaaggaatctaaaatcctcagaaaaaagtacctacaaagaaggaagaatcagataaacaactagcttctgattatcaataatgctacaagggatagtggaataatatcttcagtgttaggagaggaaataaat

SEQ ID NO: 31580 - DNA, 1320 bp, Bovine  19866880571794
  misc_feature (1)..(1): n is a, c, g, or t
ncaggctgtgctaactgcttcttgaggttttaccccatagcaggtatttgaaggtagttatcagtaactcctttttgcaggcgagggactgaggtttaagcagatttggtcacttggtccgaatcacgccgctctcaggggcagactcgcggctggaaccaggctgggcgaccacagtgtgcgtcctcagttgctcctctaatccgcctcccattgactggcttcccaaactgcagtgtgttcataaatgactggctttagtgatctcagcctgatgaggcttcaaagaagagagacctgtgagaacacgagatggagcagcatagattaaaattgtgtattttcgcaaatgtcttattctcagctaatgacctaaaaagttaggaatttttaactctgtaagcatgaaaaagtaaacattgaaagtgaatacagtgcaaaagagaagtgggcttttgaacatgcagacctaccattcgtttttccttagtgaggcttgttgaaaggaaaagttctgttcagttcagttcagtcagtcaggtccaactctttgcgaccccatgaatcacgcagcacaccaggcctccctgtccatcaccacctcccggagttcactcagactcacgtccatcgagtcagtgatgccatccagctatctcatcctctgtcgtccccttctcctcctgcccccaatccctcccagcatcagagtctttttccaacgagtcaactcttcgattgactctaatgatttttgttagatctcaggatcaaagtccttccatgaaatcacatatttgaaatgataactgcagtctatagaaaaagattattttaaagtttagttaaacccctccaatgttttatgaagtacataaaaataaagattctagttccaattcatggaagtattaggttctacctgaaacttcaaccacaattccagccaggcaggcaatggtgacttgaagaagaggatcagctaacacctggaatattctaaacattaccattaaaagaaaaattggggaaggaagaaagaaatctagttccattatagatgaaataaaaaccaattacatttagcttctagaaaacgaagtccaaaagaaaccaaaaaagcaaaagcaaagagttggggtggggttggttatcttggcagcttttattcctaagtgctgcccatttggggaagtataaaatatgatctcatcacttctttctgctctagagaatctaatttgggtctacttttcttcttttgagagcctatgctcggtttcagaccatttttcctggcagtcatatgaaggaaataaa

SEQ ID NO: 31581 - DNA, 1393 bp, Bovine  19866880583737
  misc_feature (1)..(1): n is a, c, g, or t
ntccatggaatcccatggacagagtaccctagcagactacagtccatggggtcgcaaagagtcaggcacatcttagcgactaagcacacacacacgcacaccagctagcaaggtaagtgcagacacaagacagacgataaaatccctgttccaggctcgctgatctttcttctccaccactatttggcctcaacttcttccacatacacagtgagtgttaacatttttcagagaccacatactgcggtacaaagaggtaactcataacagtagctaacatttccagaacccttactgcatgcctggcgtagttctgaatgtgcctggcacagtgcctggcacaggcatatgatttggtccaagcaataagcctgtgggtgaggttcacgtttgttatcaccttcattgtatacatgataaacgagtcacagagagcttcagtaacttgcccaaggtcacacagccaggatttgaatccagagagtccaactcagacccacacatatagacactctgctttgctggctcaaaaagcaataggtcctactgctgattcctatgtgtccacaggggcttccctggtgactcagtggtaaagaatccacctgcagtgtgggagacacagaagatgtggctttgatctttggattgggaagacccctggaggaaagtgtggcaacccactccagtgttgcctagagaatcccatggacagaggagcccggctggctgcaggccatggggtcgcagagctggacacaagtgaagcagctgagcacacgcacacacacacgcgtcctcagacacagctaggatgcatctgtgatgcatgggatgacggggagaatgcacagggtaaaagatgcaggacatgtcctgccaggccctcgacatagtaggccctcagtaaatcacagctctgaatgttgctgagaagcatctctcagtgacagagcccagactggcaaaagcttttcatggtaatgaaagaattaggcaaacagaaacgtttaattagctgtttattttcagattacctgcaccgagttgagataaaaccttaagtgcatcactccagttgtgagaaagaggtaggcgagagtcaaagtttgacattggacttaaaagctcttaaataattacggcgttcagaataaacaaggccttcatgcttcattaggcgatgtgtattacgtctccattaacacactgtggcgcttttccatttcccattttgtgaaccatgctgagaggagagctgaagtcatcgatgttaattgatagctaacagaaacaaacttcctaaaaggggaatgattttttaggtcctaatttgattaattattaaagctcccagaacctatcttgatggggtgacaggaaaacaagataa

SEQ ID NO: 31582 - DNA, 1383 bp, Bovine  19866880587749
  misc_feature (1)..(1): n is a, c, g, or t
ngctcttggcggtgtaccggcgcgccctcggatccccggctccgtcagtttctgcagaaatccctggctgctgccgctggcaagcaggtaaggagactcccttgacgtcttctttcccctcacccgaatcccctaactttccctcgccttgcccctgctcccttgggtgaatttgaggtgctcccacagtgctggtgcctttttgggtcccttagccaccaaagctctcgggaaaactttcaaagtccagaatacctttttacctttttttttttttctttcccgatcagcgcagtaggtcacagttcaggtgagttctgtggcattcaagacaattccaagaccttggttaactgagctcgaagggataatggcatctctcccgggtactgaccgcgggaggtgctgacccaggtgctgaaagcgcggacctctgaagcggctaggcagtacctccctcccatgcagcgggactaggggctaaaggacactgtacagccagaacacaacatgtttacggttgcgaaaggtctcattccctaaaaggtggcttagtaaaaacggtaagaacaattctagtttgtagctcatgatgtggacattgagctaatctattggcttatgtttcacctttgcaaaactaacaatctatttccttctttgtgtgtgttttaaacctacagaagcagaaaacttgcagaaacatttgagtttttaaagcttctttgtgtaattttgtggctgtagcaacagcccttgtttttttacatccttaactgattttaagtgttacaaaaagtccacagctgggaaaattggggtttggttgtggttaaacctgtatttcaagccaagctcttctggtttttcttcttcaccatcctcattttcatcctctttccttctgtcttccttccaccccatgcaggaactggccaagtacttcttggcagagctgctgtctgaacccaaccagacagagaatgatgccctggagcctgaagatttgtcccaggctgctgagcaggatgaaatgaggctggagctgcagagatctgctaactcaaacccggccatggcaccccgagaacgcaaagctggctgcaagaatttcttctggaagactttcacatcctgttaactttattaatgattgttgcccatataagacctctgattcctcttctccaaaccccttctcacctccctaatccctccaatcctcaataagaccctcgtgttagaaattgaagactgtaaatacaaaataaaattatggtgaaattatgaaaaataagattttggtttcttattgacttaaatatttctgttcaatgatatatgacttaatttgtgatttcagtcaagttatttaatatacat

SEQ ID NO: 31583 - DNA, 957 bp, Bovine  19866880676268
  misc_feature (1)..(1): n is a, c, g, or t
ncccgaagtacctttttcctatgagcacattccgtggctgattgattaggggagaccttttaatgaaggcattaataaaagaagctccagtgccagaggggtcctgcactaattaggatggtgccactcaggagaacacccacacagacagctctgggtcttctccacggcgggggtgcagggagctgccggttgttgctgcccccctgccctctcctccccacctggggcctgtttgttaaaatctgcttcctacacagtcagccccctgagaatgtgtgggcttgccccgccccagccagaacctggggaggtggctctgttaaaccttctgggacaccactatccttacagaaagcatcgcagctgtgtatgtttccagggaagatggagagagggcagtacgagaccttcccgcctctcagttccctcagctgagcagagaagctttgctttcctcccttcactctgtcctttattttataaccttccaaagtgattgactttcccatctgtatccgtgttttccagagaatttatagatacatgcacacatatgtgcatatgaaaaacactggctgattgatttttagacattgtctggtgcaactgtgcatgcgtgctaagttgcttcggtcgtatccaactctctggtgaccctgtggactgtagcctgctaggcccctttgtccatggggtttcttcaggcaagaatactagaggggggttgtcattcttctccaggggatcttcccaacccagggattgaacccatgtctcttatgtctcctacattgacaggcagattctttaccactgtgccacctgcaactgtaggggatgacacatccagaatttggagagcaagccagcaggggaagctcaggctgcagtcctgagacaatttttcttctccagcaaacttttggtttttgttcctatagcctttcagcagat

SEQ ID NO: 31584 - DNA, 1563 bp, Bovine  19866880686029
  misc_feature (1)..(1): n is a, c, g, or t
nttgactcccctttctcttagaccccacatctgagtcatcaacaaaccctctcagctctaccttaaaatatagccagactcaatcccagttgctgccaccctgttacaggcccccaccctggaacaggccactatcccctctttgctggattgttgcaccagcctcctggctaatctttcctttttcattgttatccctctgtggtcattctcaacacagtgacagtaaactgaattacatcaccccactgctcaaaccctccaatggcatcttatcttgtttaagttaaaaatcgatgtcctgataatgacctatatggattctatgctctgaatccatcaccccattcccacttagtaatggctactaagcctgaactgcattccagccacgttggcctcctcatggttcagcattccaggctgctcccacctctgggccttcatatgcccttccccttccccttacagtttcttcatctttttttttccaaatgtcacctcttagtgagaccttccctagctacctaatctaaaactgtaactctgtcccctgcccttcctgtcccccttgcctctttgattcttcttagtcctttaactagtgtaccacacagcctacttatactgttttctgtctagttcctctactctccataaagtcagtgatttagtcactttgctcttccatgtatcccagcacctagaacaatgactggcacataatatatactcaacaaacattcattgagtgaatgaatcttgaaaatactgagtattttattatgtcctcaaaataaaattataggcctattaagatggaagtgaagaaaaactattgggcttattttagaagagagagaataagacacaggctgaaatttcatcactaccacacaagtatttgtataaggtgacacctttcaaaataactacctttcaaaatgtgaatacctttaaagagaggttgagtcaaagtaagacatataacagtttgctgccagaaaggaaaggaagatgctatgggcgttcagataagaaggtccaactccaagctgacctaagcagacagaaatcttggtgtaacaactagatgacctattagagggatcagggtcagggcaccatcccaaatgcctgaggacaaaataaggctaagcagaagtttttgagtgatgtcagagctagtagggactcttcagatcaccttacctttttacttgataagtgaggaaactgagagccagggaagagaaaagactaggtcacccaaggtcagcagcctagatgcctagataatggctaagccagggctgaaactcgggtttccggctctcaggtcaatgagttttctataccaccacccaccctcacaaggtcctgtcacaacaaagccataaaataggcagctttcattcccctgacgcatgcagcagtacccacgcaaacgccgaaaacgttcccaaaggacatttcttagctgggagtcctacagagaaccagaatgggacttggaaaagaactaaattccttcttggctatttcagccaatgggaatggagc

SEQ ID NO: 31585 - DNA, 715 bp, Bovine  19866881002940
  misc_feature (1)..(1): n is a, c, g, or t
nctggaaactgaagtgtggggcaagtaatattatggtaatattgtgtataggagagataataacaactgtgtatgcctgctactgctcatcagaaataattattacatgaacacagtccaccccagatggtgggaaatccagccactactactcctgatacagaccatagttgggagacaaatacatggcaatgcagggcgggcatggaaaacactggtataggacaggaattctcctgaacaactaatccaaaagtgaggtgccctgaaatggaaccagtcagccctcagggtggctaggtcaaccacaactttaaaaacccagtacatcagggaaatgtatagaaaacaggtgacccaatcccaatttcccatggacatccacttacctttgggatatctgaatggtaaacagatgggtcccacacaattaggattccttcattgtacaaactgtctttgaggaagcctgcttctgtggtgaccaactgcaggaagaaacagacaggctgtcacctggacatttacatgtgagtgttggcttgtagtactgtctgtcacatcgtaagtgccacctgagtgaggccctagagcccagtgaagtgtcttaagttttggggcagaacttgtgagaagaaggcaaagatgacagctggaactgtgtggaccttaaaggacatttttgtcataacccatcagccacatagcagaaaag

SEQ ID NO: 31586 - DNA, 1844 bp, Bovine  19866881055951
  misc_feature (1)..(1): n is a, c, g, or t
nactcagaaaatcaccccagtatttcaatgtgctgacactttgttgcttactatgttactgtttcatgtacaactatagaaagcacatctattcaagtcagtatacaatgcagacaagcaagaaaaatatatgtttttccccaatttggttcttactgagtaagtcactgacaccaaatctaagcaaattctcaagagtttatgttccagaagattactgcaaatttcactaatgaattatttccgacactctgtaatgcaaccacgtccccatacttgtggagatccaccttctcttggaagccttcccttttccactctctcatttaccacctgctcttggtttgacttgacgaaaagagacaatcctactcctgcagaggtcaattttgagataaattagatctattttctgtgggttcctgagggcagttttccaaatgcattccaagcaaggatggtggggggccaacaagtggatctggttctttgtaactccaggcccagcataggaaccacccctgcccccacctgcgtgcttgtcagtaagtatggagtaaatggatggaaagactagattgcactcacctgggcatgaaatttctggattttttttttttttttcaaactaggtttatttaccttaaagtcacacacactgcacaaccacccaaagacccttttaacagtctggcagacatttcgccttgtttgtgaccaggctgggcctcttcctttgagcacagggctcacccaatggggttatcttcccatcatcattctctcccactaaaaagctgatgagcactcaaccctgctgggaggtctgaataagcatgcatcacatgatttactacccgccacacccctgggagatgcatacatgttcttcccttgacactgtgtggatgcagtccacaaggaacacaggagaggagggttgacccaaccggactctccacctctaaaggctgagcaacttccactccatccaaacagcctgtgcagagactgggcaggaaggactctcactgcacaaggaacactggaacccaagaagttaaatagcatgaagagctaaggagggtctctcttctgacttcccgctgcctttcattctgtgatcatactttaaagcacttccctactggaggagcaggaggcagaggaatgtggggaaacccagggcaagagtaaagagaaccacttagtaaacactaaagaaaaccaatccccaatgaaaactattaatataatactcctcactgaatctaccactgggatccatggttttgtttaataaccaaaaacctgtgtaagtccttaaggaattcactctctgacttaaaaaatgtgttgttgtaacaaccatcataactttgactgtacactggggtaccaacaaaaaactcatttgacataagtttcgctaaagcgcaaaaagggcactaacagcagacaccttgttgtgtgtccctgggcaagtgatttctcactgagcttcagttttttcatttagaaaaacaggccagctgatttctaagttccttacagggtgagcgctctgatgagaaccatattcaagtgttaagtggaattaccacaaaaatgaaaacaccctagaaaccttaagagaaaccagtgtagttaggaggtaagaggaacagggtgaaacagcactttggggaaacccagactcaaagtgatgtctttggttttccaatgtttcccctgacaaatacaaaattaaaaagctacttccgtgagactctcatctctaaaaacttaattaaataaaatcagtgaaaacaatgctttgttctcccacaagtgactcaggaata

SEQ ID NO: 31587 - DNA, 1066 bp, Bovine  19866881127382
  misc_feature (1)..(1): n is a, c, g, or t
ntagacatcgtccatcatcactattctgtggatgaggtgaaggaggctcagagaggtcaatgattcagcccaagtggcttggacggcagacctggctctcctcatgccgccttgtggtgtgttctccagagaaacatagcaggagcagacccagtcatgcatgagcctctccaggaagaagcactaagatccttatcactcagccccatgccctcacccctgcgttaggcccctcttgcatgccgcctcaccagtgctccagggaggctgagttcctaggtacctagggcatttgatgaatgcctgcagccctaatcaccccattaagatgagagcaaacaaagagagggataaaataattgccaagtcaacaacctgaacagctggctagaataaggtcaacacggtgattgctctgctccaacaaagaaaagcgtggcgactaaggcttcccactatctctttttgatggatgtctccctgcctgtgaactgcagagcagctcatggaggccagtggttctcccacccctactgcctgcctcgttgcctcttgatagaagtgggccattactcttcactaaaattcattgtccacgcatttgacacttgacaacgctcgggaaattgatccactcaaatatttttggagctaaattaatgtaatttgtccttccagggctccacaccagcatcccgagagatagagtcagtggtaagaggatgattatgccttcctgggaagggagggaagtctcattggagggagataatccaaaatcttggtagtgtgggttataaaatgatttaaaaacatcaaatatcatttgcactgctctactgcttacacagaacactcatgtacattatctgtgagatatgaacctcacactgcctgtgaggaagctgggaaacatttgactctacattttacagaagacagaactcagaggtacatgactggcccaaggtcacacttcagttggttaaagatcaagtacttgaatccaggcttaacggccctaagtgatatgttgtgtgtcactgatatggtgtgtgtgtgtgtg

SEQ ID NO: 31588 - DNA, 901 bp, Bovine  19866881136306
  misc_feature (1)..(1): n is a, c, g, or t
ncgtggtttcaagtgattcatacacaaacaatccaagcttcccttctcctttgtaaactggctgatggagttcagttcaccacatatttatgtcctgacattatgtcagatctaaagacacaagttcctgcccacaaggactgatagtctaataaaggaataaaatatgagcacaaagccccctaataaaatgcaggaagcagtaagttctgtaggagaggaacagggggagttcatagggaagagattcctaactgaagcgtctaactcaagaatctccgaggtttcacggaggaggcaacacattacccgggtacggaagggtgactatggtttggacatatggtaatgggccctggaatgagtattaattacaaggcgatgggatcagatcagattatgaagaaagatagaggttcgagcccaggacaatatgtggggaaaggcaaatggggagggatggcttaaaacaggtacgtgaagggcactgtaagggttagggctggaagcatgggctgcatggcaggggctggcagggaacaaggtgggactttatcctccaagcttcctatgccctcatgtctcacatgccttcttcttgcccaggcaagcttcggaggacccagtcagatgagaatgaacagagtctcagagtcaaacaagtcttcttccatcccctgtataaccccaacacgtacgagaatgatgttgctctgttggagctgtcgaggggcccggtgctaaatgactttgtgatgcccatctgtctaccccagaggccaccggaggaaggtaccgcacccacctgattccacctcggcagagcctccagggaggcttttactccagcgctggtcaggcttcagtgccagctgagtcagctgactgtgtctgcctgatt

SEQ ID NO: 31589 - DNA, 1417 bp, Bovine  19866881196477
  misc_feature (1)..(1): n is a, c, g, or t
ntatacctacactgtccatgggctttgctagtagctcagctggtaaagaattgacctgcaatgcaggaaaccccagttcaattcttgggttgggaagatcccctggagaagggataagttacccactctagtactcttgggcttccctggtggctcagaccataagagaatctgcctgtaatgtgggatacctgggttccatccctgggttgggaagattcccctggaagagagcatggtcaaacactccagtattcttgcctggagaatccccatggacagaggagcctggtgggctacagtgcatggggtcgcaaagagttggacacaactgagtgactaagtacagtgcggcccagcattctgtcctcaacagttaccatgagccatgcttgatttctgagcacttagaacgtggctagagcagccaaggcaaagaggtttcaattttatttcattttaatcaatgctgattgtagctagtggctaccatgttggacagcacagaagtacagacaagaaagtggacagctcttcatggccatgtcagtttttagggggggaggcagctgaagatggctatggggaagagctctccctttgccccactgctcctccaggacatctgtcatcatctggttgtcctggagtgaacgtcaggaaactgagacacatagggctgggtcctttgaagtgtccctgaaccaacgtgataagtcagaccctccccacacctacatgtggctgccaccagcaatcctcccttctcttctgagtgatgaaattaatagattctggcaaggtgcagatttaaagaggagcaaatcctctgtgaaagagaagcaatgagttgtcaaaaaagccccaggcctcactagcaagttcgtgtggtggcctgaagggagcgtggagtggacataaagaaacctgtgatccagcccccacctgctgtgagcccaccccgtgaccctgagtagctattccttcttgctgggccttgatgtccttttctgtaacctgggggatgaattttctgatttgtcagccagctcaaagcttcagagaaaatcttattcccggagacagcaatttaacagtgaaggagagtctggggatgtattttccaatgtgaagcacaaggcaaaactaatttagcagaaaatgaaaaatgggagtagttgaaagtacatggtgttatcggtggtaagcgagtgctactcgtgaacttagcagcagtaagaagaaaaaaggccaagaagattgcagaggaggcgggggaagaccgatgaggaactcacaagaatagaggcaggagccacgggggcaggtaaataacaagagaatcaccagccgcgcagccagagacggggaaagaaggcagcaagcagacctccctgaactggaaaaagcaattcga

SEQ ID NO: 31590 - DNA, 730 bp, Bovine  19866881215949
  misc_feature (1)..(1): n is a, c, g, or t
ncattataatatccaaatgggactttgcttatctttattttgagaggatttatgctttccagtgaacatttatctcacttgtagcagtaatatatttcaaagaggctgacattccgtataaatgaagggaaaatgtcttagttgaatgaacaaggaggctagatgagaaatacaccgcaagtgctacaagcgcagccgcagttgaaaggatattcttgtggattcattcctcagcaataaagaactctgaacccctagaaaagtggtgtgattacaagtgtctaggtattatctattatgccgagagactcaagattactctcatatcaagtatctggacttattttgcttaagaagtcttagataaatttcttttgttacactgtacaaatcaatggatattgcagacagtgttttccttcaagtttcaattttctgaatagaataggggtacttgaattatattgggcaatagggatctcgtgtaagtgggttgtgcataataaggaagacaggtgactagaacaagagcttgtttgggcattgtgaaagagtagggattcagacaattcagttttgaagttttgattggtagcatgttaaagtacagttgcttagacgttttccttgactcagaatataaaaggaaaaattaaaatggcaccccactccagtactcttgcctggaaaatcccatggacggaggagcctgataggctgcagtcaatgg

SEQ ID NO: 31591 - DNA, 1183 bp, Bovine  19866881361422
  misc_feature (1)..(1): n is a, c, g, or t
nacacaccatcaaaagacaaaatgaaagatttgatgctaagggaatttggttctcatgctgtcatttcctaaatgactgatttggggtgattaaaatcatgaggagtccaaaagtagaagaattcgtcatatttgacgttggtgcattttaaccaatttaaaaaaaaattgcttccgcatcagcacatggccaatttacatgtgcttaggtaatgaagaagaaaatatgcagacactgaacgtgagaaggaagataaccatgggggagggcagggagggggaagggaggaaccgttccagaaaaaggaagagaaagaaatgagaaaaagagagaaggaaaatataataatttgagacacaaaaaccagaatgaataatgaaagagaagtcaacagcatagataaacattctccttattcaaatttagaatgttagagcccccagggaatcttacagcctgacgtgtgggagaagaagcaaaacctgaaggggaaacgcaggactgggggtcactgctggtgtcagggctggactgcgggtctcctggtgagcagggtgccgttccttcccccaaatcaggccgattccatggctatgtcgtcgttttcctttcagtgtgatcaactccctgtatataatgtgcacatcataattgtttgtggaaggcaggatacagtgcaacgtgcagacagagcctggaaccatttgtgttggtgttggcgtgctggcttttatttttcacagtgaagagcttggaagtgtgtgtgatttaatgcccctccatcgagcctctggttttgcctttccaggcactgccaccctgatccatatcacagccttcctagcttcccaaagcccttattcttcttttatatcttgcggtggtcacattttgcccctcgccccgctgttttttgctctgtcttgtcttccttactaagttataagttataagagatcagagatctcatcttgtctgtgacactgagtcaactgaaatgaattaggagactgggttgagagccagctcggaccctgttaacccttagggtcagtttcttcatctgtaaaacgctaataaggagtttcctgactctccacctcagaggatgcctgtgagactcattgcactgttgtgaactgttacaagagttcgctcgggtgtgatagaaatggcaggggt

SEQ ID NO: 31592 - DNA, 938 bp, Bovine  19866881489401
  misc_feature (1)..(1): n is a, c, g, or t
ncttgcctcctggagacctgggaagcctgggtgagtgtggtccggggctcagccccctacccctgctcactgcccttgcatcactgcccagccctgcatccccagcctagctcagggccctgggactcccctttgggacttcccttcttccccagccccggcctcagctgccatggcaacaggtaccagggtgacaaaggaggttgctgggtcctgtttccttctggtcctgacaaggaagctttccaggcctcagagattgcactgctctgcaccacctggctgttttctgtgttctcgctcaggttgagctcaaactcccagctctgccaacaggaccatgtgcaccagcctgaccacttgtgaatggaagaaagtcttctatgagaagatggaggtggccaaaccagctgacagctgggagctcatcatagaccccaacctcaagcccaacgagctggctcctggctggaagcagtacctggagcagcatgcctcaggcaggtaagaggtggggtgtgaagggctgtggggagccctgtggcacagcccaggggcaccttccaagaggaggcagagatgcatggagcccaattctagggtcaactcaggttagaggttagaggccagagaaggaactgccaggtgggtcgaaccagctttgattctaatcccagctataccactaactccctgaatgctcctagcaagttgtattctgtctctaggtctgcattttccatagtaaagagctgtgattcttcaatgctcctgcagtctttgacattttaaatgttttcacatgttcctgatttcttaaagattggtaggaacaaagcagaggcagccatgtggtccattggggaaagccttagctctttctggtcctaggtctgtgcagtcaactcaataaatcagattgaatacaaaagcattta

SEQ ID NO: 31593 - DNA, 897 bp, Bovine  19866881546898
  misc_feature (1)..(1): n is a, c, g, or t
naacagggctgtgcttacttgttcactctgatattcttactccccctgctcccacagggctcaataagtacagttgaatgaatggatggatgaatgaactaatgagcagaagttctgcccagttcatgtggttagaagcacagtcttcctatgaaggagggtggcagcagtatgcctgggacactgcttctgcgacccacccaggcagtgccttgctgagggtaggagccctttgaacttgagatggatgggagagctccagactaagaggtccctggcatggggagatgactctttcaagtgttctgaatgtcagggcccagtggcagctttcctccatggcaatgacttattacattcctgaataagtgaagggaaattcaatccatatgttctggagttatttgcacaatactcagcaagatgctgctgttgtgtaagagccatttgacgtcggtggcatgactttcttctttctgttctgagaagagtccctgaagaaatgccaattctactctccccgaagagggaggggcaggagcaccgggggcaagtcatctagggccatcctgcaggcaactcagcccttgaggagactggcaagtctcagagaggaggccgaggagagggagactcttgtccagctgtacgcccacgtgggcgcagccagctgctgcgggaacagcatcagtggaggatggggtggaaacagcttaaggagttgctgaagaacagggaggaaaagccgatgcattggaaagatgggggcatcaggaagagcacctgggttgcattctgctgtaactttaggtaagttacttcctcccttccagcctcagtttccccttttgcaaagtatgaggctatactcatgttccaccatccttacgcatcccg

SEQ ID NO: 31594 - DNA, 1575 bp, Bovine  19866881761085
  misc_feature (1)..(1): n is a, c, g, or t
naacacagttccgccctgagggagctgcagtctaatagggaaggcaggtgggcagatgacagtgccagggggcatctggcagaaagtgcctgtggtccagctgaactcagtgagaggcagcgagcgaggggcagacaggccatgagggcagagagctgtggagtaagtccaagaagaagtctgcagccagcactaagggccctcagcactctgaccccggcccgcccccacatcggcacccacaactccatttgtgacccccaaactaagtgcagcttcaccactcagtcttctctcagggccacagatagggtggtcactaggtgaaattctgaatattattgattcttcctttttcttcagattctaatatggctcacgacaataatggcattattactgatcctttatctaaaattttaatattttgtctatcatgaaatttttcactgtgatttttttaaagacactattaagatatcatttatttctgaatttcatggcagctccttaaattgtacatctgaagtaggtgcctggctggcctcacccaagtcccagccctactcctcctgcctcatcttttctgtgcttccctttttactccacatgcacttgccaactctcccatttcccaggtctggtcctcttctccacaaagttctcaggctgtctccctagaaggggtcctctctcctatggcaccaagctggtcacgctttcctggcacaaactgaatgttgcctcagacacctgaccaaatgctcccactggacaccctgaagttaaagaagaagattctatcatattgatctctgtgtcttagttggaatttgcctcagcataaaaatatagcaaaaactagcaactgtttggtaaatgaacaaatgaatgagaccccagaagaaagctactctattgtagagacaagcaccagaaggtctttctcagacatggactcaccaagcatcccagaggatggggggtttggctggatcagctccgaggagatttcttgaatgatgtcccacagctcccaaggcatctggggcttgaggatgtaaaagggctgatcaggatgcagcttacgataactcttgaagttattgaagaaactgtagtcgggattcctgtaccactgaaaaagaagggaagaggtctcctcaaggagagcaatgggctggtctgctgccaccccggcgttcatcatcctctgaggactaggggaggtgggggagggaccactcatggcagactcctgagagacatcgcttcatcgagatagactccatgcttctccatatcacagctctcacctgatagcagggcacccagcacatagcctatgctcacagggacatttgctcttggtgaccatggaacagcttcagacctcaggatcacagactgggaaagagatcagagctgagaggggctcttggccctatctaatcccacctctcttttttaaaggggtgaaaactgggacccagattgccacagctgtggactcacagttcttgacctgacccaggcaaatttcagttctaagtgagatcagtgcaaaactgtaaa

SEQ ID NO: 31595 - DNA, 1787 bp, Bovine  19866880454313
  misc_feature (1)..(1): n is a, c, g, or t
ncacccagctcccagactggtgggcagagactagacctggttactatcctgaagaaaaaccctcctgctccctctttgccacccctttctatgattgcccaatcatctggtgggaatgacacatttatacatctccgaagtgacgatgagaagcagaatgtgggagccagcctttggagcccaggcagcaatcgggattgggtgcaggatggggtgcgcaggcttctccattgctctcatgtgtcacacatcaaataagagaagatctattttttccccaggcagcatgcctacaacttcaattggcccaaaatacgcttggctaaatttacctatgtgatgctctaaatggtaccctgtgtttcataagaaggcatggtgagaaacctcagtacaaggtggcggggacaggaatccacacggtgagcacataaggagccaggcgcagggcgctcctcccagcaaatgacgtccccagctctgggccccacttctccggctggctgcagtccagaagtccttgtggccaccaggctgcttcccggcagcctcagcatcctgctgggccagagcgcatctccctcttgtccctggtggcttcctctctgggtacccaccccctgactcatcactcactgctgggcccagcatacagggggctgccagctcccagcacaagaagcctagagaaggagagagatcttcagcaccatctgccaagacatgaacgaggaaaacacccagagagcacacgagcccaggcatcccaagacgtcacctgagacccaggggtttttataccaggctacacccaggaatgcaggcctggggagtttacaacatcaattccaataagcagaaacctgatagagcaccagtggtttgaaatgtccttaaacacagagcatgtgatgagaggggctcaagatgcagaaagacaccccccacgtggccagcactcttcagagaggctgccctgatagaaggagatggccacagagcagtgtactctcgacccagataggactggactcaaaacctggctccctctgatcagctccatgacctgggcacacagttccacttgctgagctgcagctgcctcagctataggccagggatagtaatgggaccacctctccattgggaggcaacaggccataaagtgcatataaaacactcagtgcccggcacagagtaggtcctcaaaaacagggattatatcagttcccttgtgtctggactgtgtgatgtggggccagccctaatgtggagatggttgcatcccacctcattggtcactgatggggccatcgggtcaccagctctgataggaagaccagtcttctcattagaatcagcttcccctgtggagcgtccctacggtcagagttagtcatgggacgcgccaacgggcactaattatacctgccaagttcttttcgtatggtatttatttggttcccaccacaaccctgagagaggatctgttctcccctcattttacagagaaagcagacccttagagaaggtaagcgtctcccccagggatcccacacacagccaggaagtgccagggctaggttttgaatccagagaagaatctgatgcccatgccctggactgtgtcagcaagggcagtccatgttactcgaccaaggtgagactcttacccagctgacactgggttcctaactgcgaatgatccagtctcagcacttcagttaacctcgaaccgtgcctctgacccattcacggccctggtgtcgtcttccgacatttatcta

SEQ ID NO: 31596 - DNA, 1882 bp, Bovine  19866880570171
  misc_feature (1)..(1): n is a, c, g, or t
natgagctgagctccctgtgctgtacggcaggttctgtctcctttttttcctccttgttcccaatatgttattgagtttaagttcagttcagttgctcagtcgtgtccgactctttgcgaccccatggactatagcatgccaggcttccctgtccatcaccaactcccagagcctgttcaaactcctgtccatcgagtcagtgatgccatccaaccatctcatcctctgttgtccccttctcctcctgccttcaggctgcatccatctgcctctttgtgcccaagggttttttctggaacctcaaagactgtgctttgcttgcactcatagcaggcagaagctgctggggaattagcacacctggaaacggccctcctctgaagatggatggcagctggggtaaagacaccctgtcccctgtcccacaggtggtatgatcctcaggcctgcattgtgttcagatgttccccacaggaggaagctccagccattggtgggaagtttcctgataaaaccccattcctggctgacttcccttccctgtaccacttccctctgcctccggaattaacccctttcacatgaatctgtgtcttagagtttgcttctggggacccaaattcagacactttccaataaggtgatgctcactatctgagcactgctcctggtgtggtcaccagtgacctccatgggcccaagcctggctcattcccatggcttcatctgaccccacttcttgcagtctctggctctgccaattactttcttgtgctcagaatatatcctcacttggactttgggacactgtcttttttttatgtttacttttctggaccatcctttcatagtcctttgttggctgtttttcatcttcctgaccccagcactcactgccaggaagatcagccaaaatatacacaaaggaaataacacactgcaaacagggcaggggttaatttcatctgtgtcttttaagtcgaggagggaggtgactatggaggaccagtatatgggaggcactttgcatcattaagtcatttgatcctgacgacaacccatggtggaggtgctgtttattgctgtatacaaaggaggaaataaaggctcaggcagattgaagagaggcttggtcaaggcctgtcctccgggggtggtgctaggattcagaccatggactgtcccactccttcccccgtgaggaggcagatgtggcctgagacagccgtgcggaaagtgggccctgatttctttcccatctttctccccagcttcctggtctgatgattgcctttattccctccagcccagtgccccaagcccttgatttggttgagccgctgaataagccccagagaaaaacagttgattaactcatcaatggtgcggagccccagccactcgcaggaggcccttgcccctgctgtccagagcattcagcctccatcagggagattgaggctgacttagaaattcctttgcagaactgtgtttggagggtaatcagcccccatccaggccacttgttgaaacagggctgagtgattcagaggcgctccagacagtccctatgatttggtccacatcattgaggctgataatggggcttccccgaagtgacgggacctcatcccgacactcacttccttgaaatgttttcctgtgactggtgacggagcatgaggcattgagaagcagcagaaagaaggccctccacgccatgggaagggaaccacaactgctggcctgtcgcttggtttcttggggctgtgatgccatggaggcacctgcgccctggcagggggtctgggtcagatctgttgaccccccggaggtgccctgagtctacacagctcccaacacaacgcctgtccagtcagg

SEQ ID NO: 31597 - DNA, 1033 bp, Bovine  19866880578185
  misc_feature (1)..(1): n is a, c, g, or t
ncatacaataaaaggcagtttctggtctataaatatcaaatcattcttcagatgagttgtctaaaacagtaaagtgtaatctgtaacttctctgcccaaggggtcatgggtttctttgaaaatctattgaaatttcccagctccatccaggaaatacacacagaagatacaaaaagacatgctgcagaaagcaaaagggacacttttatgtgggagtgttaatatgtaaacacaagtacatttaatgaatttgccgggttttgtctactatgagcatttctgagtcctaatcctggtagtgatataagcctgtgtggactcagaagaaaaacatcctttatggtgtctatgaatggctgagggccagctaagacccttgtcctgtatcctcgttcccagaagcatcaggaccacatgcttcagcagagacaagagcattttgtgaatcatttgctcagttcggctttgggccattggtttcctttcatgtcagtgtccttccagaaaatgatttaggtcaagctggagcataaatgctgactggtttattccaagctctcaagtatgcaaaaaagagtgacagaaagtacaagaccagtttggagttacttaacccggctaagagatgttagtctttcatggaaaacataccaatctgctgacatctcggatctgaatattggctcgctctttttgaaaaaggaaacctctgcctgaaagtgatatagtatctaccacctttttacaatcaaattcctaaacttgacttgcttccctactatgctgcataagtaagaactataagcacagggacccataactgacctgatattgtcctgtgtcctcattttcatctctctttattccctcctgcaatattccaggacagagaattgtgtcctggagtttcaaaagtggagtcattctaaatctactttgtgccgaggggctcttccacgtaaaaatagactccgttccactcagactctgagtgaccaaagagggatcacttaaccgcgagttcactgcagag

SEQ ID NO: 31598 - DNA, 1597 bp, Bovine  19866880578425
  misc_feature (1)..(1): n is a, c, g, or t
ncctgtgtgtttcggaaggagaagtgttccatgtggtaaacaggaaggattagaagtgaaggaaagtggggtgggcttgagaacccactttgggaacataaaatgtagggatggtggctggaggactaggtggggacggtcccacagagcatagagtcatgtttacaaggggtcactttgtttggaggagaatgggaagccaggaagttttgtccagacagcatcatggtcagaactcatcacagcctcctgctcagaagcttgtcacctggtatagcaggaagcaggctgcccacagtgcaaggtccagctctgtctggtcagccgagtttccccaccaggcctgaccacagagcagggctgcccagggctccattcgggcacaggaagatgtcccctctttctcaggggaccggtcccgtagtttaggagactggcattggatgtatggggagggaggagatctgggaaagtgatgggcagcaatgcgtggggctgggagagagctggggctccgcaggatgaccaacttttccctctgctcaatcactggtcttttcacaccatcgcttggcttgtgaagtccctcatccttgcatccgagcccttgcctacctcccctcattccagtatcctttcagtccttctctgtttgctccttccagcctggatgatcaaatccatggagggtgttttcagaaatgcctttagagagaggtgcaagaatcctcttgtttacctgatcagtgtatctggaatagaaggcaagaaaagcatggttgtggcagcagagatgtgtgcatagacatcattcacccactcaaccaaatggaaatgcactgtctcctgagtgactcttgtgatctgggcctagagatctaggtacagcctgatcctggaactctagggtctgactcccaggagacacaggaggtagctgtgaatgtagatagcttctgaacatggcaggagggaaacatttcagacagagccttgattttggcagacatagaaatctggagggctggcaggcacagggcaccccagctttgaacaacacagtcctttgagggttcccatgaaatgctttttctcttgacgatgacagccagcatcctcctaaaattcaccgtcaactctccctgttccactgaggaaggaattgggttccctttgggtttgtggctggtttttgtgcattttcttttatcccaaggcgccgtggggacaatattatgctgctaagagtcagggaagcccacagagacctgagtgaatgacactgaaggtggttaatttgctttgctccattgagtaggttctggcctcagccttggtgtgacttggagaccaaatcccatggtccctgcttctgggaaggtggctgccggcttcccacaggggcaaagcttctggcatccagtcaaactggattttaattgctagaagcctcttctttgtgggatcctccccatggtagtcctgagtccctatagacactgcaaaaagagaatccagttttcagacaaaatacccatgtttcagagaaaacagtccacggtgccgctacttgtcagaagagagaatcctaagtaag

SEQ ID NO: 31599 - DNA, 1822 bp, Bovine  19866880686437
  misc_feature (1)..(1): n is a, c, g, or t
ncttattaagttgattttctattttcccaaattactgcaggtaacaattttgcttagtttgctgcaattatataacaagggtaccctttccctctaactcccagtaatatttgcctcactttcctttaaactcatgagcctcctcaaggttcactttgcttccattaaaagtctccttaaggtccttctagattccttctgctccacaggcccaaagtctattccacacattttacattttccccatcggaatgccaccatatttccagataccacattctgttcaagttattactacttaataacaaatgtcacagaacctgctgttttaaacaataatactgtatgtcaggtatcgtgcatgtcagaaatttgatcagggcttggcttggtgattcttttggcattaactgagattgcttgatgatactcagctgcctgatggattgattctaagagtctaatatggcctcactcacaagtctggtgctttggcagaggtggctggaaggctggattcatctggaactgttgactagaaaacctatgtgtggtttttccagcatggtagtctcagggatgctgaacgttttgtttggtagcaggcttctcttagataagtgattctacatggagcatgattctgtccctggcggaatatttggcaatgtctggagatatttctggtgggggcatggggatggggaagatgctgctcaacatcccacagtgcacagggcagacaccccaccccccaggtccacaacaaatacctggtcccaaatgtcagtgtggtcaaggctgaaaattcctttcctagaacgagcatcctaagagtcaagcagaagtttctgatctagacttgaagacaagcagcatcatattcagaccagattttaagagagaagggaattaaacatcacttcttgatagggggtggtgaagtcacattagagaagagaatgtgggatgggaaacattgccacaaccatctttagaaaatacaatctgctccaggagctgtcagggaactctgaatgcgatctgagccacagaaaaggggcaagcagaatgctttaaggatgcgggaggatctgcctcttctggttggagggataaaatgggatttccagaaaacatgacaattcagcaattttttttttcagtgataaattaaaccttgaaagaagtggagtattttgaaaaactcagttggagacacaaacattatagatagaaagaacaatagaaataaagatatttattcttaaggatcagcagactatgggttttggattaaatccagcttgttatttattttgtaagtaagattaattggcaccaagccatgtgtactctttgagtagttaaccacagggaccatgtggcccaaggagcctaaatatttactgcctggccctttatgggaaactttgctgatcccttagactaattcatgaatttatttggttttttcaacaaatacttcttaagtggatgctatatgccagaaatgtatcaaagcttgaatatagaatggtgagcaaaacaaagagtagaacagataaaagcaaaaagtagttattttggagggtgattttgactattaataatacaatatttgagagctgtaaagaaaataacaaagttctgtgcttaagcattttgagtacttgggaaaagtgagctgaaaagactttatatagaggataaaggtaagacctgccagatgagaaagagccagcgatgggatgtgaaggctggtgataagaattatcgggaaggtgaagagggtacacagagttcccaaggcaggaaatag

SEQ ID NO: 31600 - DNA, 1908 bp, Bovine  19866880731831
  misc_feature (1)..(1): n is a, c, g, or t
nactgtttcatttcttccgaagtcacacagaattgggctgggatatagtaactttgtttttttgatgctgatctgcaagtatctttacatatatttatttaagctatttagtaactgtctgaagtgggattattgctgcattttatagatgaggagcatgaggctcagagagatttcttttgactttgatgcccatgcatttagccatggcaccatcttattactgtcatctggggcttgctaggctccagccttctcttatcaccagccaggcagagttgatgccaaggatggcatgtgtggaatggacttggcatgccctaggtttgtgcagtcagtcacttggataaatgtcatgtgtaagatcctacccctgcaaggtaaggactggtccttcctcctttgcccctcagccttcctttaaaccaaggaatgtcctgccttgggtggagcctgaggactgggcatctgggtcaagggtcagaaaggcaaaagcaagttctacgacagaatttggcagagtggtgggagaggagtttgtatgtttaaggtttacagaatgcagtgccatttggtaaaattccattgaaaatacttgtatgcttgttgtgacagcgaaaggaaaaataaaagagaagctgacatttgggagagaaaatctgtaacattaaaataccaaaagtttggactgaaccagaagagagaactttctgtcttgccacttggatttctgggctattcatgtgtgttctggggagggtgtgctagaagctgcagccacaatttctccccagtgagcacatttggatgagggatgtatttatggtgggatcttagaaaccactgactcattcattcaacaaatattcactgagtccctaccatgcacaactattttgctaggtactcattttagatgttgaaacagatggttggagtgtcttggctaaagttgcacagggctgggatgtgaagttaggaccccagggctccttcctccatagcatctttggggtgtgatgctccctgttagcctcttgaaccagcttgcaggcctgggatgagttggcagcagggattccacagaagcaaaagcttagggctctaaatgtgtgtccatttcctatttgtgcttgtttttaaattattttttaaaagttaaaagttgcacacttttacaatgtatatgtcaagttaaaagaatgataatgaagtgagctcccacgaacccagaccagtttaaaaaatgtacaggagaggagggttcaggagggggaacacatgtatacctgtggtggattcattttgatatttggcagaactaatacaattatgtaaagtttaaaaataaaataaaattaaaaaaaaaatgtacaggagccttaagtgtcctcatcgtatcatgtcatctacctaggggatctgaccagtatcatgattgtattctaatgagctccttgcttttctttatagcttatcatacaagtatgcatcctaaaatacttactgcctagtttggcctctccatgaaccttaaacatcttgagttaaactactgtacacttttgtgattgctttcttttcttaaatgtttatttatttttaattgattgatgattgtgattgctttattttttattaaatattgtgaactattgggcctatgcatgtttcactttgttagatcattccaaattactttccaaagcatttctacctattttcactgctatctgcaatgtaagagaattctcgaagctccccaacctcaccaacacctggcattgcttttagttttaagattttcatgtggaaggtgtctcactgtgattttgatttgcattgccatataaaagatgaagctgagcgtatctttatgtgctattttgttgctcttctaaataccca

SEQ ID NO: 31601 - DNA, 1422 bp, Bovine  19866880735697
  misc_feature (1)..(1): n is a, c, g, or t
ntacgtgtctgactgtccactgtgccataaccactgtggaggcttgagagaggatcagacaaggagctcaatggaaacagacatgcaaggcttgaagctgtattgctgctgctgctgctaagtcacttcagtcgtgtctgactctgtgcgaccccatagacggcagcccaccaggctcccccaaccctgggattctccaggcaagaacactggagtggggtgccatttccttctccaatgcgtgaaagtgaaaagtgaaagtgaagtcgctcagtcgtgtccgactcttagtgaccccatggactgcagcctccaggctcctccatccatgggattttccaggcaagagtactggagtggggtgccattgccttctctgtgaagctgcgttaggacccatgaaaaatgcccaagaagcagtctgtttcctggggcagtgttgggggaggacgggtctccaggaaaccttcagagagctcagccctggagcccgtacgcctaggtggtctttcccacaaggagagacgtgtgctccaggccaagagaacatcaggaccaaggatctcctggaccctggagcctgcccagacctgctgatggctctgtgtggccgtgagggacaccgagcccgaagagctcctgagggggagagccacagcggcattcttgggactggccagaaagcagcaggacagaaggactggcatcagagggacccctgggtcagctgggactaggactgtggccccggtcacaccatctccaccctatggcttactccaagtctctgatgcagaggcaggactggggggcagcaaagtcagtcgctctggaggcagcccggatcccccctgtgtgcctgagtatccgccatgaccagagccaggcagcctgagcagctgcggcccaactcttgttggggcctttccaaagcagggctctggctcccaggcaggagagtcgggatttggagcctgacactaggagatgggctcatacatgttgtcatctatagcctgatcatgcctacttagctctcggagcctcagttgccacctctgtaaaatgggcagggtggggcctcctgtggggaccaccacagagagcacgcaggaggatggatacaagcgcctggactaaagtctgcatgtgggcagggctcggaacgatgggcctgtctccccagtgacactgccccctccatgccacctccagcaccaccctgcccctcctgctcctccacagccccggctcaggaaacctcagtcttcacagctctctgctgacctcatgacaaaatgttcttttacttatgcatttaatttacataatgaccccctgatatttactcagatttaatttgtttcctctggaacttgcctttgaagaggcagtgccaaccacggctaggagtgaagcgca

SEQ ID NO: 31602 - DNA, 1075 bp, Bovine  19866880796743
  misc_feature (1)..(1): n is a, c, g, or t
ncctctgtccatgggattctccaggcaagaatactgagtgggttgccatttcctcctccaggggatcttcccgacccagggatggagcccacgtctctctcatcgcctgcattggcaggaggttctctaccactgacatcacctgtaggagacttctggctccccagccagaagggaagatgaaaacttgggtgctcccaggattaaaagcgtaacatttgaatctctgctctcagattgaatgtgaaggcagcagagtctaatttttaaaaatcaatatcaaatcaaggataatttttcctctgctagaaagaaacgaaagctaattttcctgcattcccgagtcataatatcatttgggaaagaacatttcccttcaaatattgagacacctctttatgcttcctctgtgccacgcaagtacttctggcaccaccagaaattaattctttgtcctcagaaatgcatagtgctatgcttttatagtgtgtctctgacaaatgaagaagctttgcttttgtaaattgtggcataggttttgtaaaactgaggatagaaactataatagaatggtgctcgactagtataaacacgggttcaggtgtgaaaatgctgtgacacagttaataggcaggtttctatgtttcggtttctatgtttcattttctagcctgagggttggactctggaaatgctgactcagtccctcaaacctcttgagtaaaacctgtatttaatgaacccctactacacgcctgaccttgtagtaggcattttacacaaaggagttatttaaaataagtctgtgaagtaaataccattttctccattttccagcaaagaaatagacatttattgtgcattaaaaactagttcaaagtatttttattatttcatctattgtgcattaaaaactagtttaaaaagtagttcaaagtagtttgcacacagtaagtggttggccttggatttgaaccccaaaatatttggcctcagaagccctgatcttaatcactaagccctgacagggtcgtttagactttgtggttattaaggaggccaggaattctcagtt

SEQ ID NO: 31603 - DNA, 2085 bp, Bovine  19866880814487
  misc_feature (1)..(1): n is a, c, g, or t
ncctgccagatggtccagtcaaactctaccaaattgttgtgggcacatgttttctccagtgttcttttgcaaagtagcatcatgcgtcatttcttgagacttaaaaatttaacagcatgcctattcctacagtgggaaaacattttatatccctttccactgacttttcgctactttagaccttcaagatttctcttgtcaatagcactgggtcattgcaagccctgcccagttgcaaatgaacaaagtccaatctaagtttataaaacaagagtggatcccttagtgccgggtggaaatagtggaactaccaggcatttatttgatccttagatctggattcaaaaagaggcaagaaaaatgcacctcagagccagacaccaggaaacgagtgtagaagaacatgaagcaggactctaaatccagaccatgcaactggagaatcacgtaacagcactgtgactctgagaggtagagatggagaaacctaacagcgggaggcaaagggggttagaccaggtccagcctgtcctgtaatactagtaaaaagagttgctgttgtcttacaaatgttactctttttgtcttccaaatggatatttggtatatatttgtatacccacattaaagatgggaactttgagattcaaggaagttagattatctgtccaatggtctagagacaatgagaggacaagctttagatgttgatttgtctgatttcagaactcacactgattttccagagacactgtatctagggggctacacttcagtattatccatggaaattaagatggtctctaacttaatgagctgatgggacaggacattcctgatgtacagagtgctttaccatggtacttctcaggtgacggtggtcccttatagtccaaggagacaagactggtattgcaggagctcacacacgtggataatgggttagaactagagggcttgaccctggctgagatgttctattttgggccccttggacctggcaaatagcttctccttccttatttccccactttgacattttaccccccttccaggcttcctctctcatacccccataacatgtctgccatgattggagaaggttcatacgctttcccgtgtccctccaagcttgtaattccatggggcacgttctaaaaataaaatgaaactattctgaagtaagaatattcatttgctcagagctaagcttctggggagctccaggcagtcaccgacacatttgcagagacctgtcccatttctcacagccctgccacctactccccgaacctcgaaaccctgcagcctgcctctggagccccgagtgaccagtgcagattctatcagcctccatttcattaaagataaaatatactgagtgacaatcaaaacccagaaatctctaagcatccctagagcaacgatgggagcttgggagccagcagtgaatgatgggggtggaaggtgtagggcagggaggctgtgagaagaaattatagagaagtagattgtggtcataagaggacattctaatagtctgagctgcctgagtatgaaatgaaccattttggaaggcagagagtttcttgttaccgagagggctgcagaagtacttaaggtggcaggggaagggctcactatccacttccccaaaaacctgacccccaggtctgcacaatggggacagggttctgggaaataactacttcatgtacttgaccgtgaaggaagctgttaacccaatcagtcctgtcatctccactcaccattccaatctggactgcatgagagcaggggactgttggggactgcattccctagcatcagtgagctgggtggcggtattaatccagcttatgaggggcagaggaacgaatgaagctaagcagaatatttggcaggatttgaaagagtagggccagctctgctttctgagacgagtacaaggtcaagtcatagaccccactgagggggcgctgtcgtccaggtgggggtctggaactttgaaaaggaagaatgctgtgccctagacacagattgtgtgcaggagggtggaggaagtgttggcagtgggcagagttc

SEQ ID NO: 31604 - DNA, 1805 bp, Bovine  19866880825745
  misc_feature (1)..(1): n is a, c, g, or t
naagtctttgtttaatggataaacttattattttaccttgttttactattttcccatctttctgcatttctttcctttcttttttgcatttctccaattaaattttttctttgattgaagtttttctacagacaaaaggcagagagaagacatgagggtgcgatctgttctgggaagaccccataggatcctgcttggttaccatagcaattccagccaataacatgaggagaaaaagcactccacctaagctcatgtgatctgcagaattgtgagagatagtatttttaagctgtctgtgtgtgtgtggaggaggggtgtggttggtacacagcaataggcaactgacacaagagaaccatatacttggaaatgcatcaaaaacgtctagattataggatttagcctatgatctcagatgttcccaatgcacatccttctaaaagtctacttgcctcctcccctgtccaaagaaccaccttcctctaaaaggacagccacaactcaggcatttagaaggacgcattgaatttctgtttggactgatctcatcagtcctttggggagttttgctctcccatttcttacaacagcagagacaaagaaatattcttaaaagaaacaaaatatgtgaacatttctttggagattgatgctcctggatagagaagtagtgagcattctatgggttccagccattctgttctcattttgcttttaaattgctgctggcaaatctacatatcataaaagtatatctccacacttatgacaaaacttctacatttcccttatagattgatgcctctgaatgaagaggtaatgtggtttatccggttctagctgctctgttttcattttgctattgtactgctcttggcaaatttacatatcgtaagaaagatatttgtgtctacttgcctgaagcttgttaacatctttccagtgttgcctaaaacatgattaagattatacaggacagtcatcttgacatgggatccaaattaggccaacctaatctgactagtgcccttgagcccctaacgttgctcaaccaggtaaggcaaatggagagtcacgagatacacatgaaagtaggctgccagaattagtgaagcgcaatacagttcagcccattaaattaaaaattcagataagcaataaataatttttggtacaagtgtagcctatgccagtttggaagtacttaaaccaaaatcgtatttaactggatgccttgtattttacctgaaaaccctatcatcgtctcactaaggtataaggaggccaagtatgtctctagtagtcatacctccttttagaaatgtgtctctttgcctgctcttgtgggatccacagtaatgtggttatactttaacatggggcatggaaaagtgagatagacttctgggaacctagagccctcacatctattggacagttataatgcatccaatatttcacatatgttatttcatgtaaacttctcgacaactccaacagatttgagtgtcaccacttggagggaatactgggagaggacttgcccggggtcccccggctggtagaccgaagctcagttctctgatcagaactacctggctcccaagcccatgtgtgtatatctccacaatgttctgatcttgagggtgaggtgacaggaggtaggagggtgtgaagagggggtggagttcttgctattttcctgtcattttcgtgtacccttgttgcatgacatttgagaggcttattgacgactatatactttattgaggacaaataaggtaagagaaaacaggaaagat

SEQ ID NO: 31605 - DNA, 1736 bp, Bovine  19866880830118
  misc_feature (1)..(1): n is a, c, g, or t
ncctggtgtgctgcgattcatggggtcacaaagagtcggacatgactgagcaactgaactaaactgaaataaagggcatactcagtttggttcccaagaccctaccgttttttgttttaacaaactatgtctccagacatatgcccaggtgggcaggtgattaagagaagttacaaatcaacactagggcaacatcagttctgtctctgtaatagcagccttcggactctgaccaggtagcaacaggttcaacatcttgattaaaagtttcctaagtgcttagacactacctcctccaataaatgcatcagcacaactgtggttggtcctaaatttttttacaactatctttaaaagttagactcaagatttagttgaaatagagaaacatcaggtacacatagcctgctgtcaatcaaaatctgcagtgaaggggatttacctggtggtctggtgggtaaggctctgcctgccaatacaggggacttgggctcaatcctaagtcggggaactaggatcctacatgctgtggagcaactaaagcccacacgccacaactagagagtcctgcacgcttcactgaagatcccgcatgcggcagctaagatcctatgcagccaaatacataaataattaaaaagagaaaaacctaccgtgtaactaaggaccatttgttgccaggatatcctattgccctgaactcaaatttcaccttcaggatactaaagattttagaatttatctacaccaagtaaacatccctttaccttcactgtaattacagcttgatgaatgctatagtagttcatcatataagcttagatttactaaatacttcacctggcataaagtagacatcccataagcatttcttaaattaataatattggtctctggcattttcttataaccccatgggttctgggaagcagtcaggcatactcttacccactctctgactcattaagtcattaaaactcttatgatcagctttgtcacatttatattcattttcctcattctcttgagtgattttttgagttcagttaagagttcagcatttgttgaatgatttctgtgtagcaaataagttccccccaaactatttattaattttgattcatgtcttatgcataatgatctatatggtggtagtaggagcctgagcataagtgcaaaccactaattcattcattcaacaaatgtttgctgagtgccagctgtttgtcacatgctggaatgcagatacagaggtgattcacaggtcttctgtccttgacagagctgccagtatatgtgagagaaaaagaagaaagtattaattataagaaaaagtagtaagcacttctttgttgacaacattgaagagacctaacacagatggaagaagagggtaagggatgatgaaagcttttctagaggagtgaaaaaatgagggggatggtgaaaaatgagtgggactcggcctggtggataagaaagaggtgcaggacaaagcatatccttttgagagtgatattctaaggggtgtattgagaagctcagacatgactgactgatgtgtggaaacaacccacaagaaggggatgggaagctcagcctaattccattgtgcttttggctgtgcttacacgcgggctgagcagataactgtgttgtccgacaaggtcctggctgagaagtaaagctgacagacgccggcttctgctcacagtagaacactgcccctataaggt

SEQ ID NO: 31606 - DNA, 1697 bp, Bovine  19866880844346
  misc_feature (1)..(1): n is a, c, g, or t
nccagagcacaaggcacttagatggattaagcctccttgatacaattggagtggctggaaatagctctgtgcagcctgcagccgctgcctcccaacaatcatccccaatcaacaccccacctgtccctgctgccagttaattccacatgacaccctggctgggaaactcagagcctccagatgtcagccccaaacgagggatcgcagggactgggcccactcagccaaggctgaagcaaagtcaccctcctgggtccccagtgtccaagagggacaacatgagctcatgcctatgagctgcaggcagagaagagcttggagatcgcaggagaccatgcacctccaagggagccgggtcaatctcaggaaatagacatatgggtcccctcctgccctcagctactctcctagactgttcaagactctcaagagttggcaccaggaggaaggacatttaagggcttcatgcctaagaataagcagtctcttcaacagcaaaaactgagtggcatcttggtcattattcgaggcagtgaagaggaggagcacatgccctccagatcctccacatgcccaagggtaccgccaaacaagggtggactatatgggggcaactggcaacccagtggtgaggggctactctggcccagatggaggctctctgttctacaaatgaagactctgtgcagctcagaaagagtttccacgtgatttcttctgggctttctactttgtgaacccctccttcccagccccctgcttcctcagtctctccagccatatactttccatgcctctctgatgcccccgggcactcagtcccagccagagcatggggccaacatggcctgtgccccgcctcccggggaagaagagagtcccccaaaaaaacacccaacaccatggaagagtgtaggattcagagtaaagacatgggaaccatgctgccctctcccagaagccactgggttacatgatatacaacgaagaggcagcatatagagcacatatagctccacctgatcaactccgagtcaccatcagcaacaagcccaaagcacggaaacaggcattccctactatctccacacctgaaataccattctcggaacaacctcacccttcagggttttgtacttttgcatgccttgttacctccatctgcagaactctcccctggctactataaactcctactcatacttgaagaatttgctcaactgttagctcctccaggaagtcttccctgatttctcccaggtccctcctctgagttcccagagttacctcctgctctggtctgtgagttcttccacagagggtcatatccaagccatctattgatcccctgccgagggctggcaggaaagagccctggcagatgggtcccttccacagatggtatgtgaatgatgtgctgtcacctctgccctgcagtgtggatggtgatgggccccaggcggccctgtaactgtccaagctgccaccccaggttccctgagactttgctgagcgctgggctctttccaggtctctaaacacaaccctggcctcagcaaacttagaaacctgcagtgatggctagggaaagaagaaacactgcctggccagccaggctttccagaaggggcctgtgatgcacgctttgcaaatggcaggagacatgcatgtcagaaaactgtccacgatcaatttca

SEQ ID NO: 31607 - DNA, 2846 bp, Bovine  19866880850176
  misc_feature (1)..(1): n is a, c, g, or t
ntataaagatattctcccgcggaaaccttcctctctgctctgagagcagatgttgccctccagcctgagtgtccacagctaggtcctggctctgagtatgcctggatccctatggctagaccatctctccctgcagctatggcctgacattcttccctgacactgctttgctctgctgtggccatggaactgatcttatcttagtggtgactgcgcagcttgtggcatggtggttcaggagggcttcctgaaggaggtggcatgtacgcaagcctctaaaggacttgaagtaggaaataggcaagcagagggtactgggggcagataggaggaagagtgtgccaggcagaaggaaagcatgctggaaggcctgggggcaacagagagggaaaagatatggctggattgtgggcagtggccaagggtggggctggagctcggggccaagcaggccttagaggcctcactgatgagcacagaatctccagaaatccttgagagccatagctcgcctcctcaggtggtgcctctgggtcctattcattccacccagtccagaggcctgaagacagactcgggtcttcttttctggagggctctggtctttctgttgtctgtgtccagactcattggcttcctctgaaaggaaagatgctaatgcacaggaacaagctgaggacaaatcccagaccccgaggcaggccctgaacttcccaggtgaccaggcggcccagatgtctgtgagtcacagttcatgtttctccagcctcactccaagcagggcgccgtgcaagcactgtgcgtgctccagctcatggcatccttatagcaatccttcgaagtgggttcataccaccctcgttttacagatgaggaaactgtgactcagaaaactgagtgagtggctggtgagtagggggttggctaagtgtgattcccgaagcccaggtcaccacagctttgctcacagcctcttaatccttgtggcaaagctgtggggagcaaggcccgcaggtagactcttcacttaatgtacaagggtttactggagcactgttggtgaccacagatactgccaacaaccataatggttaaatatgttatgatacatacataatgggaaaccacgattcctaatgaaccaagaggccatggttccaacgcagggtactgttagctcatagcagcaaagtgagggtggtggtgttagtattgctctgggtagaagcaaggtcacatgtgtgtgtgagtacacgtacagtgtcaggggagagctgtgtcagggagggaagcacagtgacttgggacaaagatgggagatctgtttttttgtttaacgtctttaaagttttctatcaagtaccaaaaatagtaaatacaacagtgagggttgccatccttccttcccgctgatcgcccatggtgaattccctttttgtcatctaagaatagggatggtaatttctgagctgcagattaaaacccctggcacagttccggtacgtggcaaacggtctgtatgataataacaaatcatgagtgggaactaagagtggcagtggtcagtattcttccttcccagggctggatgttggcatagggcttggtagagtcttggcgtgagagctttggctgtttgtccctcctcaggattatcgttgagtacagtggttaggagcatggacttgggagcagtctgcttcagctgaatgctggctctgcctctatagctgtgtgacactggacaagtcactcaacctctctctgcaatggtttcctgatctgtctaaggggaataaagtaatcattcctatttgctgtgcttgctgtggggattaaatgcattaatacatgccaagggcttagttggcaccaccaaatcaatggatgtgagtttgagcatattctgggagatagtgaagcacagggaagcctggcatgctgcagtctatgggattgcaaagactcggacacgactgagtgattgaacaaccgtatgagcttagcacagcgcctagcacctgaagtgctcaggaagacttccttactcagaagctacaactgctggagccccctggcctctgagctggctcatctctgctatggcttgttctgcagtccaggaaacatcttgcttatgtccttggtgcttgcaggaagagagagagttcagggtcagctctctcacctgcaggggacactccaggcctgcctggtggtggaggtgagttgctaggagtccccaaagactcactgcgcagtcccaagtggctctgatgagtcatcacaccttctcagctggacagcctgacaggttcccttggtgaacatctgttggcagttggtcttcaccccgagtcctcctgataggaaactcctcagaagaaagagaattggacacctactattttaaccaatgcttcatgccaacaaagtctcctttctgacgtctggcataggaagtcagacaactgagctgctccggtgagccttcttattaataacacgtatcgtatcattatggcattagtttaaattgaagtaataaatactttttccaagagaaatgaataagtgagtttaattgctaggaaacctaccaagaagttcgacaataactttactgggacgagtgttttgggttttgttcttcgatctaattataaagcaactgcacttcagggcacgttaattgtagcatttgctggaagattaaagttcattaactctgaagttccatcacccttctgtcggattccatggtgcgtctgaggacgtaaggagatgccggatgaaggacaggaagacaggggtgccggccgccctcgccccagccccatgcacag

SEQ ID NO: 31608 - DNA, 1532 bp, Bovine  19866880883397
  misc_feature (1)..(1): n is a, c, g, or t
ntatgagacagaactttctgactttccaggagttaatatggaatggtttgccaccccgggagcagcaaggtctcatcgaagaaatgattgaatggaaggcagatagttggacgatgaatggtaagtgaatatcagcatggaggttgaccatgggtgagggggtaacacccatcatcactggcattctgcagccatgaatctcagtctggctacatgtaagaacctcctagggagctttgtaaaatgcagaccctggggccctactccttggaatcctaattcactgggaatggtcatgtgcctaagatactgtgttctttcagagctctgaaccctgaatcttagcctccaaagctgggagctctgtagtctagaatgtgtagttttgtgaatttgaaggtgtaggcgcacctgtacaggtgagaggtcctccactgtccctgcaggagccagcagtgcagacctaactcagccgccaggacatcccatgcagcaggtgagagccccggctacactaaggcatcttcccaccaggtctcagactcatgtgtggaagataatgatggagagaattgatcagaaaacccacaggacaactggccaactttcctgtcctactttccctcaccaattagcaattagctaatttgttaagcctcttttccccacatggagataaatagcacttggctgcagcctttttcagagggtgcaactcacacagaagctgcgatggctggtgagaaggagatgcaactgcagatttagcgagaacaccctcccctcccccaatgactggagaactgctgccagctccctgggcagagccctaaatgctccaagcccagaggatggtgtccccttctaagtacccttccctcatcttctccaaccataagtgaggcaggtggaggcccctgagatctcccttttatctcagagccagcaaggtcaggacaaggcaggcaggcagagcatggtcaaatcccaggtccgcctctacttacctgagtgcccctgtgttagctactccacctctctgagcggcagccccatgcctgcagggtgttaagatgccggcagcacaatcgatgctgtgccctgggccccctcaaatcccattgggaattctgagcgcgctggctctccatgcgcatccattgccaatgcagacactgaccaactgtcggaactctccttggcactcatggaaatgtgcaccctcacgaaggactggggatgcccagctgccccgttccactatggggactgtttggagtgtaagctcaactgtttccaggttccttctgcaggaccagcccacacggcctcactgctggctgcctctacttccatgatccacattcccactcccttgctgggctcttcttaattcccctgggaaaacttcttaataaatcgtcatcacacaaactctcacatcaaagttggcttctgggaacccaacctgagacaagcaccccccatcttacaaatattgtgagaactaacatgaaattaagttgaagcct

SEQ ID NO: 31609 - DNA, 1657 bp, Bovine  19866880962078
  misc_feature (1)..(1): n is a, c, g, or t
naagaaaattgtctagcaatctgttgtatttgacttctcactctgccgtgttactgtgttgacttttgttcagcctcccaaccttgaagagatatcctcttcaagaacattcaagagaagacagaagaggaagcagagtagcaaacaatttttttttttttttttttctgtagaggtgtccctgtggcaggcagacattctaggaaaacactcaagattctacatccttctgcctggaacccgtgaacaggaagagatattattcctgtggctgtgttaagttacgtagcacacttgacccagaaaaggggagatgattcagatggagctaatctggtcacatgctcagtctctcagttctttcctctctttgcaaccctatgtactgagcccgccaagctccagtgtccgtgagcttttctgaacaagaataccggcatgggttgccatttcctcctccaggggatcttcctgaccttctgcgtctcctacatggcaggcagattttgtgaatcaaatcacaggtgcccctaaaacacagaagaaaacacagaaggaaaatacagagatgtgaagaataaggactgatgtgccccagctagtatgaagatgcagaggaccctgtcaaatgcaggggaatctaggtgtcttcctggggcagacagcacctcttactgatgttcaagaaggaatctggccaacaatgtaaatgaatttgggagtggagtctttccagaacctcccacaaaggccctagctgggtcacacctcgcttttgctttgtgagaaccagaatttagaacctaaaagaggcctccctgattgctgacctctagaagtgtgagctaacaaaaaacttttgttttatgttgctagtctgcggtaatttattacagcagcaaggggaggctaatacctactcctttgtgtgtaattaagttctaaacggaagaggtaaatggaattactgaaaagcaaactctcagaaacaaaattagaaagtaagctcgtttgcacaataaaagaattctttacattgcaaaaggatttagaggttcctttaagtagcacttatttaagtatttgtttacagatcattacttgcttaacagagggagaaactaaaagctgaagtgttccaagcttttgctgattaaatagcaatcaaaaatgaagataaagtatgagattataataataacaaatgtgcatttatgcaggcatttcaaatgttttcattttacataatcaaaagcaaaagtcccaggatttgcagttctctccaggacacttgtccttcttattcaagtcatatttagtgcaagcaagcaactgcgcagcactgaagaccttgggagtacaaagaggaggcaaggaattctcatcctcgggtcctttgctccaaactaactgatgctttctaactgtggtgctagagaagactcttgaaagttccttgaacagcaaggagatccaaccagtcaatcctaaaggaaatctgtcctgagtattcattggaaggactgatgcttaagatgaagctccaatactttgggcacctgatgcaaagagctgactcatggaaaagacccagatactgggaaagattgaagtcaggaggagaagcggagacaaaggattaggggtggaggcatca

SEQ ID NO: 31610 - DNA, 755 bp, Bovine  19866881017212
  misc_feature (1)..(1): n is a, c, g, or t
naaatttcttcttctccccataatctcatccgataagaccaccgtgatctataaacatctaggctcctcatagcagatttgttagctatctggtctccatttgacaagcttttgaacttaatatattaagcagcacagttctctcaggaggtctgaatgcctccattcccatgacagtcccagagttcttgtcaaaagaaatgcagatggaaaagaccgactccctagggcttgttctccatgaaaatccacctaaattaagggggaagatatctggacacatttatctataattagggctaaatactgaggaggaacttccagctggaaccccttcttggatcagtagcacctaaatgctctgatgggatcatactccatcctgtagacctgctttgaccctcaattcttcagtcattcatacatttttaaatttttcatttttcttacaggtgttcatattatagctcaaatttataataacaatgagataaactgctatttttattcgagtactcagttcacactaggtgatgggctcagaattttatatggcttaactcctggaatgctcactgcaactctgtgggtattttctatcatgatgtctattacacagataagaaaaatgaggtgcagacacatgataatacatcatgatacaacacagccaggatttcacctcagaaatggtgagtaaacatgctgaaaatgtacaaaagcctaatttctggtcagcagaatccagaaagcca

SEQ ID NO: 31611 - DNA, 1440 bp, Bovine  19866881086494
  misc_feature (1)..(1): n is a, c, g, or t
ntccaaatataagtgagcccacacagttcaaatccctgctattcaggtcaattacacacacacacacacacacacacacacacacacacacatgagagtatgtatataaatatatacagtgaaagtcactcagtcgtgtctgactctttgtgaccccatggacttcatagtctattaaattctccaggccagagtgggttgccatgtcctcctccaggggaccttcccaactcagggaaggaacccaggtctcccacactgcagggagattctttaccagctgagccacaagggaagcccatatatataatttcttattttattttcccctttttctattaagttaagagatatatcaatataagtggtgttgacatttgcatttcagttcacagaacactagaagccacatcaagaggttaacgggaagatggtatgtcactggagatgtgaggcttccaggtgggtacagcgaataacaggacattgtgtcgtcacttctgtgtcatgaagttgctgccgtttgcaagttaaataaaggtagaagttgagactcaatagtgagtagcagaaaagtgggctatgctagtctaatatctggtttgcttccagatctattccctgaccagcgcccagaagcaatgggagggcatgggagcaggattagcaagaagccacacatggacagaggagaaaagtttacaacactaggaggaggactggataaaaatcagcaaattttggtaactttgtcagggttatagcagacagccaacagtgaatggagcatggtgagtatttcaagccaggtagatttagatccttctctaaaaccatctcagatgctctaatcagcacagattggcaacaccagaaagaagcatggtgcctgatataaaatggagaagacgggacacagtgagctatggccagagagggaccatcatagtgggatgggctgatttggaaacaatcactctgtaatggctcacacggatcttgacttctaatcaaatgagactgttgcgagttcaaaggagaatgtgaattcagtgccactgccagtttatggcatttaaacaaaggcgggagtttgcttgattagtaatggcagtgactggactgccttggcaagacacaggactcgtcctcttgaaatgcaagtgcttaagaacagaaagagagtgatagggagacagaagtgaaaatgagagaagctgaaggatgaacatgggctgacggaggaggatcaaagcagcaataaccaatggagagaattttagaagcaaagttagcttcatttacagattaactctagcctcagggcatgcactgatggaatgctaccaaatgatatcaaattcacagaaaacatcaaatcaaacgcttgggaggaaaaagaaacaaaaacaaaggaaactatcctactgttttgaaggc

SEQ ID NO: 31612 - DNA, 1111 bp, Bovine  19866881105426
  misc_feature (1)..(1): n is a, c, g, or t
ntaactttggattctgtttgtgtgtcttcagggaaggaaatggaaagaagccagcggaggaagaaagccgtgatgagggaagcccagtgcttggtgcccgcagctgcagtctccatcccagtaggtcacaagatacgcagaaggggacagggtaccaagacccaccccagtttaccttttcagtccattcaattatctggttaaatggttaaactgtggtttagatgaactgatattaaattgtccgtgacttgattgtgggttctcctgtgcccctaaggttatgttttattgttgttcaaagtcatgtgtcttagggcacatttccttgtggaagatacgagaatagcatgcgctgtatgggaggcgtaattctatatcacccagtagtatcccgtatcaccctggcattgccattttggagcagagccttgtctgtattgggcatgaggcagggcataatactaaggaccccagacagcccctggtctgcaaggaagaaggacacatgtaggagcggtcgtgggcacagtgacattgactgtcaactcagaggtgagtgagggagaggatggggagagaaatgagctccaggtctgcagagtaggctccaggtggtggaaggaaggtactgaagcacagatctgataagtacacagtttgatctgagcctggcctcagatgtagcccagtcccgagactaagcattggttacaaactgcatctgtcctcaggctcactaaaccctgaccaattctccatgttaattcagactcaggcacagagttaagctgtaacctggcaagtttctgagctgtagcctcaacctagaagaatcctgtttatccattcaaataatatgttttcagtgcttgcagatttcaggtcattctctgaccttgaagccccttcaccttttctcattattagtgtgaaggtaaataagataatacacgttccaggttagtgcagttcctgcacacagctatcaccatttcctaccctcaccacctcctgaatccctaccatttccctcactattgggaggacagtagtcttctttggatgcaaagaggggcttttacaaggtttccagtagttctcataaagg

SEQ ID NO: 31613 - DNA, 1416 bp, Bovine  19866881117228
  misc_feature (1)..(1): n is a, c, g, or t
ngtagaaacttgaggaagttaaattttggcatgtttggttctagtctggtgggacactgttctatggtctaagggcatttctgtgcatcagttcagttcagtcactcagtcgtgtccaactctttgcgaccccatgaatcgcagcacaccaggcctccctgtccatcaccaactcccggagttcactcagactcacatctattgagtcagtgatgccatccaggcatctcatcctctgtcgtccccttctcctcctgcccccaatccctcccagcatcagaatcttttccaatgagtcaactcttcacatgaggtggccaaagtactggagtttcagcttcagctcattccctccaaagaaatcccagggctgatctcccatagttaacttctttccagctctcccaggaggcaatccaggatttctgtaagccacactgtccccttagctggcctcatgccaccaaggtgaggaggtgaggtcatgtcatggcaatataccctggcacaggaagtgttgtggcagcggaggagaaacaaggtttgaaataaaccatgtcagcagcaagctgtggaaaaatcttctaaatcttacaactcacatatggacatccaaatttgacaataatcaaatatacaagaccttaacaatgacgagaagcagaataaaacttttctaactgctaattaaaaaagctttcaatcaccatattagaggatagatttaattatctttctattcttcttctataaaattaaatgtcatatgaagagagggtcaaacagtagcccacagacacaggggaaagttatagaccatgtgccaggcagtctgcgtgtattatatgtgatttgttgtatttgacatccttttcatgttttttaaatgattggtgttacgatttatattctctgagaatacatattcattttcatgtctgatttcatattcacaatttcatattcttttccttaaaaatgctctgaaattgcatacacttcctgctcacaaaacctgtatgcatcctgcctgccaagctaaccagaattgaaagatcttcttcacagtgtaaagattcatctatgtccctctgattcctctgcaatcaaattcacacacatgattgtcaatcccaaagaggtctagaatttctttttaatgaacatttgagtcttttggagaacaaggccccaggacttgatatcagaagttagatttctcatgtgcagctccctatcttactgtaagggttgtaaccaatatttcccttttttgctttgcctgctagaaaacactgagccaaatcagcatttggtgcaaatgcagcaattgtaccaatacatctaagtcacacttttatgagcccgtcttcctttttaaccatcatccccaatgccccagactttagactttct

SEQ ID NO: 31614 - DNA, 1370 bp, Bovine  19866881137675
  misc_feature (1)..(1): n is a, c, g, or t
ntctcccctactgtaaccaaaggaaaatgtctgaattcctagtaaaacagaagtaacctctgtggatgtacccagactatggccttcagaggtagggctcacttcacagcacagggaacccataaggtggccctccttgtaggagccactctcagcacagggccaacatccccagggtcccaggatggctgcttcgtgcatatgaagcccctggaacccatagtccctacctggttgatggggtgtttgcgcctctccccccatgctcctctgttccacccatctctctatctgcaggacctaatccagcatctccagacacagccccccatgacctcccagatttgacctgcccagtgggagagactatagtaggacaagtcagtgtcgtctgtctcccccacggtcgggttcacaaggggaaaagggcacaatctggccactcggtacaaattctgacaaatttttgaacaatggtttcatctcacaaagccttcatttactcccccagagaacaaaaataataatatctgcctcacagggacagagtggaaataaaaccagacactggaggctaaatgcccagcatagcgctcaataaatcactcatttaatggaattacgaaatacgaagcacgactaggagggaagctttgcatgcctcccaggtgtttttgaactcacggatagattgggcggatatctaaatgtatgctaagaagtccacgataagtcaggctccccaatttaatacagaacaatctgaaaggtaatgaagttgtctcagactgcctttgtcttaaaggcaatcgcctgcagatagcaagcccagaatattttcaaatgagatgccctgggagagcccttggtgggcgccaaagcagtcagtctgataggaaaaaagaaatcataataatacagattgttgtctgaggcatttgtctgtgcagtctgttgaagaaatagcattagctgcagagacaggcctgacagggcggccagctgcaaggagcatcggggagatacagcagcttggagaagcttgacatcactgccaaatcctgcctgcaacatcagtgcaccccattcgccaggcacactggaggaaggtaaaagtgtgagcaagcagaagcatgtcagcatcaatcccggagggtgagcgggcggacaaggatgccggcaccttctgagacttgccctgacccctcggtcaactcagtccacatctatatctaagtctaatgtctgtggaatatcatttcttcaacaagtgtttgctgagcacaaagaccaaagaatcactttggatactgaagacacagcaaaggacagctcagataaagctttcttctctctcagcgttcatgtga

SEQ ID NO: 31615 - DNA, 2387 bp, Bovine  19866881143673
  misc_feature (1)..(1): n is a, c, g, or t
ncagaatgaaaccagattcccctggacataaagcattctgagtcattgcctcaggtcacaagggctgacaagagatcaatgtatgtctaaccccaagtggtccactttgccttcatgtggctgtaagagccgcaggaaggtgggctagcatggcccagggaagctgtgctcagaagggcacactaaatacacctattatccctgtggctttgtcaacaaaatatttcaacccctgatgaatctctctgtgttcctagatttatttttaggtgcagcacaacagattgtttctttgtttgcttttctgtttgctcatggttattacttcctcctgaacggttcatcatagcggcagtcatacagtaatcatctagcagtatattattatttattatgtatccagtaccataaaggctcataaagcttaccaggtgcccatgacaataccagccattgactgaagagcttaatgttgcattcgggcacttactggggagctggagctggaggctcagtgatgaggccgactgtcctgggaccaaactgttactcctacttcctcctggcagtgtaaagggatgcagagttctagaagctccatgcagtcaggacacagagaaggacatggacagggcagaaatcttgatatggatggaacaggagaaggaggtggtgcttgtaatagcatggttctcatgcttctgagaacgagaaacctgattctcatgtcttctgaaatggactctatagctgggaggattgttgctgtttttcagtcgctcagtcgtgtccgactctgcagccccatggactatagcccaccaggctcctctgtcatgggatttcccaggtgagaattacggaatgggttgcattcccttctccagggaccttcccaacccagcgatggaaccctcatctttcatgccttctgcaccagagctccttttgctgtgttgctcttcactctatcagggaagaacccaggttggtggcgctggccactttctccaagctcccaagcctgaggtcacgcattcaattattttcaaatactgcctattcagataaaaaaggaacggaggaggaagacagctggctgaggctgaggctggttgcagacttgcttcttgtcctcatggtggctggcgagtggagctctgtcagggatcccttgcctcccgtgtcagacagacttcagtctcaggaggacggctgtgcttcccttgtggctgtgctcactcttttccctccagtgctagattcaagataggattccacaaccagtcccccatcattcactcggcatctgcaaatcccaatcagacaagaagattttgtcagatttaatttttgaagtgtgtttatggaccagttctctcattgactctgccttatcagcctattcgatgcctctctagactttcaggcatgcctctttattttcccatggttgaaaataaggttgaatttagaaatccctcaagtttacttttcatttttgattgtaacccaagcctgattaaaaattttttttctcccttttcattatctatcaatctttctgatgaaatcaatggagatagaggcaagatacctttgctcaagtcactatcttacccaattcctatgcaagaccaaattttatatattttgactaatatatccctcaggtaagcctgcttgctgtcaataggttaagtcttcctgtttgattccatcatctttccagtgtagacacaggtgaagtctagagtttccaggagacaacaaaatacttctcatgcaaaacagggacactgagtgcctcagctgtaactgttactctgaacaaactctgtcacacgatcacatgatcttcagcacttgacacatgtctatcagaaatagaacttatgaaaagaaccccatttacaattgcatcaaaaagaataaaataccgaagaatttaaccaaggaggtaaaaaaacccctataatgtgaaaactataaaaaaccccaaaaactgttgaaagaaattgaagataacacaaataaatagaaagtatttcatgctagcagattggaaaaattaatattgttaaaatgtccatttagtaaccaaatcaatttacagattcaatgcagtccctatcaaaataccaatggggtttttcacagtactgaaaaaatataattgtaaaatttgtatggagtcagagaagatcccaaataacaaaagcaatcttaacaaagaagagcaaagctagagataatcatgtcccagatttcaaaccataccacaaagctattagtgatcacaactgtatggtactgggataaaatacttagttttaatcaagaactttcttattttatcagtcttttccatatctggttactctagt

SEQ ID NO: 31616 - DNA, 1061 bp, Bovine  19866881157626
  misc_feature (1)..(1): n is a, c, g, or t
nattatctaagtagataagggttaaagatgggaaagtcacatcattagaagtttccatgactcacaaaatagactaccctgagaagacgcccagttacccacaggatgtcactaaccccttatctgttccataagagtgccatgtctcttcgtctatttgtatagtttttcttcttatcccattaacctcttctctctctaaatctgtgctcacctaaacacatctgtgagttccccaaaccatcttgccctgaaccattccagatggttctacccatgatctccccactttcacctcctacctcaaccctctactccttgcccacagagtagactcagcacaaacaccacctcctctgtgaaacctttcctgacctcaataagcagccttatgtccttccgctctgctatttctacccagcactactgagccttgatcatcatcagtcagcattagcaagtggtagaaaaaatagtgtcacaaaatatcctatctttatatgtacccaagtatacatcattaaggtttattgactcttggggatttcttttgtacatatggagaaactgagaaagtgtgctgttttatcctcaagaagttatgtaccatgggtatacaccttaagatgttcgagtgcctggcaatccttatttgtggatcaactatgatgagtgagcccaaaaagaattatatgagaaactgccatactggacacaaagcaacaccaaagccatgaatccatttaattcaattcaatacacaattatccatcccctactaggagcaggcactgtactgcctgctgggtggggatttacccagctctaagataaggtctggacattgtggagctacagattgaataagatcctagacaaggcaatgatatatcctctttggggtaaatgctaatattggagagatttttttttctccaatagttagaccaatggtgtttcttgtagtttccatccattatccctaggtctggtctctgatgagacctataaaaaattcagaggtctttatatacaacagtataactttcttttttaatgag

SEQ ID NO: 31617 - DNA, 1504 bp, Bovine  19866881158195
  misc_feature (1)..(1): n is a, c, g, or t
ntagcgcacttgaatgactgcttctagagtcatttcttctccctgattctatagtttcattgtcccagacagggcaatggagggaagcaggtcgttggagcctgaagaaacagagttttctaacaggtttttcagctcggggatagagccggagatctcagagactagacgatgccctcagccaggacagcccctgccgtgggctggatgacaacctgagagcttccggtttggagcaggtgccaaagcaggacgtgaagtctcatgctgggtttcagccctgtctggcagactgtctgcggggtttaagacccagagacatcctttcactttggagcttcttctctggaggctgggagttacttatcccgcatcacaaaagtcacactgttctttctgtaagagccaaggcttcctcttacctgcacggacatggtccttttgatctatggtgggcactcgcatcccctgagcacgagtctgcccacctcagtacctctctccactcctccaacaggatgcttttacctgaaaacacaggcccacacccaagtgaatattctccccctacctggcttctcgcaccctccgcctcacctggtccacacaccagacctcacatcttccgatccccatggacgaagccaagcccacctctgctcagcctccctgaggcaatggtgggacccaccctcttcctcccagattccttgtggatgcttcttattaagaaaagaaagtcaaacacacacacacgcacacacacacaaggccaacaggataaccctagaacacgtcggcctccaagtcctcagagtcggctgcatcggcctgggtgcttctcttgggcccacggcacaccgcgatgtgaagtggggtgaccaagaggacagctccggtcccgggagcctcctcagtcccaggctgactggcacagtggatccccctacagcacagggacccaggggccaggccaacgctggctcgaggctcaccctttatctacgtgagaggagtaaatggaaaaaggccaggggcagaggaacacgcaggagccacgagacagggaaggaggcagcgccccgggctcctctaaagggactggctgggcaccttcccctctccaccagcagggggcgtccttttctgatcacccctcctgccctcgccctcggaaaggcccaggaacagggggcttctttggcacttcagaatgatcacaagtaatttgccattttattcatatagaacaaaatttacaaagtcattcatacaggttttgtttttttttttactgacttcgaaaattgggaatattcaaaatacacttttaccccactccattctgtcattatttacacgtatatacaagaaaaatgaaagagtctctgtgtgtgtgtgtgcgcgcgcacgcgcgcgtgtgtgtgtggtttgtgttgtagttttctggtattaaaaagctctgctggtcgggtgggtggatgggcgggcaggagggcaggcg

SEQ ID NO: 31618 - DNA, 757 bp, Bovine  19866881161814
  misc_feature (1)..(1): n is a, c, g, or t
ncttctttgcctggacctctactatttgaggaaaccttatgcctctagtacatatggaagaatgcccccttttaaaaaagaagatatctttctgttttgcatgatttaaaaattctacatgaatacttttctatcataaaagatccacccactctaccacatccatactctatcctcaattgcagattgatatgtacctaatagaccttcttctgtgcatctacatcaagttaattaagtatcaagttgatgatagcctttgaattaaaaataacattttaatttgcttccaaataacacgaagagcatgagggtgaggttcaactgaaacagaataaactctgctgataattgttgaaacagtatgatgagtgcctgagaggctgtcactttgttctctatagtttgcatttttttatatacacaagtaaaataaaatcataaaataaatatatgtacagtgtaaagaatttttttaaataaaaatgagaaaataaaaacatcttctattatccagaatttaccacaattaataatagcatgttcttatattatatgtccttccaaatctttgtgatacacacacacacacacttacctgttatttttaaaacttagccaaaagtagataagagtatacatgtttagctaccttttttttttttttttccctgttgttagcttgtttcttatttgggaaaagtaatgtcatctttatgcttctaagtcaatattcaatattctttgtctcaataat

SEQ ID NO: 31619 - DNA, 2296 bp, Bovine  19866881194314
  misc_feature (1)..(1): n is a, c, g, or t
natcacccattgcagaagcagtttttaggaaaccctgtaactgatccaaaccatttcagatagttggaggagaggccatgcattgacaaccatgtatgaactaggaaaccctcctgattatcaggggacaggcttcaatgaaaaagcatgatagtcccatgagtcatattgccccgcagattacctgaaacgatttccacttttgactgtataccacatatgggtgaaatcaattaaagagatttgaacagaaaaagttatcaagttaaaaactacaaagtgaaaattgaactatttgggagctatgatccacagaaacaactcattattgaaaatcactatcattgaaaatcacaactctgactttgagaccatcaatgagcaatgtgtgcagcactgcagaacatttctggagaaggttcactgaccgggtccagtcctgcgaggcccaggcttatccccacaggccccttttctcggctcagtgtcacagttccctagctcaaggtcatagccctttcttcagttgactcactgtttcttactttaaagaaataattatagataaaaatcagttgtatttggcagaataatacataagcattttttattagacagtttatggggtgaagatgaatcagaaagcatggcctccactgtccttttggacgatgtgtggtgtttgcccgtctgctcagtgccaggcagcagcttgatgagtaagtgcataagtaagcgtgttgcttgtaatctgttcatggaacaagctggtgaccctggacccacagcagccttccctcccctccatcttcagaggagtgtagcttctcctccctggggccagcagccccaagacaggaccccatgtggagagctacatgaagacagctcttcttgactctctcttcaaccctgttcacagttggtgacccaaaatcctggaaggactctgagtcacggatcaaactgagtgacagtcgttcagaagctgagagagttgagaggaacagcttccaggacttagtatcataaggatccctggtgggagacgctgagtcataaacccacctgggcttgaaggatgagcaggcaagtttcccacccagggtagcaaaggcagaaacgctggggaggtcgtggcaagaagactgggcaaatgtgtctggctccctgtggaattgttccatgggattcttttcctgaagatttgaaaggttaagtgaattgagaatttgataactatgttcataaaaattaaagaattgagaaaaaatgtttaactgaaactagaacatagaaagtaaagcacttcaaaaattataccttaatgtcctaaccattcagtacttgtttcatacttcaaagtgatatctcactcttttctgttcgtttatgctcataaactaatttctagcttgttttctttcatatatatgtcttaaatatagattctcggacaaattctaggattttttaagttggctttgtctttacagctatttttccagaccaggggtcatgtgaatagagagactcattcctgaatccacttgtcttttaaaaattagattcagtcagattcattcaaaatatgtctacctttaaaaatctggagtttcttggaagtcttaaggtcccttttttagtttaatgtttccattacaaagtcacacaggaaatacaaatacaagcttatttgaaatattcactaccaaatcaagctgtatcttaagaaatatgttgccaatatagagtgatactctctttaaagaatactgatttaattgtcccttataagaatttatagccttctcattttatttacttatgccttttacattctgtgacattctgccagtatttcaatctcttcatagatttgggaatcacgaaatctcaatagtgaactttttcaaaagtaaagagtcacttagaagacttcattataacaatggcaacaaaaaaaacattcttacttttcatagaggactttattctacttttaggctggtggttaataaacatttgtccttaacaagcattctaactataccagagtatatcccagtgaacacattcttgaaatttcagctgccagtgcttattaaaaaacatttgagaaaaatatttttagtctttagcagcaaatattaccattgtagcactcatgtcatgtcttagtccttaatactattcctacttaaagaagtagttgattccaagactggggcagggatgagtacagatgatagtacaggtgacgtgtgtgatgatagacagcaagaagctgtcaaat

SEQ ID NO: 31620 - DNA, 989 bp, Bovine  19866881241825
  misc_feature (1)..(1): n is a, c, g, or t
ntgggaaaaatttccttctgttatatggttcccaccaagcatcgaaagaaaattttcttagggaccatgttcctagtggagtttcatatgccagtctaccaacagacaatcttcaccgttacccccaaatatccaggaagaaaaccacctctcacaatgggtgcacagctccacatgcacctcccaggcctaagagaagctaacctcttctcttaggttgattgcacctatgtcaaagactagtgggggaactaatcatacacactctgtgtttctcatcttggaaggaagggaataggtgggcaagtaatgtttctaccttttgcgccctcctgctcagctaggattccagtagtgttctggttgacttaagacttagcattcagaagatgagctgagacgtttcccagttatttccatatttttgactttctacagagaagaacttaaaacaggttcaaaatcatgactctctacaggaaggctctgtccccagttctgacagatgaaatcattccccattaacacagccatcacagaaacttaagatacaggactctccttactccctaagtgtgcaacttttaaatacaagaggcacccagtgagctaatatgctgcatctgctgacatcggccataattgcctgctaatgtgcttagaggtattgcccagttgactggtttcaatttcagcacagagttctaataattacagttggtggggaagtgtgctcaactagagctgaggcacactgatgcacgaggcaggccaagggtatgggtgagactccctcctggaagaagtttaggaggccagcactgacctgcagcatctggaggtagccttcctgggggtcgcagagcaaggaggagatgcggtggttgttcctcatgcatttctggttgtcctttgcagaagggaagatctgccggaccacagtcatcctgccaagggcgctgtggaccagatccaggatctctgggtca

SEQ ID NO: 31621 - DNA, 3045 bp, Bovine  19866881259754
  misc_feature (1)..(1): n is a, c, g, or t
nactctgtgcgaccccatagacggcagcccaccaggctcccccgtccctgggaggctccaggcaagaacactggagtgggctgccatttccttctccagtgcatgaaagtgaaaagtgaaagtgaagtcactcagtcgtgtccgactcagcgatctcatggactgcagcccaccaggctcctccgtccttgggattttccaggcaagagtaccatggcctttcttttttctgaggtgctacagaagtttgtttgggatggatacataggagtggaattgctgggtcagtgggtatgaaaaactccattttctaagagaatgacaatttgttttcaaagtggcaatactgagtacactcccaccagcaattaaccacctgctactcagtcctctccaccacctctcctttggggcaagtctagttgatacaaagtgatatatctttatggtcttgattttcattttctggaaacactaatgactgaacatctcttcacatgattactgaccatatgtggtacctcttctgtgaaagtcctgtacaagtcttttgctcatttttctattaaattgtttgaactttccttattcgtttgtaaaagtttttcatgtaatatccatataggatattaaccctttattggttgcatgcactgtagatactcactcccagtgtgtgacttgcctttttattttctttataaagtgtcttgtaacgcacagaagtttgataaagtcaaaagcggcatcttttcttttagaagttctttttgtagccttgttgcaatgaatcttcataagcatcccgtttggatgggcgtattggctctccatgagagacaaagaaagcagagaagggaaactcaaaggccatttggctcaagtcttacatttataaaaggccttaaatcaactttgtattcattatccgcaaatgaggtcacctacagccacaaagatccactgtcagggggtgaaagaagactcagcagctcgaggtgagagcaccgtatttctttgcacacgaggacataagaagttttaataaaccttgtgagcagaggactagcacatctatgctgcattctattatttttgttatgatatcccttgcttaaatataaacatttcaaatctaccacaacatgtccttctaaatgtttcaagtgtctaaagagaccccccaaacgggaaattgaccaggcttctcttaacacccagagatttgacaagaagaccgggtgctccatgtaaacatcactggtgagctgtggaactgggattcacacccacatgtgccaggctccagagcccagacactctctgctgcttcactttgctaaacgacggggaaaagccaccccaagctgactgccccgtgagcatgcagaccacagggactcctagaccacgcagagccctgcatcaagacaccatgccaggagccaggctgctgcttctgaagcaggcctcaggctctgcctctctccctggacccattcttgagaggggttggcaaactactgagggcttttctcatcatgaagagcaaggtgggtagactctagtggccttgaaactttctggagtctcccccttatacccactgccctctgcagtaaggccagggcatgtgtgtgctgctcagccatgccaaactctttgtgactccatggactgtagcccacctggctcctctgtcaatgatatttctcaggcaagaatactggaggggttgccatgtcctcatccaggggatcttccagacccaggaatcagacctgtgccttttgcatccccagcatttgcaggcagattctttacaaccgcaccaccgggaagcccacagtaaatccaaggttctgccaaatgaccagggatgtagaacacaggtgcgtgcatgcacatgtgcatatgtgtgagcattagtgtgtgtgtgtttgtgtagtgggagcacgggcatgagtgactatgtgtgagagcctgtaggaatgttctgcagaggtagcatcgatgggtagggaaatgtaagacacactgaggcaggctggatgcatgtgcgtgtgtgtgtgtgaatgcgtgtgaatgtgtgaagattctgcagaagtggtggggcaggttgaatagagaacagaagggaagagatgctgagcaagatgggctggatagaggtctacccagagagacaggagtgctgggcgctgtgcacatctttcttgtgttgttcactgatgaccaagagtaagtagcctctgtacgcgagggtcactgagaagaaggtgccaccacccgagacatccttacgatacctgccttcatcccaccatgaccccatgttctgcagcacgtggcggataaacaccaaacccctcagtctggaaccccaggcatgagaacctaatgaggagtgtgacccacgtctgattctcatctgcataatgggacaatcacgatgaatttgggtccctgtggaaactcattgaaataagttagcaacgtctagtcatctctgcagaacaggttcatctttcccacccatcctctctggcgtgggctcttctcacgcagtgctccctcagttccaccccgcccccattcagtctccatgctgggcttgctgtcctgacaactgtctcccaagcacacctctgctcacagtggtcccacatggtgcccacccttccctgaaccctggcctacctcctctccctctcccctggtcctctgcgtctgcttttactgagtgttcttacttgggtgggcagacccctctgtaccactatcctattagcccaggaagagggagatccaggtcttgggcttaacctccctgcccttccctgatcctttgaaaacttagaagggccttaagtttccctctgccagccccttggcatctcctgccaaaaattggcatctacctgaagaatgtgagcctttttacccatatgtctatgaaaaatgcctgttgacgctgctgaagatgggtcaccctgcaggtgacagggatactcaaaggagatgcctctaggagggtgtctccta

SEQ ID NO: 31622 - DNA, 652 bp, Bovine  19866881396305
  misc_feature (1)..(1): n is a, c, g, or t
ntagcaatgcttgtttgagggtggaatgaataaccgtgctttaaactcattgttttgataggaagcatgcacttgtttcacaggggacaatattgtgttgtctgcattgacatggggttgtgaatacagacctagatgctgccagaatagaggtgctaagcaaagctgggtcaaggagctgctctctcacagtattttcatctgaaaagttcattttgcagaaaagaaagagatggtttctgacgataagctgtgctggaaaattgccactcgattgcattttcttcctatctggaattttttgttttgtttcatatttagtgcctatcactttctcttttttcttgaaaagtaccctgaatatttttcttctgcttatgaacttaagagacagttgtatcaacttcaatcatgatcaatccctatgcaaataaaagtgaacaaggcttgtctcccacccttgagagataatcaccatcaaaggttcaatgtatatctgcccatctttccccacaaatatagtgtatatataatatatatatattatatatatatatatacactatatatatagtgtatatataatatataattatagcttattcttttttttttttaagtttgggtcatagtatgcatttgcttgtttttt

SEQ ID NO: 31623 - DNA, 1150 bp, Bovine  19866881493717
  misc_feature (1)..(1): n is a, c, g, or t
nctgaacgagtgaaccgtctgggatcccataaagaaaacgttattaatgttaaactgctgtagagtaattgcacctggatcaatggctttccgttctggctgcacatcagaggtgatccatcctggagctttttagaaatacagatacctgggctccattctccaaagggttgtatcaggcagttgaggacaactgtaatttctagaagctgcccatgtgcttctgatagcctgccaaggaggaaaactactgctttacactgtcatgccaaggggaagttgagtggaaaacaactcaaggtttgaaaccaggcacacgtggctgtcatcctggtgctccatttatcacagaattgtgtatcctcggtaagtcccttcacgccatgtgtacctgctgctactacatatgatgggaggtgtctattgactccctcctttcacggtcctcctctacaaaatctgcaattaagctcaccagaattctttcctacaacattctgaaacaggggtccccaacctctgggatctgatgcctgatgttctgaggtggagctaaggtaataataatagaaataaagtacacagtacatgtaacgagcttgaatcgtcctgaaacgcttccccgcagatccatggaaaaattgtctttcatgaaaccaggccctggtgccaaaaaagttagggactgcccatcgtaccctgcggccacttcactgactcaaagtccagcttctttgcttttacccaatcattactctcaaacttccagccagtcctttaggcttgagcaatgctttggagcaatacttaagaagatcacaatgatgtgtgtctcccagtccgttgagtcttatttaccacctggttggtctgcggtaacaggagatcacctcctacaaccatccttgtcacgtgggaagtccctaatcccattttgttcctgcctaacttaaagtaggagctgttggactccaaataaagtcggttctaatgagtcccacgtgtaacctgctgttacatagatgatagtttagttaattaccgttttccagtacaatgttttatttccacattggtgaacagcggctcaattgcagaactttctgtctcttcaagacaatgcctgcgagagggtctccagtaacctctg

SEQ ID NO: 31624 - DNA, 1705 bp, Bovine  19866881524979
  misc_feature (1)..(1): n is a, c, g, or t
nctgtgctctattttgataccttgtctcttatttctgccttgggctgacctcgattcggagctcagcccctgtcccttcatttctcacagataccatttgtgcaggtggcttggctgtgcaaccacttttcctgaagaggcatgacagcatggcacagctaacagcctaaacccaagtgacagacagctcatccttgtgtcttctcagcagccttgaaggctctgccccacctacactgtctgcctggcagccaagtctggtcaacacagatcccctgctccctgccctcaccctctctcctggtcttccttgccctgcatctcccctgcctggtttactgttcatctcttccacttgttcctcctgaaattcccctattcctcagttcactctccttgttgcaccccaagcccattcctacaatgcccacagggcctccaggcatattctaagaggcccattaaaactcgtttttaaacaagcacaattctctccctgagtggaattctgctcccaatatctcaaataacattgtttccctcactcttgcacaggccactgaaggcagccaggccctcctgaagagttctgggagctctcctttagagctccatcccctggcacttccctccggacagcctccatgtgaactccacgttctccagatcaaaacacaggccctgcagggccctattcctttccacaggcctttccctctgcctggaataattgaccttctcagctgtcaaattccctctcgtccttctgaacacaactcaaatatcaccctctctgacttctctccagttctctggaccaagggagctagacgcgtcttcccctgagtttccgcagacatgcgttgtcatctgcaaaacactacctccctccccactgagtatcacagtgccctatttacccccattttccccttacaagtaggagagcctttcacggaggagccagggctctcctagtcctgtatctccgcatattttgcagctggcagattattgcctctttgaaagtatgatttaaatgggagtataaatggaaaataggtgacatatatttagtgcttactctctgccaggcagtgttctaagcaccaaacatgcatatctcatttcactacctgtgtgtacttcctcaccaggacgctataaatattatggagtactttacttacaggtgaacatcccgaggctcatccatgttaaagggcttatgcaagatcactcaggtagaaagtgctggagctgaaatctgaacccacccatggctcgtaataattatgttggactcaaacctatggcttttccggtagtcatgtacagatgtgagaggtggaccataaagaaggctgaatgctgaagaattgatgctttcaaactgtggtgctggagaagattctcaaaccagtcaatcctaaaggaaatcaactctgaatattcactggaaggactactgctgaaactgaagctccaattatggctacctgatgcaaagagccaactcaatgaaaacaccacagaaggcaaaaagagaagggagctacagaggatacgatggttagatagcatcactgacttagtggacatgaacctgagcaaactccaggagctggtggaggacagaagagcctggcatgctatagtccatgaggttgcaaagagctggacacgacttagtgactgaacaaca

SEQ ID NO: 31625 - DNA, 1548 bp, Bovine  19866881733845
  misc_feature (1)..(1): n is a, c, g, or t
ntgtatgtagtatccccttgtgctgtactgagcttcctacttatgcccctgaccttcctcatactgagcaccagcaaatatccaggagtgtggacgcacccgttcattccttccatagacattttttccgaagttcgtcatctgccagggctgtgtggtgactacatcagacctcagccctggaggagctcacttcttggcgaggggctgaaggctgccttccatatacagaagccctgtggcaatcagaggatcacttgacccaggagttctggggaaggatggtggcaggaaactccagaatctgggacctgactttacagaagtctgtttagctccacatgccaggcctcaccactgtctgcatcgccttccagctccgctgtcgattttgcattaaacatctacaaaaagtgccgagtgagtgtgtctttgctcagttcccgagtctgcacaatatgctcaaaagcacacggactctggtgtctgaaaggctggattgtgctgcctcggccgcactgacttgctgggagacttccccacctacaggctcagaacctctgtcaatgagctgtcctgaggacccagggaggtttcacctgtaaagggcttagctccaggtcaggtggcagagttgttcagcaagtgtcagtcattggacccagtatgtaagtaaccctcacctccgtccagcctggcccagccagagtacttcctgcattcccaggctataggctcagatctccctcttcagtgtcccagagttacttttggaagctacacaagattaattctgccacaccttccccagatggccttgtgtggctgtgatacaggacccaagattcctcagtgagatctacgagtaaggatggagccagaaaagctaaggagtaagagtaaggaggagccatgggagatgtggggagggggaacagatgaggggaaatccaccagttttctggtgaaagcaaggccccaaggggttctggaggcaaggctggagtatagagggcgagtatctggaccagaagctcaggccttttcccgagaaggcagcccctgggaagcacggtgtggcatcatgcagctcagtgctaactgcccttaatgggtttcctcatggtagttctgggcatatcttctgaaacttgggcctcatggtgactgctttgctggtctccttgagctcctggggaccattccttgggctcccgggaccatccatagtcttgcaaccagctcctccccttccttgcaaagaggggcgttgcacttgatcatgctccaggggggtgacattgcatagacagaattgttcctaaatagcatgctgttgcaaagacagcagtgggtctttaaagttagctccatgtctgtccttgggaaaatgccaggccttgggctccagggggggactgttctgaaatgttagagttggggttttaaaaagatgcttatcgtcgacaagctttcattatctcaggctcccagtgttgggggagggggatggagacatggccaacaattaacacatacacaaatagt

SEQ ID NO: 31626 - DNA, 739 bp, Bovine  19866881760500
  misc_feature (1)..(1): n is a, c, g, or t
naattgaaaggtggtgcattttgttggaacttagtaactaagatggagagcatggcaggggtttagtttgaagagcaggcctgggacaggtcttggaaagttttataagccgtgaaaaggacacatgcttttaaatccaagtttaacagagaaccacttgagaattttgagaaggagagtgaaatagaacaataacaatttttattagaagaggaaaagaaagaaaattctggctgcagagtagggattaggtagcaggaggagaagaggctttgagagataggtaaagcagctcataaggattctagatcagaaatcatgatagcatgatctagaaattgtgcttctcagcacattaatctcgttaatatgcggaagctgactcaagaaacgtgggatggagccaagattgtttgctttaaatgaatttccaggtgatgtgatgccctggtccaagcaccacactttgtgcaaagagagtttagaggtaaagatgtaaaaaaaaagtgggtatttaaaatgccttttgaaacattcattttactaacactttcccatgaccagaagtcttaaagtaagtatgcaaaacaaaatcatgcaaaagagaaatccagcccaggcacttgcaaccattataaataaaccagaagtgagtgagaaagccttttacagagcttcagatatgagatgtatcctgggagctaagagtttgtgaagagcacacagtttcaactagtta

SEQ ID NO: 31627 - DNA, 1513 bp, Bovine  19866881917372
  misc_feature (1)..(1): n is a, c, g, or t
nctgactcaccttatgggcatgaggctacagctgtgcctgacagctccaccatccccacacaagtggttgccttgccccaccatcccccccgccccaatccaaaggaaacctacccatccatccagttacacactaaccatcactatgcttatttccatccagcttatggccagtgaatacctttccgtgctctgcactctgttgtgaatgtctgtctgtgtgtgtgtgagtaactctgccacatcaaaagaagatgatttgatttgatagtttatgagcataggaagagaggctaatgtccaagaagataatatgtttttaccattttgttttctactattttcattctactttatttcatattcattctaagttggacatagtctaatatattatttggaaaggtgacataatttctctttatgttgatttatcatgctctccatttgcttggttattggattgtttaccagtttttttttcccctcctattttcagttgtatttctgtgagtacctaaatttttgtttattgaatccaggggaatttctttgggatataaacacagaagtcgaatttctgggtcaaaactgtgaacagttttaaaggtcttattacatagcaacagatttcttcttagaaagatgaaaccaatttgctatgctaggagcaatgtacaattgtgcctgtttccccatggtcttgtcaacattgacttgaaacattttttttatcccttgtaccttgttttgctaatttagttatgttaggaggcacccgtggaaaatagcacaagggaaaaatcacagacgagtgtcatcatgttctagtgtgaagcactctcgcaattctagcaacttgattttatcagagcctgtgtcgttcagaatgctttcagcaacagaaagcagaaaagaaaatccatactggctaatatcatgaagcaggtatactgagttgggtgactgctctgctcatagggattgcggctcatatctctaccattctcttggcattgcttttctcttcatgtctacttactgttgcagggaaacctgctaagacagctccgagcctcacttctgcatctgacaacacacagctaaggaacggaacttaccttcttgtgactccttttacaattgaggaaacttttcaaaaataactcctcttccctcccagatactgtctcattggactgaagtgggtcccttgcttatttctgaactaattactacgtgacagcaataagcatgggtattatcttaggcttgcattccagtacttctttcacacaatccatgcatgcaggcagcaaaagtatggtgagaatccaattagactcagtcccctgggagcaggacttggaatgtggggtcaggaaaaggagaatgcaaggataaaacagaacaattaggaagggggaatagatgttggggaaacaatttttcgtcacttcatgacaaatagatggggaaacagtgggaaacagtggctgactttattttttgg

SEQ ID NO: 31628 - DNA, 704 bp, Bovine  19866880465847
  misc_feature (1)..(1): n is a, c, g, or t
ntgagtcatgagataatgtctgaacaaactaccaaaggcctgcaatacataatagccatatttgactgcaaattcctgctctctacagggtgaaaatgggcatcagttgttcaatcagaggagctagcacaggctttcattcaaaccatccactgtgttccctccttccctacctgccatggaagatcaatgagataatgcatgtgtataattcccttgaaagtgcttgggaaagtataaagcactaccaaatgcaggttgtcattataatgcttattaggggtctgattcaatgctattaaaattcgacagcacggaggatgggaaaggcaggcagatttccaaatggataataacttttatcagcatcagactgtatccagagcatgttttgtccttctgatcagcaatgaaaagtgctgcaattaatttgacagccaagcaaagccatgaattaatgggaagtcattctctgaggaacgttcttccccatgaatggggaacaaatgactgaaataatcaagcagatatgctagtcttggaaactggtattagggcaaacttcgcttgtatgtataccatgatcacctccttctaatatgggaatatcaaaagcatgatgagatacagagagtaaatgctgttgggaagatcatcagaagagaggacacaaaatcaatcagggtgcgggagggaaacggaag

SEQ ID NO: 31629 - DNA, 1124 bp, Bovine  19866880758939
  misc_feature (1)..(1): n is a, c, g, or t
naatagaaaattctgctgcatagtatgacccactgagaaatgaggatggacttttatttactttctcagattatgtaagactatgtgcatttttaaagacagttatgttaatgattctttaaatgtattttatacctgttcagcccttaattcacaactccctgagaattaagtagggcaagacaacattttctacttctcagcttgggaacatacagtttagagatttttatcttggtcttataacgttcaatagagggagtcatgatttcaacccagtctcttagatcccaaagctcatgctttgccaactatttctttctgaggattttaacattatcaaatgatttgttactcagcattcttctggtttaactgttactgatgaacattctcatagtttcctctattttcaactcacatcctgttcatagcaagttactatggagacatgacatattactggtctctctgtaggatagtgacctggcatatttaacaatgctctgggtatcttagcaactcaaccaacattattggtctttgccttcacaatttgtacttttgctgcagtaaatgaaacctgggtcggggctagtttctaggggataacaacggagtttttagaaaggaagtgagtgttaaatgcatcaaatatagtctctattccaccaactacctgttccctttctattaaagcagttttgaaaatgattagcaatgaagaaatagaaagctaagggatttagtatttccttggtggtccagtggttaagactctgtgcttctgctgcaggagacatgggttcaatccctggtcagagaagttccatgtgctgttcagtgtggtcaaaagtgcacacacacacacacacaaacaaaaagaaccccaaactaagggatttaggcacccaaaacttcaatacctatcacttgctttatcattctcactttgaatgttattaaacaccccctgaaaccctgatgctgggaaagattgaaggtgcggaaaaggggatgacagatgatgagatggttggatggcatcaccgatgtgatgaacatgagtttgagtaggctctaggagttggtaaggacagggaagcctggcatgctgcagtcca

SEQ ID NO: 31630 - DNA, 1384 bp, Bovine  19866881468722
  misc_feature (1)..(1): n is a, c, g, or t
ngaactctcttgctttttcctgatccgcagatgttggcaatttgatgctctggttcctctgcctttcctaaaactagcttgaacacccatacactactatacatcaaatagataaccaacagagacctactgtatagcacagggaattctacccaatactctgtaatgaccaatatgggaaaataatctaaaaaagaatatacgtatactgaaccacttagcagaaactaacacaacattgtaaatcaactatacgccaataaaaaaaattttttttaagagaacaaaactcagaaagatgaaggtgagtagatgagatgaaactcagccactgctgaccccaagtctgagttttagaagacactgtgctggtagttttccttgcccatcacacacaccttgagagcattaagttaaaaatgaactgatctcactctacagcaccaggaactatgctcaatatcctgtggcaaaccaaaatggaaaaggacgtgaaaaagaacacacctgactgactcactctgccgtatggtaggaactgctgctgctaagccgcttctgtcgtgtctgactctgtgcgaccccatagacggcagcccaccagcctcccccgtccctgggattctccaggcaggaacactggagtgggttgccatttccttctccagtgcatgaaagtgaaaagtcaaagtgaagtcacttagtcgtgtccgactcttagcaaccccatggactgcagcctaccaggttcccccacccaatgggactttccaggcaagagtactggagtggggtgccattgccttctcggaaaacttggcacagccgaataaataaaataaatattgaaaacaataataattctaaaaagtaaaaaagaaaagctctgttcagatggaagaggttactttcaaaagctgttcttagaggcatagggcgaaatgttgagaaatcttttctgatcagtatgcatttgtccagcagcaccagctgtgactaattcactcttatttcccagggattgacttcagagcttctttaatgaatggctacagtggctttaatgacagcactgcctggacaggatgaatgcccagcaggcagctctcaaacacagccaggggcaaatcccagatggccagtctctcaaggcccagaagcactttgcaccagtctcaccacagtaagtgccattatttagactgaaaccactgcacatgtcctacaattgccaagggacacactaataacaggattcctgattttagggtattgatgtatgcacccggtgacttgggaattatggtggtgtttgggaattatatttagggaccatggggtcaagggggaagtccttggctgagaaaggtcagcttgccaacat

SEQ ID NO: 31631 - DNA, 1613 bp, Bovine  19866880543414
  misc_feature (1)..(1): n is a, c, g, or t
nctggtgtgctgcagtcctggttccaaagaagcaggatatgactgagcaactgaactgaactgagaaggtaaatgtcctatatttaatactacaattgataattaaaacattcacatatactcataattctacatttatctaattattctggtgaatgtttgtttctgtgatcttgggtttctttctatgcttttcttctagttcatttccaggcaaccccttgcctcccaccgattgaagggttctgtcctcagtgctttatattgaaccatttttgcattcctgagatcatagtaagataaataaataaaattagcattactatgtgctggtctctgtgctaaagtacttttaaaagtaatatctgattatctccaggttacagatgaagggactgaaggcaccaagtgttaggaaagtcgccccagttccacagtggactacagtgttggggctgggatttcagcccacacagttggaagtctgtttcgttacaagcatgatattgtgttgcctcctggaatgatctgatttggttacgtaagctattttatattcttcctttgaataagacgggtataaaattaaaacaatttacaaaattaagaaagtaacattctggatgctttttggagtagaaaatagctgtttacattaagtaggcttaaaaaaatatgctatttaagatgggcaaaataatggtcccagagccaagaaaaaattcaattcaacaggaaaggcaactcaaagcagtcagaaaattctctgccatatttgtgtttccccccgtggacagaggagcctggtgggctacaatccatggggctgcaaagaggcagacacgactgaagcaactgggcacacacagaaagtgacgatcatacccgtctctactcctgaggcctcccagaggcctccacacgcctctgcctcctggttcagaacagggctggcctgcctgcgttcccgggatggagttacctttaaaaattctttgaagtctgcgtgttcgtctgtcttctgctgtaacagggctgctccattaagctgacagctgcagaagcggatgtaggcctgcatgtgggacagctcagcggccaggatgtccccgatcatgtgcacgggcatcttctcacccccggtcttcttccgcacccgcagcgccctgcaaccaacacactctctctcatttcttgtttaactgagtgtccgtcgccaatgaacagtgaatatcttgggagactaacagtaataacgaccagcgagttacctgaagatctctagcactatggggggaaaagtcaggaggaggaggcagttaggacctgaagctccgcctgcccagccaacctgggtgaactgtgagcaaagaagaaaaaatgaagactctgcgcttgggtgttcctcagtctttggaactcttttggtttcagcttagtttcttaaaaaagtttcttttgaaagttttctaacttgttttcagctgaaccaagaagaaagaaatttctattctctgcaggagaagtaagggagcaagagtccgcagaggccgggtgtggaggtgaaggtagtggtggacactgtgcccagagagctgctaaacctcaaggag

SEQ ID NO: 31632 - DNA, 1483 bp, Bovine  19866880562622
  misc_feature (1)..(1): n is a, c, g, or t
ntgtcacactgtactctgatgactgaatcttcataacagaaggcagcactagtacctgagagcaccgcttaccttgaggccccaggcttgactcccagcatgtcccaactgtccttactacttcgaattctgcgaatggtgtccgcttgttctttggtgaaactagcactgctatttgtgttaggacgttttccgccgttttcacataaatcaactatggatagataaaaggtctgcaaaaacaaaacacatcccagaggagaaatgattaggggaaaataggaattctttctaggcatcaacttaaagaactttactataatccaataacttaaaattcacaataaagcaaacatacattttctcttttgtactaatcatatacgtagaacatatatgtatattatatatattttaagcacacaaaaagtataagaatttaaatggcttatgatcctactctcagatagtcatacttgaaattaaaaactagtatacaaatattattagaaaaattcaaatagtagaaaaagtgtaaaatgaaaactgtctccttgcccctcgagttcctctccttggggtaaaccattgttaatacattttttcagtatccttccagaataattttctctcagtaccaatacacgtatccaagcccaaagtatttacataagagagagcagattaaacacactgctgagcaccttgtaacttttttcacataataataaatcttagaatctttctctagctgcatatagatgctttcttcctcccttctaatgactgttcagtactccactgtgtgactgactgcactcataatttagtcaatcaactccctattcttggacaggtcaattgtttccagttttgtgtcacacactgtgtcacacagtgctttagggaatatttttttacgggcacatatctctgcacacttgtggggatactgtttcagaataaatttctgaaagcaaaactgctgaataaaagtgtatgtgcattttactttctgattttgacaactgtcatacaaaaaggctataccagtttatactcccatcacagtgaatggaaatgcctacttccccatactcttttcaggattgggcattatcatacatcttcatttttgccaatctgatgttatctcacagtttttatttccatttctttaattataagggaggttgcgtatcttttcatatgcttataggtcttttcttattctgtaaactgttattattttttcctattttatctttttcaaagtgaaaattattttgtgatcctgctcatatttcacgccttgtgcaccattgttgtcactgaataacttcactaaaaatactaatttaatacattacggctacttttaaattgctgactgtataaagcttctccatctttggctgcaaagaatataatcaatatgatttcagtatcaaccatctggtgatgtccatgtgtagagtcttct

SEQ ID NO: 31633 - DNA, 1659 bp, Bovine  19866880591020
  misc_feature (1)..(1): n is a, c, g, or t
naacagttggacaatctctctcttgagccaaatttaattattcttatttttgtaatcagtcattggcttcttatctggatgaagacttttggaggagaaccagaaggacgagttctaaggggaagatggcagctccagttcagctggctcagtcctgaccctgccagggaagaagggcccggtggggtttggcctgtgtccgtccaccaaaggctgtcacacgtctctgaatcaacaacccctccccttcccaaccaggcagcttgtgtgtacaatcagcttcttctagcaactctgtatctgatggcttcgagagaatattttgcctccacatatgtaccccttctcctttttttaaaagatggatttaaaccaagatgcctccaggaatgaggacgaaatgagtatattcacagaggaatccaaaaaaaatacaattttgggggaaaatgcaataatttttgatgagatgggtgaaggacaagaagtgagttatgtcaattattgtagataaaattctctgatttaaatctggaagaaaaaaaaggcagcctgttctttctgcttttattgtattaacagctgaggttagctaaagttatttaaaataaaaattaaatttatgattcaagtagcttatttttccctttaaatctcactgtacatatatatgatttcttgtagaaattgattttcttctgtttaattttatggtttttattatcatactcttgatttttctaaatttctgtgtgtgaaaatataacattgattgaattgcagttacctttggctagtaatatttcattattttaataaccatgatgccacgtatggatttactttgggtttcaaatcaaaatgtcactgccagaaagagccgttccagacgagcctagtgcctcctgtgccccggcgtgtccctggaatcagctgacttgagagtggtgcaaggaattctcaccagaagtgcacagaccacttgtacagagaaaaaagtaatactcaaaggaaaatcttctttttttttttagattgactttgggaatttgaattctcatcagtgcaaatataaatctctctatcctgctctgaggctaattggtaccatatcttccctttgtgtcttgtcactctaccacgtcttgtctcatcctggcctctgagtcaaggacccagtgaactgactttctagttctcgaagttccaactgaaaggccaggaaagcctgagaaaggggttgtggaagaagcgaagatagaccccccatccctcgcctttactgcccgccccgggcctgtgaacgatgacaacatctgacattgtgcaccagctacctctgcttccatggcagagaaaaggccataagaactaacaatggaagaggagcacagactcagacatcaaggaagaagccattttcccaggtcctcttttctgcatctcatcacccttagttataaataacattgaacagcatctattcagaacctatactgaataaaaagattgatggaagggctcaagtgggtagcaactatgaaacagaaataggacactcagttacaaacattcttttagtttttcagaaaaatgcatccctgatttcattcattcccagcttgaaagcccagccatattactctattccctctcaaa

SEQ ID NO: 31634 - DNA, 1003 bp, Bovine  19866880625661
  misc_feature (1)..(1): n is a, c, g, or t
nacagtaggaaaatacttacattcctaaagcagttcagtttagctttaaaaagctctaatgggtataacgtttattcttttattcgtctggaatgttgcccttggtaacaagtcctcattttatcaatgtcctcttaaaaacctggaatctaaaattaaactcagtacttcacttacgtgtgtagtagtacaaagtatggttgactgataattttttgttttcccttttatttagtataacccataattaagctgtttttggtaaccatatcctctttggagctcctgttgagcttgtgaccaggtgaaacccctgtttaacaagagttgctaggctgcatgtcccattttttttgaaacaccagagttgttataaatgttgctttacagctccagatcatgtgggctcttctcttattggctctgtgaccatagccaagtcacccaatttctttgactttaatttttaaaatctgccaaatgggaataataccttcatttttgcagtgttattagggatataattagatggtttgtgcatatggctctcacactccctgatggaaataggtcttgtgaaaacagtcttctgtcataggctttactggctttacttactcttggtcaggtattaactctgttaaatagaatccacccagttcagatctctatatattctgaatggataagaagtatttcaaatattcagaaaagagtaaagaatagtagaaaaatcattccatgtactatccatccaacttataacttaactggttcttggatcttaacattttcctctatttgctttagattttttttttaaagaagtaaaacactgtgggggttgaaccctctgtgtacctgtttctttcccatcccccttcattcctcagaggtaaatactatcttgaagatgtttgttttcataaataatgtaattgttttgcgtatttttaaactttcgatatacactatactgcagtgcactcttgcagtatgattt

SEQ ID NO: 31635 - DNA, 768 bp, Bovine  19866880627401
  misc_feature (1)..(1): n is a, c, g, or t
nctggtgcatcagacatggagtcagaccatgtggcaggtggctggcatgcttggaggcttcctgaccatcagccttgaaggaccctgcttctccccactggacactcacgcttctgatgaggagtgggtagcgggtgatcctctgcatgggcttcagcaggaagctggaaaggggcatccctttacaccgagggtcagatgccaacttctgcaaaataattgagaggctcgtgaggaaatcagagcctaagaaaaacgagcgaacactggaactactcctcactttgacatctttcagattttgaatttcttttaaaaactcaggatccaaaatgatacccatcaatttaacagtaggaatatcccaccttgtgagccagaccccacgaatactttcagttctttcttaaggtggttttgacaggctgtgcgagccttccctccattactgagaaagaccatgctctctcagctgtcttccaagtccactgaccttctcagtcttcctcactccttttttctttccccccagtgtcccactgagtcccacagtgtaacccagaccatcaatggagccgaattattctccttttcatctgatgttccaaaggcacctcaatacctcagcatacctcaaaatgaagtcctcgtcttctgtcataaaagcatcgtcttctacctctattcctatcgggagttggtagcatcattctgcacccacccgcctccttcccacacacctaggagtcaccactgatgccaatctgt

SEQ ID NO: 31636 - DNA, 606 bp, Bovine  19866880646628
  misc_feature (1)..(1): n is a, c, g, or t
naaccccccaaggttctggttcctctttcctctgttcacaaactacctctggacagtcgtgttgttttttgttatgtgttttgttcttagacatccgtcgctgctgctgctaccagcgccaaatgtccatcctcattgcctcctgttctgcccacgtccccctcctccaagaagcccttaggggaaggggcctggagcaaagcaggctgggtaccaactcccccagtcccagggaaggtggggtcctgcccctaggatgctgcagcagagtgagggtggggaggggggggcccgtgttgactgtcaggtgtaggggccaccttctccacctgttctgtcagggaggaggtagccattatttgtcccagcctggggctcccctctggtttcctatttgcagttacttgaataaaaaaatatccttttctggactgtcttttctgtggtgggtgcctagaacagaggttagaaaccaaggatctctagtgagtgagtgaaaaagaaaaagcacagggaaggtaacgtaagccggtcttgatgaagtcaactacacccctagccacaaaacattttatttacaaaatatatatactgaatatacattag

SEQ ID NO: 31637 - DNA, 2637 bp, Bovine  19866880655581
  misc_feature (1)..(1): n is a, c, g, or t
natctttattcttatatactattcctaaattggagatggaaatggcaatccactccaattttcttgcctggataatcccttggacagaggagaaagtcaggctacagtccatgggtcacaaagagtaggacatgacttcagcaactgagcattcctaaattatttgtccaacattttagacaattattcaaataatctcttttcattgctattattgaacatattgtttgtttccaatattttacatataatggaataagctacaaagtgatctgtaaatgttcagagaatggaaaaaaacaatgaagaaagaccaggtctacaatgatttctactatgctcattttatttataagcctgcttaacatgtaggtttgaagtttataactaaacaatgtatttacaacaaattccttagtatgtggcatagaaattctcagatttgagtagagcacattattaccacaattattactctcattctaaacttacatttaacactcattaaggaaaaaaaattcattttaagaaatggtccatggcatcaaataatctttataatcccataccatttccagagaaggagcaatgctcacatctgaaaaggcaaaaaacaaaacaacaaaacccttatctcaagtccatccttaaatgacagcatcctaccacatattaaaatttatctttactttttatgaaaataattcatttttctaaaacttttctaaatgtcacaagagcaatccggagtcttaagatacacaacatatattttctttattaacaatgtactgatttggccctatgattgaaaacactaaaaaaaaaaaaggaattgatcaattggtaacattaacacaatcctatgtgaaggctgtggaattattggtggcttttccctcttttttcccctagtgttcttttcaattacagttttcagttctaatgttaaaagaattattgactggactctttattttcttatatttataattagctaataaaatctacctcataattaagaactcagcatctttgattaccttagtaatttaaaaacataatgcattttctcaatcataaatgatacacacagtaaaaaatacctactaaaggtgagtaatatatatctgagaaacaaaacttgaatcagaaaaaaaccttgaaaactttttattattgaaataacctaaacatgtcctctaaaatgtttcctattaagaaactgtgtgtataggtatacacataaccctttataaaagggaaaacaaactaattttatgtgtatattaataaatgaatctttactggtttaatcactttacaatcatctcatgctatcaaaaacatctttaatattctccacttatggcactatgctttctgtcttccagttttatgctttaaacacaatggatgtttaggttactcttaactgctcaaaggcaagcacacactccagatgatactgcagaccatgcttatattgagctttgggatttactgcataatattctaatagaagacacacgcagtgttttgatataaactatctaaattctttaaacaagaagtacttgaaattttgcatttataaatttaagggaaaatatctaaatgaatattttataacttctaccaaaatctcataaccactttatctcaccacaagcatgaagctacttaccattcattgctgtgggaaactgagccatcatggtcctgaattttccttgctaacgctcagccatctgcaacatgaaaacatggtgccattaataatacagcaagggcagatcacagcttagcacacctgctaagcaccaggaatgcctggccccttcagctcacacttccaccagaaaacagtgcagagcttcggctgctgctgaacaggcagaatttacatctggggaagagcagaagattttgctgggtaacggtgctgcctttaaaataaaaccatttaacagaaaatcagtcatatttaatggtaaatactgaataaagaacctttggcattaaaccaattttgtagaaactaatttgcgaaagaggagggttgctacaaccagccaagaatttattccggagaagtcaactctataaattaagtgtacaataacatgggaagtcataatactcttctccttcaaaaaataaacccccaaaaaaacaaaaaaaaaaaacctcgagcaagaaaaatatccaaaatatacgtagcatagctgtttaattcagctctacaggtttataaaaatggactaaaagtaactattaaaacatgtatgtttatttatacataacaaatgtactaaggaaatattctgcactaggaagagaagggaatttggaaattaacagctctgggttcaaatctcaactttatttttctagctgtgatcacgagttatttaatcttacagagtctcagatttctcatctgtaaaaataattggcatgagtttttatttttttaagtgttaaacataacccagtacactgcctgacacattgtgggtgtttttaaaatgacttaaaaatggtttcctgggtgtccaggaaggaagaatacaatataactttgaaccctgaattcatcatcttattacaaataaattcaaaatttgttccagg

SEQ ID NO: 31638 - DNA, 2626 bp, Bovine  19866880687676
  misc_feature (1)..(1): n is a, c, g, or t
ncctgtttatcttagacttcagggcttccataacaaaataccaaagactaggtgcctcagacagcagaaatttattttctcacagttctggaggctagaagtccaagatcaaggtgttggctggtttgatttcttctgaggcctctttccttggtgtgtagatggccatcttctcattgtgtcctcagatggtctttcctctgtgtgcacagccctggtatctctttgggtgtccaaatttcctctgcttataagaaaatcaatcagataagaatagggcaccttgacagcctcattttaacttaatcatcggtttgaaggctctttctccaagtacagttacattctgatatactggggttaggatttcaacatacgagttggaggcggccacaatcctgttgaacacctttttggacgattgcctaatgataatcctgtggcgtaagcttcacttcccataggaggctaaacagctgtggcaagtgcctgtgagttattgattatcacaatcttggactttcaaaggcagtccaccaggtatgcttcctgggggtttacagcacaaaatacaatatgagacacaaagaagaccttatttccttaagcagtgactagaagtgtagcatttctatgtttggttttccatcttttgaagttagaggtggagtctctatgtgatctacaggaagctcaggagattataatcttctctcttgtatgatcatccatgtgcaacttctagaaactatcttcaagcattggtcctctatgttgtaaaattttctttgagtcttttctgtggttaagtcctgttaagaacttggtctattcaggcatgacaaggtagggtggtagatattggggataaccacaggctggtgaaggtgatcagcatacggattagttaagggcaggccttgtacatgtgtggctggctcagatattagatgagtcaatagagcagagattaaagcaagtgaccaggatcagggtttgctgaaagtctggaggacaaaattgaagaaacaatgagtacagttctttgttcctggatagagaaccttcaggctaagaatttgaggggaaaatgttgctctgagagcgtgcaagactctcctttctatccagtggaatggctttttaaaaacagcactattgttctctgagcatcatcaatataagcaatagtcacatgcagtcctgattgccagtgtgcactaatgcagcctcatgcgttgccgcaggctggtctgttagcttctgtgtcatatcagttgttaaatattttcagtaccacccttatgcagatgtataagttttctatcatttttggtaaaatttctgtcaagggcaccagctaatctgctctttagtgtcctcatacaaagatttacatgatagatttcacttggcattccaaattcaggatgatacataacattgtgctgtagtgtacagttccaattaacatcagcactgaagtcaccagtactgtcagtttctctatatggcagtgactactgacaatttgtcttggtttcctggatgtcatccagtacattggccaaagaggccaaagtaggcatctgtgttatatttcaacctccttcttgtctctctctctttttttcctcttcttattttatctgtacctaaacttttgctcctgagtctttggccacatgatgaaaagagccgactcactggaaagaccctgatgctgggaaagatcgagtgcaggaggagaagggggtgaaaaaggatgaaatggttagatagcatcatcgactcagtggacatgaatttgaacaaactccaggagatagtgaaggacagggaagtcttcatgctgcagtctgttgggttgcaaagagttggacacgactgtgtgattgaacaacaacaacacaggtactcattgggaggtgcctttattattcatttgtttattccttcaacaagacaaagttcctactctgtatcaggtactagacatgataatagtgaacaaaacctgatatggtccttgctctcatggagtttagagtcatatggatagcttaatggcaggataagccaagaagtcaagtccccacttttggttttaatctcatccttatttcacacccattaaaccttgcttggtaaattatttttatttttttgccacttcaatcttttcttataagtgatcttcccctctgagcagaaacatgtcttatctcccttctactgcaatgataatcctcttgtgttcatttaagttcttatttttatttttttagtttatttgtctgctgtgagtcttagatgaagcacactggatctttgttgcagcatgtggaatctagttctctgaccagggactgaacctgggtccctgcactgggagtgtggagtctcaaccactggactaccaaggaagtccctcatttaagttcttgattgccatcttctctgtccattaacggacttcacaagtgagttaatcttgacctcccagggcccactcctttaccacttgtaatcctgcatccatccctacctccctgggtggccggtgattttcctgctatctgagtcgcctcttttggtcatctgaggttctccttcctttccatgc

SEQ ID NO: 31639 - DNA, 1552 bp, Bovine  19866880689079
  misc_feature (1)..(1): n is a, c, g, or t
nttggaggaattagctggtagtgttgaagacagaagtagaagttcagagaaggtaaccctaaatgtcacatactaacaccctctcgtcgtcattattttttgagatttttttatattttaatattaaaaattagtgtctgaatgctgggttcagaaaacaaaattcagtgtgttgtgtctgtgctttctcacttaacatttaaggctcttatactcagaatggtacatttcctgctaataactcttgagttaacttggtattagacatttatcttaggggcttccctggtgactcagatggttaagaatctgcctgcaatgcaggagacctgggttcaatctctgggtcaggaagatcccctagagaagggaatggtaacactccagtgttcttgcctggagaactccatgaacagaagagtttcctgctacttactctcttgagttaacttggttttagacatttatcctagagtgaatataaatgacaaatgacatttacaatttaaataaaaatattattctcttgatgggagcatttcttattagcattttatataactgtatttatatggtcttcccgtagaatggcaaacatcagcagatctcaggcagacttcaagatgtccgactcagaaagcaaactcagaagactgacctggaagttctggataagcagtgtgacctggaaatcatggaaatcaagcagcttcaacaggagcttcaggtgagtgcttggctgctgaatcgtccttcactgtgagcagttactagtaactcttcctaatcctagcggttttttgctttttggggtcctgaaccccgtggagcctctagtgacctccttgtaaaagggtagtagacatacacaaccttgtggaatatcaggaatctcatggactccctaaaactctgcctgacacctggctaaattctgcttaatatttatgcattccctgagcatttgccactttgtgttttaagtctttaataaatacatacataaatatatattaaactaaggttattgtgactacttttaggaaatttttacctaatgttgttctttcagaaattgtggtgagaatataattactaaatatgccctcagggacctggtaattctgctctttatttgtgtagaaaagagaccctggaagcattttgcatctcaagtcctcttaaccaaatgtgtttttccataaggactaacagtaattaacataatgtttttactttctcacagcagatgtagacaagacgccaaataacatttcctgtctgatttacacctgctttcccagctatccctgagtttttggcccctctttgatcttcatcctggggtatcatagcccaggtatcatagcttccacacaccattcagagcagataccaaaggcacctcttaggctgtgcctgttctcatcctttaggacatgggaaattgtcaggcttctcgacataccctactagcaaagctttcttccccaccttttattttcagccagtcttttgtaaatggatttatgtgtaaatatttgtattttaa

SEQ ID NO: 31640 - DNA, 1494 bp, Bovine  19866880690186
  misc_feature (1)..(1): n is a, c, g, or t
nggtaggagggaaggcaagactggcacatggaattgcaaaatgtactgaggacgaagatcaagctagcaaactggggcatggccaggatcaagataaacatatcagagaggcagggctagttatgaggtaaccagagtgaactagaggtgctgtggaagagcaggctctgaaagggacatgggaagcactgcctggagcagctccccaaggcccaagaatgtagcaaaagagctttttggagacttcgtctaggagtagggagggtgacattaaaaggatggaagcattctggatgatggcttagatggtaaagagtttgcctgcaattcaggagacctgagtttgatccctgggttaggaagatcccctggagaagggaatggcaacccactccagtattcttgcctgggaaatccacggacagaggagcctggcaaactacagcccacagggtcaccaagagacggacatgactgagtgactaacactttcactgaagatttttgaccagagtgcaacaaaatggtattttagaaaaatgtattaaggaactgtagaactagaattagaaagcatagcacatcaagacatgagttgaaggttataaaaattattttgaaagcacccagtttcatatttctttgcttaccctagtacctaaaagtcagtccttagtaaataaatgctaaatatgaaatgtacaccctcttcaaaatgattgttttgtctttagactaagaaaatctcctagaataaagaaataaattaatatcgtcacttatatatgtcaaatttctatgagtttggtcaatgtgtatcacttttatgcagcataataattcctgaatgaactgatagaactcagtttataaaccttgcaggttctgatgctttattggttctttggttgaaaattacgagaataaacccttgctactgacgcaaaaattgattggaaggatacagggcagatgagggaatacaaagatcggttggatcatttgttctcaggaggccagaaccaaagcagcttcaaggatctgggaatcaggaactgtgagctgtctcatggcagcataggatcacagcttcaccaccttctgtgcctgcatttctcagctcaaagttcaacttcttcggataaaaagtgtgattggccaagcaaagatcaaacatcaacctctctgttgggggtagagtgttgtacttaacaacatatcagaaccacatattgaacatattgggacactagcagcccccaaggaagtaattctagacagaaaaaataaccagtgtctactctgggtacttatacttcaaaattcaccctcaaaatagtggggacagctgattaaacaagatgctacttaattggccttttcacccctgagaattaattggaattaatatttgtcactccagagaccaaatcctactgatgatgatgagtttgtgtactgcgaagcttacctacttaaggaggttctcatttc

SEQ ID NO: 31641 - DNA, 2125 bp, Bovine  19866880696942
  misc_feature (1)..(1): n is a, c, g, or t
ntgtccttgccctttcaaaatacctgtatgtgtaatactggctttactgtgctgagtttgtttggaggaaactagggaaaagatacttgttctgcagagtcttaagtcctcccctccctctccattccagatggtacaggaaatctgttttagaatttctaagggtgtactcaatcattcattcaagacatagttataagagtacttgttcaaggtgctgtgttgtgaaaacatagaaaagttaaatgataagatatagatcctgtttttacagagattatgacctaagagaggtgataaaatgacacacaaatacctgtagtactaattaaatgtgatgagtgcgatgagagaggtactgaaatagtatactttgaggaatctggagagcaagcaattattttcatttaaaagagatcagagcaagtttcgtggagggcttgttgttggacgggaacattgaaggcaggggatgatttctctctgagtgaggaggaggagagcagtatattcaggaagattaaatagcaaagatgaaaggacagaaaagcttggggttattttgggagtaatgaagggggaaagtgtaagcaggaaggtggcaccagctgaagtgggagaaggaaccagatgttctgggtgcagttgtaagacattaaaggattttaatggagggaggtggtgaggaacagtgaagtttgtagatctggaagaaaatgaaaagtgtcagttttccaaatctacgtggatctttttttggcaggttttacaccccaaattttatattttcatagtttttgaaatgattccatatgtaaggcttaccacactgggaacttactcatttttatgtatatttgagaacagacttttttttcccttttcttggtagaagttagtacgaaatctttttcactggcttgtgcttttttttttccccccccagtagctatttctttaaacagtgtgttatcatttggcattcttaagatgatgcagcagacttgtttttcaagtgtaaaaatgtcatctccttatgtaaatatatgtcactgtataagttagattggtcatgcaagttgaaagcccctggctctcaatatagttcatgatttattttactgatttatttatgccctgccatgttccagaaaggatttaaagcaggatatgtcatgaaaagtcttggaccttgttcgagccctgtctattatttgactgaatcgctagccaacattacactgagggaacagtgttgaagacaactggtgtcacagaatgtgctgcagttgtgtcttttgccaactggtagtgattcagagatggatacaatataattagactacctttaaggataagtccttcgaactttgagagcatgtaaggaaaattggttggaaggaactcacggagggctttgacccttgggagcccaggcacatttagagcagtggtctctacagtagggtttatataaaattatctgggaaatgggagaaatactagaggtctgtttgaaagattctttattttcagtcagctgtgatgttttttagttcataggagcatgggtaattagatttttagatttattattttattttattttatttttttttagatttattattttaaatagtagactcttaacatgtattgttgcaataggaagtcaccatgcagatcttttataaaatatttcatccagtttagctggtcatcttgaggcaaaggacttaagtattgtctaatctgaagatgacttactaatttttctttcacgaaaacacaaatttcagatacaaatgtctgaaatttgctgacattttcctctcacagatgtctgtgaattatatactacctacctgatatttatgaaaattaacagacttaatctgttgctttgggatgataggtaaattcataacagtgacccgaaaagtaactacctttcaagacgaaatccactattatgaagagaggttatttggaatggatatttggatatttccaattctaaacatccaaaattgatatttggaattatttccatcattattggatttaattgctgaagatgatatgatcttaaaactttaagaatatttttatatgtacacttgaa

SEQ ID NO: 31642 - DNA, 2169 bp, Bovine  19866880775685
  misc_feature (1)..(1): n is a, c, g, or t
naatgttttagtcttacatttgcagtgagtattaacttgtaaattccttccaatctttttagagataaagttggattaaaaattataaataacgtagtctattattatcctagatatttcttttgctttcaaatcaaaatttcttttgcttttgagatacatacacttatcctggatcaaactatctcaatcgttaccacttaaaaatttcttttgtcccttgtactacaatacaacttgcgggtctggaccaagagaccacgttaaggaaaaacagacatccaaagaaattcaaacaggactacaatataaacagttaaaaataagttctaaaggatgcttcaaaagaaatacacaatacaagtaatgtagtttgtgtccctttaataaacacacttgcatagttatattacagttttgtaaaaatgaaaatgaatgacctcatgccaagcgtgcccagcatttgcacaatctcaatatctttgatactatagttttcaagacgcacaaaataaaaatttaaggcaaaaaaacagcactttgcaacaataatttattacattacagtagcatcacagcagcatccaataatgccactataggcaaaagtctctcagtctttccattagagtctatttacaagaatttataacttggtaaaattcatcctaagaaaacttggcaaataaagctttggactggaattggcatttctttctctacttttccttcccctactttattttaaactatcagaattcatattatatttttaaaacactaatgtagcagttatactgttttaatagctgtattattttaaaatgactccctaggataaagttttagaggaaactatacaacaggtaggattgatttagattttcaaattttcgaaaaaaaatcagctttggtcttagaactgatttttttcattgctggaaaacccatcaggtttaatcacatactgtagaaatgattacaacatactgcaattttaaaataaacaggtattttgattcttcacttcctacagggttcagatttgctcagttgtgctcccattttaaaaattctatcttcctgataaactccttctaatgtctctttctaagtaaactgaagctgcctcttatactgaatgaggaagagagcaaatatgtggctgaatatgaggtattgcaaaggactgcatgctcttttaagaaggacaagttattattatatgtcataccatttcctttacttttagcttcctgtcaaatgtatgacaaaatacctaaacagagagaggtatttctgtaaatacagtaaatttatttcccagacagacactcagtttaaatacgccattataagacttggtccatagtacctgaagaatatattcttttcaaattgatttacagacactaatctctaccagaatgtcattctttatagttatcagtgtaaaagtgaagcaatttgagctacaaagatacctttgaaataatttatcagtgtattaaataagcccaaattcaaaattataaagagagaatgttatactatatcatgtgattaattaagtggtcttatttctaacctcagggtttaagggtggatttaaagtaactgccctgaatttgaacccaactaacatgttcagaaaataaaaggcaagaccaagtaacccatacaatttagaagatcagctgaatttacaaggactcagtcttgacactgtaccctttagtgactgcaggcaaatctgttatgccacctgtaaaataatattattgctttccatttaatgtcatattttataaaagtatcatgatgatgccaaatgctaaaagttgaggtggtctagtaactagaaatccctgcctcaggaagcatacatgcctgtcaccatacattccaatgatgtgaagtattctggaacacagacatttatattttgtgaagttctaactacgggtttagttgattcttcctcaagtgttgtaaagttatgatttaggcaacatatgactaaaatcattcattcataatgtataggcacattaacacaaatattgcacaaaatatgcctcagagatataaaaacacatttcactcttcttaaagaactctgtgaggaaataagactctgtgattgtatgtacacttttcctgataata

SEQ ID NO: 31643 - DNA, 1205 bp, Bovine  19866880812667
  misc_feature (1)..(1): n is a, c, g, or t
naagcctagactctgcccgagaaatctagaaacctatgatgtgaaacctgcctcctaaaaacattttatcattttttcttgttattgtccattatgttacatttaacaacagaaatctcggccatagctaaaaaattcccattcagagaccggtctgtgcagagctaagggtatgccgacttgtcacatctatttggcttcacagtgaagcgaggctttcaccaccacagcgaccctatgacgcaacctcatcacctgtctaagaggggtttccaatgaaaacaaatcgtaagctgaaagaactctggtggtggtggactgagcaaaggagaaagaaaaagttggataattatgtttactacttaacaaagaggagaggaaaactgacagaaatagggcagatattattggtatcttttctgtatttttctgttcacagtacagaaacagaagataatatctcaacaggaccagctgatatagtctcactatttcactctgtttcaatcacgtgaataacacagagcatattataatttcttcctggaggcatccttcctcttaccttgagaagtaactgtgacgtcagttggaagggttgtcgtgaggtccttatacagcagtctagcacaaaaggggaaggactgaccttccggcttcactttgtaagtaaatgacagcaagttgcacaatgagtttctctgcaagggccccacaagaaaggctgtaaagtcactctaatggggatggggatcaaaagagacacaaagtatatgacaattacagctccaaggcaataagtggttatgatgcatcaaacatgtctaccaaaacagggcccattaattaaatctcagaaataaatgaaggatagagaaaggcctgaaaaaaggacaaatgagagagatttataagataattaagagttggtagcagcctagaaggcctgtaagaagcacttactaagtcaatggccagaggctggggagacactatttctgctaagaactcaggggatgtcacacgtttggctgaaatgcttcatgtctacattcacatgtcagtatctaactgataaccagaagcttcggtcattccaaatgcacagagaaattttaagtttgtaagagtcacttatttcctgcttgtattcatttccttttttttcccccctttttactgcaacccagctcagttcaacccta

SEQ ID NO: 31644 - DNA, 1213 bp, Bovine  19866880817312
  misc_feature (1)..(1): n is a, c, g, or t
ngctttgttatccagtcccatggcctttagatcccacccaaattatagttccagtgcagactctcccatctgcctacttgcagtacaagctcgtatgtcttaatagtatctcaagattgccacctgcacaaatctgtgcctcgtcagtcttccccatctcaggaatagctcctcctagccttccagtcacccaccctaaaaccttaacatcatgcttctccctcatcctggatccccttctccatgccattagcatgtcctgtcagctccaattccaaaatatatctcccatctattttactctcttctctgctgccaacctctttaattcaagccatcattgattttctgtctggattattgcaacaggcgcctaactgtccatcctacacagaacagccagagtgatcttataaaatcttaattcagattatgtcattctcttgcttaaagccctcccatgccttcttgttgcacttaaagaatttgcagaattaaatccagctctgcaaggccctgtatgatctggctctttcccacttgtctccacctccttcccttctttccagtcatctaggctcctttcattctgtaaatgcattgatcctttcctgcttcacagtttatgcactgcctgctgcttcttcccgcagtgcttttcccagtgtgttcctcatccttcaagtctcagttcaaatgtcatgtcctctgagaggctgtcctggaccagccattctgaaatgacctgtcccactgtatctctctgcaattcatcattgtgtttattttctttagagaacttatcacaatctatattgtcttgtttattggagtattgtttgtctcccgccattagaatgtaaattccaaaagagtagcgatcttgtctggtctgtgtaactcactggtgtatcctgaaatcaggccttacacagtgcaggtattcagtaaatatttgtgaatgattctgtttattcagaatcatcgggcttccctgatagctcagttggtaaagaatccgcctccaatgcaggagaccctggttcaattcctgggtcaggaagatccgctggagaatggaaaggctacccactccagtattctcgcctggagaataccatggattgtatagtccatgtgatcgcaaagagtcggacatgactgagtgactttcactgtttattcatccttgtgcagtcatcaccctgcatta

SEQ ID NO: 31645 - DNA, 789 bp, Bovine  19866880832523
  misc_feature (1)..(1): n is a, c, g, or t
nccttttattaaaatcttgcaaattttaattagattccttctatactatgatatttattacttagatacattattatatttattgtataattatacattataatgtataattatacattattattacttacataaatccagtttggtcttcccattccatttgcatttgtcattgataccattttaaagcataacagtggaactgtgtatttgactcttgaatcttgttatgttcaaaattaatcgtgcacctcttattcttatgtgtggttccttcctacagggaaatgcatttatagagcattatgatccgaaagagtatgatcctttttacatgaacagagagaacccgaattttctgaaggtagatttctaattttaactttggcattatgtggtttatgtttttgaacagtcttaatatgtaagtagtccttcagtgattccctgtgaatgctgtaacatcttaatcatgtcccatctccacagctttgattatatggacctttgtcagcaaagtgatgtctctgctttttaatatgctgtctaggtttgccacagcttttcttctaagaagcaagtgtcttaatttcatggctgcagtcaccatcctcagtgattttggagcccaagaaaataaaatctgtcattgtctcttctttttccccgtctatttgctataaagtgatgggactggatgccatgaccttagtttttttgtatgttgagttttaagccagctttttcactttcctctacaccctcatcaagaggctcttagttcctctt

SEQ ID NO: 31646 - DNA, 1368 bp, Bovine  19866880874914
  misc_feature (1)..(1): n is a, c, g, or t
ncagagatgatttgagatttttctttccaaatgcctagaaatcttggtaagctttcaggaattgtgtcatgatagctaaaagctgaggtatgactgaaataaacaagccccacatctggtcccatgagacgagggacaggcaaattttcaaagtgagctggttagtttcctttactttcaaggtcacacaatggaattatcaccactattatttcaacttcaaatctgacaggtgaaaataatataatagctctatcttcatgaactggaaatatactattcaaagtgtctcttaagtaggaaaatattaacatgggcgagagcagtcatgacctatttcaacacagttgtctccatgaaaaactcattctgtggggtaacacatattacttgacaaaaggaattccataatcaagaaaagtttggtaaatgttgggttaaagaaatatttaatttaaatcgtaagataggcaacaaggatgtattatacaacatggggaatatagtcaatattctataataattgtaaatggagtgtaaactttaaaacatgtgtaattttttaagaattaaaaaagaaactggcatgaagataaagcaaaaaaataaaaaaactaaactagtttctctaacacaggacttcataaaacctctaatatacactaaggaatgatatatatgtcatgaagcatttacccagtgtatgtcagcacaaaatacttttcttcacaatttatggagccagtattcaagaagacactttggaaacataatctgaccccacattatacttctgaaagtcctactatggaaaggttgggtaagaacgtaaaattactcaatatcaactgctcaccttaaaattacctattaaaaagtagaggttgtactataacttaaaatacacaagacgagtgacattcatatatctaaaatcaactatatactacttactgtggcattaatgaaaagatacttcactcccaataaacaaaaggtctgtgcaataattatgagggacaaagctctaatccatatcatcattaaacgtttaaaatgaagttctgtccccaacacatactgttcagcctggaagtgggcctggcagaggtggactgaagtgcagatggcaggatctccgatttgatggccacattgctgactgcgccatccatcctctctgtctcacataggcctggcaactgtggtgccttctccagcgtcggaagtaactgatcaaactggtcaaggtcagctgtaaactaagaacggaaatcaaagttagaggaaacacattctacactttcacctgaaagaaactagaaaacaagttgttcctttaaaatacatgaattgagtgtgactatg

SEQ ID NO: 31647 - DNA, 1943 bp, Bovine  19866880878551
  misc_feature (1)..(1): n is a, c, g, or t
ntgctggtgtgtgtgcgtggaggggaccgccccggcctgagacctccaagaggagacagatgtgaatttcagaattttgcccaaccgtgatgggagtggaggtgaatctctaaatcctgaaccacggtccccagggaaaggcagtcccagcttctctccagccagtcctagaggaggatgctaacaatgggaaaccacccccttggacacacgcccaattcccagactcagcaaggtgctttgggggtgctgatgccacccagggccccccagaggccttgaggggacagccaggagcatcccccagggatgtccaagctcagggcagacaccgcagcgggaaagatcctggggacccagagctcactgccctcaaggcaggagcggagctctgagctcagaggccagggttccaggcccggctctgctgcacatcagtggtcactcccctgctgcactcggatttcctggttgaagagacaggcatggggatctctgaacttatctgtcctggggggtcatgatgaggaaacacagggagaagagatggggggacacttgggaggataataaagaaaatgtgaggtggaggcatttcgtgatgagggcacctcccagcagaacaaacagcatggcctgaggctggaaaagcctccgtcagaggctgcacccacgtcacaccccgacggaccttcctcaggggcctgggctgcacagggcccatcaaaacaggccagcttggaaggtgtgcttccccaaggggccgggacccatattctgggagcccccccatctcccgccagcggcaccccacttacgagatggcctccaccatggcgagccccatgaggatggagcagacggcgtggtcctcccggtagtcaggcagcccacagatgcagtagtaacagtcgcccaggatcttaatccgcagctggtggtatttctgaaagggaggggtgtggactggggtcctgaggcccccctcctcagcgaggaggggtgagaggcaaagattgctggggaaggctgggtgggaggaagtcgtggcagacagggaggatggggaggggaggcccaggccacgtgggtgccccctgccccgcaccgtggaaagccagccgaggggcagggtacttacagccgccagcttgtcgaagcgggcaaagagctcattaagcagcttcacaagctcctgggcgctgcaggctgaggacagactgggtgaagcccacgatatcagcaaagaggatgctgcaggggaggaaggcccagcggtgaggacgtggatagcaagccaggctccgtgctgcccaccgccagctcccactccagctcccaggcagccaggtcctcgtcaggccccaaagtggtgagaccctggcacatccagggcacatttcagggctctggcctctagcttagcttgtttgtggtgtctgtacaaagacgggcctagaccatatagcgcatctcagcccccaacgtccagcagcaaggcagctcctgcaggggctgaggttcatactgtggggagggagtgcgttgtttctagtccccaagaagactctcgaactccacagtcctcagttggccccccgaagcccccatccagtgcttggaacccaggtggccggcgcacctgacgttctcatggcggtacatgtacatggtgttgaactgctgctggtccttctggctctcatccttcttcatgtccttcagcatctcgtcggccacgtgcttgggcaggatggagagcataaggttctcctgtgggaggggagagggtgagcagggagggcagggccggtgtggacactctgggaagaaatgccccaatcctggtgacagacatgggccaggaaccaggtgaccttccatggagacctggcagggcagaccccacgctgggaagcagctggaggccaggacaggtcagt

SEQ ID NO: 31648 - DNA, 875 bp, Bovine  19866880882217
  misc_feature (1)..(1): n is a, c, g, or t
ncagtctgttgtttgagcagtaagtatgttatatcctgggaaacagaaatgacagttgtcattgttttctgtttgtttctgattttgtggttttgtattcacagggacaggttgtagaaaacctgaaagcacaggccctttgttcttggactgcaaagaaagaaaaccacttgaacttctcaaaacatgatattattactgtcttagagcagcaagaaaattggtggtttggggaggttcacggaggaagaggatggtttccgaaatcttacgtcaaaatcatccctgggagtgaagttaagcgggaagagtaagcacttagttttgtgtgtttacatgagatgtggatgttgccagtttcactgatgagtcagccaaagtacaactggctgtgcaggaaaattagaagtttaaacttaagtctgaatatcagaatggtgattcctagagtgaaatacctaaggtatttgtaccagttttagaatatcttttattctagttatttcagattcctaaagttttcaaagtgcttaaaattttagatcgtttgctttctttgcaccagcaggttagagaagttattgttcatttcctttggagctttctcccttgtttactgtgaactgtcaatatttagataaacctttactgagggccttgcctctgcctctcccatctctggatctccagagttccttgcaggtcacctttcttggtgctcatgacacactgtgttgtagctatttcccttcttacctatattccttattagatcataagctctaggaggtgggattcatgtcttttttgtttgcattttagattttcgatacctagtgtgaccttaatgcctagtagctgctcaatcatacttg

SEQ ID NO: 31649 - DNA, 1945 bp, Bovine  19866880892314
  misc_feature (1)..(1): n is a, c, g, or t
ncccgtataatccacactcctccagccccaatttcttctctgtaacacaacacggatgctcttttccagcaccaggaacctctgtccctgaagcgtatctgagagcaatgagacactggctaatcgtgaggacagaagaaatcacaggctgctaattaagcctttgtgtccttgttagtgaattacactgcattggtattccactttctatcaagaaaatcacaacaaggaagagttactgagcattgtggtgctcaggaaaacccagtttttcttcagccccgtccaccctcttgtcctccagcacctggtctgcaggcacagggcagcagagaccggtggtgaggctgaccagctcacggcagcctctgcagggcagcagagactggcggtgaggctgaccagctcacggcagcctctgcagggcagcagagaccggcagtgaggctgaccagctcatggcagcctctacagggccgagacccatctcagcacttgcctctgtcagtggctatactgaggaagctcttcagtaatggacggatcctggacaggatcctgaactcccaaagtggaccctggtctcagggggacagcctgttgattcctttggaaaccctccatctgagcacagcacttgcgggctttggacctagctagataggtgggcacagccctgaaggcccacttccaaaacagtccagtcctggagcagtgtccacttggtgtccccactgccctcagacctacagggttcgggacatcagagctggaccaggccgtggcagtgggcacatcttctgaccttagccaacccatccccagtaactgaagaggggcccgtgagaccaggtgggggggtgacctgccccatgttatgcagttccaaggatggagcccagctaggggccaggactgcccttcagctcaggactcttcaccttctgcctcctcatctctgcccacatcccagggctcagcccccacccatacctgggcatcttgctcctcgggctcctcagatatagagccgctggtgtgaatgctcccgttggactccttggtctcaatgagggcaggggagctgggctttgaggaaggcggcgctccgttcagcagggcctgcagcagaagggaggggccgtcagggccccccaggcactgccagctgcccacccaggcgaggggctggtctactctctggtttggaatctccccactagagttcagaggcctcatagccttagaaatctcactattcgtttcctcctccagaacatccatattagaatgctgtaattttctagtattaaatttctagtattaaaacttttccaagcagagaaagatcctattgttccaactcctatttctaagtaactcgggaacacagagcttcacagggatcatttttggggtagagagccctgtcaaacaccttccaaacatctgaataaattccataaaccagtttacccagggattagtacttttccttgacggaataaatgagatcctctacacaggaacacagtccactcattcatttactgagtatttattgagtagctactgtgtgacaggaactgttgtaacttctggggacacagacacaatgtcctgacctgggagcccaccttctagtgaggacaggcagacagccgtgaacaaagaataaatgattacaggaggtccgagagcagggcctggagaggcaggggaggcacgggacacaggggttcccggggaggtgactgtaaaggggaggctggagaggagtcactgtgaggatcacatttccgtaaacacatgagagagcatgttatgcagctctcgggttttggggagcaggaagcctggagtgggcatgcacccggcgtgggtgtgcagccagagtgggcgtgcacccggagggtctgagcagcagccaggaggctggcactgc

SEQ ID NO: 31650 - DNA, 1962 bp, Bovine  19866880907886
  misc_feature (1)..(1): n is a, c, g, or t
nctgcttcaagggcatttaaactcttccaagcattccttatgatctttactaaatgcattaagaagaaagtcaaccagtgcccctttgtgacctaggacatggagttacctcattaaaatagataacatgaatttctaactttaaaatgtatagatataaattctctgcctaaggtagggaaagtttcatatcttgtagtcaatgatgggagcctttcattcttcaaaaataatccatttttaggcaatcagtaaagaagtaacaactgactgtggcagcacattagcagtatcttcacgagcccagagaccccagtggactcccagggtacagggctcattttgggacagctgctatagataaaacccaccctgctctgcacatatggctgggtaaggcaggccgcttccctcttctatgtgtaagaagagttcctccaaagtgtcatcactcccacatcaaaatacacagaaaatagagaaaaggatatttccaattctcggccttttaacaaacttaaatattggtacttatagtggcatattagaaagtaatagaggaaaacagtgcctattgggggacaaatcgcatattgaaccaattaagggctcactgtgattaggattaggtcaaacataacagcaaaacataagcaattctgaattctgtaatgaatatacatgttgcagtaacattagaaaagcatggcagcccattccaaaccagcaagaacagtttgtgcaaatagtgggtctttgtgtgtttgaactcccaccatgtaagggcaaactcagtatgcatgctaatgacctacaattaccaaattaaaaaaggagaaaaatgctaaaggatgccagagtgaacagcagggaaagccacacaaagacccactatcctttaacttgttacaaataaattttaactgtaaattagaaacacagagaaataatcacaagtggctctaacatttgagaacgaagctaaggaattgtgtaggagatatttgatcagggctgcctgccctgtctccacgctagagtcaaacttggatagtgggtctctggggtgctttcacactggaaggcaacactgggtcctataaaaagaaaaacgagggataaaatgaacataaagcaaatcaagggggtgagaaaaattctactgattacatgcaacatcaacaagtttgaactatgaaaattctcaacctttagaaaatatcctacctacctagtaaaatgaaagtaatatttataaaggcttgagaaacacacacgatagtctaaaacttaactagttttcactgacgcgtatactcctgggctgttcttcctttagatcacttccattttttcttatatttcttattataaaagacttaaaagggaaaaatatgttccaccattggaaaacaagataacaacaaaacatttggaaaacgatcactttacattatagacactatgaaagtcaaatgcactgataaactagaatgcctccaaggatcacttagcccaagatcttccagaccttcctctctcaggcccaggaaagacccctcgggtatttttattaaccagacaaactggcaagccctgaaaactgccaaaaccatcagcagaatttaaaaatggtctttcatttaagtaatccaagttttataattttccttactatctcttctgaaaccctgaggtatttttaggaatattcaaagcataaaaaactggactccacatccagactgggaaattcagctgctctatctaaaggaccgtcttctccccaaatcacaatgatttttatgagctctaaagtgaaaataatgcactaataatttaaaatgatagatacagtacaaagtaaattaataatacttgcacttaattgtaaacacagctcagctttgactgggttaccatttatatgttcttagaagctaagttaaaagaaaggctaaa

SEQ ID NO: 31651 - DNA, 3013 bp, Bovine  19866880951274
  misc_feature (1)..(1): n is a, c, g, or t
nagctggaggccggacaggtcagttcctgccctgaacaggctgagtgttgagacctgagcgtcttcagagcactgatggggctcagaaacccatggagagactgagtgactcgttaccatgaagcacttagagtggcgtctgcacacagcaggtatgccatataccttagctgctcttgtgtcgcttgacgtgaagtgtcactaaggcactgagacagaaagtgtccaagaaagacaaggtctacacttgtcccgggcttccaagctgaccacaggctgacagatgacaagctccagggggttttcaggtcagcaggagaccttctgtccctcggccaggtcctgtgagctctgtctggtccaggcatcatgatgaggggacacaaagaaggatcctgcctgccatgctcgtctcagcctttttctccccctgacatatgcatgcggggtgcacagtaatacaaggaatcagcaggtgtgtgaggggctggggaggacatgccaggctgggaagggtggagagggcccacaggacaccaaggatcgagaaagtccagagtgctgctgcccggctactgcaaactccgcagcccctgcccacacggtcaggcctcccccccaccctcggactctgccccaaactctgtcctccaaaaaaagactctctgggctccctgggagccttggggacatcaggatacaatctagtcctgtgcggtggccgctcctagcacagcctgggctctaggactgtcaaccagggccagacaaaggcagcagctgaaacacaaagctttgcagctctgatgccccaaacccgggtgccttgaagacaacagagtgaggaggtcggggctcatctctggggagtgccacgggggaaactgtcacattttgcatcatatgcttctgtagctttttgcaagagaatagatgagttctgaaagcagatcatcattcaacgtcaaattgtcaaataataagaaagaggctgtgttgtaaattacggctactgatcttcgtgtgccgtgtgaggcaacctcatggtcgaccagaaacggttaagcaggcagagtctactttaaggtagagtctgataaggggcctcccaactggcactggtggtaaagaacctgcctgccaatgcaggagacgtaagagacgtgaggttgatctctgagtcaggaagatcccctggaggagagcatggcaacccactccagtattcctgcctggagaattccatggcagggcctaccttaagtcactccgataaaacaggtcttaaataagaagtaggcatagtgtacacagaagaagggacaatttgttagatgagaaaaaatgcagcaaagggacttgacagaaaagaacattctagaaggtggagggcaggagcaggaaagcggctgagtgggcagtgaaggaggggctaggcccatgtcacaaccgcagttttgtgccggccaggctctgctctcctcctccctccccaccaccttccacatccaatttcacatccccggatggctcccacagtgctctgctctgtggtcccaaggcctcctccatgtgacccacttgctttcacggccccgactccccgacttccctagtggcccctcccagtagacaagctggacaccatctgcttttttctgcatgccttcctgccctctgctctcgtgtcactctttctagaacacccttcctcactgacctgccacctccccagagcccccagcccctggccaggtgtgttcaccctgctcctcacttatacccactttaccagcatctttgctgatgctgatcttgtttgcccttacatttcagagattctaaacccattcctgggtcctggcctcttttaagactgtgtgatgctaacgatggatctttctgataaatcctcacacacatagaaggttcctgacagtcactctcagagtccaggtaaaactccagcatttcttccacgtctccttggaggagggagaagctgggatccaagtgcacttgccaggtgggtctcacagagggcgcaggcgtggacaggacaggagccacccagggcagtctcaggggcccagagcagagagatatggcttggcctccccagcagagaggcagagcctcaccctgctcttcctaagatagcagttgctatatgttttgagagtcataagaatgttccaagcctctgacccattaatggctcctctgggaatttatccaacagaaataatccgaaagaaataaaaagatttatgtgcaagaagaacctcactgcagcatcacttacacttgtagaaaaaactctaagcagcccaaatgtccagaaaatggctcattagattgtgacacatcctctggatggaagattatgaaactttaaaaatgaccttgatgaaaactgttacaaggaaagaaagagaagcaagacacagaactgtattctgtgaaggtgacgctggatacacgtgcatcttaataacagcagaaggatatatgccagacagaaacgggcgattcaatgcaggagatctaattaggagaaaattccagatgtttttcgaaactgctaaatggtgtcatctagagaaggaggtggcaacccactccagtatttttgcctggagaattccacagacagaggagcctggcaggctacgagcctacggggttgccaagagtcagacacgactgagcaactaacccacctccatatggcgtcatactgctgcggcttttttaaattacgttttaaactggaaataaacacaaaacttcctgttgcctccagctgtgacctgaccccagcttgtctatagctaccacggttttcttcgaaaaggacaatcccggcaaggccactgagctagctccagactcctgtgtctgctcgggtctaacctgagaaagaagaccgacggccaggcacgaaacaagcgggagaccacagcctcgcagcaaagggaggagggaggaggcggtagccctccttaggagc

SEQ ID NO: 31652 - DNA, 1739 bp, Bovine  19866880955165
  misc_feature (1)..(1): n is a, c, g, or t
naatgtgttctagccatgcgcgttctgattatagttcttctcaaggttcacatttagggaggaagtttcccaatggcctgagtaagaatcccatgagactttattaaatggggaagaagtaactcctcaaaggaaatcagacattctctgaaagaggaaaaggtaattatagttaaaaacaaataagcaaaaaccaaatgatacgatatgtacctgtaagtcacacaggtatatctttagcccagctctctcttcacagcttccctttcattatatcctattgccttttcagcctatttcaggatatttctccatcagaaagttcctcagtcatttcaaaatataacattcctaaagctaaatttataatcgatcccctcattgcctaatttttttaaaaagtcaaaaaatttaaaacttggttttttccccccttgagtcccctttgtctaggaaaggcacctatctaccggatccctgaagtcattaatgaaggatcaccccttgtgcttgtttccacagctgctagaggtccccagatgctgtttgttctgcatttgtagatttctcttctgtcacttccactgcccattgccttgatccaggctcgcatttgacctggagtatcacaatagtattgcagtttgtctgcctacttccagtctacatgccacacccactgccagaaggatctttgttaaagcagatcatgtcactctcctgcttaaaaacactactttcaaaataatccccatggcttttttggggggaggggggaggtaatggtgctttactttgaagctttaaaaaaaataactttttattgttaagtataacacagatatgacaagtgtgtacaaggtgattttttttttttaacctctgagctgtttcctctgtttgaatgttctttccaccccttgtccacccgagttattgctctgtgtcctttaggcctcggctcaggtgtcattgagtctcctcccaggaaactttacccacaacagccattcctttgcccaattgggatctgtgcgtaacctttttgaacgcctctattgtactacactgtgactatgtgtacttgtctttttccctcagagactataaaattgttgagaatgtgtgttttattcccagaactttgtccagtgactgacacttagtgatactcagggaatcttgtgtaatcatttaaagcgagggctctgtgagaagccctggccagtgcaaacctgcgttgagacccagggtggtcctcttcaaaggctgatatcctgggaagagagaaaaacttttccagctgatgatgccatactgaatggagtggcatttgttatcatcccctgtgtgtagctcagtgtcagcccagctgtgagaacttggagaaataggaagatgccttcccagcagcatacttggaaattaattatatgcacaacacatgaaggaaacttgtagaataagaacaaatattagcaggttatattaattagatacacttttagaaattaaaaatgtttatatattcataggaatagtttcaaaggattccttgaaatgttaccaatctcttgggaataggattttggcagatcttatactatatacttaattgtcatatttttaaaaatttcaagtatatattttattttaatttagaaaacaaacaaacaaacaaaaaaacacacatatccagcccaggatagtctgtctgcatcctcaggagaaggtcagca

SEQ ID NO: 31653 - DNA, 2171 bp, Bovine  19866880980841
  misc_feature (1)..(1): n is a, c, g, or t
ntgttactcggtagaatgctcgcaaggtcggctagaaattggtcatgagctttctttgaacattgctctgaaagcgggaacgctttctcataaagagtaacagaacggcccgtgtagtgcgactgaagctcgcaataccataagtcgtttttgctcacgaatatcagaccagtcaacaagtacaatgggcatcgtattgcccgaacagataaagctagcatgccaacggtatacagcgagtcgctctttgtggaggtgacgattacctaacaatcggtcgattcgtttgatgttatgttttgttctcgctttggttggcaggttacggccaagttcggtaagagtgagagttttacagtcaagtaatgcgtggcaagccaacgttaagctgttgagtcgttttaagtgtaattcggggcagaattggtaaagagagtcgtgtaaaatatcgagttcgcacatcttgttgtctgattattgatttttcgcgaaaccatttgatcatatgacaagatgtgtatccaccttaacttaatgatttttaccaaaatcattaggggattcatcagagcttggcctctaatactggcatagtcctttgtgtcagtcacttgtggggaccattatcttctggaaggacatgggagcacattcttctactgactgtagattttaaactccttggtccaggggatgtgtttattttgatgactactgaatgctcagtgcctcgtgcatggtaaaatcccaggatagcagcagtgttatttcacgagtacagctatttaagtttgcatgactttaagaggctaaagaatcttcttttatgtattttttttcccccactaaatcaggttttcaagctagaaatgctcttcttcagtcaaatctttctcaaactcagctagctactatatggtgagtttgcccgttaattatgatttttaactagacattctgtatgatttttaattagacataagaaagaagccatttctgtaaatgtttgtgactcaaaaatgttccacaaaagcaactgtgtgacagttaatgcaaacctgcaagcaaataaaattgctttgtaaaatgttacccttgagaatttggcatttaattatcttacaagtaaaacttgtttgcttttatgtaataccttctgtgaaggattagagagtatctcattttcagtgtagagcgtgaggtgatttgataagtgaattaaccacgaaccaagacaagctacctttttgaagggaatatttcccttttcatttcaaaatttcttccctctctggtgatatggaaattaaaggcaaaaattagctcacttttctgtatgtacttctcactaaaatatattaacccagctgtttttctgtcattactcttgctttcaaaataaaaagattgaactcttctgaaaatattttactctaaataggctttctaagttgagaaactttaccctttcttcaggactctggctgacatcgatggtgatggacagctgaaagctgaggagttcatccttgcgatgcacctcactgatatggccaaagctggacagccgttgccgctggctttacctcctgagcttgtccctccatcttttaggtgagtgtctctgaaggttaaggggtgttgtttcaatcatgtttggcagacaagatttttactctgggaattcctgaggtctctgctctacttttgtggaaaatcaagcatttacattgccatttgattttggtatttagtgagtaacactgataagagagtagatattagaagtacgtatgtgttttcaccacattatagataaggaaactaatgcctaaagagattcaaaataaatttacccaagaatagcaactggtcgaaccatgttctgaatccagatctgtctatcttgataatttgtatacctgatgttcagtgtaactatagaccataatgttttaaatatctttaatattatatgctaaatattaaattgctgtagtcattgatagtctatatagtctggtctaaaattttcagatctcataatgctaaatttattttgttgtttgcctttcttagaggaggaaagcaaattgattccattaatggaactctgccttcatatcagaaagcacaagaagaggaacctcagaaaaaataccaggtacatt

SEQ ID NO: 31654 - DNA, 1226 bp, Bovine  19866880995323
  misc_feature (1)..(1): n is a, c, g, or t
ntcccctagagatggataataggttgttgcatgctctttatgcaatgaacatccttcacaaagctgctgttatacactgaggtgaactactctgggggattacagggccataaggattactttcaccaacttctcatggtaagattggattgttcttccaaatgaacgcactagtccacatgcctgttatattttcataagtgatttatatagaacacactgagtctcagaggggcttccttgatggatcagcagataaagaacccacctccaatgcaggagacacaggagatgagggttcaatccatgggtcgggaagatgccctggagagggaaacggcaatcgctccagtattcttgcctaaaaaatcccatggacagaggagactggtgggctacagcccagagatacatggtgaggcattcaaatagatagtaagtcccaggaccgagatccaaatcttctaatccagttctaagtctttctcaactggggaaaatgtctttctcaggaaggttaccctaacccacatggttgtgcacaatcacaaatgcgaagtttagctgaattagtccttataattactcttcactgtccctcattcaatgattatttgttgaatggtagctacagaaaacactgcttttctccttcaagaggtcacggttttatttcctttcatcactaaagtacctaccaacaggtatgtgccaggaatccaccccttcctttcctaaaagaacttgaaatcaaatttcccctcataaccacagtcaacattagtacagactttcaagaactttctgtggttctgttttcttgcatatgcatttcatgctctcagaatccctcaaaatcgaccattttacctggtccctgttcttcatttccagagaccacgaactcaaagttcaggtctcaaatatcaagtcagtaacgaagagagttaacaaggctagtggtcagtacccagtggatagcgccgtgattttgttgggagtacaatgttttatgagcaagtatggcagaaccataaactggatccattttagcagtggtcggttatgcccttgggtttgaaataattactttcctagacatgtggctcccagatgaaattcatgctgcgatttgaaatttttcatgcaaaaattttttttcgctagcagaaattcatcaccaatatgtcaaggaattgagactaaaaatagtctccctgtaaagg

SEQ ID NO: 31655 - DNA, 693 bp, Bovine  19866881004581
  misc_feature (1)..(1): n is a, c, g, or t
nagctcctgcgtggattgaggaatcaattctactcagtggggatactaagcagatgtagaaagtatcttcccttcttatgtattcttgctccaaacaaagagaaaagctggacaaaataattatacaactaagaactcaagagcaatagagttgttgtgctgaggccaattcatctaccagtcccagaaattttacggtaatcaatcaaagcaaagtaagagatgaaaaataaagctgcatactatatcaatctcttggtaattaaaatatacactagtcttgcagtcatgcagtaaataaatctgtttgatttggtgtcctcccccatctttttcttttcattaaaccttcaccttccattaatatctataaaacaccaatacaaactggaatcttgtttgggaaaagcagttctttgctgtagaagatggtatctgttacttgataatacacaaaatgtactactcactcttctggcttattctgatttacagctgtcactgtattatttgcccatggaatctgatcaccagttcctggttgtccaaactggttatcaattgcttctaattccagttcaggtaatcctggttaaagaaagaaaggttagaagtcaggatgtattaaaacagaagatatgataatatttttcagaagtaatatattatatagtagagtgagatttcccctat

SEQ ID NO: 31656 - DNA, 680 bp, Bovine  19866881027197
  misc_feature (1)..(1): n is a, c, g, or t
ncttactctaggctcttatcttaggcattacatgagttgtacgaatcacctccaatttacatattatagaagagccttacatggaaaagaataaatcattttcaaattagacattctgtctagagctgtcagtagctgattcccagcactgtcttttatttctgacatgcttttagatgagagtaatcttatacttgcagtaattctcaggataaaattttcttctcaaagctcatttcatgagagttgttttttttttttttaattttgaagaataaagcaattattcttgctttttgaaattgcacatcaagtctaggaacataaattattctttctttttgaaattgcataccaagtccagaaatatagactcttaaaattttaaatattaatgtcaagtgatggatgtaaacatctcccacttttaactctcattctctcagtgtgcccctctttctcggtagatcctcatttctactggatttccatcgcacaccaattatcccaggctacagctgtttactgtcagctgttctcttcactgcccaccacacagccagcctgctgctggtaactggactctcgctcccatctgtggaaatccctgcctccagtgtggttgctcaggctggggcttcacccctggctcaggcacagagtttgtgacctaaatcaat

SEQ ID NO: 31657 - DNA, 1285 bp, Bovine  19866881039964
  misc_feature (1)..(1): n is a, c, g, or t
ngcttctgagggtccttctaccttgttagttgtggagtttgtgtttagtccctaaatgggactatcaggccagagagtcactgggcctgcataggtcaagcattcagacccagagtaggctacttccctttgccaaagcttccacttggcagaatcttcagtaacaaagatttgtgctgtttccagtgcccagagtctaatttgttggggtttaccagctagccctgctggtggaagtatttagtttagctagtactagtatgctgctgctgctgctcctaagtcacttcagtcgtgtccgactctgtgcgaccccatagacggcagcctaccaggctcccccgtccctgggattctccaggcaagaacactggaatgggttgccatttcctccattgcatgaaagtgaaaagtgaaagtgaagtcactcagtcatgtccaactcttcgagaccccatggactgcatgcagcctaccaggctcctccacccatgggattttccaggcaagagtactggagtggggtgccattgccttctccgagtagtagtatacctgtcctaatttatgtgttttgacaaatatactctggttatgtaaattgttaacttagtagaaattgggtgcaggctccatactatctttgcaactttcctataagtctaaaaggatttcaaataagaaggttactttaaaatgtatcagaggacactccataacttccagggtaaaggtcagctaaggatgctatttaagaccctttaaagctagtccttcctacctctttcttaacctctttcccacactcacgtggtgctttagctatcagtctactcaggggagtgtctggaacatgccttgactcctcatgctctgaccttgttttgtgaaatatccttatccctcctcttcacatggcaaaattcaagccaagcttcaaggctctgcctcagtcttacctttcctgttagctcatcactgatgcttctcagtcaggattagcacagctttttgtatatggtttctgttttaggatgcctcacaggttaacacttgtaagtgctgatagtcattttctagagtaagatttccttaaggatggaacaatactttattcatctttttatttccagtatttagcttgttgctcatttccagtgagtggaccacagcagttgttcaggtagatgttaattgggtaatgagtgaaaagcgtcaggaccatacttggtatggttatgaatagagctttcttctttgtgtcactccagtattaggactgtca

SEQ ID NO: 31658 - DNA, 991 bp, Bovine  19866881072399
  misc_feature (1)..(1): n is a, c, g, or t
ntttaaaacttagccctttaaagtcctttatctcttactcattttcaggtcttataatcgttgaatctaggacaccatcagatttaagatacacagtaatttttacctgttgttaagaaaggagaaatgctgccacttgagacatacagttaactgaaagatgtattccagtttcaaagatataaaatttgtttagtaaaatatgtcaataccacatctattttcttatagcttccagtgccactaccctgaatcgggctctcattttcctcgtgggtgtcccactggtctgcccacctagtgtgtcctggtcacaagccagcagatgacctgccaccaggcttatgcaggatcactgagcacgcttgtcagtacagggtcctacttgcccatggaagaaagtcaggcttccttagatcagccctcaggccctccgtgtttatatttcctaactaactttttaggtgactcttcaattcccttattcaaacttgatgcatcagtaaagacactccagttgctgccctccagtctctggcctgggagtcgaatgttaggactctcctcctcccttgcctgcctctggacgtaagctgtttctggctccagtgctgccaccttcacagagcctaacccagccacaaatgatagcacccatctctgaatgtttatataatatagacagtgcttaaaaataggcagggtcaggggcataatggaggactggccttgaacagggagagagagagaaaacttaattttgagactagaggagagggagtggggaaaagtatgaatatatataagttcatagtggaagaaatacctgttgacttaattttcttctatgaagtgggaagcatatagtcttccagaacagtgaataaactttctgagcaccttattacatggcataacatagtggttaaagctcagactctggtgtcaaacagcctgagtccaaatcctggctttcgtacatttcagctgt

SEQ ID NO: 31659 - DNA, 828 bp, Bovine  19866881089495
  misc_feature (1)..(1): n is a, c, g, or t
nctttatttttcttatcttttgattcttcgccagtgtattagttccaattagatgaacttctctgtccaccaacaacagtcgaaggaagaaatgatgagaaggcccttcttgaacagctggtatccttcctcagtggaaaagatgaaactgagctagctgaactagacagagctttgggaattgacaagcttgttcaggtatgtactacagttggccttttttagatgatgcagccctgaaaagctagaagagtatttttaagcaagactttttcatatgactctcactgtatggtagctattttataatttacccttgtgaaagttatcaaaatatataataattaaataatgggcttttaaaacaaaaagcctgtcataataattacagagttatagccttttactatggaacataatcttagaagctttccctagaatagaatccagattttatattattcttattttaggacttaatttatccttcattcatgctagacttcagcctatatgttctataacattccaacttccaggttagtatttttgagactttggagttaaaaaatcaatttagtgcatcatgaccagcattttttttaatggatagaataatgtagaataaagactgtcagaatgcagaaaaagggaaagttgtgtttcatgaaactctgttttcagttacatacacaaacagtaggtcataatttaaattatatttctttcaataagtagtagtcaaaaagtttgaaagccgtagctgtatggcattctggtaggtcagctgtgaatttttttttttcaaacaagataaaagcatgaatt

SEQ ID NO: 31660 - DNA, 1559 bp, Bovine  19866881107366
  misc_feature (1)..(1): n is a, c, g, or t
nttgttttgtgccgggaattctgcccttagacaaaacccacagtcatgaatacataaataactgctttctgagccatctaacaaagactgggctctgctgcagagcagggaacagcagcctggggggaaaagtggcagagccagccatggcaagtgcttcacctcccagcggcactgcagaccccagctggggagcgtccaccttggaaaacagctcttgttagtaatggcctggtctgcgaggctgttcagcacatactctgctgacaagtatcagactacactgccagtatggtcagaagagccggtagtatctccgctttggggaatccatcactgaagactccaagagaaggactgctatcaaggctctgaggcagagtttcggaagtcatctgacctgccatctcttatgattatttcctgtgtggctgtgaaagttaaggggacgaagccttcactgtccgcacagagaaggatccagtgagagtctgcaaagtaaaataaacacacaggcaattctaaaataaacacacaagcaattctaaataaacatacaggcaattcaggatatcctgtcttactcaataaagaaaaatatcacaaatacaacctttttgagagaaagaatgtagtagttgataatcctgaacctgaccatcgcaagactttacagagatggaggggccgggtgaaacttagggtcaggttccatggcaggaatgggatattgacgacaggtgacaggtagagctaagggacacgtattaacgcctgggctaggcactaaagggtcagtgtcatgtatttgagcttgtgtgtgcatgtgtgcatgctgatgttaggggttgtgtatggcgtccctaccttttctaatgccatctaatagtttctccagaaactatgcgcagctggcaacagcaactctatggaggaaacctctatatttttgagatccataccagcctctagacacccaagaaggttgagctgactagtgccaggctagaagtgcccagataatcctaaatagtttgttctgcggtaacctaggaccactggtgtaacacatacctggactttctctggttcttttgagtctactgtgaccctgtaatttcacttctgaaaatctacactttccataaatgtataaaatacagaaaggtttttattagtgttattgatgataatgaaaaattggaaaccacttaaatgtcaaagaaaacaaggcaaactgaaatatggtattaagagtaaatactgctcatcacaaggaaaaattttttctatctatatgagatgatggctgttcactaacttacatgatgtatttaagtcaaattgctatgttgtacactttatagtgctgtatgtcaactgtaactcaataaaactggaaggaaaaaaaatatggtacatccaagatagaatgttaacccagtaaaaattacaattatcaagttgtatcataaatgcatgtatcaaaatagaaaaatgctgatgctataatgtttagcaggaaaaaaaaaaaggaatggaaaaaaaaaatttatgtt

SEQ ID NO: 31661 - DNA, 2877 bp, Bovine  19866881114738
  misc_feature (1)..(1): n is a, c, g, or t
ntatatagaattcgtaaactggggacatgttaccaagtttggagggggaaaaaagcactttgtacctaaatcttttgggttttttttaacaaatgaaatttactttaaatttcaagtaatagcaaagaggaatcaattacttctatgactatcaaagagaaacctggttttgaagaactgaaaacgactagcttagataattaagctatgctggtaaatcaagcgttccagattaactgacacccttatgattatatctcaatctcaattctaatgaaccaactgtaacaaaaatatttacttaggaattccaaatttaaacaaataggtgttccttttgattttttatttggacaatccatttggagataggcctccaataaatatataaatgaaatacaaatatttaattgctaaaatggcttaaatttctgaaagattaaatagcagtcatgtattttgagtttaatggtttcatcacattataatttataattaagataggttaagtctattaagctgcaacttgaatttgctcattattttacattgctaagagaaaaaattaacttttccaatgtaaaaagaaagaaagtagaggggccagacttagcacacagaggggaaaaagaaacaattatacaattctgtaaagattaattaaatacatgcatctaatattggtgttaaggttttacaaatcatcttcagaataagccaaaaggatactaatatctgctcttacagcagaggttccaatgtagatttttgtgtgtgtgtgcatgctgctgttaggatttctcctgtctaaaatgggtccctggggaaccagcaagaagaaattcttttattattttctgatgcaataaagggagaggtttttccagtactgaatttaaggaaaatacgtaatgactctgctccagttgttatggcaatatccctatcaggaatataaaagtaaaatggctacaatttctggcatatttctttttgtgtttttagttaaacaatatttaattttcttaaggaagattttttcattagattatgaagtcataaattaaaacttttattataaattacagtttgtacaattcacaaaagaaaaacatttaaacacaattacatactccacttatagcaatagggattcttgcttctacaatgttttatttacaaattactgaggaattactgtgtttacttgaataacttgtatatttcccagcaaatatctggaacttaatttacagtcatccttacaagcctaatttatcttctagagtcttctgtttatcaaagattggtacacttactaaaaatgataaccagtagcagagttaaattagaatctagatttagcacttctctcctctttggttgtttctttagatttctaagaagatttcttggagctgcagataaataaatgggtgagggtagacttcatatgtaaattcctttatgcaagacagcaggaaattagtaaaaaaaatcagagctttattcccaggatttgcaactaacctgcttttgtgacatcaggtataagataacttcttaggaactcagtttctggagtctgtaaaataaggatatcggagcacatgatctccaagttcatttccaattaaaatagttaagtttacgtttatggaagtgtaggaaacagaattggagttaagttcatttgagactacagctatgtatgtaggaacagaagatggcaaagaaatgtcaaaaataaaatacaaagatcacatttaaagtttcctctcacaagttaggtttgggcttatgactaaaaatggccagaaagcccaccagttttatccaaatccccagcatcgtcccttcaagatgccgctattctaatgtccacaggagtgcagcctatgagtgtgttttctcccaatataacccttcctgtacctggtccaagaagaactgatccagctcatctagatcaggggttagcagatttttctataaaaggccagacagcaatacatcaggttttacaggctatccagtctctgtacaggatagcaagtactcaattctgccttcaacgtatagaagcaatcatagactacacaaaaatgaatgggcatggtggctatgttctaataaaactttactgaaaacagactgtaggcaggatctggctcacagactgtagtctgccaactcctgatctagatcacaccaagaaacaagatggtataaatcagctattctaaatttttcagagtcctttcacagcctagagtaagagacagcataatacagtagaaagtactatgcaggtacttcgtgtgtgtgtgtgtgtgtgtgtgtgcgcacacgtgtgtgcatgtgtgcacatgcacactcagttgtgttcgactctgcaatcccatggactatagcccgccaggcccctctgtccatgagattgccaggtaagaatactggaattggttgccatttccttagttcagtttctactccaggggatcttcccaattcagggactgaacccgtgtctcttgggtctcctgcattggcaggtggattctttactactgtaccacctgggaagctccagatgtgcatactagatgcttaataaatatagatttcctttctcttctgaataccaccatccctcaaaatttacttctagaaatcacttattctggccctctcacaagaggtggtccttggtcctgccaaatatgctcctggtaaaaagttggcttaaagctcaacattcagaaaacaaagatcatggcacccggtcccatcacttcatgggaaatagatggggaaacagtggaaacagtgtcagactttattttttgggggctccaaaatcactgcagatggtga

SEQ ID NO: 31662 - DNA, 1720 bp, Bovine  19866881123165
  misc_feature (1)..(1): n is a, c, g, or t
ntaggttttaatttttcttaatagcacattaacagaatttgcaattgtgtatttaatgtctctcttctctgttagatgttaagtttcataaaggcatctttattgtgatgtatccagttgtcttatacaatgcctgaaacatgatagacactgcatatttatgaattaattaacttgagaaggttgctaagaagtttgaaaagagaaacatttgatgaaaaccttttgactaatgaaagttaagaagaataagttgggcagctttatattaaagctataggtaccttcttagtctcaaatacttgtaaggaaccttatgcttttaatttgtttttcccaagtaaactgctctgctggaaagcaaattcactgacttcctggcaaggatattagttgagtttataagatactgttcattgtaaaggactaaatcagctttgggggaccactcttcataagataaactgatccattgaggtactcgatctgtggggctaagcgattaagcacctcaatagcagtcttgaggccgttgtccagccatcagtctatctatctcttgttactttacctagcttcatttaatgaaaatcaggaaaactgtttttctcctcaaattgctatcccctcctactttttttgtactgttttgaagcagtaaccatggttactagtaagctccttggagcttagaaaacattagtcagtttcacagctggaggtagagtgatctagataaaagcagaagaaaaaagctgactgggggtttttttccttctcttggaactgagttctttcaatggggagcacttcacataaagtgaaatgttctttattcccaccagtatgaccatgttttcatttaaattaacaggtaggctagcacctggctcctttttagagtcaggaaagggagataatgctaccactcacctgccctccacctgaatctcctccctctctaccctcttctctctcttctctatttctttacacctcccccgggccagtagtgagtgaagtaatactgacatttgaggcccagatggataaggttatgaagttgcagctttggattaacggggtgggtaaggggaggagtgaaggagcactaaaatcttggtataatggtaaagtgaaagtcgctcggttgtgtccgactcttcgccacctcatggactatacagtccatgggattctccgggccaggatactggagtgggtagcctttcccttctccacgggatcttcccaacccagagatcaaacccaggtctcctgcattgcaggcggattctttaccagctgacccacaaggaaagctcaagaatattgaagtgggtagcctatcccttctccagcggtatagtgttcagttcagttcagtccctcagtcgtgtcccactctttgcgaccccatgaatcgcagcatgccaggcctccctgtccatcaccaactcccggagttcactcaaactcatgtccatcgagttggtgatgccatccagccgtctcattctctgtcctccccttctcctcctgcccccaatccctcctagcatcagggtcttttccaatgagtcaactcttcgcatgaggtggtcaaagtattggagtttcagcttcagcatcagtccttccaatgaacccccaggactgatctcctttagaacggactggttggatctccttgcagtccaagggactctcaagaggtctt

SEQ ID NO: 31663 - DNA, 1765 bp, Bovine  19866881123352
  misc_feature (1)..(1): n is a, c, g, or t
ntgaaaaaataagaattcccttgcctcattttttaaaacaagagatatatacaaatactatgctttcaaatgtgtatgaatgtcacagcttataaattatgttttagataataatggcaagttttaaaatgtagctaatgtaagacggtattgttaatgtattaaccaggatagactagttatgttgcagaattaaacaatcccaaactttcatatcatggtttcccagttggtaaagaatctgcctgcactgcaggagaccccggttcaattcctgggtcaggaagatccgctggagaagggataggctacccactccagtattctcgggcttcccttgtggctcagctggtaaagaatccacctgccatgtgggagacatgggttcgaaccctgggttgggaaggtcccctggggaagggaaaggctaccctctccaatattctggcctggagaattccatggaccatatagttcaagggatcacaaagaaccagacatgaccaagtgaatttcactttcaaacttccgttggtttagcccattacagtttatttttccctcacatgaagttagccataggtaccatggctcttctggacacctcccttccaagcatgcctgacatccaggctatctcccctatttttggttacaccatctcgacatctggcttcttctgctggggtggtaggaaaagagaggcatcaggaactaacaaacgctgtcttctctatgctttgtcccagaagtgacacacatcacttctcttcacatctcatttgtcacaactagtcacatagacccacttaactattaatacctgggagctgggaaatgcatgggagcacatagatactcagtgactaatacattataataaattacatcgctttagatgtgattgaacttaaaatgaactccttgaaatatttccaagtaagagttgttcccaaagcaataggaaaatcatggtgtaatttccaaagtttgaagaagcagatattctgctgtctgccccctgcagtggttaatttcttaaagaggttctgacagcttcaaaacataaaacacagcatggaattttgtttattcttggatagttgccttctatttaaaaggcagggattggattgaatgatcgctaatgtcacttaagaacccttgaaatgattgtttaaacaatcaaaacgaactattgtctatttcaacttggattcatttttatttcagaattctgatttttttttaaccaagatgaattatatactagaagtttcagtccctcagaaaaaaacatttgataagtgaactagagataaggtaaatcttatgcatctggtttgtgtcacacacgatttatatattaggaccttcacttttttaatgaaggccttttcttggcaacagaagttaaaaaacggaaaccccatttctcaggtgcaatggcagggggtaagatcagtctgggcttccaggtggctccatggtaaagaatctgctctgtgatgcagacaccttgagttcaattcctgggtaggaaagatcccctggaggaggaaatagcaacccactccagtattcttgcctggaaaattccatgaacagaggagccctggagggctacagtccagagtcaaaaaagagttgaacatgactgagcacgcacgctttagagatcagtttattcaaaaagttaacatgagcttacatcattaaaactttgctcttcatatataatttttgcgtgccctgagttttaaca

SEQ ID NO: 31664 - DNA, 1215 bp, Bovine  19866881136046
  misc_feature (1)..(1): n is a, c, g, or t
nttcttgaatgaaatcagatagggaaaatttcagtatatcctcagggtcacaggcaagatggcagagtagaaggacatgagctcatctcttcttaccgaaacaccagaatcacaactgctgaacacccattgacaaaaaaatactggaaccttctaataaaataccctacatccaaagacaaagaagaagccacaatgagatgataggagggacgcaagtgcaataaaatcaaatcccatacagggtgggtgggcgacccacaaactggaaagtatactggcagaagttctcccataggagtgaaagcgtgaagtctgcatgcaagtctcttagatagcctcatccaccaggctacaaccacaatcacagaaagacaaaatgagatggcagagaaatatgtcccagatgaaagaacaagacaaaacctcagaagaacaactaagtgaagacaggcaatctacctttaaaagaattcacagtaatgatagtaaagatgatccaagatgtccaaaatgaatggaagcatagatggagaaaacaacaagaaatgtttaacaaagacctagaagaactaaagaacaaacagatgaacaataactgaaataaaaaaatataccagaaggaatcaagtatatcacccaaacaagcaaacagtagcttcctattggcgaagggtctatcttcctacagttcttgactccagagcaaggatggttaccccatctcatctctctctgctgagtgggcataaggccaagataggggcagttatctttcttttatttcacaggctcaagatgccttatttagggagaagaaaatggcaatactagaaataaaaatgcttgtcccaccagtctgggccaagtagtacaaagtgatctgatccactgtatattttaaattaaaacactgttgctttcttgaacccagaataatgtggcctgtgtttctctatttaaaaggggaaagaaaatcacaaatctgcatgggaaaattcccaacaaaaggcttatgcctgactttacccctttttagtcataccaaccaaggttacataatcacaaacagaactttaccctacttcctaggattgttgttaagtattaaatgaaataaaattactctgtcaagtgcaaaatgccacataaatattagtcaggttattacatgaaggaaactggtatcattccaggtttgtgctggagatagca

SEQ ID NO: 31665 - DNA, 1288 bp, Bovine  19866881252583
  misc_feature (1)..(1): n is a, c, g, or t
ntgggttcatccctggttggagaactaagatcccacaagccatttggcatggccaagaaaaaataaaaactaccagaatttaaaaggaagagggaattgtcattgaaaggagtacgcggtgcttagggatggacggcatgtagtttctggattcagctgatacgcaaacataacaaagcaatggataatgtcagtcatttgaacaatcggaacttcttcaaatactggctcacttcttccttggggtagggacggagcgcaatgcaagtgggtatattctctggctgctccatccacagcttgtggtcaatgttcttctgttgcagcgtctctgccagcaactttaaggtggtctcatccggggcctgaaaggagcagaacacaggctgaaaagcccacttaggaagtaacaaaaagcaaaagcaaaaaaaaaaaagtatgaagggggactcctcttaactgaaagtggagtaacagctctaccaaagaaggcgctgtagagaatgtctccagaagcaacagcttcatcgctccatttgccattcactctctgaaggggtgggagtgggggtaaaggtttaatattcctatgtataaaatggagctttatctctcccctcctgagatgctgaggggctctatcagtaattatgctctatgcattttctagttctggtgactaaacagccatcactaatcccacagccagctctgaccttaagagttgactactggaaggctttctaaaatcacatcacttccacctccctcctacttccaccccagtccacacaaaccaagaaggattttcttactgctgggatagttccgccttgttaactcaatggtgggcaaatgattctctcgtgtctttcagaaatcgtttctcatcatctttatcacccatgcgaatctcattacaggaaatagtaaagccatcactcagaaaataaagatcattagtgtgttatgttgcataaggtgtgtgtgtgtgtgtgtatatatatatatatatatacacacatatatattgcctagaaaagcagaagccactaagataaccagaggtttgtcttatcaaagtagaggatgctgggattgctactcttaatctattgagtcctttgggcatgctgaaggacttgcattgacttcccttccttcctttttcagcaccaggagcagcatagtaaagttagagtgagttcaaacccttgctgtaccactttctgggcttctctggtggctcagatggtaaagaacctacctgcaatgcaggagacctggg

SEQ ID NO: 31666 - DNA, 1651 bp, Bovine  19866881322584
  misc_feature (1)..(1): n is a, c, g, or t
ntattagtctgtaggtattttgcagatatctcttctaggggaatgaagactggaactgaatggtgatgtatccaaagtggtttctccatgacaaggtccacaaagtaggaatccagcaggttcccctcgaaagcagtgctgatgcagacacagactcctcggctggtcagcttcccgctgatccctgggacaagacagtgccttaagggacatgaggcaaaggtttcatctgtgcatcccacgctcctcaactccacccagtacacacaccatgggctcaaatgctcactgaacgaatgtctagactctttcttctgactttgactcactgagtttgttttcttaaaaccacagaattgtggggggaaaaacattctaagtatcaaattattgaagaagagattttgaaattttcaatttacctatggctccttttttcctgagtgtcaagtaacttacagtagtactcaggtcttctcacaatcctcttatgatacagataataggtaagtaagtcctcattttaatggtcaaacagagacttgaggggttcaaactatttgaacagtggcatcaagcaaaccagctgtaaaggaagttctagcacacggtctagcacatgttgaatcactacaatgaatagtctaagccagtcaccaaccaatctgctgctgcacagggagccagttttgcaggtaaagctgcctatgaatagcatgccagttctgcatgtgtatgtcggggggggtggggggcaaaattcagtgttaatgaaataggtccaggactaataatacatcttgcaaactatctcactagacaggagactcagactgaaacaagtgagaaaaaattatacctgtaaaacgatatgcctgcagaatggctttcatgttttcctgttttctctccaaaatttcttgctcactaatctctaatatttggtcaggttctacattggcagtagatgctttaacctgcaagacatgtagcagatttatctgggtacagaggcataatagaagtcccatgccctcacctacatgggaaaaatgtaaatgcagagtattttttttattaggttatgaatcaagaaatgctactgtggccagccagctggtgctatgaattcacagcagaggaagaatcttgtgggttatatacagtaccaggaatcagaagtagaaactatgctggcctgaagaacaatgcatttggctgcagtatagtcttgtgagaggagaaagaaaaagaggtaaggaaagcctagggtaagcaaaaacagctgtaaagaggcaaagctggtaaagttgggtcagactgtgcaggcttttaagtgccaggatgagaaatactgattataagttgcacactgtgagctacaacccagtagatgctatcagactaactccttctgagacaactacccaagctgatgcaaataccaaaaagaaataagcaatcatgcaagtaaacaaacagaaaatggcccaaaggcatcagagaaccaccaaaatagccagactgaagactaaagatgaatgcggaagttagtttgggttttcctcctcatagtcctgttgatttttatcacatggcatacaggccaaatagaaagctgcaggctagattctgcagcagtctcgcagcg

SEQ ID NO: 31667 - DNA, 1466 bp, Bovine  19866881339010
  misc_feature (1)..(1): n is a, c, g, or t
nttcatatgttgaaacatataaacaaaattctgtgttatttttttttaaatcagccattgcctaaatgcactgtagtttgtgtttatgttaagtctcagtagcaaaatctttctgtagtggctcatcatgaaatctctatttgctctaagcacttgccagacgaaagctggggagtgagttagatagaagtataaagatagttgtacagaaaaggagaaaagaaagaaaaaggagagaaggactaggggaggattcaaggctctctgcattcagagagctgggatggagaaaatgagagaacaggaacacaggggaattgttaacacagagagagatgaaggccaaggttggagctctagagggaaaagagtaggaatgagaaattacagagaacaaaggtgggtggagggcacaggggcagctacagaacagactcagacagagagctggtgtatgttaggtacacacggaagagccccaaaaaagaagaaagccaaatgggagcctatgggaacaagaagcaaagtttgggaaatggggagagaggaggacaaggagagaaatgacactaatgtacatagagatttaattcatcagacacaaaaacactcggcccaggaaccatcagcgttatcccagagagtggagtagaggtgaaagtgaatcaagtgaatcgtgaggagaaaacatcaggcattggactgatgaagaaattggatagtcgcgagattggacagttggcctgttaaggttgatggaaagcagcttttattcaattaggatagaaaagttttcagaaatgctgagtatgattggcatgaatttagtggtgaaagacacccccaaaaaatctatcactaatctaaaatacttcctgaacctgttaaacacgcacaagtttgccaactgcggagacagacagatgcattgggtgccttaggaggcatctccactgttggtctggaacattcacaagtgtggtactggcctcatcagttctacaaatgactttctaataataaggctggttggtaaagactaactctggctttgttttcctgatagaaaatgttaaaactatgtaaccttagacttttcaaaggaatacgtgcattattactgaaagtattaagctcttatggaaaaactggaatgaactttttggccaacctgatagctaaagggaaaattcacactgttctcagctagtagtttagtgttattttcagctcatgcgtttggatggactgtctgtcaggaaaaataagttaagtataaaattgttctactaatattttgctgtaattctaaaggtaatatgtaaagaagctatgtaaaggtatattagatactacataaatcctctggacattaattttaataatactcatgtcctgttactgagttgtggtgggttttattttgctaatactgggttaaagcccttaattttctaacatcataa

SEQ ID NO: 31668 - DNA, 749 bp, Bovine  19866881388860
  misc_feature (1)..(1): n is a, c, g, or t
ngatggtgtttataagctagctgaaggcgcccagctggccccagcgctcacagccactctctggtgcaggacgagaagtcagacaaggagcgctggcagcacctggcagatctggccgattttgcgctggccatgaaggacacgctcaccaacatcaacaaccaagtccttcaacaactttcatgctgcgcattggtaaggcctctcagcacgccctctcctgctgtgcgcctcctccccaagcaggggactctacacatcaggggaggggtcttggatagacctgatgcacttcgggtgggaagggtcacacttctcgagctgaagggaccttaagggtctttaggtcagtgatcaaaccgaaaatgtgatgctcagccattcctgtcccatgctgtttatgatgacctcccttctgaatctggctggggcttcagtttgtctccctttccttggaatcttctgtcacttcagtcctgcccactaggattaacatcacccatcatacacttctggggaggggagttctcaatcctgggcaaggtcacaggagacttgaagtaccaggtgggtggcaagagaaactggcaacttctgcactaaattatgtagcacagcagggtggctgacatctgctgagcacagtgaggatgagaagacttgatttctgtcctctgggaactcaagagtcaggcttgagatcaggttatataaccaggagctttgtggctggagtcaggcggaaattg

SEQ ID NO: 31669 - DNA, 740 bp, Bovine  19866881400891
  misc_feature (1)..(1): n is a, c, g, or t
ntgaattagctatgtgatatgcattactgtttctatttttcagatggtaaaaactgaggttccaaaaggtaaagtgacttaaccaagttcatggtagatcaagataacccaggttgaactccaaagcctgtagttttcactaagggaacatttacaattggttactgtaaactcagtctgcaaaaggaggactaaacttctaaactttagaatctaattagcatcttaggataatgattttattccccttatatttttcatagtcaaactaaagatatgggcaacaaaaattagaattttagtagcaatatagtataataaatttatcaactacattaccttgtagcctcatcttctagtttctttttctgtattaactctgatctttttctttcaatttccctcagtttgtcacgtttgatcttataaagctgttcaatggctaactgctgtgtattgtaactttctctcagttcctaaggagaaaataaaaagttaatatggcatggatttaaatacttttgccttacataaaaatgtggcaactgtatttaaatataaaaatcataaagcaagttaaactaaagtaaaaaagattaaaagtcttaaaaaagatgattaaaaaaatcttaaatacattaagtactgaaggtatatagccactgaggacaaatttatgttaaaatcaactacttttatactaattcattcctaaggaacaaaaatcttttacaagccaa

SEQ ID NO: 31670 - DNA, 718 bp, Bovine  19866881499492
  misc_feature (1)..(1): n is a, c, g, or t
ntgagacacactgtatgcaggtatcgtgcttgctctacatgttatattttataaggaaggttaagtggctgttatacgattgcacagcttgttggtattggggctgacatttgagtccaggtcttgagacctggaatctccaacatacctctacactggcttctctccaagcgtgttagccgcatgtggccacattgcacccctctgttcttgtctggactcctttctgtcgtcttcatgtgcagtagagacggctgtagtctccattgctttctgatgacccaggagccatgaagcagttacttaatgaaagtatcactttaagattttcatgctgtttctgatctcacctttgtacttagtaatgttgattctttggtgcttctggtctagcttatctttgaatggttggtttggagtcttagcaatacaattctgcctctcaagttttgttagtatttgaatagctagagcttagggtatttttttttcatttgaaataaattgcttggtcattctctgtgtttccacttgtattttgaatggttggtcttaatctgatagctttaatatattgcattgttagtttgcctatatggttaaaatatttacatgcttttattatcaagcacagattcaattgtttaacagaagatattctgttgtgagtgtgtttgtatatatacagataatcataccgtatttgaccaaatagttg

SEQ ID NO: 31671 - DNA, 1300 bp, Bovine  19866881771414
  misc_feature (1)..(1): n is a, c, g, or t
nttttggtgccttttagtagtttgaggaaattttcttctattgctactgtactgaaaggcttaatgaattttgaatgttttcagtttctttactgcatattttgatatttgataaacactattaactgtttcagttatgctaagtaccaatcatatcgaaatatgaacttctcttcccctggcaatgcttgcaatggaaagtagtagctgtatttcgtgactaaattcctcagcaaaaattttacaaaaatgttggcagactctgaggtagatggagtgtggtggaaaacagagtaacattctgctgaaattgcttgtaaaacaggcactgtccctgtgaaacatgatatgtacatggccccaccctttctaacttgagccaaaatacttccctccctcttgagattctcttattgttctgtgaggaatagtgacctcattactaattcagagcttaccgggcctgtctgctttctgcctttctttccaaaatttagctaccttatctatagctcatttagcaaactgtgaattaggtactagcttgtcagtgtaaggaaatatttaccaattgggaattgaatgcaaaacaaacaaacaaacaaaaaacccaccatactagagtgagtttcctgaggtaaatgtgaaccttaaagaatctacagatttatagcagtttatcttgggaaggagtacaataccttcaagtgtggactttacaagcactcatgtacatgaagaaataaaataacagtgctgaagtaaaagacactttactgacagctgagaatatcaatccaaaataagccatgaaagagaaacaaaatgaaggtatatttttacagttcttaggtaggttgaattattatttcaaaagcctccaagaatttctagcaagttttaagaccgttcattcttggtgactcacatgcaaaagaaatggctattcttgaataatacctgtttgaacttcttattcttttatgaaaaataagattatgcataaattttttttggctattgaaattattctgctagttgttactatcactgttgtagtgtgcagtcctaactggctgaagaattttattcaggcttccacatattattgagcagagttccctgcgcttatgcagctggacctttttggttatctgttctaaatatagtagggtgcacctgttcattcaaaacttctaatatcctttccccctatccttacccccagcaacaatagtttgttctctaaatctgtgagtttctgttttgcaaataaggtcatttgtatcatgtcttttca

SEQ ID NO: 31672 - DNA, 836 bp, Bovine  19866882054549
  misc_feature (1)..(1): n is a, c, g, or t
nctgtcaggcagggcaagaagccagcatacccagagaacaacttgagcaggcatcagcatagttcccgcttggggcggggactccccaaatcaaaagtatcctgttcctgttccttttccttctgaagccagagagcaagcctttgattcatgtggcgatgatatcatgtaacccgctgggtgtagctgggctctgggcgtgcatctgggaggcatctaatcccccgagcactccctgagcctgctgaaccccactggatacatttcatggtagagctgagatgatattttcccctttaagttcatacattcagctcagaagccattcagcttcccggaatttttgcaaagaataccctcggccatcattttcggccttcatagcctctgataaggaggaaagagcttgatattctggttctgtttctgtttgaagagcacatccccaaaggaattgtatgtgtcccagattcaacacagctgttaattagagctgagaacacttggttgacccctgtgcggctaattgctagaattgagaagtgtctctaagggcctcatatgataacaactgaaaattgtactgagcatcacctaatgcttctggaaccagttcaggacggaaagcaataggctccctgtggttcctggcgcgggagaagcagctatgtgctgaagcagcagtattaaggattctcttcagtgattaaaacacccacatttcactgtggatgtgtgactggaggcagtgtgctcggaagggcttatcagagaactcagaactgtgcagccgagcatctgtggcctacttcggaggacttccactactcctgtga

SEQ ID NO: 31673 - DNA, 696 bp, Bovine  19866882190247
  misc_feature (1)..(1): n is a, c, g, or t
ncacctggttatttctgcctctttgcccagatcctttggcctcacacttcagagggactctctgtttggcatcccagctttgcccagggatgctatctttcccttggctccattagttacagtctgtgggccagtcttgcctcatctctgagcctagtcctggatcccagttctctaaaacagtatggttccctgggtacttgtttttgcaggaagagagctcaaacaatatcatgtctttgtcttttaacatatattttttccatgaaaagcatcctaggtttattctccttactttttcttattctatcttatttttctagccttgagctaatcgagtaagatttgtttattccatcgtcttccatcttctgagcctatcttcctgcttttcattcgtcccttatagactttttataatttttttttaaaccctagtattacctccttcttccaaaatgttctggttttcttgaaggtcttttatcatttcactcctgtatattgctctctcccacattattcctagctttgaattttaaaaaaaagtttaaacctcattgttattttttgacattggccaattctagctctttctcagaggtgtcttctcacaattcacaaatactgtttgggtgaggaccaggtatttttttttaaatttaattttattttattttttaactttacaatatt

SEQ ID NO: 31674 - DNA, 1626 bp, Bovine  19866880390606
  misc_feature (1)..(1): n is a, c, g, or t
naattgatgcttttgaactgtggtgttggagaagactcttaagagtcccttggactgcaaggagatccaaccagtccatcctaaaggaaatcagtcctgaatatttattggaaggactgatgctgaagcttaaacttcaatactttggctacctgatacaaagaactgactcatttgaaaagaccctgatgctgggaaagattgaaggcaggaggagagggggatgacagaggatgagatggttgcaggtcatcactgactcaatcgacatgagtttgagcaagctccaagagttggtaatggacagggaagcctggcgtgctgcagtccatggggttgcaaagagtcagacacaactgagcgactgaactgaatacaccaccttggatgaccagctgaatttctctttttttcttctgtaagtgatctaagtaggtcaaacctcttagtcactgaggtgtacagattttgtacagtggaaatggggaatggtcagagtggagattacagagaaaaatgatgttttcatgatatcagagaagtacaattttgataatgaaaatagaggggtcctcattttgatcccagagaaggcaatggcaccccactccagtactcctgcctgcagactcccatggacagaggagcctggtaggctgcagtccatgaggtcgctaagagtcggacacgactgagggacttcactttcattttcactttcatgcattggagaaggaaacagcaacccactccagtgttcttgcctggagaatcccagggacgggggagcctggtgggctgctgtctatggggtgctcacagagtcggacacgactgaagcgacttagcagcagcagcagcagttagaaaagaattgaatgacactttgttgtttctagtaaactctgattctggtatttaaaatatatacactcaaaaagtcaagaaataaactattgatgtcataacattattgtttctatttgttttgtaaatgaacttcttattaatgtgtctcacaaattcagttttaaaaaagtagggattctgtgggaaaagaggatggtagaattttagaatatgttaggatatgaatacaggcatttctttggttaaaaatttcatatacatgtatacacactaaactttagaaactcccactgactagaggaatgcagacagaaccagggcatgaagggggcggggacgggggctggtggagaagcattaggtcatctacttctccctgccacactgaaattatcccccatatggtggtttatgtttctgcggtttgctgaggacttgagctagttttaagtaattttcttcaaggtcctctaagccagtttaaaattattttgtgagcaattcattctatcacatgctttagcaaaatctaccacaatctaataagcatctggatatgttctttgagatgcagcccagagtctcctttcctcaaatttcaactttctacctcgttgcagcaaaatatatttacctccttgatgtttaaatgcttcccagacaccaagtgtttcgagccagtcttgctatacaatccacaagagactactctgagattcatggtctgtgtgtccaaccagaggtttcacaaaagga

SEQ ID NO: 31675 - DNA, 4217 bp, Bovine  19866880420890
  misc_feature (1)..(1): n is a, c, g, or t
naccccaggaaatgagacgtcaacaggaaagtaatgtggttcacagctaagtataaccttcaacagaacaatgttgaaatttttctctgaagtcttgtgcatcaccttcgttaaaagcattttcaatatccaaagattctctccttcaggatctctgtgtcagtcaaactgcttctaaaatccaaacaaaggaaatcatgcagagcagttcataatgtgcttttcatgcatttctttgcaagagcacaaagtcgtttaacaaatgtaagctcaccgtttttcataatagtctttctgttcaattttaaaatatgttttctttccagaattacttcagggtgaaaggacaaagaattaacacatttaattttaataaaatctgaaaagtaacagaggtcagctcctgctaggaaatggaattttaacatctcctttctttcagggaaacccacattccctgaaggtggagaagtgaaggctccttttccactccatccaggataggctggtggtcagggaggaaagtctcccaccatgagggcaggacgtctgctttgatgatgacagaaaagcatgtctgtacttcagcaaacaccatacagaaacagagaaaacaatcagaatccaaaggccgagtatctcccacctcaactggctcccaggcttgttaacatccacccactaactttcatttacagaggacagagactagatttcagggaaatgactccttggtaaagacgtgtggttattcacagaaggacatgatgactgttccctgccagatacaactgtcctgggtttctagcttggggtaaaataggatgtctttaccttccaacattaagaaatgttaggctggaattacagaatgagtttaatgaacctagaataaaaataaatatataccatcttatgaacaattggtgaaatattctgtgaccctaatctgattactgaaatgtaggaaacacccagcaagcctaaagacaaatgaggaggctgagttgtgttcttaatggtttctcttttgaggtcaggcggagataattctgagcaggttgtcatcaagtatcctattattatgcatgtactgatctgtcccttgcaaggatttagggggatatggatgatgctaagatataaagcatcattcctgccattcaggagattttagaattacctgggagaagagatttttcacatgatgaaatagggctactgtcttcctgaacgtccaggctaccctctacagcaccactataaacatttgctatgacaactgtcatacttactcattactactcagctaatgatgtttcctgcaaaagccagacaacagagttactgatttcctagtccaggactcccagacttctattcttactccccaccctcaactcatcagtaagtctcaggtccctggagttgttgggtcaagtggggctgacaggtattttcagggagggatagggagttaaaagtctttgaatgaaaggcaggaagaaatataactgatcttgatgctttcatctctgccctttttctcctagaaattccagtaaatcacagtgatggagtatagtagcaaaaacaggccagaagatacagtacaaagaccctgatctgtaggttagtgtccctattaaactgagacacattacaagcctggggagggatatcagctacctgctctacttttcatattaagagaaatctacctaactggatgccaataagaatctaaatttattgaattctctaagaaaaatatcctccccttaatgtttctagaggtctcctatctcttaatgttgtaaagtgaagcaactcttaaaaaaaaaaaatccctcagattcagaaaaaggggaattctcatttgttttccagagctacaaactcactgttagtgaaatatttgcctctcattggggttgggatgcccagggttcccatatagtggctaccggacaaagctccctcctgggtgttgttttatacttctgtggcccagagtcaacagattggacaggttttcctttgagactcaaccaggctctaagagaagaaaaattttggatgcccacagaacattaattgtgcacgcctggcatccggcagttgccagccctgcatcagcccctccgtggctgtttgcatgcagcaggtggcagcaacgccccgcagaccaacgctgctagcctggtgatgggaattgcccccaccctgcttttcaatcccaggaatattttctaaaggccctttcagcataaggataggcattctctccacttaaaaataactcttcggtgaagtcatgtcaatctcttctattatcatccctgctcacaaatccccactgcagtgtttcttctgctttagattcgggtctgctgcatataccgagaaaacagaggcagccagttttacacacaaaaggaaatcttgaacttcttgaacttcagaggcaaattcaattattgacagacagaagtgggggcacccattatttctgctagaggcaagccataattgtgtgttttggacaaagtttttaaatgcttcgtctaaacactaaccctcaacgagataaggacattttcagaaataggaactgagcaaaagataatcttcctcttgtggttttcactgaggttaactcaaaatatgactgattagtcttagatttcaccctttaactacttacataaaaagaacaggaatgtgcagtgttctactgttgtacatgtttctttaccaaaatgcttagaacacagtctagttaatgcttcagttcatcaaaaaaacatatatttagtgccaactcttaagggattactactgaagaggcatagtcctaggtgattttaaaatacagatgataaaatgcagcccacgtctttaagacaactaatcattttgctggggagaaaacttccacactcaccaaagaagtcaagtaacataaagcacagaaatgaatgagtaggtggcacaggtctttagaaaagggagtgatctcttagagatcagtgggctaggaacatatcaagtgtgaatcttaacttggctttatattgtagaagtgaatctgggggaaagcatgaggtaagtcatcccagagagagaaaacaggaagagccaacacttgggagtattgaatttcaaggtcaatgcagtgagttagctgttatcatgaagcaaaggctttcttgggggtgttgaagcaaagtcatactaggatgagttttaagttctggagagctttgaattctaggttatagattttttccttcatgtcagagagagttactggattttcaacaaaagagtattgtacttaagagtaacattttagtaggataaatcaagtgaattagtaggtagacatgtgtagactgaaaaaagaaggcaaaaaaaaaaaaaaaaggcaggagatctcttaggaattttgtacttccttaggcacctcaggatgagcgctttcctcacagttgacttactaccgtgtgatgggggcgtggacattacaaagaaagaggaggtaaagcttggtatccaattgcacacggaataaaatctcctctgaattttcatgcacccgaatacaaggaaagaaaaaccagctacatttggattcctgctggaagaatgggtcctactcccttgccctccccaggagtaatcatcaagggatcactggacttccaactggaagtgaaccaattaggtacaggtagtggccctgcctccatgagaatgaaggtccttcttttggttttcactcaaattttttgaatcttgagaattatctaatagaggagaaagaatttcatgagacttttcacacaacaatctgttttatcaccatcatttctatcatgctcagtccatctgttgaggactagttttaatgcaatccgtttttctaatgacaactgctcattataagaaaacactttaaaaggataaaaataaatcaataaaaatcagttggcattctaagcacccaaagacagactgaagtacttatattttgtcttatattcttctagacaatcacataaatatgtatatatgaagaagatggatgctctctatgcactctaccacatgcactctaacctgtttacatcatactatattgcagacacagatatatggttatacaacaaaaataaacttattctttttaaaatagttgcataatatattat

SEQ ID NO: 31676 - DNA, 977 bp, Bovine  19866880443321
  misc_feature (1)..(1): n is a, c, g, or t
nttgttgctcccaacgcacagggaactacagacccagcagagaagagaaagccagtggctgggagggggattccattgctgactgtcctccttccctgctgagtgctcccaggtaaaatctgggagaggctgagttttctgggtgctgggctgcaggaatgcatttcccaccaagtgtttctctaaacatgctattaggctacagagttaccctctgactagtaacccttcagggatggttaggtgtttcaagaaattaataaagtcagaaagaaacaaataaatttgatcataagttctggggctaatcaacactccagctccaggaaactgatggcgatcagataggaaaatgctggggatgaaagcgctgagtggcttggcacatctggtttgagatgtgctgactgaagaagtgccaggactagaaatgtgagaagaaataccaggttctgggaaggggcactgctgtcagggtttggggtggttttcatggctttttttttactgttttcatcctttaaaaaaagctgaaataaagatgacttgaaataattttagtcatgtgtatatcctaactctgtcacatccttgatcatgttaacttctttttatttaaaagaatattcaatttactaggccaaaacttcatagtgtttttaatttaaacagaaaatcttgccaaagccagccctaagagaaatattttcattatctggctcttttatcaactccaaagcttgggtgtggtttcattccccagtgtgccttccctctgtgctgctgggaaaccaaacacgatagccacaaactggaaaaatactcctgatggattggcttccacctgcatctgatgtgagagacatggcatcaggagcgagttgcagaaatagggggactaaattaaaagttatgtttaataatgttatgtgagatataaggaaaaatacaaaggcttgttacaagaattcctaata

SEQ ID NO: 31677 - DNA, 5072 bp, Bovine  19866880454815
  misc_feature (1)..(1): n is a, c, g, or t
ngactgatgcagagtaatctgtctccattccactcttcattttatagcaaaatgattcccagagtaatactctcttaaatactacaatgatttgttaaaaaaaaaaaaaaatgccaaggatttgtgcccagacacatgaaaataaagcaagggggaagaaaaaaaagctaaatactggttttaaaaggtacaatttacatgaattgtgcagaatttgcaggaaaatatcaaaacatgttctgcaaagtggttacacctgagttacatttttaatattaacagatctggatcatttggggagtaaatgttctgccacatttgcagtctgtgttttctgggtatatttttggcagtttgttttctcagcagtcttgacagtggtggctttgggagcacagcctcaaattgctaggaatggccataacgaaagaaccacatggctgcttttcccgtccaaacctgagcaccctctgttatttcttccatttatagtccctggtgctgcttccacaaaaccaaaggcttccagtggttaaaactttagctgctatttttcctgatacagcaattagattgaagctcccttagctttgtccacattcaaatgcccatttctgtacttgctctctgtcttcaggtgttcagaaggctcgtctgtcatctatctaccttccaactgatttggttcttggcaccactgatcttatgcagggcacaaggtaaagatactcaattcccctgcgtggaatccaggaaacacagtttctggagtggacatctgaccactcttgtctgtgctgtgttcatttgtctgcatgaattaattaaccgtgtaatttgtttggaagactgggagtggttctttctgctttccacagatatttggcaaaactaatacaatgatgtaaagtttaaaaaaaattaaattaaaaaaaactttaatattaagaaacttttcatagataaaaccagacataaaaaaaattgtttctgaattaagacatcattttttcacctatcaaagtgcataatgtttaaaataataattccatatgtgtgtgaagacatgggaatgcgtgttggagcaagaatgaatttggcctctagagcaagtaatctggcaataagccttaaaactggttgtatccctcttacagaaaaatagtgaaatatgaaagctatatacagttcacatatgttcacatagtctattatataaaacacacctgagctgtccacttgtctgctgaattgcctacttctgccagacctttctctttgactccatgggagaccacacctcacttactgctggccttttattaccttttgtgtggtatgtactatgggcttctgtgatagctcagttggtaaagaatccgcttgcaatgcaggagaccccagttcaactcctgggttgggaagatctgctgcagaagggataggctacccactccagtattcttggacttccctcatgactcagctggtaaagaatccgcccacaatgcgggagacctgggttcaatccctgggttgggaagatcctctggagaagggaaaggctacccactccagtattcaggcctggagaattccatgaactgtatagtccgtggggttgcaaagagttggatacgattgagtgactttcacaacaatgtggtgtgtactatagtcagcagtcttcacagggatacaaaaggcatgcttcacaccgtgtatagctcaggatttaccaactgggggatcttaaatggaatttcatataaaagcagcaaataattgtaaacttttcattaaattattttgtcgcatagtcaaagagaaataatctcgcatagtcatagattttttcaccctagaagttgaaactctagttttgatcccttttttactctctattctaaaagcagcaatttattcaaatctatgctctgcactcagcaaacctttaagaaaccccatcctaataacagctattcccctagaattttttgcaactatcaagagtgtacctcactaaaattggaattttgcagcacttggcggttccagtttgtatttgttgctatgcccgccttttcattcttgatgttgtagagcatatattctttttttctaattactctagtcattttatctgttattagtcttaaaaaaaacagattttggtgttttgattaagccagtattttgtgtactattttattaatttgtgcttttaactttattaattcactccttttatcaacttttggtgtgtgggaagtttgaatgcatgtaggtattcatttttcaatctttcctgtttcccaataaattaagttaggattaaatattcccacctgagaactgctttataagcctctacagattttaatatatgatattcttattgtcattcatagtgatttataatttttgttatgatttctggtgtaattaaggagacaaaagtatgtaaatttctaattttattgcattatggattgagttcaaagtcatttttttgtatactacttcaaatttaatttggggttatgtttcacatgtggtttgaaaagcatgtatgttttcttttgggtaaaggtttataaatacatgctcatatgcacatattacatgtacacgtatgaatatttgtttttaaagtcttctatgtccttgtatttgattttcttattttttaatagatggaaatgaaaattctgagagaacaatgaaaaattctcccattatgattatggatttatgcattttcctttgtagttctattagctttgtatatatttcagagttatgttgttaggcacatcaaggttcatgagggatataccttatttcagatttctccttttatcatttttaaaaatacatttttgtttcttagtgtttttgtcttccatttccccttctctttccttttaaaaatcttacttggactaatactgaaatatcagtctttcaatatttaatcttttctgtatttttaacccttccaattctggaagaattttatgatctggtcttcccacctactcatttagtcttcagtgatactcattctgctaaggcagccagattgtgaaaagagtttatatttctcattttatacatctctagtttctactatttacagtgctggttccttttcacacttaagatatcacatttgttcatgtaaaaatgtttatttattcatttgtagagtttattattcctctatcattgtgttagttgactcaagtgtttgtctatttgttactgtattgacatttcccattgagccatctgtcatatcaatatgagtagccagcattggagggggaagaaattattggcataccttatattcatgccatattcagtaaaaatgggggactgtgtagattgtaatttggttgtcaacgctctctggtactatcagcctcctggagcattgtcctgtacatctctctgtctatgttcctatatttaccactgcttcctgatggcagacgtcactactgctgccccttccttttcagatgtgtgtgtggaatgtatagggctgctgtaacttcttcacttaaactaatcactgcatattgtccattggccctttcttattcctagctattactgttccagacataaacccacttggtgatacttctatcctatctatcctatctggcattttccatcttcaacctcatttcacctaatttccagcctacagggattcttcatgtaagttctggtcactgggagtttgctttcttatttttctactctgctactcttaaagactgaacaaacatatttgaacttatagttctctggcaacaacaggaaggtaggtaaatgttgttttcttttttgtatttttctttctttataaatttgactttgaacatgcattttttaatcaaaaatgtatatttgtgtatgtactaaaatatataaatgttcttttatgattccatgatgaaagtggtgacccaggatgtaagagggctgctgaacacacctgcttctttaagatgctctctgaaaaatccccaggaagttttgattgtgacatggcaaaaaatcaaggctgtaagcccagaaaacatgatcacctacagcgagaaccacggggttgtagtccagcctgcctacaaggacaagataaacatcacccagctgggactcatgaactcaaccattaccttctggaataccaccttggaagatgaggcgtgttacaagtgcctctttaatacctttggttctggaaagatctcaggaatagcctgcctcactctctttggtgagagtctctgagaatacattgtctctagcttgaaatgttatcttgaagaatgtttgaaatgtagtggtagtagtaattagtctttcaggatcctagccccagaaaggttcattggaggacacttggcctttcatgtctactgtgtaactgtgctaatgattatttggagagttcatagaactatgttgaatctttgcctgaagttatctttgccttgaagaatactgttgtcaacaagagtaaactaaggaccatagtgaggataaattctccataagcagtgctatggttcagacctggcattgccattaggagtcatgtgaccctagaagagtcctgtccatggtgtaccagagtttatttatctgcaccaaaagtgtgaaatagatcatctctggttcctaagagctttcgtattttttaacctaagaacaaagccagattgggctaagctggagccagttatggggagtccctctcattttgcttcagcggagcttttgcaaaattgataaacagccatgcagcagaggttcttcatacccagtgcctggtagcgatttaactggtaaataagcattcttctaaaatctaagaggcttagtttgacaagattcctttcctgttaactgatgcttagctgggatcaagaactgagaattacgaataaggggtagctttggaggatgcacacttggtggtggttttagaagggaaagccaaacttagggttattgggaatgttaaaatgagagtttgaacacaccaa

SEQ ID NO: 31678 - DNA, 3503 bp, Bovine  19866880464760
  misc_feature (1)..(1): n is a, c, g, or t
nataatctctactggcttccccatcctccttttgacctagatgcttaaaggaacttaaagggaatacatctctctcttccacagggcaagccacatccaaacttacagggtttcacacacaatactgaggtcacttactcactaaacaaaagtcaagcccacagggatactgatgaatgctgcccttaggtcataaataacagtcctgttacattggctcttcactaacaatttccatctggtaacactcacggctgcatgtctgaccatgggtcagaggtgaaagggaggcagccgttcactgaaggcattgttttcattggtccataattaaagactcaagaaattgctcatcagcggccagagggctcctcaggctttttgtgaatctcttcctctggcaaatatgagactgggagttagtttgatggtatgctgaagcattccagacatgaatctgagcattgtctctgaggatctctgcacgtaggtccagcttaacaatgcaaagtaagctggcaaggcagagcaaactccaggaatacaggtggtttggagtgatgaaggtttgcaggaagacatttaaatccctggcagttttacagacctttattcagcaagagtcccttaacattgctgtggcagtgattcatgtatttgtggccagatcagagggtgtgggtgggggactgactgtctagctgatgggtagacatgccgctctccagatctcctctactgtccctgaattcttgtggctggtgagttccattgttttcattcatgcagtagctgttagtctaagagagggaagggtcctcttcaggtcatctttttagcaccagactctcaccaactgcctcttacactgtctttctctacaaatgcatcataagcttagtctgctgtttacagaaaataataacctgacttcaatgcagaaaaacatttgttacaaactacatatacacataggtaacttagctgttgaactcaggttaactcaacagggttggctttttaaaaaactgtttattttctattggagcatagttgattaacaacattgtgatagtttcaggtgtagagcaaaattattcagttatacatgtatctattctttttcaaattatttccccatttaggttgttacataatattgagcagagttccctgtgcctatagtaggtccttgttggttattcattttaaatatagtatggccagccccaactccctaactatcctttccccaaatttctcccctcaataagattttatgtttaaaatcttttagttctcctcaacaaatgtcatcactttgtaattctgccctgcagaaactctgttgtattcctgcaacccagtttccagtcacgattccctaaaactaaatgatataacttgcttgtacattagtcaggttagtaaaaatttatttaagtcctttctataacagaaaagtgtactcacttgctgctctctgctcttgttttttcctaattttcttttgggcactccccatcagatcagttatctctctttctgattctccttttctaatttaccttccaatcctcaccctttggggcttccctggtggctcagatggtaaagaatctgcctgcagggcaggagacccgggttcaatccctgggtcgggaagatcccctggagaagggaatggctacccactccagtattcttgcctggagaattccatggccagaggagcctagtgggatacagtctataggattgcacagagtaggacatgacagagagactaacacacaacacttcaccttttagcacatcccatcttcataaatttcatgaatgcttcctctatgaaactcaattcacatacctctcaatctggaacttagaaaatcaagcctaattcattacaaaaattaaaacctctacagacaaattggtagccacattgtaaaaaaaatgatattctggagaatagcagctacaacaaaacaaatatttcccattgctggtaaatgtaatggacctgtgacaatagctaaggatatagctattgagaatgggatcaatgataatcatgctggttaccatttgctgagctttcactgtgccaggcatagttttgagcactttacatcttatttaatctgacaacaactaaatgaagtcacaattatcatctacattttcagataagggaagtaagttttttatgtttcactgactgtaaagtggtagagtgattaaaacccttgactgcaagaatttagaacaaaacaaacaaaaaacaaaaacccctctgctcctagtgaaaatgcctgttttcgatcttgagttctatcaccagtaatatttgattcgctggtttagtagcaacaatctacaagaagtgaatgtggaaaaatagcaaatttttacaggtatcctttcactggcatgaggggttcagaccatgagaccagaagtatgaggaattgtgctttatcccaaactgaacacagctttcctccacttcaattcagttcagttcagttcagtccagtcgctcagtcttgtccgactctttgcgaccccatcaatcacagcatgccaggcctccctgtccatcaccaactcccggagttcacaaactgatgtccaccgagtcggtgatgccatccagccatctcatcctctgttgtccccttctcctgccccaaatccttcccagcatcagagtattttccagtgagtcaactcttctcatgaggtggccaaagtactggagtttcagcttcagtgtcagtccttccaatgaatacccagggctgatattttttaggatggactggttggatcatcttgcaggccacgggactctcaagagtcttctccaataccacagttcaaaaagcatcaattctttggcgctcagccttcttcacagtccaactctcacacccatacatgaccacaggaaaaaccatagccttgactagacagacctttgttgacaaagtaatgtctctgcttttgaatatgctgtctaggttggtcataactttctagatgactctaaatcatttatttactgaattacctgaaagtctctccaactgatccagatttagacagagcatttttgtttcttgtactttaagtccaagaggtttataataaaagaattatctgtagtaatgtgctatatagaacctttggcgtcgcctagtagggaaaccattttggaagcttctgtgtgtaaaatcatagaatggaaagtcttcccaggttcaggataaagtaaggtgaaccagcattctaaatcaaaaggcttggctttccctccatagttggccaaaagacatttgtggtgattcttctttgatttttacatgtcagaaacagagggatttaagataattcgttctgcttataaaaatttcatatgtctgacaccagtatatgtgtccaaagaatgaatgttgtttaagagtcaataaataaaggattgttcactgcctgac

SEQ ID NO: 31679 - DNA, 1057 bp, Bovine  19866880569118
  misc_feature (1)..(1): n is a, c, g, or t
natgttgtcccctaagatctgagcactggttactataagccttgtcctcctcgctgtgtctatctgattcccagtggccaagttccttagattccctcagtggtgtctgagatgagactttagggagttgtaggactcccaggacatgtcctacaacattggaagagcaatgcaaacttgggagactgcagagactgtagactcagagagggccagagattcagtgccagccaccggaaggagagatgtagccactccccttccccttctaatgtgggccttctaggttcctatgattcagggagatgcttcagtctcacctccatgtgctggagttttctcttgatatcttgtctgtggatagctgctagttggtcttcctgtgaggagggactgaagtcaggaataccttaaatactactttatagtatttaagaggtaaggtaatatgccctgctgattagaaatgaatcgtatttacagttagccccaattttgttacacggggtaaagtatgctccccaaaagtacctttgggaatatacactttcaaaattaatagcatagatattgtatcttgttcatttatatcacctttcttgggcacatgtatatttaaacccaagcctggtaccaccagataaactaaatggaaaaatttaagatgggaaatttataaagtactataattgcattctccccaacccagtattcccatctccaaattatagagagttccactggagtcctcactttagtttccctcatattcaatcatttgaataatctaacccttgggacttacctggtgatccgttggttaagactttgccttcttccactgcaggcgggtataggttcaatctctgatcaggctgctaagattccacattcctcagggccaaaaaaacaaaacataaaacagaaacaatattgtaaatttgataaaatggtccacatcaaaaaaaagaaaaaatccactccttaaatattttttcagcagtttttgagaaacaaggacttcagattacatcacaatttttcatctatttctttg

SEQ ID NO: 31680 - DNA, 1892 bp, Bovine  19866880628708
  misc_feature (1)..(1): n is a, c, g, or t
ncctcctttctacagctccaaggtcaattttcccttgggagcagctaaggaactaaaggtcacaaaaagttggcaattcactgtgccttggaggacttcccagaaagcaaaatgaaaatgagattgttttcacataagatctctgtatttggaggataggattcaaactgtttgaatttgcagtttcactgtgcacttaggtaacccccacaaagtccagtgttgttttttttttccccctcaagccaaaacaatatcaaaaacacttcctgcagagaactctaactaggcagaattcttttctgtcattgctgggctgatgttttcaaggattcatttctcaagataagtcttatatggtacatttggatggagcccttgatgatttctgtataatgatggctgtcatccacagggcctgttttgtggtgatctcattagatttcatgagggaagcagctgaaaacccatggttagtacatgagcaggtagcaagaacagagaaaagccagaggctgccaagagatgttacagaaagcaggtttctttctgaccaaaggaaaacccatctctcaattccaaggagatgtaccctgcagttcaaacatatgtttttcacaaaatgtagctctgcttccttaataagaattccaaatacaggcaagaaccaatggctagactttcccaaatctgactgttctctaccaaaattcatctcttctttatcctctttgcataatggaagtattcttgagaagagataatattatagaacgtagttgtattggtaacttgaaagcccaacataggctttccggtcctgacagcaccaggtcatgctctgtgccttggtgccaatttctaaagtccttgctggtgtgtgcgtgctaagttgcttcagtcatgtctgactctttgcgaccccatgaacaatagcccgccaggctcctctgtccaatggaattctcccaggaaagaatactggaatggactgccaaggccctcctctcttgctggtgactcagtttcaattctttaccatctacatcctccctttgaagacccacaaacatttattaacagttcttcatcacttgtgtaaatgtcacccactctttcccagaaacacgttagagactatttttgaaacaagagtaagtcatcttgaaggttttaaaccttctacaggtcttaaatcaaaccacagcctccttagagtctcctgtttgggtctgtttgtgtggatatatatacttttaattaagtgtacagtcctctaaagattatgtgtgctcaataaatattcactggggatggtaaattagtaactgactgtaaatttagtagaaaaagtgatttattaaaaaaaaaaaaacactttggcatttccagagatgaccaaaaagtaaactagaagtattaattgtcttgcaggggtgggggagctggggaatggtgtcttgagggttactctctctcctgccatctgggaacagaatgtctgaacagattaaagatcctggttgtattcaattttgctgttattatttgctaatcatacgaccttgagcaagtcacttcagctctctcggcctcaatttctctttttcaaaagtagtttttatcattctgaatgtctcctctagttctaatattctgtcttctaagaaaaactggagaaattaagctggggatgctcttttaaaaatggacacagctggggaaaggaaggatgggacaaactgagacagtagcgctgacaatatccactaccatgtgtgaaacacatagctagtggataggtgctgtatagcacagggagctcagccccgtgctctgtgatgacctagaggaatggaatggggagggagtggggaaaggaagctcaagag

SEQ ID NO: 31681 - DNA, 1354 bp, Bovine  19866880687802
  misc_feature (1)..(1): n is a, c, g, or t
nagtttcctgtgctgtacagtgagaccttgttggttatttactttaattatagaagtgtgtgccttcaagttagtttttaaaaggccaaatttggtcagtgcagttagagctcaccttgatgtgggatgtgcaaaactttatatggtgatggctgcaggtccctgacaggacaacacccacccagctttcagcttcatacatctgctgcctcaacccaggaaccaagatcaatgttccacatgatcacggaaacaaaaagatttgctaaaagctagtcacatctgtagatctgtcatcagtaaggttgtacaggctgcatggtgaatgcaggtctcatttctgattctctgatatgtcaaagaacaggaagatgacttaagaaaacgtctgactccagatagaccagagttctctactctttacataatcccttccaccaagaactgtgacgaaaactgggtcttctgttaatggaaaaacaaagctcacttttcataaggtcttgttttttgtttccaggcaagttgccatttagttaacatttacagaaagctttaattacacaataggttgcagcactattgctaacagtaaatttaatttccatgacctcaaattagcttaactgttgatttcaccgtcattgaaattgacataatcctgttgactgaggatctttcactgctatggtaactgtaaagcacacagattaaaatgcaaattactgagttattggcagaaatgagcacatcattcctgcaagttgttttataaacctagttcccctgaacattttgaaggctaaatttctccatttaaacagcccagcttcttagatgatgtagattcaaggccatgatctttcagggcttagtaataccttcatactgtgcacatggtgaagaagctaaaggccactacatgccctgtatgcatgccaagacacttcagttatgtccaactctttgcaaccccatgggctgtagccccccaggctttctgcacctaagcaatgtttaagaaccactttggtaggtgccaattttagatagtttctttacccatttcagctctacaaaataatctaatggtttgcttggatccagagtatagtcaagtccttttttttttttttaaaaaaagggcaaccttttcagaaattccctagtattcccttcatgcttccagtgctgaggtcacgggttcaatccctggtcaggaaactaagacctcatttgacaaaaggttaaaaaaaaaaaaaagaacaaactttctcctctctcaagttatagatctgcttaaaatgctatgattctttctaattacaagcagcagtgattaggcagaataaat

SEQ ID NO: 31682 - DNA, 829 bp, Bovine  19866880703893
  misc_feature (1)..(1): n is a, c, g, or t
naaaaatggacatactgtgctgtctattccatcatccagatgcatttggtcaggggtaaggcttctggttgtcctttcttgtcacactggctgctttagggaggaaaggggcctctggtcattgaaaatgccttgtgactactgctggaattgatcaccaaaggcagattgttactaaagttttcagttatgtatttaagtggcagctctcagagagatgtaaggatctagaaatgattacaaatgagcactaaaaacaagaaaggaatgggtggtttgtgccactgctctgagacattttcacccatttccttcctaagagggtctctggagtaactggaaaactatgcttcttgaaaatgaaatgctctccaagtggttgtcagaacaacgctggaacatttaaaaaaaaagaaaaaatcacaatgccatcaaggctcagagtttcttgttcaactttttctctctctcaaatactttctcttttggatttaacaagcattcctcctccaaatactcagatctttgggagttgaacatatgctgaattttaatgaggcatgtataggtatggacctggaagaaaaagtagactccttgtgacagcagggaccagcgcctaaagggcctgtttaaaatagcaggaagaaagattcattctgcattccataatatgagggtattactgtgagcctgagtgtcttaagaattaactgtgcttttcagatatagctacaaagattttaaaggaggatttctaaatcaaaggagacattggaatataatgctttagataggataaagaggtgtattatcaggcaaagctgag

SEQ ID NO: 31683 - DNA, 939 bp, Bovine  19866880706428
  misc_feature (1)..(1): n is a, c, g, or t
nattaggcctgtaattatgggtttagttctgtgtgctgagtggtcctgccagggtagttatacgcctcaaatctgggaggttctggcaatataggagaattctttagtgtgcctttcctggaagagctctgaacctcactgcgttaagttcttatcgtttcaacaagtagccaatgggtgtacctcaaggccaagtacatagtagtatatttagaaatgattcagaagtgatgactttttaagaggtctgctctctgcaggtgttgcagtaaaggggcatagcatccttttcatgatcacttttcatctagtcattcttgttacttatttttcaggtgatgggacagaagatgaatgtgtgtttttgtttataatttcgactggaaatatttattggcatttgattcatatgatttcttgtcttttgaaagtgagtaaaaccaaaaaggttttactcaggttttcacaccccttcaaaataagtaaggcagaacttgtctctgccacccaggaataagaattcttctggaagttaatttgcacagttattttcatgatatttaggaatgtttctttgatgttgatgagaagctttgtgctgtatctgctttaaaggcaaggttgttatttatagcagctaatggtccacaggacaaacccaagtataaaaatcattttgttgagattcagtggaaaggctagggactggagacgctttccatacaaagaaacagataaataagacatagagcaacaggctaagttatagggagacttgttgagaggttttttttttaacaaaagatatttgttttgcttagtgtgagtgggttgatttattagaatatctttttccttactttgcaaattaaggggaaggaaaagttagttcattccaatatttaatattggtacctcaagtggggtcagctttttcta

SEQ ID NO: 31684 - DNA, 2478 bp, Bovine  19866880713272
  misc_feature (1)..(1): n is a, c, g, or t
naatggagagcagaaaagccctgatccatcctcctgatcttgaggcaataaggatataggaaaataaacaaccactatctgagaatgatgcagggaagatgggccctaatgggaaggcctggcttcaattaagaaagcaggaggagagagttatcattaaagaggacaactgatattgacaagagcttgaaatgcagcaaaactttaaaggcaaaatacaacatttgaaatattcccatgtattttaaaaatgtgctgttgataataaggagaatgttcatacctcatgacctattaattatacttctgagaatgtatcttaagtagctaaatggtcagaagaaagctattagtttaaggatgaaccttgctataaagattgtaatagtttaaataagttaaaaactgaaaaagcatatgattcaatacttgaaaattgctaaacaaattatgatgtatatatgtaatgtaatagaaatttcaaccacaggtagcttaagaatcatgcaaaatcttttaagtaaagctataggtaacacttgatggtaaataaaattgcaaagtatgaaaaaaatagctgcacacaaacaagatttgcataaatacaggaaaaaagaataagattttcaggatattaagatgatagaattgttgtcatttataagttattttctgatattatagtttactcacaaatgtatatatatgtatatataactttccccaaaagagagactataaaactatttatctcatatcactttaaaaatgaaaataattcattagacatgcttccttggagtttcctgatgtgtttttctgtgtgatttcttctttggagaaatatctgtaagctctaaaaagacaatcaggtataaaagcagtgaaaagatcagcatatgtcagaagtttggtgaaaggaagggatgaaaaggcagagcacaaagaatttttaggtcagtgaaactattctatatgatattacaagagtggatatatatcagactttggtcaaaattcatggaatgtacaacaccaaaagtgagccttatgtaaataaaatatggactttgggtgatgatgtgtttgatgtagtttcattgattgtaatgaaggcatcactgtggttagcgatgttaacgggggagattgtgcatgcatgagggcagggtatatatggaaactgtactttccactcaattttgctatgtacctaaaacttctctaaaaaaaattgtctactaaaaattttaaaagacaactgaggccagattataatgttttatattctacctgatccaggaaatatgatctaaagactaatgcaccaacttgaagttaaagcagaagaatgtactgaactgtgagttggattctgttaagggagtttccccatagttattcagtgatagacaaccctgtgcttctcagtgaccctgttacaccatttatacaatgaggactgtaggcggtggggtcctcttcataggtataccctgaagatagttgaatctctatactaaaactattctcgtttcttggattaaaaatactttatagaccaatcacagatccatgtctttccctccttatgttttgttacagttgcacaagaagaatggaaaaacaaccatacaatagaaatagagataaatgggactctggaaataccatgctttcaaaacacttccttagagatttcatctgtgctcacctttgcatggctggtggtaagtgttgcccttttcagtgaataatggccatgatctttaaatattaatgaagtgaagatgaataacaagtaataatagggaaggaagcacactggataagagacaagcattatgtgaaggttgagttaatgtctggaggaaggacgggagggcactatgggattccttccaactcggcaagcccccaggtctttgaatgcagtgacttagaaaagagttcctaaaggttagtttatatttcaagctgtatactcaacaatgataacagaaagaaaaaagtgtgatggtgccctggagaggagccacatccagcagaagcccctactcatccttatttgtttacacatagcacatgcaggggcatagactcccttttttcccagaaccctactaccacatcctggaaaataaacaacatttcttggacaggaaacacaaactcttaacgcacatcaaacacaaatagaaaacgcccatgagagaagcagtatgtctatacaaaacaccactgcccggctccatcacggccacaggtaacgacaggcctatggcagctatgtttcctgacttacaagaataaaacaaaacagacatatagatttttatgtgaaattttccaaggcaagtcaaccaaatggcatccagctattaaccaatatatagagtggactcctaatactactgttaaatcagttgataacacaagccttacataattatattaccataaacacaattttagaat

SEQ ID NO: 31685 - DNA, 1573 bp, Bovine  19866880715723
  misc_feature (1)..(1): n is a, c, g, or t
nagcagcacaacagggggcaaaagacaggatctgttagctatttaacaatctagataagcaaatatcttacaggtggatctatgaagtagacaggacaatcatatctgggaggaaaatcccttttatttcattcctttttattttagcaatgtcagaagggaatttggaggtcacttaatcaattttttgaaatttaataaggaaatgtcttttattgaactcctgtccagggagaatcatctggaagtaccttgaacaaatatggctatcatttactgagggtgtactatagtttagtcattttacatatattgccacaaatcctcataaatacaaccttgagattttattctttttttatggatgaagggacagaggctcaaaggggtaatggtcaggcaatgaataggtgtctagtcaggattttagggcttcctaggcactagtggtaaagaactcgcctgccaatgtaggagatataagagatgcaggttccatccctggatcgggaagatcccctggaggagggcatggcaattgttccagtattcttgcctggagaatcccatggacacagaagcctcgcggactacagtacatagggtcgtggagagttgaacacgactgaagtgagttagtacacggcacacaagccattaagttggtggtaatttgttataatagcaatatgaaatgaatacagattctctcagaaatgctcttcacgatgctcactcgctcacttagcatcccattccacatacgaatgctttttatcaccatgatctacctgcttgaaatggcagctcatgagttctagttctttcctgcacattaggcactcaggggggccagttgaaaaatgatggaaaagggctcagagactagattctgctgccaactctgcccttaggccaggtggctctctctatggttttgttttctctcctgtaacattagcactgggacaaatgctctttggtcctttccacatctaaagtcataagattctaaaatctcagtcataaatatcatcgtcacatttctctcaatcttttctgatgtgtggcaagttatttctacacccactggctgctggtgggggatacttttgtaaaaggcaatctaatatcacatttcacagagaccatgaaatgaaactctctgggccctgattgagaaaacacccactggggatcagggaggaaagtctttaggccaaaaaagcagagatattctcaggttaaacaaagaagcactttcagtggcctccctgttcaccaagagctcggcttttcagggcctttctccacaggataaatcttgttcttgagaccccttagattaaagccatgtgctggcccaaggcttctctggatgggatgatgctactggatagaggctgacacttctgggtcctccttctccatccatcctatccccaaacactgcccagctgtgcaaacatcctggactgagtagcactttggtttactggcgctcatccaggccatctatcctgggtgaggtttgaggcacatgggttttggccatgatccctccattgcaacc

SEQ ID NO: 31686 - DNA, 2309 bp, Bovine  19866880719512
  misc_feature (1)..(1): n is a, c, g, or t
nattttgaaagaagagaggaagtaatagcagcagctgcaataagcactgcagtcaaaagaactcgagcttagaactcctgtgagactggccttagcctgagccatcttgaagtgggaacgcagaacaaaataaaccattggtaaaaataatctagagtctaggggagaaaagaccaaagggaaccacaaatgacaaaaagggaaaataaagtttcctagatattggtaatattttgaaatccttgacaaggtgaccagctaagccaagaagtggtcttaggcaagcttggaaaaaaggaaggttttgaaggaaactactttgaggaggtaatagccagagcagataaggagctgctgacctagtgattatggtaaaaatattagtcataaatttagtgatcataaacttagattcatgagaaatcatgaattagtttgaaaaacactttaatattgaaaaacattacaaccatttttagaatggttaaaaaaattcctatatttgaggaatatataaaattgatctttgttaaccacttgaaattattttaaaatggggtgaaaaaggtaagttgatatggttttagagtataataatgtataaatagtcctttaaaaagtgattaaagacttagaaaaatgtgaagtgtaaaactaaattggaaagaaatgaagtttaattaacctttagtaatattactggaatggggaccagcccaatatatggtataaataattgcctcttatattcccagggggcttccctggtggctcagtggtaaagaactcacctgccaatgcaggagacataagagacataggttcgatccctgggtcgggaagatcccctggtaggagggcatggcaacccactccagttttcttggctggagaatctcatggacagagaggtctggcgggctacagcctgtggggtcacaaaccgtcagacgtgactgaagcaacttagcacgcacacacacgagcctttctttgtgaggatgaaatgctctcatttctaagtgaagtaggtgggtgagatcatctcagagccaaggggaggaaattggactagaagtttgaacagagggaaggtatgaaatagccatgccataaaacagtagagtaactttatttgagaaacagtgatgctgccaagaggtattcagtctctatgtgagtttggttgtcaagaatatgcagtaacatcatctaggccagtctgctttcacttccctcgttctcctctggaatctctcacccaaagccagtttctgtcatttttcataccatgtgatgacagacaataatcccaccttccgagaccaactaatcccctaacagctgtgtgagctggttctatacttcaagcccccactgtcccctctcttcaaaataataataggaaggatacaataaagaacaatatgtaagtagcctcctctttgtttgtttccacccatgttactagagttccatctccaccttagtctggagaatatcacacaactggccctgaaaagtgagatttagcactcactcaacttacttcacttttgtgtatggaatttataggctgtgtcatatgtgggttacacaaagacaaacaactacacggacggggaaggcagacaggttcacagagaatctgataccccattcctatgccccacaagctttccagtttgacataaacagtaaaatactagtaagcaccaaaacaaagacacctgatgcctccaacaaaagttccttgctgtatcagtgcagaatctttggaaaccataatattcctgtgcagcagaactagatgatcaatgatttcatatggttttgagcttttaaagaaaaatatgtccactactcaaatggattctttactgtttcaaagtctggagcccaaaggcacatacataaactttaccatgaaaaagatgtgcagttgaatcttgacaagcaggcaaccaagaaattgatatgtagcttttaatctgattttaatttctgacaatatctttttgagctcaccctctggcaccaagatcaaatgccattatttataggtttcaaacaaagagaagcctaaaaaggaagccacatgcagcagaaatcctctccacatattaccagtgcaatttactcaaactgaaattatttttctttttctcagtttagaggagaactcgatgatcaagaaagaatgtaagctcatttgtttttgttttcaaattgtaattttaatttttaatttaggctgaatttagctgtagctgacttagaatttaggatgacagtaaatgaagtatttt

SEQ ID NO: 31687 - DNA, 3525 bp, Bovine  19866880852601
  misc_feature (1)..(1): n is a, c, g, or t
nacagctgctgggcagtaaagccaaagcaggttagggaagcggtgagtaatgcagcttgcctgaacccacagtacatggcaggaggcttgggagataagatctggggatctggggggaggtttgaggagagggaagagatgggaccttgaattttagattttatgtctaataccattttaattatgtcatttcctctctcctaaacttatactggctccttcttgcctgataaatacaggaagagccagcagcagtagtaagtgattatatagcagtaggatgaaagagaaagacaagttccagccacagaatttaaagaccaataaagtggtccaggttctgtgtcctaacatgtcaaacaaggttatcaatccaagaaaagttcgctcaactgaatatttactaagggcctagttaagatcctgagtctccttgccttctcctgactgccatcattttttaaatcttaggatgactccatagttacagattctgagttctcacagaagtacatgtgaaacaggtaacgtttggctattgtgttcagggattgaactggaaactcagtggcttaatattccaatgaaccagttgtgtcaccaggagcctaggactacttgcttgaccttttaagatgtttcacattatgggggtaattcctcccaggacagttgttaagagagcttgtaaaacattattacataccactcatctctgactagatatttagaatgagtactcaaaaaattctaaatggttgtttgaagcgtttatctctgagatatagatagtgatgcatatgactggtacagttcttttagattcatttgaatgtcttgctcttcataagaaccaggcagttctctgagttacaaatatgcctaaacaagatgatcaaaattcacttacgggttcctgaagatgggaacaaaatgaaattctattcagaacgtccttctcttatcattcaagaggtggatctccatggtataagcattgtatttataagattgacataagaatctccagaactttaacatagggagtagagacaccactacaccttcaatgttaatattaaaagtttgctttataaaaggtttatcaacccaagaactcacaagagaaaagttacaggtactgaaatggattggctagtcaagaaggcagatctggatgtgactaagagtgtgtttcctccctttctcccacacctgcttgcagaactttctgtggctctctctctgcttcctctccaagaagccctggtgaagtctgaggaccccaacaactgagtgctagtggagggcaatcacctacatgatcttcattcttctagtctgttgaatattgatagacattgttgtcaagacaagccctgatgtggtttaatgatttcctgtctcacaagctagttttggccctcatcctgcctggctcctgagttaatcaaagtgacaatccaggtgggaaattctttacaaattttgaaggttctgtgtgggtggagggcaacattacttctaatgaataattcacgggtaattagtgcccaaaagaaagttttttctcctgttggttattagcatccatgttaaattccctgtgacttgtaaatagttgaatgctttgatcctactggaaatattggtcccttgttttccatttgaactgtccccaccttcagtacaaggaaggtggggatgatgtatagggtagctgctgagggattctcatttttcgaagcttgcccttatgacgggtgtgatggcgaggaggacaggagtaggcagacattggaatgataagcttctaaaccaagcctctactctcaatggcactaatcagaatttgtacttactttttgtgtctttcccccctccccattccctcacctcccccaccgctataattctaaactttgtgaagtcagggaccttctacattgttcatcattatacacccaatgcctcccccatacaccataaattatttgtttaataattacataaattggtcttgaatactgaaaatctaatttcatcacttcagtgattaagaattcttcacggactcctccaagatgtgcagataaaataaatccagaatcactgcttttgcacttaaaaaaagtaagtcatctggttactttaggttattttcctatgtagtatctcactgtttcctctgccctctctctgaaaggaggggatgttttaatcataataaatgacttacatttaatcacatgtcatatttgttcacctctttcctcataaccagcaaaaatcagtgcaggaatcacgagttccagaaagcttttcccaactccatccctggtcgtggttggaggttggggtacttcatgttattggattacaggttttctgtttcattgtctatctctattcaagtcataaaactccctcaagtaagaggactgtgatggataattttatatagccaggctatggtgcccaatgtttggtcaaacatcagattagatgtcactgtgaaggtgtttttaggtatgattggcatttaaatcagcagacttagagtaaagcaaattacccttcaaaacatgactgggcctcctccaatagttgagaccttcagttcagtcactcagtcgtgtccgactccttgcgaccccatggacttcagtatgccaggcttccctgtccatcaccaactcccggagcctgctcaaattcatgtccatcgtgtcagtgataccttgagaccttaagagcatctagacagagggttcccaaagagaattctcaaaaaggaggaattctcaagaccataacatagaaacactatgtcagtttccagcctgtccaccagaacccagactcaagactacaacatcagctcttgtctgaatttccagtcctcaggcctaccctgaggatttcagccctgccagcccccgtcatgtgagacaagtcttaaaaatctccctctttttctctctgcttctcctctctctctccccgctctctctatgtctgtttttctatacacatacacatcttctgttggttctgtttctctggagaaccttcactattccagaagctttctagtttaactcttgtttttagaacacagcacaataaataaatgaaaaattaaatctagcttgaaatccccctcccttaacagaggagaactttgcagtgcagagatgtccatttagtcctgttgaggccaactaaacaggtccctagcacatccctgagcaacccctcccctgtcccctggtaacttggtcatctgacacataataaaaaaataatgaggaaaatacacattttatgaacctacttattttgttgaatgccaggaaatgcattacagagattccaaccagcaccacgtgccctgtgagtcagagtagctgagttggagcctcatcgcccctcaaaaggggacatcaggatcagcctctcttctggaatacttaaaacttcatgcctttctctctacatcccatctcacccctttttgtttgt

SEQ ID NO: 31688 - DNA, 1392 bp, Bovine  19866880865238
  misc_feature (1)..(1): n is a, c, g, or t
nttttattacagcttattttttatttctggtatgctggtaacttgaagttaatcatccagactggaaaatgagcgagtggttctaaaaacagaggggctatgttgcacacgggaggggataaagctcaaagtctcctcatggacatcgattcagaaaggaatggacactgctgatgtaatttttcacacatgatgggattcgagcaaatccttcatcctaaaaaggacagaaaccagaagggaatgactggggagagtgagtcactagcagctgttaagaatcagagacctctagtcctgatttaactctctcctttatctgccctggaggccagtggctctcagactttagctgcatcagaatcagcttgtggggttgttaaaacatgcattgctgagccccaccctgagggtttccaattcagcacatctgggcaggggcagacaatttacatttcctgccagtttcctggtgatgccgatgctgctggttagggatactgaacagccataagaagcactgctggaggcaatacccatttcagaattgagctcaagggaccaaaaccagtttatattcctggaaaaccaatccaacatttctttaaaatagggcttccatgttaacctgaaaggggcactgataaaaaataggatgtggggtgggggggcgctggtcaacataacacactgtcaattaagtgatgtcccctattgctcccacaagatttagcttgggaccagagcagtgtgggccaaggttggcctttccatgggaaggcaggataggtgtcaattcatagatgccagactaacatttgagactcaagctcaccacttaaagctatgagcttgttcaagtcaatctagcttttctaaactgtagtttcctcaggtacaaatttataaaaaataatatcactgatctcatcaagttgagagaattaaatgagataatgtttagaaagctttaacacagtggttcatgcattataagtaagtattgcttaataatactataactagcctatcataccactattcataccatttttactgctcccaacaaattttgaggtgtttgtctcgttttcaaatattggaaaccaagtcactgagaaattaactctcttgtattttagggagctctgtgaagtcaagctctgtgatgcagctggtatcatcatcactctaatcccagacttctgagtgagatccgatccagaccctctggacagccctcccccagaatctggacacactccttgggattaaaggaggaggcattatttcttcaggccctcctggagtctctctctgccttttttggcccacataccactgtatgtagtttgtgtctaaaggaaaatttctgtaacacaatacccagct

SEQ ID NO: 31689 - DNA, 2188 bp, Bovine  19866880873371
  misc_feature (1)..(1): n is a, c, g, or t
nccagccataggcaaccagtagtctattttctgtctgtacagatttgcctgttctggacatttcttatatattgaatcatactataagtgctttgtgactatcttctttcagttagcatgctttcaaagttcattcatgctatagtatcaatatttcatcctttttattgcttaataatattagtattccattgtgcaattacatcacattttatttatcagttcaacagctgatagacatgtgggttgtctcaactttttggctggtatgaataatgctgtttataatagtcaagacatggaagcaacctaaatgtccattgacagataaatggataaagatgatgcagcacatatacacaatggaatactatttagccataataagaagaaaatactcttatttgcagaaacatagatggacctagaggagcctcataacttgctaatgtgtcatagatacttcagtaaggagtcacctgagtaatataaatgtagattagtttctgtttttgcaaaaatttctcagtaaaccaggagtcagagatcacctctacatatatagaaagaagacacgatgggtgagggcaactgaggagtgagggaaataaaccattttcttagtatttaaagttttcctcacctgtttaacctgtttagaacttgcaatcttatcaattatagtcattatatctgcttcgccttggacatatccttttagtatagcatatctaaaggacagctgatgactcatccttttatctaatatttgcagcaaccttggtgttacaagctgaaaaaacaagactatatttaataaaatttgtacaaattatggttgattttatgttggctagtttaaaataggtagtaataagaaatgacattctctctggtaactatagcaacttgtcaagattcttagttattttatgcacagaatctctgtaactttgtggctagagctacttccccataactaataatattagatgcctatgtgaagttaagactttgttttccacttatttccattgtagagaattgcatgatattttaagtggttttattcttggaaaacaacgtggttgatcttctgggcttaggtcacaaaatgactgtctatgaagtattgccacttttaccgactaaacctcccactaaaattttcactagatgcttcatagttaattgagttagagctcaccacaactatggtccttatttgaccccacaattaacttctcattgtttctttgctgcgggtttaagtctccagcttatctgtcaccactgtactgtctgtctcctaacttcagcagaactggccaacccctacattttcctatctttgctccacagtgctccacactcatacagaaaacaattacttgttatattgctatagaaagacacattagacaattaaaggtcattttagatgctgtgatttcataatactgtaagtttatagaacacaaagtgtgtatttttcagttccttaatttgtatgaatatatactacttgcactgtcactacaaacatacatgatttgctttgctaattcctatcatttatttcaggtattcataagaataaatgttactttggggtttccatgtgctttctactaaaaggaaaggctgtgatgagtatttctttactttcgtgtgctaaatgaatttctaatataatttagatattcataatataatctgttatgagacttaacttgtcaaaagaatctaaatataaacatcagcccaacagaaagtggaaaccacaaaactagtaagctgattttcatccatatttcatgaagtagttaggagaaatttgaaactgtttgatttaatagttttttaccttcaaaatgcgtaggatgcgaagaaatctaacaattttcataatgatgactatttggaccaaatcaaaaatataatagttaatggaatttgtctcaatcagcattacatctatgatgccaactaacgtaattgttagctcaaatagattccaggcatggaaaaaatattccttcctcattgctgctatctgttgatttaaaaagaaattgtactaccttatttgtttttgctttcacaacattattttccataataacttaaacatgaatagttaaggtttttctctgatctacccttaagactctacttgtctgaaata

SEQ ID NO: 31690 - DNA, 633 bp, Bovine  19866880921362
  misc_feature (1)..(1): n is a, c, g, or t
nctctccatggaatttttcagtcaagaacactgaagtgggttgccatttccttctcccaaaagccatttggtgtggccaaaaaatataaaagaatataaagaaaataaggtcaagaaaggtagagtgactattccaaggtcccactgcttattgaggcctgaagacagttttccagcgtcaagtgcagggcatcttgaaccgccacatcactggcctctggcataaagatcttaggcctaccctggattcaagcagccttgtcttctctgcgtgagcgtgcttcaacagtctctccatttcctctattcgggcaatatttgaagtgctggcactgaagaaaacacaaaagccttttaagaatactgcttcatactgatgtctcatcagatgacacacacacacacacacacacacaccacgccccccaagatccattatgaaatgatgttgcttacaagaatcactggtctgatgaggcaagtcacttcaactctaacaactctaggtgaaagtaacttaactcagtttagaagacaaaatactggcaagggaaataccaccacacaaagtgctctactcacatataaggcaaaaccaaatcctacaaagtgtgttcccaatatgtttcctcc

SEQ ID NO: 31691 - DNA, 1776 bp, Bovine  19866880975335
  misc_feature (1)..(1): n is a, c, g, or t
nttaatgtaatcttattagcagcttgttcatagctcagttggtaaagaatctgcctgcaatgtgggagatcacgggtttgatccctgggttgggaagatcccctggagaagggaaaggctacccactccagtattctggcctggagaattccatggactgtatagagtccacggggtagcaaagagtcggacacgactgagcaacttctacttttcacttttcagccaggagtaaaatgataatttcatacattgctggtataaggtaaattaataaatacctttttggaaagttacttagaaaaatgtttgagaagagctttaaaatattcacaccatttaatctagtaatttcatttcagaaaattcattttcaataggaaatctattctgaagaactaaactaatgtttggaaaaataaagatttcttctgaagaatattcctaatagagacaaactagagtttgcttaagcgtacctcatagaagaatgtttaatggtggcgcattattcaatgctttattcaagcaggcattgaaagaaaagataagacaactctgtgtctatctcagtaatgctgggacaggcatttaaattctaagaaaggcagaattattttttaaactgccttcttacaattttgtatatactattttcatattgtaaaaataagtcagtgggaatgatttcttaacagatcatataaacattctgaagagccttggttagttatatgcccctctttctgaaatcatctcttaataagccaattattaaatgatcaaatgcatgttgtatttctcttccttaaagaaggtaaggatcctcctagacactgagatgatcttactgttataaagtctaaatgaccatgagagacacttttctaactacagtgagaaaatatttcagtagtaacttaagtaaaaattatctttaacaaatatcttccattttgtcatcagtttctatctggtgtcaaccatttttatttggttggcttggtgagtagctctgaccccaggggtctcctcacagggtgctgcactttgcaaacaaaatctaagagaaaagtgttgtgttctgccaatcttgtccttaatcactacgactcacaccagaatcaaaattcttatattcatatagaatactcttgactgtcaccagttatacttttcagtaagttttagagtaggtatttcatacataatgtaggattttatacaactctactgttttatgttttattatttccattttcttgaaaataaatcattctgggaatggtttttactgtttcatctttttagaaataaacccaaaaaacaacaaaaaaaatgtgacaagcaatgctttattgttatgtagtctctagaacatgaagggtattcagtaactattaagaaaaagcatagttatcaatcctcaggcaaagtgaattttgtgagcaaggaaattactagcatgtttcaggtaaaaaatggctgttactaatagaaatgtggagcgagtccctctggagttcccacactggttgtctctgctaatgagactcactggaaacttgccgaatgctctgcttccctgggctgcagcagaaataggagctctttatacctcttcactgagagatttattatgaatacattatgtatagatggaggacaaccagttctctcttctttttagattttatcagcagcccagctgtttgggattgagtgtgtaatatagtatgagttatgtattggacttaattcttccctgggtatcag

SEQ ID NO: 31692 - DNA, 2017 bp, Bovine  19866880979750
  misc_feature (1)..(1): n is a, c, g, or t
ntcttatatgtaatggaaagataaagagtcagttgggaagttggtattatcacacatgccaacttcaaatcatttgtagagctgtctaaagggatgaatagaaagtgattctgaggcagtatcaggaaacagcgaaatggttatcattgtctgctgtgcctctgtgagaggggagttgtggtaaatggattagtaatgtgatagaatttttaatattagccttccttgatctgtaacttctatttttattaccttcttgatctaagagttaccaagacagtttttttttcaatttcaggtagttagaatattcatttttaaagatcttccttttgaagtaagcattaaattgcactgtggctgaataatgtttgaaattttattgatatgttcttctagtctagttgatttctgttaatgcctataggtatgtgtaaagaataagcactctgttttggaagataaaactctctatatatcttaggaaccaagcatttaagttttcatataaatcatagccatagtcatttttttaatccaattggttatgaaattatttaggaaaggcctgttaaagtttctccttgtaattacggttttgtcaagtttctcttattataattgcctttatgtaccttggtacattgtttcctattgtatacatattaatatttttaatgtcttttgataaattttttacaaaaatattccttctagatcagttgcatggtggttttttgtttttgtttttgctttttacctggtaaatatttcccacatctttatatctttaatttgaacctttttatattatttaattttaggcatagtccccttacttacaaatataaaagatgaggtacagaaatgaaaagctgagacttatatgattgacatcctctccaaaaacagtagacatccatagttgaatcagttttgaactaacaattccaaacgagaaacttactataagatgtaaccaaatttctctcatgatgatataggctgaaagaaaagggaataaattaaaaaataattaatagaatgtatgtgcttttaatttcaaatgataatctgggtcaacttttgtttctgacattatcttttaaaatagctcatagcctttgggatagatgtagggtattttcttattcttaagttgaaagagtttcttttcaaacgtcaaaagtcacaattaaattgataaaatttgaccagtttaatttaagagctttttaagtcccaattcaggaatatatatttatttagttccaaaatgtgtaatacattttggaaaaacaataatgaataagaagtagaagctctctaacttcatggaatttagaatccacgtctaaaattatatacacaagaaattaaaaaaaaaaaaaaaggaatgcctctgggtcacagctaagtgaatctcttgtattgtattggcctgccaaaccaatccgattggttccttactattggacatttcattgtttccagtttttctcctgataagcaatggtgtggtgtatatttctatacatacatttttgtacttctctgattacttccttaggccccagaagtggaattactacactaatggatagttgatcccatactgatactgttatgttttgccaaatttctttcaacagtcattatgatgcccttcccagataaacaggaagcctaaacccttgagggcattgatggctgcaatcaggcattttcagtggatgaggaagtccttctcatttttgtagggtgaggaagaaaggagaaaagttttaaatcacagatgaaagtgggtcttaggtgcagaaaagcctgaagggtcaacttcaatagaatatgagaagagcaagaacaaaaccaaaatgaaggatggccaacagaaaacagcaatagcaaccacatcaaaaaacaaggctaaatttggggaagtaaatcccagaacagtgctctgaggtggtgaaatgaagaagaaagaatccttttatgaatccttaatcatagatgt

SEQ ID NO: 31693 - DNA, 929 bp, Bovine  19866881075377
  misc_feature (1)..(1): n is a, c, g, or t
ngaatgcacatctgcagtcctcacagtgcacactagcatggcagccccttgtacccacattcgaaaactttggagtcattttagtttactgtctacctcccctgaaggtggtaagttcattttcttattctgtgatacatttgggaaaaaaatcctggactatctaaggagcaggacatacttacataattgcattacaggaactagcttttcctcctcgtgaaaaaactgaagggaagggaggttgtgacacatgtcatcaccaaggagccgattcttgtgttttaaatgacacacgagggttaaagggttgtcctttagggatttggttttcatactaaaacaaggaaatgtcttccatgttattggtgccagcatgaagttctctttgccaacaagccttttttgaaagtgtaaagaaagatacatgtatgaccttttcaaataacctctggtattttttgtccctcccttttccataatgaataattggaaacaatttaaaaggagcagttagtaattccaaaagttcaagtgtcaaaggtaaatatttgtataatgaattttttgccatgtttaagattgaaaaaaaaaaaaggcacaagctccacatttatgaatgcgctggcttttgtgatgctttatgcattaatccttacaactgatgctgttctctctcaagcctcatggtgtgcttttatgttttgcatctttccttagcaaagtgatatgtagtttttacatacatgtgtgtatttataatttatgattacatcttacattaaggaaacttattttcccagaaatgtgttaacctgaactaacatattttaacttcagtatctaaaactgctctaaatacaagtggcatgaaaacccttcatggaactcaaatcattttacagatttagtttaggtctataatgttt

SEQ ID NO: 31694 - DNA, 1757 bp, Bovine  19866881219437
  misc_feature (1)..(1): n is a, c, g, or t
ncaaatttctcacatgaataaattaaaataattttttaaaaaagagaatgttgtaggaagatgaagaatattcaatatcaggtccagataggaagccaccaaatatatttcaaattctgaaactattaaatatttgaatcattcagctgaactataaaatgatagtttgttttaaaaaatcaatataccagccattgatgtctataatggtaccactaactgacactgcaccaagctccccagaaaaagaagtatatatttatgatttttgactttaagtaaattaactatatgtttgtgaacaaggggatataatttacaaaatgcttatcataaacctagacagcactgttgaggtaaggaaactcaacatcttctctcacattagctcaattgccaaagtgaaaagaaaaaaaataaaatagcaaaaaaatctcttgtcattacatctaccacattgaaaagaggattctaaagtcttccacagagaaacattttccaaactggttaccagtaaaaaaagaaaaatgttaagtagccctgggctattgtttttaatattttacagcaaatctgtagagacgaaattctgaaggcagtttactctttattagtggaagaatatcaaataggaaaatcaaataggaaaaggccaacataattccctggttttcattaaatacatccattaaatgacaaattagcatgaaatgacttttatctgtcttcttaagtactttccacactccaaaaatgcaataacttgatcaaaaggactattaaactggttgttataagccccacctccctttcactgcctgaacttctggactccagctgcagctccatcctcatggcctcagtctcatggaaggcactcggctacacaacctcatcgcaggagcttctgcaccctgtccatccaggagtcccgatgcttattttatctctgcagctgccaccagctgccaagtcctacccacctcagctttgtggggagggagcatgtgtatgcggggcggagttggtggggggtggcagtggcccagcattcactgccttattttaaacttctctaacaatccagcaaagtctgcatgggaatatgcaaaaacaactggaaggcataagtgaggaaggggataggaacaagatgttataatttacccattctcaagagcatctgcattagaggctaatctccaaggaaaagttctctttctgcagtgtaggtgaattaagtcaaagcatctaaacacagtctttgctattcttcatagaggacagtatgtatgccttgacattcattatgtttgggattataggaaagttgtcaatttctattaatcaagttgctaatgaacagtgcagtcctcaaaagcatgaaaggtacttctgcccagtctgtcactcatggcaaaattcctcctacctctccttcccaaaatagtctcttttgctgccagcgctattgcttaattccagagggaataaatgatcccagccttaagatgaatgctatttcagatggtgaaacagtattccaaggcgagtgcacaggaagtttggtctactgctatgtgcttctctctattcttatcaccccattcacagccaatctgttcagacttgaatctcacacgcatgcagcactgctgcccacgagtctaacagaaatccggactgcgccgagatgcactggccccgtcagaagctgcaccaaagaaaaataaactgatggtgaggagtgcgtcaga

SEQ ID NO: 31695 - DNA, 2389 bp, Bovine  19866881280738
  misc_feature (1)..(1): n is a, c, g, or t
nctgaatgggagaaaatatttgcaaatgatacgaccaataaagagttaatattcaaaatatacagctcatataattcaatatcagaaaaacaactgctttaaaaagggcagaagacctgaatagacagttttctgaagaagacatacagatggccaagaggcacatgaaaagatgctcaacattgccaatcatcagaataatgcaagtcataagcacagtgagatcacctcacacctgtcagaacggctatcctcaagaagttcacagataacatatgtcggtgagggtgtggagcaaagggaaccttagcacactactggcgggaatacaaactgcaaacctctatggaaaacagcatgcagctttctcaagaaaactaaaaacagaatcaccatatgatccagcaagtcccaatcctgggtatatatctgaagaaaacaaaaaaaaacccagtaatttgaaaagatatatgcacctcaatgtttatagcaacactatttataatagccaagaaatgaaagcaacctaagtgtaacaaatgaatggttaaagaggatgtggtaaatatggacaatgaaatattcataaaaagaatgaaaatttcctatttgcaacaacatggatggacctggaggatattatgcttagtgaaataagtcagccagagaaagacaaatactgcatattagcacttgcatgtggaacctaaaaaaaataaacataacaaaacagaaacagatttattgatacagatcaatatagatccagtgaggaggggactccccctggtggctcagacagtaaagaatctgcctacaatgcaggagaccctggttcaagccctgggttcggaagatcctctggagaagggaatggctacccactccagtattcttgctagttaaactggcaagcaaattaaaacataattaacttagcaaattgaaaattttgatgatacatactttggcaagtgtgtaaataacaaggtgcagggataaactcttctcaagagtcacctggaaatacacacagtctttgagattataagttggaaatattgtttaaaatgaataatacacaacctctttgacctaccaactccacagatacatttgcacaatttgtgctaatatatatattccagaatatttgctgcatatggattttattagtaaaatattggtaacaatttaaacagtatttccaaacaataaaatactagctgaccatcagtaagaatgaggtagaacggtctataataatattcaaagatgctcaagacattcaataggagaaaaacatcatgcagaacactatacttgtgtatatgtttatatatataatatatatattatatatataaattcaatatgcttatattgccacatgttcacagaaatattgggaaggtatggaagaccctctgtgtttatctctcaggtatgcaaccagaggggatagggaaaagtcaaactgtttctctttctctttctgtactgctacattttctagagtctaaatgtgttactttataggaaacactagaatttgctgcaccttgtttagctagcgttagtgttagtcgctcagtcatgtctgactctttgcgacccctatggactgtagcccaccaggttcctctgaccatggaatttcccaggcaagaatactggcgtggactgccatttcctcctccaccggatcttcccccatccaggaactgaacctggttctcctgcattgcagctagattctttactgtctgagccaccagagtagctgcttcactgcaaacattctggaaaacaagcagtaagacccctaatgtctaggccagggcagatgcacggtccgggccctgtatctaatctctgtgtgtggccggctttacctttggtaggatacttaggtaagcggactcgccggaagctttcagaaaggcagaggagggcggcgggggagtcctggcgaggtccccgagaagttcatcattcctggcgccccgtggcgggaggaagctggcactgctctgactgaggctcccaaagcctgccaggtccgcgtcgtggagagcacttttctggtggcacctgtacctggtgtccgggctcaccagggcttcttcaaacacagactcctcatccgagagctgcagtttctccagctctttattgattttctgcacatctgccacggtggtgccgggggacacacgactgtcaggctttgtgtactcagcacagaggctgaggatggtctccagacgctgtctctcctagaacacagaggacagaaggtcggtgagtttgtgagcagggagcaactccacatagagaagaggctgggaccactggtaaattcaacccacacatagtcccacagaca

SEQ ID NO: 31696 - DNA, 2537 bp, Bovine  19866881425279
  misc_feature (1)..(1): n is a, c, g, or t
nttaattgtattaatccatatattcctaaagtcataggtccttctgacatctgtaaattgttttaaactgctggtagaattattttacaatataacaatgaactttaaggaactgacctgaatgtattatcataaatgaaacaacatatatcagcttctctttcatcccagaaacccgcccctcacacatacacacacgagagagagagagagaaaaaaaagttgtagccaaataaaaattctatgaaaaaaaaaatagaaattttagtaagagcacaataatatcatcaatcttatgcccattgatgtcatgtccttttggagagctgtatcattgtttctactcttagtgataaaaaatttttttgtgggtctatggatttgtaaactatggttacttgccacatgcctcaaaacattgctgctataattgttttaccaggtcttggttaaatgcagtgttctccaggaagctttccctgacctctcagtgttggttggtgcccctccttgcattctcctggcatcttgcacttctgttgccgtagcactcagcacggtgcctggctacctacctatattctaagctgtatgctctttaaagacagtcctgtgtctttacctttcaccattttactccacttcctagcccatagcaagcaataatgatgacttttaatcaataatttcttagatgaataaataaaggtttggcgggaactaagttactattttatcttcctgccacagtattttgttcattaccagtgtctgtttgatccttccaggctcacttgaaccctccaatagattctccactcaatgctacagaatctacccttggcacccgaccttctctagccaacagcatatctcctacaggtaagaatgtttttatactgttttacttcccatgaactattaatcctttaagtagattgatagaaaaatttcagaaaatttgtatgattcatgccccattcttatctatggagattttaaataaatatattaagtactattttcatggattaaaagaattagcacaacttccaaagtccttcactttgctgctgctgctgctaagtcgcttcagtcatgtctgcctctgtgcgaccacatagacggaagcccaccaggctcccccgtccctgggattctccaagcaagaacactggaatgggttgtcatttctggcaaaaccagggtcaataaatactcaatgagaaatttaaattctatatttattattaaagacgttaataaattgacagtgctcctctacaactgtgctctcagtagggtgtttaagaaattgttgtaagtagggatcctgtgggccacaggtaggtagatagttttaaattcaaatctgttcttgttcaaattaattttgacaaaattgactgggatgaggacttgaattcagccttccaatggcattattaataatggagttcaggctgggtcagtgtttctatggcaaagggatagcagtgagtttcagaagttggcattgatgcaaacaaatcataaatttccatgtctgtggcctttgtgtttaataaagaaccaaggtgactttctctagcacagaaaaagtatgttctacatagagtagaagcatgctttttatttcttctttaattaaaactatcaattttagctcaaaaagagaactgaaaatggagtaaaacaaagcagtcactagaaatgaacaatttgtttagcctgtagcctttgacaggtagcctgcagtcactgtcacaggttgatggcgctcagagaatgaagcacgtggcagggtgagaaatgcctgcaaatcacccaatagacattttgcatccatctattttttcctagttcttaagactttgtaattttctctcttttatgcttctttttcttcctcttctagctcatcattcagcaataaaccatagtaaattatgatattcttcattcaacaagcattagcatattcaacagtaataccttaaatctctctagtactctatgtgttagttatccatcgctgtataacaaatcacccaaacaaaaataaactaggtttaacatatatattgtctcatgtggttttacacaagacaggagcagcttagctgagtgtgtggctcaggttctttcatgagggtggagtcaggctgttgggctcccatcatctgaaggcttgactgaagctgagggctctgcttccaaacttggacacgctggcaggaggtctcagctactcaccacatggacctctctacagggctgcctctctctatggcagctgtaatcccccagaccaagtagttcaagaaacagagtcaccaagataaaacccccctgactccttatgacccagtctacaaaactgtacaccattattattgctatattctatctgttaaaagcaagtcactacgtccagcttatactcaagaggaagagaattgagctccacctcttgaaggaaaaagtgtcaacgaatttgtgtacaaagtaaagcaaccacattttatcacttagaa

SEQ ID NO: 31697 - DNA, 903 bp, Bovine  19866881574702
  misc_feature (1)..(1): n is a, c, g, or t
naattttttaaaaatcttttaataacctaagtccaggaaatgaaaagggaatcatgaatagacacaactgttacttttcagagaaccttagctatttattcaaacaaatatttacacaattgagggcaatggtaccagggatatagccattctgttaaaacagtgggcaactctaaagatttatttatcccaaatcagactactctgttgctatcctaccaggaacgaagaattcaagtgctcccagggcaaaagtttaactaaccctctgaaattgtgaacttcatttagacctcacccagctgaattcagatgttagaatcctggagacaaatccaagggcttgttaagccaaactacgaagctaaaagttacaagtccaatacttgaaaattaatatctgtaattaacacattcatataatgcagggaaatgtgactgacatatattcaccctaaaagcaagccacatttttatgcctcttctcttcgttccactcccagctgcgtctggctgtgactagcgatgcattctagaattcttgagagcaactagagagcaggagaaggaagatttctagggaagacagcaggacaggcgagaggacttccagccgcgggcaagtggacccacataaaagccagcgggcgcagttcctgcttttacatgagaaaggtagatgggtagcaggttcgacttccgaagcgctttcaaacaggaaaccccaactttggaagggacagcctgtcagccttttaatttcctggcggtggcgggagttagccaggtcctcggcgctttagttaagagatgactgttgaagctaagttattcagtacaccagcaaacatttcagctgcgccttggcggtgccgggacttgggtaaacgggttcaaagcatt

SEQ ID NO: 31698 - DNA, 893 bp, Bovine  19866881802441
  misc_feature (1)..(1): n is a, c, g, or t
nctaatgtgattagctgacctacttaatacattgataccctaaaacctcagggtatcaggtagataggcatttatttgccagaatgtagcctgctggtcacattgtctctgatctcatctaaagagttctaccctcttcccaggtggctcagtgataaagaatccacctgccaatgcacaagacgcaggagatgcgggtttgaacccaggatggggaagattcccctggagggagaaatagcgacccactctagtattcttgcctggaaaatgccatggaaaaaggagcctggctggctgcagtccatggagttgcaaagagtcagaggtaaatgaacacaccctggaaaattaaaataattctgtaatatggctgtgagtgttcatcaggacacaggagcctccagtgggattttatttcctttcccagcaggctaagtgcttctgacttattgggatgattgctgccatcctctcactttctcgtcaagcataaagggcatatgaatggatgtctctgctaagtcatcactcagtgcatcagtttgctgcaatggaccggaaagggttttatcttaaaaagagtttttgcacttctttcgcaaattgtatgtcacctagaagtccttgacagtgccaattgatactgacctttatggctgccaaacctcctttcttgagatacagtctcttcagcctcactgataaaaatgccttagtttcttcagcaaagaatggagtccagcaaagaatggagtccgtccatggggctggcatcagattgggagagccactgctctccacatcatccagacccacgaggaaggaccactcaggtagggggcgctgcttcccgactctcccataagataaacccacatcagctgagggag

SEQ ID NO: 31699 - DNA, 656 bp, Bovine  19866881842933
  misc_feature (1)..(1): n is a, c, g, or t
nctttgtattaataattgcttcactgagttatcctgtcttctggcccagccaaggagggatcagcacgtatccgggtcatggagggaaagtacaggcgagccccaaaggccattttacttggctctgactcaccctgactctccagtgaagcagaaaggaggaaacatcacacctcccaggtgtggccagcctttgaccactattgcaaatccctgagagtcacccagtcccttcccaagtacacttttagctttagagacttctggctcaaggaaagctgtaaagtggagacaggatgaggcgggaagaagaggaagaggatggaaacaggatgaaggcaaaagggcgcttggaagtgaaggaggaggaggagatcagtgaggcgggagaacctgtagcccctttttgtcggtgccacgcccaccccgatgccccacaacaaggggactcggttttctgaggcctgggaatatttccacttggcccctgcccgtgccgggcaccaccccaaccaatatgccacctgccgcctgtgtggcaggcaggtgagccggggccctggggttaacgtgggcaccacagccctatggaagcatctgaaaagcatgcacaaagacgagctggagaagagcggccacggtcaagctgggcagcg

SEQ ID NO: 31700 - DNA, 709 bp, Bovine  19866881855187
  misc_feature (1)..(1): n is a, c, g, or t
ntaatcatctgatcaagttatctaaagcattgaaatgtgtgtatataaacttacaccgtgaaagaaaaacaacttgggagggtaaaaaaaaaactgttacaagattttagataagaataagtattcaagagatggaatttaggggcaggagtagtttaattgagcacagaataatatatacaggaagctcaaagtcaagtgtgtgactagctgaatgaaaattttaactaaacttctccactaaaagaatatgacaagtccttactggctgcaagttcaaaggccaggtgtgaaaggaaataaaacagatgtgttaaagaaaattcagtgaaagtcattttttcttcccaataacatttttgagaatgtgtagctagtggtaaagaacccgcctactaatacaggagacttaagagacgtggtttcgatccctgggtcaggaagatcccctggagaaggatatggcaacccactccaggattcttgcccggagaatcccatggacagagaagcctggcacgctacagtccatagggtcgcaaagagtcagacacaactgaagtgacttagcacgcagcatgcatggcagaagtttacctgcacaactttgttttctttgctttctttcagtagaggaactgaaagaagagactagatatggtatggccaggagatactacaatagttttatgactgctcaaggccaact

SEQ ID NO: 31701 - DNA, 789 bp, Bovine  19866880573424
  misc_feature (1)..(1): n is a, c, g, or t
nacagatcataatagctgtttttcacagttgcttatgcgagtgtcagcacgactgaatgtaattttaattaaacaaatctgccattatgagtacaataactgccttgccatttttgcattatggcatgagctaaaagaaaaaaaaatctcccttgtattgcaacaagcagaaaacctatttagtaagtaaaagtattgttaaaaatagtgtaacagtatgattacaatatatcaacgtgtaaagtgggtcctacgttacagagtcggacttcaccctgcacctggtccagccactgggcaagcagagtggcctgcagggggacgtccagccaggaaggggggctccatgctaggagtggggcatgaaggacgcattaccacccccctgggggaaccccactgaaacctctaagacatgtctgtttcctgaggaacacttgctctgcttcgaaggttggagggaccttgaattttggtttcctactattaggatttttccatcttgcatatctgtattgatctcctttacttaaacaaggccaagaatagcttctgttcagactaggcttctcgaaggcttggtctgtttaatactgccagctatattcctgcggcagatgtgagatgacatgatttgggattcatatttaaacaggttttcttgccggaggaatcgtgaaagggagaggttgaatatataggtatccattgattgaatctaggtcaaaaacaatcacatcctaaatataaccgagtcttccccgcttttcctgccatatgtccctccca

SEQ ID NO: 31702 - DNA, 1146 bp, Bovine  19866880599422
  misc_feature (1)..(1): n is a, c, g, or t
nggtgcggagcgtgggactgagccccaaggaaaggatcttcctctgcccattccaggccacagggtccccttgggcagggcaggccccagccaaggcctgagggcgggaggcaaggtgccctcccacctccacagtgcgccccccagcaccgaacctcgcgcaacagagaggacacttacgtgcacacggtcttgatgttcgtcttgtcgtccaggccctgcgggtagttggccatgctgtcgcccagcttgagcaaacagtctgaaaagcccttaaagaccgcatcgcacttgcccgctgctctcacggcctgcaccaggtacgctgcggggagcaggggacactggtcagcggtgccaccacccggccctggagccccgcagcctgacccccaggacccagtgagcatcgccccatccagctgtgtccagtggcgcccaggctcggggcgcaccagggccaaaggtgaatgaacggtggggcccgagaacgactgagctgcaggcaacccagcgtcttctgcaggtggcccgtgcgcgcgcgtgtggggttgggggagtccaggcctttcctatttcctaccgtgcgacccctgcctgcatcgctctctgcatctttttcggtttccttcgctctgtcatctcacctcccccgcctttttatttctttctcctggctctctgcttcgcttccccaacacacccttagccggcccatcaaggctctcgaagtgcggtttcccttttgtgaggtgatggaggggtgtgacagcacagtgcaggggtgaggaaggggctgggaggctcagagctgggagccgccgagggccaagtctgtgaacaatccctgggcttggggcccgctgcttagcgggtgctgggcaagcactgctgaacgaataaataaattctctggaagcccccagcagccactgacttggattgtttcactataacagggatcgtctaccgtggagttcctagtgaggccctcgtctgcaagccctacacccctagactgggaggggaaagggtggtcccgggcagttagggccggcagggtcaggatgtgtctgagctcgagaccccgggtcacgtcccggaggccagatccccgaggccggtcccttgcttccctctgccttg

SEQ ID NO: 31703 - DNA, 883 bp, Bovine  19866880625022
  misc_feature (1)..(1): n is a, c, g, or t
nacagagaaaaacacgcacagcagccacaagtcggcagcaggcaacgcggaggaaagagcttgggggcaagaaggcaccttacagtctcagccagagagcgccagtgcccctgggctacctaagaaatccactggtgtccaacaccaagtacgggtgacctctgctcactgggaactggagcaacccaaccagaggtctcagccctgcatctccagccctctgcaatggaggataagtgtgagccaccgactgctcactcatcaggagaaacgcagaggcaggcacgtggggaccggaaggcaaaagtcagacaagaggcagtaaaggcctgccagttcctgcgttactaacacagcacgctggccaggatgtccagagccccgcctgcaccaagcaccccaccaaagacggatgccacagggccccgcgcggctcgctgggaccgaccgggaagccccgcgccgcggggcccggctcacctggtggcgggagaagaggcgcacggcctccagctggtggaacacggggtagtgctgcgcgtcgatctggtcgcgccggtacacgtcgcccaccaccaggaaggcgtccagccccgcgcgcagcaggtcccactggtgcgccgacgtgtgcgcgcgcagcatgtgcgtggcgttcaggaagtagttgtcgcccttcttccggctggggtggtcggccgggatgagcaggctgtcgaagttctgccaggtggtgaccaccggggacaggtcgtcgtacacggagaagagcggggtccccgcgcggcccgggtactgcgcgtagaagtgctgcttcacgcgctccttgagcagccagagcgggtgctgcggctgttgtgcaggttccggcccacctggacaggac

SEQ ID NO: 31704 - DNA, 1132 bp, Bovine  19866880639065
  misc_feature (1)..(1): n is a, c, g, or t
nccagtcacgtcttcagagggctctctgcatcctcgcgacagtcgctctcagcagcctggacaggcgcgttcaccctgaccttgcttgggtctcaccctgcagagcatctcaacctaagcttgacttcctcccagggagatggtactgaaggcaatgccgttatgagctcagagcataggctttaggggaaaaggcttgatgaatggctttttagagaaatattttagactaatgaatgaaacaaatagctccactctaagaaaaactctcagctcccttatgatctaccttcatgcacacacaaattttcttccaggaatggggagcaagtgtccatgggtgagacaaagaaccgaagtaataacccagctttgatcaaaactcttgtgttacagcgttccctctgaaaatgatttctaatcagtgagcacttccacagcgtgctcaggagtaattaccttacatgtgtttcctctgagctctgattagaagcaagatgtgagatcagaggggcagaagaggaaggtaagaagggaaaatctcacccaggtgctgaaatgcccaggttgagggctgtttcataagctcgtgccccgcgtagggatgtcaacctccattcaccctcgtcccgctgccagtgaacacatgcccactctttggggcagtgttgatgatgtaacgatggccactgaggcagggcgaccagctggctccagtgaaagcgtttgttctggcagcacacagacgtgtgggctgctaaaccctcttctcgccctgtgtcctggtggtcagggctcagttttcagcacggactgctaggtgcagactctctagcccacacggtagttgaacctgggcttcgttagtccaagaagggacccaggggcccgggaagggaggtcaaagactgggaacgattctgcctatgaaagaaaggcacagcaagaggtggcgagggccagtgggtggttggggtcactggggtggcgaggactacatagggtctgtgcaggcaagaggaggtctgtgacccccagcgcttgctggatgggaacgagttcctagactcttgaggatgtgtgacgaggggcttccctggggtccgatgttgaagacttcgcccttccggtg

SEQ ID NO: 31705 - DNA, 2777 bp, Bovine  19866880687935
  misc_feature (1)..(1): n is a, c, g, or t
nacaaccccccgcacaaaacctcaatttccaataaagaaaaagaacagaaaaggaaaatggataagaattaaagatataataaaaattaaccccaagaatatcccatgtaatatactgagtgtaacaaagagtcaacaccccaattaaatatgggtttacaaaagacccagatgtttacaagagacatgcttttaatataaagacagaaactgaaaataaaatgatgaaaaaaatgcacatttcaaacactaatcgtaagaaaatcaatgtgtctagattagcattaaaaaaaaaaaaaaactgaactgtaaaagtatcatcagtgataaagatggatatttcatgaaaaacagacattaatgaacccaaagttggttccctgcttagactaacaggcttgataaatccccttttatcagtatataattttagaaggtccatggatctcgtgtgtttatgaatctctattgaaaacactttccaaggtcacattacctttaaactcactggtactctttacggcgcgtgacccgtcactgtgctcacgggacgcccgccgcactcacctggaacgtcaccttctggttgatgtccggcacgcggaactgcttcaggaagcgctcatcctgactccagaagaggcggatgtcggggatgtcgtagaggatcatggccagccgctccagccccagcccgaaggcccagccgatccggtcctgagctccggctgcagtggggagaggagaccagaaagagggtttaagggcacgaggggccgcaggtccatcccactcctgacacccggacaggacctcagcgggtggcgaccagaggcaaggtgcgtttacacagtgaatgtttatcatgagcttattaaaaatgtctatctgaaaatgagtatgtactatgataccactctttaatatagggacaaataaggcttgtaatgtaaaataaaaataatgatgataaagtgtgatgttcaaagattatgaggttaatagttttaaaatatgtttaaaacatgtttctgaactgtcttcgcaaattaatcaaagataggtggaatattaatgttgctctgtgagttagactttttccttaattattaaatcctttacattttattataaaatttttagataaagccaaccatctgagcccagcacccacagctgaaagaacagtaggtttagtgtatttgaatctatttaacatgcagcagtttttagttcttagctctgcttctttcattcattaccctccccagcttccttatccgctgaaactttcctagagcaagataagaacgacatgcagcccccaacggtaggtaagaaaaagaaaaacaacctcattattcagacaggcaaagaataggaagatgtgcacaaaaagggagaaaaaaaatgattcttaagcaaatgaaaagtttacttaagaaaaacaaaagtgcaccagattaccattttttatttatttgactggcaaaaataaaaacacctcatcgcatacttgacaccaaagccaagggaaaccacggcctttcatatgctgagagcaggcgcgtgtgggggcttttcacccccagacccaaggagcatcaccctgttgccgtcctcagtcacagacacaccactctgccactttgaccaccaggctgcttcccacgcacaggaagccacggatgtataaggctgtttactggagcattgtttataacaagacagtaaacaacccaagcgtccatgaaggacgcggcttgaataaaccccactatatccatacagtggaatattatggatagaaaaaaaaaaaagcagtagccgtctgtccttttaggggaagtaactgggcgaatggagaacaggcttttatatacgccttttatataacgcgtgagaagaaacatttcagataaaaattctcacggctgaatgaaataacttctgtctattccggtgaggttataagaacaaagggcctcccctgtgaagctagtggtaaagaacccacctgttaatgcaggagacctaagagaggcaggttcaatccctgggttgggaagatgccctggaggaggccacagtaacccaccccaggattcttgcctggaggatcccatggacagaggaacctggagggctatagtccatggggtcgcaaagagtcggacacgactgaagggactaagcaggcccgcatcgtatttgaaaagtaaccaagagatgcatttaggacacgactgaggcgactaagcaggcccacatcatatttgaaaggtaaccaagagatgcatttaggaagatcacaatatacaaaaagtcagggtgggtgtgacgcgggggcctcctggctgccaatgaggacaggcctgagaggaccccggacgcagagcagcgaggggccatcccgtcggcacctaagaccgcagcacctcgtacgtggacgctcaaggacgaggccctcaggaggagcagcctccagcttcctccactgcccaccacctctgactcacactcattcttactgcaaagcctgctgctgacggccaatcaccaggaagggctgcaaggaaggacgtctatgggctgagctgcatcaaattctatttttgaaacactttgctttggtcccattgagatctgcctcttctgaattgcacccctgcaaaatggcaacccactccaggattcttacctggagaatcccatggacagaggagcctggcgggctgcagtccatagggtcgcaagagttggacacgactgagcaa

SEQ ID NO: 31706 - DNA, 1471 bp, Bovine  19866880780606
  misc_feature (1)..(1): n is a, c, g, or t
nctggtgtcttgttgtcttgaagttagacaccacctttggagcgggaactgcactgctctctgacccagcgtccctgcgccccccccggagggccgttgtcaggcatcgacgtgcgggcggcccctccccgaggagctggacttgcaggggtcatggctcagcaggaaaacggcttcctacaaacgacccgcatccttttccttctaaagtgatgagctttcctaggaagttagaaaccttttcctctcatcagccagaaagttacagggagcccctcataaatgtcaagttaaacattgtgaaaatatttccatagaacttcccttcagttactgagtgaattcaggtgactacgtctgtcttgaacacagagacagtttaataacaacataactggttctaagtttttaaaggagtaatttttttttgcctttaaaaaatgtatttattgaagtaacgtggacttaaaacgtgttagtttcaagtgtacaccatagtgactctttttttttttagatttgtacagggtcttagaaaaatgaatttgttattccatggaaggagtactttccatttaggtgcacctcttgcctggaaagtcccatggacgggggagcctggtgggctgcagtccatggggtcaagaagagtcgtcacaaccgagcaacttcactttcaattttcactttcatgcattggagaaggaaatggcagcccactccagtgttcctgcctggagaatcccagggacgggggagcctggtgggctgctgtctatggggtcacacagagtcggacacgactgaagtgacttagcgtagcatagcttaggtaatattctgagccatatcctgtgagcgtgtcatagagactaaaacactagggtgaaaaatcaattacatgaccagactgtacccatgacataagctgccacaattccaagaactggcctcaaagaaatgggaacaaatggaccctggatctgaagattaactgtacctaaaattactaagatgatgctaggtaggtcaccagtgaccaatttaaagataactgtcaaaactgactgctatttctatatgtagctgtcccccacttttgtctaaaaaaagctcctgcctcactagtttccaggacatctgtctcccccaaccctagttgctggcatctgaaataaagcaaattttcctttccactagccaggcctgcttattggctttttagtaaagagcagccagaccccgcatttggtgatactataatattatgatgtcattgttcataaggacctgcctgatcagggtcctgataaggatgtaaatgtgccatgattttaaaccagtttaagttggggtttgcaaccaagaattccaagaaatgggaccctgcccttagggtgacatatcatgactaaatcggattactctaataattcacaactgcagaaaatataccccacaagagactgac

SEQ ID NO: 31707 - DNA, 1012 bp, Bovine  19866880863211
  misc_feature (1)..(1): n is a, c, g, or t
nctttttttataaggggcctgtccagtgagagtcttcagaccctttgcaactttgggcaggttcccactgctatttttagtactttgttcacatttgtaaaagataggtcatattttagtatttcagatttgaagcttattagacttatcaaaatttaccagtttatggcaaaggatcaaaatgagtttcctgtgaatgtttaataattcttgacatttgatagggaaaagcttattatcaaaaagtagtcttaaagacctaattccagaatgccaaaatgttctaattgcatcactgatagaagtacaggttaacttatttgtggtaactagctgttttccagaatccttaaaataaaacatcctgatagtatagagaagacagaactgatcttccaaagaccatattcaagtctaacaaaactaaactgaatgtattttccccctgaccatgtcaagattttgtcgtgcttcaagttggaaattatgaacatttgttaacttagcattagagatatgtagaaaaagccccctaataatagagattgtttacttattacgacagagagcttgagggcaacgcgtaagctaagttgacttggtttgcacgttgtccagaagtttccagaaacgggtcctgtgaccacacacagcatcttcactcacaaaaaggtccatgtgggtggtgttggaaatgatattaaatatcatttattctaattcacttattttattttgcagaggaagaaactggggactgggaaatggagtggtcatgattgccgttggccctcaacttcaagggtgtgagtcaactgctaggtggattttttcagtagtaaacaccacaataccatgtggtctggtgttggtagagtctgtgggtgctgcgctgtggataccagggccttctagaatttgcatgcagagttttgacagcatggggggtcggcacctctaagtttggcagtgttcaaaggtcaactgtatacatttaaaaaacgtgtagcag

SEQ ID NO: 31708 - DNA, 2203 bp, Bovine  19866880868944
  misc_feature (1)..(1): n is a, c, g, or t
ntcatcatccccataatcattttgattattgggaaagtcttgaggtggagagacacgctggtggattaagacaggtgttgtggaaggaaacaagggagcttctctgggaagaaaggaggctctgtgcataagggcagagtagtagcagaggaggagatactttcctcagtgccccttgggtgaagttaggacagaagcttatttgtgctcagcattaaagacgtcctcatattcaaagtgccaaccattaaagagactgtgtcgagaggaagtgagctcctggtgtctgaagagaagtgaaatccggatgatcacccgccggggatgttgttgttgttgttcagctgctcagtcgtgtccgactctttgcaactccatggactgcagcatgccaggcttccccgtcctctaccatctcccggagtttgctcaaactcatgtttgttgagttcatgatgccagcctaccatctcatcctctgttgccttctcctcctgccccaagtctttcccagcatcaggctcttcgcatcaggtggccaaagtattggtgcttcagcttcagccctcagtccttccaatggtgggaatgttacaggggctttaataaacatgtggaagagaggagtcatttcctttgagatctcttcctgctgaaagattgaggatttgtacacctttagagcatgggccaagttagtagcaaataaaatggcacagagaggtcgtggtctgcaccagtggttctcaattgtgggccctttcatccccagggaacacttagcaatggctggagacatttttggatcattaaaactcagaggaaggtgctattggcaactagtgagtagaagtcaaggaagctgttaaacgctataatgcacaggtcagcctccctccaacaaaggactatctggctccaatttcgctattggcgaggttgaggaacgctggcctgtagtttaacttctttctgttgaagagtggtgagagttgctgaatggataaacgctgactctcattcaccgggtagtattttcctaagcgatgagccagaaatgctgccaaatatgccctttctgttgtggttttcacacacatctcaaaggttcttcttttttcttcaaaagcttctttgaagtcagtgaaactggttaagaaatgcagtgggcaataaggacaaatgctctgtaagaacttgtttgaaacctaattctggctcccatccaggaggctctgtggagtgcagtcttgtattcatcatactttctggagggtaaatgacttccctgaaggctgaagatgaataaagaaggttcaggtttcacagatttttttcttggtaacctggtcatttcttcattttgtacatggctcacaaatggctgtggtgaccataggtccagatttgctgtaaacagtcatggtttgcccataatgtattggggtgattattaatagtacctttttttttaatcaacaagtgtcctagtttagataataaattaatattaatattataaacaatattatttgaccaatgggtattttaagcatgcatccacaccatttatataatatgcgttactcaacttcagtgctaccagtttaaaaataactcctcagtaatggctagtttgattatcaccatcatcatgatagctacttttaattacttgtctcaaatggtgatgacctctgtccttcaagccacatcccagcccacttcccgctgtgacccactacccacatttatgacttgcttgggcagaccatgggcccgaaatcagtggccactgggaaaggtgagtcacttgcagaaggtcagctgatcttgctttgatcaacccaggaacacgtttctatacgacacacagcccttctctaagctgttaagcaaatcctttctaaatatgacccctctgtgttaattttaaatccgcttttgtcttttatgtccacttctcagatccatttcctaaaccactggcttttcctcaactctcatttccaaagagctggttctgaaatgcggtttcatcggtttcctgaagaaggtaaaaacgataggtttgatcaggcaaatctgtgttttacaaacacagtgcacagagtctcagcactgaatacctaaacagagagtgatttctgctccatgaagcttttctggccagaaagccacaaactcccttctacttggctaa

SEQ ID NO: 31709 - DNA, 1578 bp, Bovine  19866880930456
  misc_feature (1)..(1): n is a, c, g, or t
natggaaatcaaggatggggaaaatctaagagtaaagtgaatctaggaaagccccagatatgttttgatttttagaaaattctgtgtgttacagattcacaaatactcagccaaactcttaaatgaagcacaagtaatctgccaaccatctagttaaaacaaattgtgtgaattataatgaaattctttccaaccaaatacacatttttaatgggaggaaatgtactccagaggaacattaaaaagacaccaatccgggtcatctcggagatgtgcagcattccttgcataggtattctgtaatgtttgctgttgttagttgctaagtcatgtccagctcttttctgacccccatggacccccaccagactcctccgtccatgggatttcccagacaagaacactggagttgggttgctgttttccttctccagggaatcttcccgacccagagcttgaactcctgtctcctgcattgcaggtggattctttaccactgacctacctgggaagtccctattctgtaattgtatttggggattacctagctcaggccattgtttagaaagggctggtggcatttaaaagtctaaacatctctgaaaatctgttctaagtgtctaaaagtttttcagtgtgaatgtaaaaattcagacattcagagtattcaccctacaattggctgaagctcttctggctgaaacacaaggtaatcatgcgttcggtttgcaaaatgactgcatattgctgtgagcagctctgcatggcgaagagtattttccctgaaatttggtgccaactctcaactctttccaaatgttttgatacagtcttgcactgacatccttttatgtacagttaggagattcaaactgtacttcgttaattcagcccccaagccccccttggcattccatgacactgttgctgatatgaattccttgtggaccgatagtccgtatggaaagaacaccccggtcctagccccagagagtgaccttggccgatgtagccgcttcacgagaatgtttatggcccgttttggatacagtaattggttctaagacccggtccagcagtgggtttttgtgtttcccacgttgacaattgtgtgtctctaaccatatcttacacctgatacgtcttcatttaaggtaagtttaatgtgtcataaaataaaaatagtagcagagaatattttaaagtggattcacatctagtaatttagtgctcaatgccaagtcgcttcagctgtgtccgactctttgcaaccttagaactgtagcccaccagactcctcagtccatgggcctctccaggtgagaagactggagtaggttgccatgccctcttctaggggatcttcccaacccagggatcaaacctgagtattacagctacctgccttggcaggtgggttctttaccactagtgccgcctgggaagccctttcagtaattttagaataatgttaattacatttgccgaagcactcaatttcaaggtacaggctcttagatctgtaatttagttttctgttggatattattcaggataattaagcaggagctgctgcca

SEQ ID NO: 31710 - DNA, 1333 bp, Bovine  19866881397888
  misc_feature (1)..(1): n is a, c, g, or t
ncttctttgctgctgcttagttgcccagccgtgtgcgcctctctgcgaccccgtggacgcctctctgcgaccctgtggactgtggcccgctagggtcctccgtccacggaattctccaagcaagaataccagagtgggttgctatttccttctccaggagatcttcccaacccaggggtcgaacccatgtctcctgcattgcaagcagaccctttcccatctgagccacaagggaagccctgaagcttcttagccagagttttaaagccatctccctgcagatcaggcagcctccggacagctccccattggacctcttatacctggagcatacactcagcatcctttgttaaaagaggagacataatgaacacccccaccagtaacacgtgtgtccttcaccacctagaacagggtccctgcccttcacctgccagacgctactcatgctgaagatcgaggtgtaagtgcatctccccgccagtcttttctcagcccgaagtcacctacagcctgtggttgcgtccaacactcagcgtaacagccgtgcctgggggggccacgccacgcacccacgtctcagccccgacacaggtggtaatctcccaccttgtatgtcttgttttggggtgcctcttcccctcacctgccactgtgtcatgcacagaacggccactgcgtgagtattgatgtatcaacagccactgcgtgatgtgttgatgaagcaatgctattccccattctgtatctcctgcagtttctgcctcaacgcagaatacatcattgcaggtcaactgactgagttgaaaatgtagcacgtcacctaccaaaaatcttgtgttttgtgacccagctcatccactgggatgccagctcgttcaggaagccaccatgtgccaacctggagttaaagttagctgtgtcgacttgggctgggcagacgcagccagggaggaaaagaaaacctcttccaaatcttccccacaaaggacgagcacggagctttggaaatctgtgccacatgagacgttacttcaagtttgttagagatgtaggagggcggcttggaagacaatggaaatgtcgcaaagaatttttcaaatgtggtaaaccctgtgacagcatggtgagcttcgaaaccacttgtgtgaaaggcagggcagcctggttgctaagttagtgacgccaagaagctgagccgtctgggcaggcggaagccaagcacaccattctcttaggatggtcctgcccctgctgagcaggggcctggtgggggttttcatcattgttttcaatttctactgtttttagtataaatttaattcccaatttc

SEQ ID NO: 31711 - DNA, 1061 bp, Bovine  19866880350304
  misc_feature (1)..(1): n is a, c, g, or t
ngcctccttagtccttcgataaaccttggtaggtttatggatcctgctggaatccgcaggtattactgcaaaactaactgagcggctttggacctggtgagtgccaagtcagggaagacagtctgtggccgtctgcagacaagaggacgcggttcccagagcagggacggccgctgctgcgggttcgccgcttcctgccaccggcccacggactgagtcacagcgctaagtgctaatgaaggacaacggaaagacagagcgagagagaaaggagagagagaaggagagaccagcgccgggcatgtgtggagatgtggcaagtacgagcctgttcgggatattctaacagcccatctgggcagcatcaactttcctgacacccacaaattggcccatgagattccaaggcaggttatggctcgaaaaagcaatcccacttcatgtttgcaaacactaccccccagcctggttttaaaggcggaaacggtagcaacgagggccggcactccagagccttccattacgcaagctgtgtttgtctcattaaattatttccaatctctctccctgggcagggcggggctgggggggatggacccatccccctcggcactctcaatcagtcctgaagagcagcgagacaacggacatcagcacactcagctattctttatcccgccagaatgaatcagcccccaactggcaatgccagacagtgccgtggggaaggagcctttcataaccgacccggaagggcagctgagtgccactcggaaagcaaggctgggcgggaggaggctgggttctgggaagcatggtctcccatccatgcagaaacagatgaacgccagaaacaggaaaatctcccgttctgaggctaaccaggagtcaaagcctgcctcccaaagaggagtccacaacaggcctctcctggagatgggcccccagctggccatcactgcgggcaaggaacgaaagcacagaactttcaggccggccggtgggcagcagtgcctttctgccacccagggcacgcgtgacgggtgtcatgggggaaagga

SEQ ID NO: 31712 - DNA, 2644 bp, Bovine  19866880355929
  misc_feature (1)..(1): n is a, c, g, or t
ntccattgtgttggtgatgccatccaaccatctcatcctctgtcatccccttctcctgccctcaatctttcccagcatcagggtcttttcaaatgagtcagctcttcgcatcaggtggccaaagtactggagtttcagattcaacatcagtccttccagtgaacacccagggctgatctcctttaggatggactggttggatctccttgcagtccaagggactctcaagagtcttctccaacaccacagttcaaaagcatcaattcttcagctctcagctttctttatagtccaactctcacatccatacatgaccactggaaaaaccagtcttaatggatattaaaagacaaaaatttttaaagacatttttaaaaattaaaaaaaaaagagaaccaccataacatcaggtgtctagctgtgtccaatatggaaatggaaaaggaaagaaggaaaatttttgactaaacacattcctctgcctccattaaagagctttttttgcatatcccttcccagtttggaaaaaaataatgaaacaaaactaattttctccatctattaaataaagggaactttaatgcctctaaatatatcaaacaaataaatttagttaggactaaataaattacagataaagatatttgtgttagatcagtaaagactgtttgaaaaatataattttcctttctctcagtctcataccgtctgtcttttttcatgtttttctgatactatatgcctccagcgtgacagtcggaaggaaactatcttggctttcccacattatgctcaattgcgtctgaatcttttgcaaccccatggactgtcgcccatcaggctccctctgtctatgggattttctgggcaagagtactggagcggtttgccatttccttctccaggagatcttccccacccagggatggaacccatgtctcttgtgtctcctgcactgcaggcagattcttaatcactgagtcacctgggaagcctttctcatattatacatttctagaagaaagactgatttaggatctgacgcacatgcttattttttatttcctggaagaaaacaaactagccctgaatttaagcatgctcaaaagtcacaacacttgagaaaagaagctatttatttatttaagggagctacaaagagcccattactttcagacaagtaatttatgcttggtggaattttcataaataaaaattcacttttactaaatattttctcgtgaaaagtaaggttttcttctttggtgcaaagtctgccatgtctattcttaagagtaaggcttgtgaagctacagggagacagataaagtgaacaaactctttaatcagagaggcgcttggcctgcctgtgaaatgcaataccagaaagtaaacaaagagacttttgcggaaaaagagtgagtttaaatggatcttgcttttccaatttgaaaacatgctcacggttgttagtaactgagtcaagacatttaaatcgtacctataattttatatcttgacaatgaccttttacaagtgtgcagtggggataagcagatgagcaaagcgatgctccagaaagagcattgcaggtaattgaacataaaatgtgttgcaatctgataacattaataatatgcaatcccttctttatatctagtgcacagttcatttggtcagagtctaactaaagcactctgtaaacgttagcgcacgaatcttgcagcaaacctatgaggtaagcagctctattttcatgcgttttttaagtatctctgtgaagtgaagtgaaagtcgctcagtcacgtctgattctttgtgaccccatggactacagagtccatggaattctccaggccagaatactggagtgggtagctttcccttctccaggggatcttcccaacccagggattgaacccaggtctcccacattgcaggtggattcttcaccagctgagccacaagggaaactcaagaatattggagtgggtagcctatctcttctccaagggatatcttcccaaccaggaatcgaactggggtctcttgcattgcaggtgggttcttcaccaactgagctatcagggaaacccaagaatctctgtattagtcatttattctgtgtaacagactagtccaaaacttagtagtttcaaacaagtattaaatgtctctgaggggcaggaattgggtgtggcttagctggaaagttctggctccaggtttctagggaagttcctgttgagtgtgagctggggcagctatcatctgaaggctggggtggggctggcagatgctgctttaaggtggtctcacaattctggcaggctagttcaggttgccgacaggaaactgcaagtcttctccacgtggggctgtctatcaggctctttgagcatcttgacggcatgaaagctggctttccctagagtgacctgagagatggagccaggcgggagccaggtgcctttactgatccagccttggagttcatccaccatcatttcctccacattctattcatcagaacccagtgactaagtacagcccacgctgggggacccggggtgggggtgggaagatcaggctccacctcttgcaggaggaccaagatactttaaaaccatagtgacccacagtt

SEQ ID NO: 31713 - DNA, 1713 bp, Bovine  19866880356571
  misc_feature (1)..(1): n is a, c, g, or t
naaacgttactcatctgccatgtttgtggctagggtggagttttatgctgctttttaattaattaatttgagtcacaagcatttgaaatgagactgttttatggagttgaaatttacatttatctccctttttaaagcccatttagcaaattaacaagaaaggagcaacacccaggaagttactgcgcccactcccatgtgtcacatataaaacagcatctgcagaagccgccgtgagggtcagggagattgtctggtgaagaacctggtgggagggcactctctgcaatagtgaaacactattaatatccttaaagtcaggctgcttggggactctgacacagagctgcttaacccttagtgaggccacatctgagctctccacataaggctccctgggactgggtgtggatccagcatctctgtgttaaaggtccgtaacgttcccagcatgatccaagataagttcaagttagaaacacagttcacagaagggaaatcaatgcagctggctgctgatgagttgtagctataatcaaagtgtattcagcagggtctccctctacttaaaacaaacgtaccagaaacagctggtggccaactggtcctcccagaggtttcactgcagagcagacttgtcttagcgccaaatcctgacaacacccagcccagtgcctttggacagaaaggagcaacggaggcagggggtgggacactagccttgagtcaaacatcggaagccaaaaggattttaaaagggggacctttctcccctaggctctttcctggtggcccagatggtaaagaatctgcctgcagtgcaggaaacccaggttcgatccctgggtcagggagatgccctggaaaagggactagcagcccactccagtagtcttgcctggagaattccatggacagagagccttgcgagctgtagtccatggggttgcaaagagatggacacaactgagtgactagcacttcattttctcccaaggactctgttttattgcaaaacttctgtttggaaagatgtatgtaatccaccgcctacctgattcaagctgtccttctccacaatctatctgaatttgtgaagtctgccaacatgtttaagatacttcaacgaagaatgaaaatggcagcaacaataatgaccttggatgccaaggcaggccctaacaggaaagggcacacagatttcccttcttccaatggcggctttcaccgctaccccaactgagagcttgaaattaactcccttggttaataattcaaacccatgggctgggcaagttttaatgtctcaatgttggttcacaattaacccagcaaccgtgttttaaaggtgtttgatttttaattagtctattgattcaccagtctggttaacgatactttattctgtgcttttattcggttgtctactcttacacagaaagaatggcggttactcaggttctgctgtcctctgcacacctccagactagggcccctgccctccccagggacacagggtacataagaacaggagacagaaagcctgaaaaagcccggattctgtgtggccttgggcaagttacaagaacctgtctgtgcctctgtttcttcatctacaaaatgggacggcagcatttacaggaccagagtgaccatctagtgagatgacccatagaaacccctcagatcagcgtctgacacagagtaagcccc

SEQ ID NO: 31714 - DNA, 1604 bp, Bovine  19866880362750
  misc_feature (1)..(1): n is a, c, g, or t
nggagatcctgtgtccactgagttttacatttttttaatttgatgttaaagagaaaccaaacaaacaaaacaacccccaaacccacgtagcctaacttagttttcagaataacgttcattttgtcgtctttcactcttccgtgtaaggtttttggtcccgctctgaagagctgacatcactgaccttccgcctccttttgctttgggcctggtgggattttgaagggggaccattcggaagttcatttgtttttgtatccagcaaactgcaggtgtgggcttctgtgtgcctggccctgtatttgaactgcagggcatcctgagaggagtcaggagacggtctgggggaggaggtaaggagggcaggattatcactcactttagcaccaagtggaaagtagcgagtgtgtgagaggcagaggggcacggcgttagggggctcagaagtgagaggcgcagcttctgggtggggcggccatataggtatttggcattttggagaagagcgttgcatcttggagggtagtcagcttggcatgggaggtacaggcgtggagaggtctcccaaggagaacctgcgtggacagaggtggggaggcctggggaccagctgggcttgactgagtgtaggacacgtcaaggggaatggtgagaaaccccgagggacaggagccctgggggtgggcacggggggctgaccctcccagtgcctgtcctgttggcagacacaagccagcacctggaatggctccgtgcaggcagtctgcacagagttttgaattacatgtgagtttcttattgacacatctgtgggtactttctgggcagcatgtctttatacacatagttctcctttgttcgcgtctcttcggtttaaaatagctctgacgtgtgacttcacatcacaatgaagctgtgtgttatggccagtgaggctttgaagtccactctccatctgcatgaaatgccagctttcaggttgcggcctgaaggcctaaggtattcctcgtgactgtctctggcatcctgagacgtctgaagggcctgctctgagcagctgagatagtcctcacatcgccttcctctctggagaagtatgcagagaggcttgttcaacagctcggtgagtgtggcttcagataaccaagttaacccgtcttcctcttgtcgtttcttgcagatggtcacaagaacaaagaaaatctttgtaggaggactgtctgcgaacaccgtggtggaagatgtgaagcagtatttcgagcagttcggcaaggtaaggggcgtgtggggctggggcagcctcctctgtccttcagagtggctgctatggcccctgcctttgccacaaccgtctcctccagagcctcgtccttggacttggctgtcgagatgtgaatgggattcggcaggagccgagatggaagagcctggcttgtggtgggcacggagccccgtgcgccgacaggaacagacagagcggcctttgagtgcggtttcaccggccttagctggtcgtgtggggcctgggccgggagctgacaggggcagcgccggctagggaagggactctgagctgggagtcacagggcaggagctcccgcaga

SEQ ID NO: 31715 - DNA, 965 bp, Bovine  19866880447843
  misc_feature (1)..(1): n is a, c, g, or t
ntgcctcgcgtctctgacccagccagagaagctctaggttgtgaagggaggctccgagcccatccgcgtgttcctgccccctcgacccctgctgcactccacaggtgggcttgccgacccggccagacccccacacccccgcccaagtccctgagggtcaaacgtgggccgagcctggccccggggagtgaagccactcttcccgcagctcccgtaccgtcccagactcgcttcttagcacagacccagaactcctggcactccggctgcaaggaaactggggcttttcctcccacaaggctgcccaagtcactgggtctccaaatcccacctctgacggtgtctggaaaccccagggtgaggcaggaacctctccccggcggccctgtgggctcaggccagagctgggccgtcgccccttgcccccagaccctctgccttcctgagcaggcagggcttctgctgtgcgctgggccccacgaggtctccaggcctcccccagctccccccagccccctagaggaccccacacctcctagacccaggagccatggttcgtagctctgttctcacaccctgtggccagggagctggagaacccaagggagttcagtttgatgtaacagagctcggaggagggtggggccgagggagatgctggtgagggtaccatgaaacagggcattaaaagcctagagggcaaaggccgcaaagacccagaccctcgctggtaagagactggcacagtgaggccctttggaaacgtcagtaaaaaaatccgttccatgcaaactggcactgcctcgagctacaaaggatcccctcccctgagccgcccactgggggttgtttgcaagggccgggggattctcggggctgttgagggccagttagccagagagttgggccggggcgccgggcacctttccttggcttcccgctgcccagccagcctccagagcccc

SEQ ID NO: 31716 - DNA, 1410 bp, Bovine  19866880453077
  misc_feature (1)..(1): n is a, c, g, or t
ncattttcttttaaaaagtttttaatgaaatccccccagttaagccacatgggcctagagttttctttgtgggtaagttttaaatgatcaattcaatttctttaacagatattgggtgattcatatttttcactcctttcttgagtcggtcttaggaagttttgtttttcaaagaatttttcaatttcctctggtcactgaatttactactataaactagagtcaaaatgaattgctcactgtatttaaatatcgatttatttttgtctgtgttgggtcttggttgcagcatgtgggacctctcattgagcatctttggttgtgctgtgcgggcttctctcgagttgtgatgagtgggctctgtagttacagcaagcaggcttagtggtccctccacaggtgggatcttagctcccagatcagggatcaaacctgcatcatctgtgttggagggtggattctgaaccaccagatcaccagggaagtcttggattgttcactttaaaatattaatgtgacctttacctcgataaaaatgaacaaataaaaatacatcatggattttctagttctagccatgactcagtagccgttatcagccttaacttcccactctaagtaactataaagacaaacagtgatttcaggccttgggcaagggcttagctgctaccctgacaagacaggtagcacaagaggcaaaccccatattcatcccagctttcttccaaggaaggtggcttccaagcttcagctagggtaggtgcagcccaagcacagaggcgcagctgcactgggtagaaaagcaggggttttgtggaggaaactgaccagagttcagagctgcagagatggtggaaactcaagggtatggagcagagaaaactatagaaagggatcccagaaatctataaagtggttctcttcagggacccagacaactgctatgctaagctgcctatccccagggtgaccattcgcaaggctgctgggggctgagagtcagagctttccgagacttgagaatcctggaggaccccagtattggagtgctgactcagctagagtggagaaacacggggcattcaatggggagcccaggaagactgtttcagggataaggaccatggcccaggagtaatcaaaatactgtaggattaagggaaaggccaaaatagacccaccttagcaaagacccaaaccaagcgtcaacaaggccaaggtgacccatcaaaaatgtaacagcctgctaaaataaaatttaacactctgtagcaaaagacttgaaaaccctatgttacatcgatcgtaataccaagaatgtaatgaaaaattactacccatttttctatgcctataaatattcttgacctttgttctgggattggggttaagttacttagacccagt

SEQ ID NO: 31717 - DNA, 1847 bp, Bovine  19866880465309
  misc_feature (1)..(1): n is a, c, g, or t
ntgtatgtaattgtttcaatgactgaactctgccattgcagaatgaaagcagccatagccagtatgtaaacaaatgggcatgaaggcgttccaccaaaactttaaacaggcagtgggttagatttggcttgtggattgcagtttgccaatccctagctttgatgatagattcacataatccaacattcctaaagtacaaacagtgaaaattattcctcccattcctgttcccacaccactgggttccctccttagaagcaattactattaagaggttttgtatcccctttcagagacagttgataaagagcatatttttaagtgactgtgtagcattccaatgtgttacagatagtttaataaatatgaaaggacttaacatatctgaagccatgccctgaaaaaatactaggagtgttgccctgacctgcccaattgactcctccgttagaataatcctttgaactcctgggatttccccaggaattttaggggacatgcctgatgaatatgttgggtgatcccttttggatgtaaaacaagctctgactctcaagggatgcaagattttccaccacagaggagatagagatgcaacctgtggatatctattctctctctcctgtctatcaatcgtcttatctattcatctgtatttattgcaaggaattggcttttgcagtggtaggggtcaggttggcaagtctggaatctgtagtgcaggccataaggaaggacaagctggaaacacttgggtaggagtggaatttcttcgaggaaacctctaggcctttcagctggttggatcaggtccgcccagattatccaggaattttttttttacataaagttaactgattgtagatgttacaacatctacaaagtatcttaacaacaacatctggattagtgtttgaatatctaggtactagagcctagtcaactgatcacacataaaactgatgatcacagattatatccagtcaacctgacaccaatacacatctccttaaaccacatttaatctccttataaagacagtaaaaaagtcatgcttccacctaacatgatacatttatcctgtgtatgactgaaaatatactaacacttcccccaaaagaggaggccaagtccttggatgatgttaataatcctgtaacttcactctgatgctgggagggattgggggcaggaggagaagggggacaacagaggatgagatggctggatggcatcactgactcgatggacgtgagtttgagtgaactccgggagttggtgatggacagggaggcctggcatgctgggattcatggggtcgagaagagttggacatgactgagcgactgaactgaactgaactgaacttcactaatgtaaagttagcttttattaatacattttatattagatggcaaggagataagagagggaagaaaaaatacacagacgtattcacgataaaataaggaataaatactcatacagtcctcatttctgaaattggttaggtggtcataactggtatttacaactactgtcttctgctgtccactctgtatttcctttaccctcagcaagcacctcattactggttgtgtgttttgtttttgtttttgtttttttcctggtgggatgcccccaaacatccattcttgaagggtttgtgccattagaaatcttgacttatggattgttacagtattccattgactttagtcacaggttatgatagtgctaagagatgccctaaggggtctcctgtattccagacatgctttcccttatctctattatgtggtcgcagccccctttcccctggagccagtatcaatccccccagccag

SEQ ID NO: 31718 - DNA, 876 bp, Bovine  19866880520146
  misc_feature (1)..(1): n is a, c, g, or t
ntgactgcacacgctctgagcccagggcagaggctgcaggactggaaagtcttcctggggagatggaggcaaaccatggcctcctctttggatgttactggttccctccctcccctcctcatgaagctgtgccaataacctccataccaggaatgccacctctctcaccccacctgccctgcacccccttctccctttaccttcaccaaccagaaggacaaatgccaaccttcaccaggaccaaacgtaccccctcatctgcagaccgaggatctcaaggtccgaatccctttccataccatatttcatttcccctctggccatgcagatagggctgccacatgaacctgtatccctgaaggtgagctggaaaaggactctaataagagtagtgggcttggagaagcccggctgttagaccttttgaagtgaggaaagacctgatctattcaagaaccatgaagaagacgaggacaaggaagaactgtaagactcctttcaacctggattctatcctcgttcgctacagttggacactatcgagagagatctccgtcgggaaggttacagctgagtgtggtgacccagttccgggctaggggagcgaggagtgtgaggggaggtggtggtggcggatggcgagaacatggatccaagcccttcggcaacattgaaaatatggagccccttctctccctggcccccaggctatctatcctgcagacagtcgtgctgtgccgagccgtccgaggccctgtaatatcaactcaacaatgcatgttctacaactacggctacggctaccaggacatctactacagtgcatgcatttagttcagtcccacagaaacatacagtctaagaacaggcaggggg

SEQ ID NO: 31719 - DNA, 1773 bp, Bovine  19866880542135
  misc_feature (1)..(1): n is a, c, g, or t
nggagaccccagttggattcctgggttgggaagatcccctggagaggggataggctaccaactccagtagtcttgggcttccctggtggttcagctggtaaagaatctgcctgcaatgtgggagacctgggttcaatccctgggttgggaagatcccctagagaagagaaaggctacccactccaggattttggcctggagaactccatggactgtatagtccatgggatcacaaagagtcgggcacaactgagcgacttgcgctttcccttcactttcctcctggctgagggctctctgcccctctcagctattctcttggtaggatctctgactattctaggcatccctctttcactcactcacaagctctcatgtttaccccaacaactctgtgagtatagttactttccaaaagtaaactctaccctgccatctttcttgctgttttggtttcgcagtccctccctgctttctagcatctccagggtgtggtatgaggtggtgggagcagatttcttcaagaacggactgagacatcactggggactcctgcaggatgaggcaagtgccaaagaaatttggaaacttggactgtatgtggtcttgagcaatttacctctctgagtcttggtttctacatctgtagaatgagaacaggaagccctatgttccttatagctgagatcctatgaagtgctttttgagaaatgggtcataagggtcaggaattggggactgttgagtcccccccaccctggactgtgtggaccttgacgtcagacactgagtcatgttgtttttctcctatctcaaggcgagtacagtttattaggtggaatggtagtgctgctgcctgtgtctctttggaacacctgcggtgtggatttgctttgcagagttgcctgtttatttcacatgtgctctctgtcaggccaaatccagagaaagtgagggcaggaccggtgcttctccaacttcatcacatccgagatatcctacaccaaagccctttcgtattgatgtggttacctggtttcattttccaaggtatttttttccaagatgtcgaacccagttctctttacttctgcttttgctgtggcaccagttctcatttctgaaagttttcttgcttttcccctcactccttcaataatgttgttttcatcttcacttgcctctgggtttttggtgtgccctgtgaactgtattcacttgctcagacaggggtgtggaggaagcgtaggccaggaaaccctagcaacctccagctaacatgcgggagcctttcactttgtgattactgcaattgttgcctagtggaacagtgagccattagctgggttctcacccccctattagcgttaccctgtaatttaatcacaattagactcccagagacatagacataggaaaccagtaggcaaaggaggtagatggcagaaagtaacagcagccagggcttttcatcaaaggcactgttttccgaaggtgcagggctaaggaagagtgaggtcggagcttggcaggaggcgactgggtaaacggtttaaaggacttgagttttactttctggctttgaggttgggagtctgtgaacattgatctcatgtgctgggctgaaccaatttgtttaatagcaatcgaaaaaacatcttgaaagatgaccccctgcacccttcaccttctctccttgtggtctgtgagaggaaggtctcagatgaggcctttcttcatctcacctggtttttctccccttgtgtcccaaag

SEQ ID NO: 31720 - DNA, 702 bp, Bovine  19866880579973
  misc_feature (1)..(1): n is a, c, g, or t
nctattgtgataattaaatgagctttgcaaattgcctattaagctccagtaaatggtagctattacagtcatcattatttcagggggaagacatttcatagcctagactctgatatttacgtgtggaatcagaatccctgagcaagatgtcctgcctgcctttatgtaagtaaactgcatctccaggatagacaccccacaccctttaacgcctatggcaagtgtccattttatgaattcacaactgctctctgatgaacacgggggtttgttttaagttaaatgggaaaatgaattaaaggattcgtttaaagtgaattaaaacataattaaaagtagaaaaaaatagggccagtaaaagagtcttgctaatggggaaagaacattctggtcatagtaggacttaggagccttcctgaagagtttaagaaatgtccttaatgccactgaattgtttatcaaaaaaagtggttaaaatggcaaatgcaatttctattttattaccaaagaaagaattggggagaaattaagcaggctgtcttgttgcttatttaaggcatgggcttgagtcaacatagagaaaccttcaggtggatgcaaactagaattttctgagtcttggaatgaaggaagtgcctagcccactcagcacctcgctggctgcagcctcccaggagtcagtggaccaagcaggggtttggg

SEQ ID NO: 31721 - DNA, 2202 bp, Bovine  19866880590053
  misc_feature (1)..(1): n is a, c, g, or t
ntgctaaccgttcatagcaaaattaaaaaaaaaattatctggactgtttctaattccttacctcctgttctctgtcacataccccatcagtgagactcgtgtccctaccatgacagtaaaaccacatttttcaaggtctccagggacttctgggattcagtggtcaattctctgttctcatttaactcatcagcaacaattcaagtcatttgatcattcacttcatgaaacagtttctcagttgcttccaaacaccagagtttttcaatcttcctcctacttcaccagctgttccttttccattttccttcctggattccctttcccccttttcacaagctctaagactggagtgctccagggcccagtgtcctactcccctcctctctttaatgccttgcctttctcttctcctcttagtccttcctcctgggtgcttatctagccccacggctttaacaccatccatgtgctccgggagttggtgatggacagggaggcctggcgtgctgcaattcatggggtcgtaaagagttggacacgactgagcgactgaactgaactgactgatatgctgcagaccccttatttatgtttctaatccagagcctctccccagagcccagtatgaataaaggcaacttcctctctttttagcatatttctctccacctctctgcagtttcaccttcttctcctggtatttggcttattcctactcaagggtgactggtaggattaaaacattcaatagcgttcagcagtgccttgcacagaatttggaaatattcatcaaatataactaaatgactcctttcagggcaatatttccatttggcctaaaggcaaagttgtaagtcttcaatgatgaaatttcagatatgagcagatatgattttattctaatcaggcctgggatggaaatgggggatgtgggtagatttttttggagtgagaagctttttcagaatagctcagatcatgctgattgctggctcagtcttccggtggcgtgtactgggtatttctctatcttttttggtcttgtggtcagagtaaggtaaactggccacacagtgcagcagagtcccaccctgaattttagcgcttcctgtctggttggggttgtccctcagttaggtcacagtagtgacaactggtgtattcattgtcactgagcttttcagagagacactgttctttagccactgactaaatccttaacttggcccaaaatggtattaataggtgttccagaccaaaggtacaagttagaccttgacatctggctgaatcactattgaaagttttacatgccagaacctccataaaataagagtgtaatcctccttcacctctccagtccatagcgatgagagtccatgaggtgataaagctatataagacaggggccctgaatcgtccaggtgctgtcactccaggcaatgaggagagctggatgaaggagctgtttataggctgcagagaagcaacaagggtaaggaagccaggaaaggtggtaagacactcagggaccggcaacaacaggaactcactagcacctccaggctgcaggggaaagtggggagtagtgaccagagcccgccggaggagagtagttgggagagggcctagggttggagcctgggccaaccatcaatccagcaatgggggagctggcagaataaacatcccaacctctgccttcccatctcttgtcaatggctcccactggccaagcccaacaaggaaccagagggcaagggatgctcttgatacagacccccacaggtcagcctcctggacctcacatgctgtggggcaactaagtctatgtgctacaactaaagagcctgcatgcctgtccaaaaaaagagcaaaagacagatggaatgtgtgatggttaattttatgtgtcagtttgattgggataaaggatgcccagatagccagtaaaacattatttctggatgtgtctgtgaggatgtttctggaagagattagcatttagaatcaatagactgagtaaagaagatctgctttcaccagtgtaggtgggcatcacccagttcaactgaaaagtgaaaaagtggaggaagggcgaattccccgtctctttttgagctgggacgtccaccttctcctgcccttggacatagtaactcctggttcttgagcctttggactccaggagtcatccag

SEQ ID NO: 31722 - DNA, 1708 bp, Bovine  19866880626512
  misc_feature (1)..(1): n is a, c, g, or t
ngtctggaagtctgaagaactccgctctgcctttaaccgcagtgtgaccttggcaggtaccagcctccctggcctttcagtcctgatttgcacggaggcaagaagattcgaccagttcacaaatctcaggcgtggggcccaaactggacctgccgacaggttttgtttagtgtgtgcactggttttctatttgaatgcattgccaacgcttaaaatagggagcgtttgggtgaaaacccaggtctccagaattacatgaaaaacgggaagatctgatggatttggacttcccttcttatagggcaacgtgagcaagggctggggccttgatgcccttgggcaagcttgtgccccccacgagggctcacattcagcgtgctaccctggttcacatcttttcttggcccctccgggtaggttccatgtcaccaaagcctccatccatctgacgtgatgcgagtgtttcatcgcttgcctgttcgccactctttgaaagggctggaaagcaccgcttgcattatgactccctacagcagccgctgtgggtgggcttccgaagtaccgagtgtctgagtcggacatggaaccgtgagaagaggggagctggtgctttgcgttgctgtgccctggctgtttggtcttgtcttgttgcttctgctgctactggtaggcagaaagtttggagacagcttgcaagacgttctttttcattctttttcagcatcagttgaccctcctgtgaaagaggacagaagcctcggggatggatggaccctggtgtggatttccagaattccttttggacacatctctgcctgttccttttgacaaagtccttgcttttcagagattaattgttgtcagatgcaacttattttctaatccttttgggctccattttaaaccttctgctttattttaccttttctgataaagtcgctgagattcggtctttcttttctcttacggatttgccaatgattgtctgctttgacaaattggattcttaaagccgattctttgaagaaaaggatgtcgtgtgacaagacaagaaacagctcatcctcaaatcgggaggataaataaaaaaataaaagcaaccccattctctggcttcccagtgactcaaagggtgtctcagctgtcactgataatctaatctttctatgataggtgaggaagaggacaatggtgacccagccaggctgtgagtgtgataggcctctgattaatagcactgtccaatacctccccagcccccaggaaggtgattaatgacatttgacgtgaactctgacctcccccggcaagaacagagggagaagacagagctgctcagacaggagggggtcctgccgagcctgattgattcctggaggctttgactctgagggggagaagggggtgccgggggtggtctggacacccttgctccctgttcctgggctccggcaggcaccctagcctagcagctttcacaatgaccatctctcccgtggcccagacttttcactgcccctataacactgcgtctcacaagcaattccctgcgaagccttggccgacctccactgacctgtcatccctaacccatgaggtcatttcgacccatccccgacccaggtgccatgaatcaaaccaaggaggatttttgtttttaatttctgctctatttttaaaaagaatacttatttttaaatttaattta

SEQ ID NO: 31723 - DNA, 3838 bp, Bovine  19866880636065
  misc_feature (1)..(1): n is a, c, g, or t
ngaggtggcagaaagagccggccttcctgaccccccaccctcccccaactcaactctgattgcccccagcagccagaaagagatgcttaaaacactaacatgatcccgccaccctcgtgcttgaacccctgggtgcaggataaggtcagagctccttggaggacccacgagggcttcctctgtctgccggcctctcagactcaccaggccttttcacacttcctggagttctctcggatgggcccccgtctcctgcctccaggccttgctttgcatgtgctgttgcctttgcctggaatgccctcctgtcctccgcttcggcagattatagcttggacctcagctcctctaggctgccttccctgcaccctgccctgtgtctatacctgcccccagactctgatctccttgggaggtcagggtagcagggtcctcgtttctgtatcacacacggttcagcacctgtctgcttcaggtggctcctaaatgctagaaatgtacgtctcggatggagagactgcatgaggccctgggggtgtgggtggggggtgggaatctgggccatctgggcctagcagggccagcccagagcaaagcgacaggtgttcagaggtggggcctgcctcttctgcacaccagcctctgagagcagccttaaccctggtctcggtgttcaccgtcagagctgacttcagaggcccactgtgcagctggggtgggacgtctgctgacacgtctggttcatacctgggcctgtgctaagtcccccagcacagcatctcattcaaccctcaccagagtgccgagacggggatgagtgttcccacttcacagatgaggcaaatggagcccagagagggtaggcagtgagccaaaggcacctcaagaatcagaagttagacggctgagggagggggaggtgggggaacacggcctctgtctgactccacaactcataggctctctttcctggatccacccccagcccagcaaaagccttcctttccagatcaggcccctgaacctcaggcaagggcagtagctcgtccacagtcacggggtgtgagtgaggcttctggagccttggtctagtgtggaggtctcttcgtccccaccggggctcctatcatgaggctgcatggcctctgccctcctccacccacaataccgggggagggggagaaggatgcagctgggatatccatgcccagtttacagtgggatactgtccctgatgggctaagttttccattctgaaaaataggtagaactattctgcccaatagaaactgaacttttttttttttttgcaaaaccatcttggaatattaaaaaaatgtcaaaggaaaatcatttagccctggtcatcgtgacccatcctgggctgcaagtcctacgaagatttcacccagactatccacttatgcctccctcattacagcctcagctctgcttctgtccctgacttcaaacaatactccccaccccaacaacttcacaggccactatccgctccctgagctacaatcacagaggtttttctcattaggggatgacaggacacaaccgaggatggcattcattggctctggagtcagaatgacctgggttcaggttcgagctctgtggtcttagggaagttacgaaacctctctggggctcagtctcctcatctataaaatggggatgacaccagtgcctgcctcacagctgttagatggtttgaatgccatcatataggtaaagaaccttgccattttctggcattcgaagggtgcttaataatggtagttgttattgttagctatgcctgaatgatcacaaagttttccaccactactgcctaggactcccaagatccccagaaggcaagatcagtccccaaggactgtcccatcagtccccctacccctccccatcccaggcctcagtcattctcaggacgagcagctccaggacaaagagaagcctgggctccaacagccacctcaaacgcttgttgttgctatttagtcgctaactcatatccaactctgcaaccccatgggctgtagcccgccaggctcctctgtccatggggttttccaggcaagaatactgcagtgcgttgccatttccttctccaggggatcttcctgacccagggatcgaacccgagtcttctgcattggcaggcggattctttaccacctgagccaccagggaaagtgtgttagtcggtcagtcgtgtccgactctttgtgaccccgtggactgtaggctgccaggctcctctgtccgtgggatttcccaggcaaggataccggaagccccacctcaaatgcagagcccagaaaaacaagcacttcagagaccagcttcatgttaaacttctaaattacagagtccctgacctggaaaaagtctccaggcacctagcagtctactgttctgcttctgcttatcaaattaccctagaaaaagagacttacttgctcatccccacaatctccctagaaccccaaatcattgattactgacgactgtctgggagtgagcgctgtgttgcagaggattctgaggttccggcttacctgagccggcaagagcacggtgatcagttagtgatgtctgccacgggcacaggaggggaagcgtcagtacacctccagctgtctgtcatccccactctgtgcctccctcgactacagactcccagaaagtgaaggctgagctttgtttaactccatgtcctgccgaatgttcagcacagccccagcccagagtaggaatgcagtggctgtctgttcttagactccttagagcttgaaaattcttcttgggttctagctaaagtgtgttttgctgcagtagaagcctgttctgggtggaatacggagggaaccagccaaggtgccctctgggcttgttgtactcaatcccaaccctgatcttcctcccccttgccctgcactctcgggggagattcttaccggggaggtggagttgggggagccagggggtaaggcctgtccaacacgtgcatgtggtaggcaggtggggagtacacaggcgggggctcctcgtcagagctatcgggttccaaggtcctctccaaaacctgcatcagagacaacaaagaaagaaatattaacaccccttccttgaactgaaataacatgtagacaaaaaatcaagtgtgggcgaggatgtgtagtcagggaactccactactgctggtgggggtggaaagtgatacaactactgctctgcaaaactgtctggcttcctgcactggcactcagcacatgggctaccttgggagcccacgattccaacacacacagcagacgcgaatgcacacgtccccggaggaatgctcagagccatccaaaaaaggttcaaaaccaggcaaaacaacttcacagggatggcaggtggagcagtgtgacctctggggatggggaggctgagagggggcatgagggggattccaggctctgctgatgcttcttgacccgggtgctgatgaaccttcactgcccacttgtgccttgtgaaaatgcttctgttcatgtgttacttttcgtaaatagctttaacatcattcctatcttctctcaaagaatttccacatcgattaactcaccttaagctcaaacaacttggcaaagtaggttatggatcacccccattttacagatgaggaaactgaggcacaggctgactgatgaacacggcaaaagctacacactgtttctagaactgagtctctaacttggatgtggtgtctacagcaggagtctctccttcaaacacaatgcggcatgcccaggtggattctcagggcagagaacag

SEQ ID NO: 31724 - DNA, 701 bp, Bovine  19866880668962
  misc_feature (1)..(1): n is a, c, g, or t
natcgacacgcgtctctgtatccccgcacaggctgcatcgggaggggaaggggctcggcgagccagctcgcacacctgagcctccgggggccaggggagtgggggcggagcagggagcgatctcaagtgtgggggtgacaatgtgacagaaacgacactctccctccaaactagtgccgaggagctgctcaagaccggacgctctaaattaatatcaagccacatgggtgccacttgccagaggggagccaatttctcaactggaaaggtgcttttctttctcgttctgcctgaggatgctctagccaatgcctgaccttgaaatgtgagcatcaaccttctaaaggtcggatgctgaccgtgaaccagcaagcatttcattaaggcttcggtacaagtaggcttttcatccggccaccataggctcaggaccatctatggaggtcccgagaccataaaccaaactgggggtgaaagtgaacggtgctcctaacccagtgtttctcagtgtggccctcgtggtctcctgctgggtgagggggtttgttagaaatgcaggcccccaggctctgtctgcctccaaatgggggcgctgtgggtgtggcccgggaatctgcatcttaactggctctctggggattctgatgctcccccaagtctgactctgctttatgcttccccattcaggatgagccaagtgg

SEQ ID NO: 31725 - DNA, 1665 bp, Bovine  19866880674132
  misc_feature (1)..(1): n is a, c, g, or t
nctgccctgattggatttcccgagggcctctcccagcaaatgttttagaagcagagtcgactccaccccctgtgccttccccgcaggaattttgtcatcttgtctaaaccgactttcagctggcgcttagtctcttctccgccccagaggagtaaataaagaaacaaagcaatgctccttgtgcaccttgggatctggccctttcaaggaatctctttgtcaagcaaagaatccttttgtaaagtgaataatgactcactttggacttcggttgggattttttgttgttgttcagggtctttctcaagagtgggggccaggctaatttgtaggcttgggggcgggcggggcggggtggggtgggggcagggccaccgagtcctcacagcagctgaaagcgctctcggtttggctgctgatcttctgattacccttctttcttccagtgtcttcctgtcagggctctggcccatcgacatcgatcacgcaagcccggaaggtggtgacggtttgtgtttcttgctctgttttgttcctttgcttcactgatcgcgtctccatggaaacaggcgcagcctttgtgttcctcttgctttgggcaaatcaatgccaactggggatttttctttgctctccaccttctttgggatcaaagggaaaggtgggggccaggcaggaggacctgcagcgtcctggagctcctggagtgggggactcctcccccagggaccatagggtcagtcctccagtcggggacccctgcctggcctgacctgtgttgggggtgcagtgagtgtcatgaggtcctgggtggagcatgtacgctgtggtttatggacactcaacaccccaccccgggccccctcgacttcagaggtggctactggccactgggaacaggaggctggtaggaaggccgctcctgctggcaggtactttgggtgagggctttaatctttccagggcttggtttctcgcgagagggtggagaggttttgaacccctttggtcctgggaccccttaaggaagccccacgtctaggtaaactgcaaaatcactgtcatatgattgttcgatggtgaatagtaaattctgtgtttgattcaaaccagtaagttgtgtagtttgacatgaaacttcagaatcaggaacccctctctagactagactgaacatcccgtgtgtgatccaggccccccggccccccgcccccagggtgtccggcgttccaggactgatcgtgacctactaggggagacttctgttccaggccaaggcaaaagcgttggcctgagcaaccagggaacaacaacagatgggctctgtgtcctcggagacctcccagtgggcgtgcccacacaggacggggcttcctgagcgggttgcctaccacactcccatggtcatctcggtcactgctggcttgacgaactatgttattcaacaggcgaaacaggaggcttctatccatcagtaccacactcgtgccaactttatactcactgactaaaactgccaactccacacgtcatttcaatatcagaactttctaccccatctgtttgtcaaatttcgcaaagcgttttttgaaaaaagtatttatttattttggctgtgccgagtcttagctgtggcatgcgagctcttcattgtggcacatgggg

SEQ ID NO: 31726 - DNA, 1799 bp, Bovine  19866880688733
  misc_feature (1)..(1): n is a, c, g, or t
ncgtctgtggttgtttttggctgcttggcacttgaaacctctctctgtgtttgagtctcgaaaggcctccctcctgctcctgctgagcctggctgctgggacagaccgtgaacctgggctgggccagtggaagtctgccccaggggccaggagggcagagaaggagggcagttcagaatctgttctggagtcagcagcacacagagcccagggtccactaataccaacagctgccccctgaccacatcattcttcagctgtcccttggttggactgtggctgaccgcctagctcctcagttccttcctgtcccccagccttcctggcagttctgtgcattgcccaagccccttccaataatctcctttactgctgacaacagtcagaggtatttctgttgctttgtcaccaaaatgctggtagaaagctgctctgatgggcgggtttaggacagtctccactccctccagccataaggatgatagtgacaggtttccacatgtatccccgtggctccaaacagcaacgtaaataccctagacaggatctggggggacatcatctgcctttaaggtggcttctcacaagttacaagcattttctgaccctgtaggtgatggctgaagaccaggaccattcatgaaattccagcttgggagcctcaacatgagttagggttggcaggtcttcctgctgcctgctctgagtgcttttatgcctcatgtgtgcatgctaagtcgcttcagtcgtctccaactctttgcaacccagtggactatagcctgccaggctcctctgtccatgggactctccagacaagaatacccgagtgggttgccatgccgtcctccaggggatcttcttgacccagggatcgcacttgcatttcctgcattacaggtggattctttaccgccgagccactggggaagcccctcggaggttcagaagtgggcctcacccttcctcacttctctgcttattggagtcacagcttctgccttgaccggaggatctgtcaagagccgggacagaagcttactggactgcacatcaggaggcgggttctccagccctgcctctggcccagggccatgccatggggggtgaccccctttccttggggtgactgagtcgtgccatctgtagggacctttgcaggtcccctgcggtgctaattctcaccagagaccccaattctcaacagaaaccagtggtggctcctttcctttgctttggccagagcctttctaaatctgccatcgcaactcactggccaatcgatcaaaacctgtttacaccccaaaagggtcttattgcttgctctttccccatgaggtttttctcccagcacctggttcctggttggcagccggctgcccagaccagccagggtgacctggcagctttaccctgactacagaggaacagaccccagtgagtccgctgagctctggcacccgacgggcaaagggtgacagagatggggacttgggtgcctcaagtggacacacacacactggctccttccttggtatctatttcatgggtggtctgcccaagtctcctccaaattaatcacctgctatcaaatcagatcattcagcactagatttcttaccattatttcaacaatattgataagtggattatatgcaaacagccaaatcaccactgctgaggggttttcctagtgaaaaatggctcctctgcctctaactttagcactggggtcttacatatttcagtgttaacatgatggcaaattacaagcctatgtgtgaccgctgagactccct

SEQ ID NO: 31727 - DNA, 1075 bp, Bovine  19866880703738
  misc_feature (1)..(1): n is a, c, g, or t
ngccccacgcccttccctgcaaaaccggggtgccctggggccataaaacacctcctcaggctcggagccgggcagcagggcttctgcgggtgtcggcacccccagtcctgtccccgtctcggggactgcatctgggtaacactcttcagctcacaggaagccaaccctggggcagccagaacccagggcccactgggccagctcagtgctacccagagacgcccccaaagggaccagccaaagggaagcatgggacagctttttggtccacaaagtgtctgcccgtgagctgctgcgtctgggaagaagcggcatcagttttccaatgccaaggtcggttgtctggctgttctggcccagatgatgggatagcatctgcccaacggaggcagggggagaagacatgcaatgcttttgtgcccttacacttgctgatcccttgatgtggaatacccttccttcatctcctgcctggcaaacttctactcatacctgaaaacccatccagatggtactccttcccgacagctttccagcagttactcctcctgcgcccccgcccagtcagaccccagagggatacgtctggccacttgtgtgacacccctgcagactctgacttcctcactgggcttaggatcccttcctgacccccagagtgggtcctgatgtcacggtctagcccaccgcacagactgccctctgctgttccacccccagctgaaggcgcaggagcgcaggtggtgactgacaccattggttgcggcttctcaggggcaggggatccaagcggacgcggactcagggcaaagttctccaggcaggactctgcgctgccttttcaggctggggggaggggacagcgcccctcctggccaccctggcttggaggcacgagctgcccacccctcaggcctggcactgccgtctgcccacaacctcacactctgtaatttgttgttgctgttgttttgggtttttttaagctgcagtctttcattggcttttgctgatggaaattaaaactgaagggcttgaagaaaggtgattatgttcctgctggcgggcttactgg

SEQ ID NO: 31728 - DNA, 1016 bp, Bovine  19866880707492
  misc_feature (1)..(1): n is a, c, g, or t
ncccccccccaccccccacacacacacccagaggtgaggagttccagccacaggtgcccagggcaaggtcatggtccagagaagatttgcagatgttttccctgctaccactgagggcagatgggcccagggcagagggaaatgccaaggataggtaggagggagaaggctgttgtgaggagcaccccctggaattcaaggaagtgcatggaacccgtattgtctggttcttcaagatggacgagttgtagtccagaactggccagccccagattcaccttgaacttcaaaagtcaatgagaaattacttttacagtataaaaaatgttttttgttgttgttgttctatcatggaaaataaaagatttaagctactaaaggggactgaagaagagacacagttaacctggttgacaagctgtggtcctcgctggggcgggaacgatggaacttggggagagtagaggcaggggcctgcggcagtgtctcctcaccctgccccctccccaccaccaatccctgaggaacatgtgggtgtgaagtctcgtttccttgtagcaaaggcccagtcctcgttcttctttctgatagtctggagtctatctgaagataaccagcagaacgcaggcttttcggtcagatacgctttcgtggtaatttggttcagtcagtatgctctgaattcatacttctttgtctttttttttttaaacaaaaggaaaaaaaaaaagtttaaatccccccctttccttctactgcaggaggtgagtgtgtgggtgtcctgtagcgtcattggcgttcaccagctttggcccagaacctccagattctccatccccaccccatccctccctccatcccctgctctccaccccaaaagggaaccctctgccaccatcattacggttatgttaagatgcccaagtcttccatgacatatcccatcctccgaccacgctcagtattgacgactttcattcagggatataaacgggaggggtggggagggagggaat

SEQ ID NO: 31729 - DNA, 1285 bp, Bovine  19866880714721
  misc_feature (1)..(1): n is a, c, g, or t
ngtgatgtgtgggcatgtaaaaagctgaggaatgcctgctagaagactgttctgcgaggaggcacctgggagagtgtcctcttttgagcagcataggtgctgtgtttgtagagggctttaggacagtgtttctcaaactgaggtgaaggaccggtggcttatttcatttatctggggacggatatgtgccccaatgaacacgaccatcacaagtctgacatgtccaggctgatctgtatgctttctctattcagagagacaagtctgccgtgacacgcttgagtgtgtaactatcaaattgctggaacttctctaaagccttctttactctctcttcctgtacttatctctccaaggacctacaacaaacagtttggtctgcagatctgctttaagtgatcttggtctcaggtcccatcttcagggtcagacagacttgaatcctggttctgttacttcctcgctgtgtgtttttgggcagctgtttaacctctctgagtcttaattttgttgtctgtaagtcagagataataatccccatgcctcatagggttggagttaggattaaatgagaaagcgtgggtgaagcatggaaggtgtacttgataatgtgctgtgctgtgctgtgcttagtcgctcagtcgtgtctgactctttgtgaccccatggactgtagcccgccaggctcctctgttcatggggattctccaggcaagaatactggagtgagttgcagttgccatgccctcctccagggaatcttctcaacccagggatcaaacccaggtcttccgccctgcaggtggaatctttaccgtctgagccactagtgaagccaaagaatactggagtgggttgccatctcttcctcaagggaatgttcccaaaccagagactgaacccaggtctcccgcattgcaggcatattctttaccatctgagccaccagggaagcccaagaatactggagtgggtagcctatcctttctccaggggatctttccgacccaggaattgaaccagggtctcctgcattgcaggcggtttctttaccagctgagctaccaggggagctcatgcttgacaatattggctgtcaaatgtgggcaacagcaccattgttattggttgctgtcttggagcatctgaaaatgaggacagtggccccagttaaggggtaccattggttttaaaaatatgtatttattttctttggctgggctgggccattatttgtggtatgcaggatctttttagctgcggcatgtggggatctagttcccag

SEQ ID NO: 31730 - DNA, 755 bp, Bovine  19866880716654
  misc_feature (1)..(1): n is a, c, g, or t
nagcctactgttcctgctgaagtcactcaggtccccaagcacctctgctctggggagggtgcccctgagctcctctgtgtgtgggccctccctctccaggcttctggaatgacctccctttccattgcctagaaacccccactcattttagagggtcctctcacacgtctcttcccctgtcttggagcctctctcacgtcttcctttttttcgagcagtatcagctctcacgtttccctccgtgaccctccactggttgctttatgattgttgacatgtcatttcccgggtccttcttggaccggtcccgtgtgctctgctggaggtttagacactgaggacaggactatatatgtcactgctgtcctgtagaactttgtacaatgaaatatacattccgtgccgtccgatgcgtatggcccctgagcatttgaaatggagctcgagcagctgaattgttaatgacaaataatttaagtgtaagtaaccacatgtggctagtggctgtcgtgttggacgttgcacatgtgtggttgtttatctgtattttcagaaaccctaggactgtgctctgcatgcaaaacaagcctcgtaagtactgctgaaggaaacaggaatcactgaggtgtggagttatattagctgtgtgttctttgcccattttccatgcagtttgatttttaagttggattcggtggtttatatacttgagcaccaccaatgctttggggcatacaaagatgaataaacatggt

SEQ ID NO: 31731 - DNA, 1126 bp, Bovine  19866880727942
  misc_feature (1)..(1): n is a, c, g, or t
nccactctcatcagcaaggtgcgccaaggcagcctcccaggcggcactgtttggggagaaagctgatggtggcagcagcagctgttcttctcatttctgggaacctgcaagggcatttcaaagtgaagagaaacctcagcctccagcacgtgccccaattctgccacaagctaggtgtttatcctcgttggtgtgtgtgttgggggggtgctctgccagagacgggggctgggcccagcttcatttctcaattcaagaaaagcaaagcaaagcgcggcttgagcgtcggctcacgcgtccccgggaagccgggcagagcaggtgagcagagtccaaggaagggagcagcctcctccaggctgcgggccctccccctgcacccatgggtggcgtgtgcaggaaggcggggccagcgcgcacggataagccggaggctctgggcacctagacaccaagaagctgctccgcgctcccccgcccctcttcagtgacctccccagaggacacatcaagggcaaaggagccagaactcaggcaacgggacgccacctccctgcaggaaaaatcacttctgcctaaacagggacgaacatttcccacccaaccaccatggccctccccgccgcccccacctccctcgacacagagcgccctctgctcgcgtcaacagagctggtgcacaaacagcgtatgcggatgggtcgcgcgcatgcgtgatgggctggagggttgggggctggggggaggaccgctccctctccagcgtaaacacaagattcatttattaagtgcctctctggcatttcctgttgttgtttttttttgccttcatcctgcttgtttaatattgcatttgacattctcattttataaatggtaacagaagcagaatggatagctaaaattagcttacgagtgaggacgatgctgcaaatagggtagtgaacacagaagcccagttaattccatccgcccctcctctccctccccctcatgctggggctggttcccagtggagctcagtcctcaggctgagggcgggcagctggagggaggcgatggtctgggtctctgcagcaccctggcagggtcagcgcccaccccggcctggggcctcctcggattc

SEQ ID NO: 31732 - DNA, 1507 bp, Bovine  19866880738229
  misc_feature (1)..(1): n is a, c, g, or t
ncataactaagcaaaactagttatctaatttagttttaattcgtctgaggataattccttcatatgtgaagaataaacgtattccctttcccatctaaagaataaatcagtgacaggtagagagtgtgtgtattgcaaccccccaggattcttatttctgggactgccttttacctgatgctttggacgcattttcactggcttgaattgagtacttgccatctgctgtcagcattcactgctgaataaaaggggaggaagggggagagaaagtgaaatgagagattgtggggtgggtgaggagtgaggaagctggaaaaataagaggaaacagctgggagctaggaagttgtggagggacttaatgtaaggtcagtaaaacagcttgcagaggacagggtcaggcctaggggtaaaaggctaattaacttctgtcaactagttgagtagagccttgtgtgctttgttttggagactaaaattacttcagaggaaacatctagattctctgaatctgatccattttccctgtgtatcatagtaaattattcaccaagtcagaatctatcctgctctctaggaattgtcctctttaggtctagcaaagagcttgctgccacagttcaggcaatcaagggtgaaatgcttcacatagtattagtggatagcaggtaagctttatgttttagtacacaacttaaggattaaatgctgactacaactgttgtttcagttcagttcagtcgctcagtcgtgtccgactttgcgaccccatgaatcgcagcacaccaggcctccctgtccattaccaactcctggagttcactcagactcacgtcagtgatgccatagtttaaagagcagcttgccaggttccctgcacctgcttatatactgggccagatgactgactgtagaactttaggcagcttctgtaatagttcagagacttctcagagtcaagaaacatccttaaagaagcaaatctagagctcatgccagatcttaacgctgttctggccttgtgttgccatctcggtattgctgtctagagtggagcaacctacctaaagcttagtctaagttttgtgatgccacctcagtgtcttaggtcaccactgctcatgtccctcactgagggaacatactgaataggttcctcaaaacctgcgtcattatttcctgtttctttcactgtgaagaatagagggatcctcagctgaagatcaaattgacccaatgaggcttttttttaatctaggccaatgaaaggaagaggaaggagcccgaattcagaaagagggagtcataatataagatctgcaatgtattaacatggtaactctttgaagactaagagaaacagaatcctatttgaattctgaactatggagtctgagatgaagacgaaattgagatgtttctattggaatttgggtaaagagcgtttactcagtatgtatgttcttgctctgccccagtgttcacaagagcatctggacaggca

SEQ ID NO: 31733 - DNA, 1321 bp, Bovine  19866880748419
  misc_feature (1)..(1): n is a, c, g, or t
ntaaggagacatatgtctgttcttatgaagaaataaagtaaaaaacctaaatacagtataataaatgctaatttgtgagcaactaatgtgttcttgtgttcactgataagctgtgtgcttaaaagaaatttataaaaggagacaagtcgtttgtcggcaaaaactctcaatccagtaaactttatatatctgacttactttgtgctcctgtggaacaggaatcctatctaagttacctccctccacaaaactaccacctcctgcccacccagtcatggtgggtggtttagaaccttctctgttgcctttttttcccccttctctcttgagatccattttagagatttggaatgaaatgtacactttggctaggttcgacaaaggttttgcaaacttttattgtaaagagcccaataataagtcatttgggctttgcaggccgttctggtctctgtgacaactaaacagcttagcctctgaagcccaaagatgatcttccgcaatatgtaaatgaacggacggggatgtgttccagtaaaactttatttatagacactgaaattagatttttatgtaattttcatatgtcagagcatattctttttttatatgtcagagaatattcttttttcttctaatgatttaaatattttttcatatgtcagagaatattcttttttcttctaatgatttaaatattttttccaataatcgaaggtttttttatagctcaaagacagtagccagaattggctacctctggggcaggcccttctttcgttttgtgtgtccatttctcctcctgatctctcttcttttcagctttctaaacacaaacccagaacagtccccaggatcttggcgggggggggggggggcgggtgggttctgggattgtgtggaggcctagaccagggtttgttttgtttcccatggcattgggagaagggatgggtgaacctcttttgtttgtaagagtagggagaacagcagcagtgatttatactgctctgctaagagtgcaaagtttaatcacattgactgatgctgtttctgtggttattttttttaatgttaccacaaagtaggtttatttcaagtatgcaagggtagctttatttcaccatgttgacagaaactagaagaatcatatgaccattttgatggataacacacttcttgactaacagaaggggcaccttttaaaaactctgcctctctctccaccctcctatccttgcattgttatctatgcacatatcccttcagccatatacggagcagtttgtacttcctgaatcctgtgtatttcgtgcctctg

SEQ ID NO: 31734 - DNA, 742 bp, Bovine  19866880758002
  misc_feature (1)..(1): n is a, c, g, or t
ncagcacccaggagctcgtattatcctggatgctagagacagaaggctgaagggctgtgacccctgcatccgtgtccagatccacaacacccaacatgagctctgcgaatgcagacctctctaggcccaaagacctttgtttgtttggccaagatacatgtggcatcttacctccctgactagggatcgaacctgcacccttgcattggaaggtgaagtcgtagcccctggactgccggggaagcccctaggcccagagaccttgcagacactgggtggctggaagcagtgagtgtgtggcacagtggcatccaggcccagaggcgaggggtgagccaaggcctggctgagaggggagctagagggctgggcctctgtgctggaggcagctggaagcttgggcacatgggtgccattctgagtaggatcccggggtgatgggctgggacacctgtgtgtgggcctgactgttccctcctcatcctcacttgtcgccctccagcatcgacgtgctgggctctgcacccccttccagccagaggcgttaccgaaactggaaccccccactgttgggaaacctccccgaagactttctccgcatcctgccccagcagctggacagcatacaggtaacaggggtcctcccgctcccagcctgtgcagcgtctctgtgttagcgccagtcactgaccctccctgacgtttaagccctggggtggtaagggaaagaaggctgaaccaa

SEQ ID NO: 31735 - DNA, 946 bp, Bovine  19866880770196
  misc_feature (1)..(1): n is a, c, g, or t
ngtcgtttgggggcagtcagcatattcagagtgagagaatgatctatttttaagggctgggatcggcagtcatgggctacagttcacagatgtttcccactggggaagccggctcttcactcttgcctttcctgtcagtcttttctctctggtttgcacatgcacacaggtttcccctacacagaggtcgcttgagtctgaaatcatcccgtgtctgtgggctgcagctctgataagccccatggctcctcggtcaaggattcagaaacctcgaaggctgacgcagtcatgcctgccaccggccagcagtgcctgagcactggctgaacaactcgtggtgtttccacagcgcgcatcgaggagccatgggactaggggatgtccagctgcttttgaaaggtcccagcgattgctggacttgccccactgtcgcctcgcacccttaaagtctggctgactcgcaacccacctgtaggctggggccattctggctacgccctctctcccacccagccctcacacccatcctctgctgggagaaagggtccacgcgtctccggctctcagctcctcaggaaggacagagcggctgcgagtttgggcttgtggggtgattcggcagagcctttgtttgatgactgttgatcgagcccaggtgtgcggacctaatgtttacagaatcctggttgactcaggctggaatgaagaaaatggatattcaggggagtagggaggtggcactgggtaatccaaaagccatttgtttagggcttggagccagagataagtaaggtatttttgcagatctccctaaatcagccaggcaggaattctttttaatgtgttcccacagtgtacattggtggctccagggactgaacagtccatgaaactcagctcaacagtccatgaaactcaggaccatctggagactcagggcagacac

SEQ ID NO: 31736 - DNA, 1287 bp, Bovine  19866880774910
  misc_feature (1)..(1): n is a, c, g, or t
ncacatggaaagtggggtccacaggccaacagctggtgcttgttagaaatgcaaacgctgcttcctgaatcagacagcctggggctgaagcccaggggagtctgtgttttaaccagttctctgggtgattctgaaagggagggggtttgagacgccctgcgcaatccccatgccacagagacagtgtggcttcccagaactgcctctcagatggcgcggggtgtacatggggcacctctgaggaggtcacagtgtggtctgagcctttcgagggtcaagattacaggtccatgaccccgtggtgtcggacgacaacaggggcattcccacgcagctcccttaagagttacttgccctgctttgtcatttgcaaagatacaccgtcaaggaagtcagggctgtgttttatacctgcctgaagttattggaagacagatctcaaggttggaacacttttctcctccccagacagatcaggcaggtgccaggacatgggacagacacgctcaggttcagacaccgcctcccctgatccccaccccaggatcccacaggaccactaggcctgtgggcacccgcttctggtatatacagagaaatctgtacggaccggtgagggcaccgtcaacgcagaaccgactctagtgctgatcgtgacgaggagcatggggcctttgaagctgtattccaccagggatagtggtgttttctccctgaagtcagagaaatgcccgtgtccacccgcctgccaactcccttgtgttcttccactccgtgaacgaggcctggcttccaggctgaactctgcacaggcaggcagtctacctctgtgtgtgagagcaagagggagaaggagagacagacagacacagttaccggtttgctgtctctggggctgaataccagctcccttgaccgtatccgtcccgtccttgtgtgatggagactcacacaagccgcttctgtttgattcacatagaaccgtgagaaacagccccgtacgtgaggccgtgtttttcattctattcagtctttgtatattcaaattcttccagtttcagctcttgctgttctgccagatttctatcgcattgatggcttctctgaattaataagtgttttgcaatcgctgaaaagttttcttcccccaagcatggggacttattcatattgattttttttttttttccctttctctttcctctctagctactccttagatgttctgttttgtaaagtgttaatagaatttttcttgccccccgccgctttatctgttcaggaggt

SEQ ID NO: 31737 - DNA, 2084 bp, Bovine  19866880779241
  misc_feature (1)..(1): n is a, c, g, or t
ncgacacccaacgggctcagggcgatcagggctcctgtggggctcccgggtgggccctgagccgcccttcccatccgctgatagctgtctcccctccagaagccatggaaacctctgtctcgttcactcagtatttcaggggcataataattcaggtcccaaataatataggttgaacaaatgaaagaccaggcgtccagagggacataaaaacactgtcgggggaggcgcctggagaagaaatcccggggccagatgcacctggggcagacaggggcggtgggccaggcgccctggctgtcagaggccactgggcggagcaggaccctccggctagcggcacccgcagcgtgcacaggcgtgggctgcaggcagaggggacccgcagcgagcaatcctgcccctgctgctgactgcccctccccaaggcaggcagccccctgggaactccacaccaaggcctcctcctccgcaggcctgcagagcaggtccacagctccgcaggcttctcagggaacctggcagaggggccgatgaccccaagaataccgggaacttctgcccagtcagcaaaggtcacagggacggggcggtttgctccagcagacagacagagtgactggggggcaggccgcaaagacgcacagtcagaaaggtcagttctcaccacggacttgactaaaacactgcccttctccccttcggactgacgccaaggctttaattatagcttgtcactcacgcgccttccccaggagatggccgggccggacaacgacggaaatgaaactcttgcttcagatggctcattctgtctgtcaggaaatttcaggctcaccaaacaacagaatatcttgaactgtggcctcgcagcgcctctggaggtctcagcctgctccccagccccctccgggcccagccagtgagctgactcctgcaatggggtggaaaagccgtctcacagatggagacgctcgtcccagcaaggcgacgtgactggctcaaggtcactggcagacggtcggtgggacaggggcacccacgagcttcgctgtgttgggctctgctctggccctttgaggaggtcccagaaagaagactcccaagccctagtaacactgacacttgagtgtcacctcctggtgccaagacctaaggccctgtcagcccacccctctttgatcaccgatgcggtccccatgaataataattcatcgttactatcctgactcttcacaaggaagcaccaaggctagagagcttgttccagctcacgcagctgggaataggacctgaatccagaccgcccagcagcaggcccgtgctcctaaccccacgctctctccttcctctcatccacagatacgaagacggaagatctggagttctttcctctcgcctctgccaggaaacgcaaagtgtttctggaagcattcaacaaaggacatcccccacatggtggaggaaggctgtcctgagccctggggggccagctgcggactcggatttggggggagggggtcctttgcactggtcccgccaggttcccctgatgaagtgctggcactcaggggggccgtgggttcaggtctggctcctggcagctgggttgtgagtccctgtgttctcatggggtatctccacgtccctcagcccctggctctcaacctagacattcagaatgcagtagggttcggcccttagagctctctgaagccgttgggacccagaggagtggagcacgtgacctgccatcagatctctcccgagccgcccaagcgaacgcggaagcgagagtcgctcagtggtgtcccactctgagaccccatggactgcagcctgccaggctcctctgtctgtggaattctctaggtcggaatactggagtgggcagctgttcccttctccaggggatcttcccaaaccagggatcgaaccaagccccctagattgcccacagcgggcttagagccacacaggtgcaagctgctttggattacctgtgtggccaaagtatccagccggtttgggaagagagcagaatttcaggtgaacatgctccagggtgaagggaagccccaggg

SEQ ID NO: 31738 - DNA, 1109 bp, Bovine  19866880787864
  misc_feature (1)..(1): n is a, c, g, or t
nctctcctcctgacagcgcgagtgataggcgcgcagaaactgaccccagctgacacactcatcttaaaatatctctgtttccctccggcccagataaaagagctgtcgcaccaaaaataaggactccacttggggagatcctggcttctccaaggactggtgatggaggagtctgggatgttggggttcagctgaagtccaagtcaaaaggaccctaagaaaccagccctggatgaatcgtcatctggggagcagccccgtgttcagcctctcatcactgggccagatgcatgagatacatcatcaacatcgtgaataagcatcgtttattcagcatgtattggcatgtggtactaggttccgctcagatcaaagagaacaatctagacccaaccctgtcccaactgtaccttacaacacgcacagaataataatgatctccagtgctgtggtcctttctggcttacaaagagccttcagcaactcagtgaattaggtatagcaggtatgaaaattattcccattttagaggtgaagtgacctcggagaggtgaagtgtattgcccaaggtcacacataagctcataagggtcaaagatccatttcagagcaggaatcacacacttcatgggggtaatgaagaaggttcaaagaaaggattctttaaagagctaggggcagggctaaggaaactgactgtggactaggaagcagcctgagtgttttgggttgaactgggtccctcagagaaggtaggtggaagccctagcctccaggacctcagaatgtcaacttatttggaaatagatttcattacagttatcattagcaaagatgaggttatcctggagaagggtggacttaatccaacgtgactggtgtccttctatgaagaagagagtcaccgagacacaagaggataatgccctgtggccagggaggcagagaggtgccaggactgccgaccagctgccagaacctggaaggagggaaggacagccttgcctccatggatcagagggagctctgccttgacgccactttaattgtggacttctggcctccagaactgtgagagagtacattgctattgttctaagacacccagt

SEQ ID NO: 31739 - DNA, 616 bp, Bovine  19866880794135
  misc_feature (1)..(1): n is a, c, g, or t
nttggacctaaatgttgccgacagctaccttaaaaaaaaaaaaattcaataaagaaaagaggaaatgagagtatagtgagaaaaatgcagacacttatgagttcaagaccctgtgggacactcctgaatattttaaatatcttgggaaaaaaaaaaaatgaaaacagtttctcccaacttaaaccagagaagggagtctctttctagtctgaaaatcctttgaggcaattctttaaattatttactagctttttgattatattttatggtgaggtgggtggcaggggaggaggaggagaggaaaaaagagggctgggcaagaagtaagtgggagaaagctgctgctgacattttcaatatctgtctggaatattttaaaagccgtgtgtctgtttgaaatcgcagagccccggcaacaatggactgctgcctcccacacttctttaggtcatatttgcatacaaaagaccagctgctgagcagctattatgctgtgaagccacagtgggcctgggagaggtgaggttaccagcaagtgcagagaacccacagagactccattaatttttcacgaattctcaggccctggccttttaaaggccagtggggagaaatc

SEQ ID NO: 31740 - DNA, 910 bp, Bovine  19866880804893
  misc_feature (1)..(1): n is a, c, g, or t
nccaattatacttttacatcaaagaatcaaaatgctggtgctgcagacttcaggcccatcattcacaaacccttttatcctgtaattaagccagacctgctgctgggttaattcttcccctgaatgccaccaccctttgagccagcccgtatgtcggcagaagacttcactctgatgatctattataccaatacatcaccgcggtgagctgcctccttaatgacttatccataacacatcatcggagtgagacacactcgtaatatactgctcaatacgtctgcattgaccaaggtggggagccgccaaccgcagccgagttcatgcccttacatggtcggtgtcagcacatggggcccacgctgggctctcccttcctaaagaaatgtgtatacaggtgggagggcttccacgccaataggcttgtagaacctgaagcactaagaccctaagaaattcctatatatccagaccagaaaagcccctcagtgggtcacgtgcctaccctcctaagcctatcagataggtcggaagcattttccttaagctcttacttagtagaaggccagggctatggcactggacacctccagggggcgctgttcacacggcagtctatgcaaattgtgcctgagtcaccccagctgggcagccccctcagtggccttgattaagagcacagactccggcatcactgcctccttcgaatcaaggttctttgactctaatggtcctatatcatggggttgctgtaagactgaacaagataacgtagccagggcacctatgacatagtgaacactcagtactcatatcagccgtaacatagcaacctctccaaacgccgagagccagggcgcctgcaggtccagggtgggggcagcggcagcccctgtattatacctccatt

SEQ ID NO: 31741 - DNA, 2651 bp, Bovine  19866880814983
  misc_feature (1)..(1): n is a, c, g, or t
nccttgaggatacggtgagaacagacccgctacgccttcgaggggggagggacacacaccccctcgcccccatccccttgatgagcggcctgcacagactgttacaggaacgaatggccctggagaatggccttccagaagatcagcccatctctctctgtacatacagttttccccccaaaggtcaaatcaagaccagagacgttcaggagcagaccaagttttaagcaaagaagaggacagtgcaccagggcctccttttccaatttctacctacagcctgatccctgagcacacagtctgctcagccccaagtctgtggtgcagaggagtaagaaatcaggagagagaggaggaaggaagtcaattccagaacccctgggcctggccatctcacttctctggaaaagcccagttgcaaacacttgggtaaaagtgtccatttcttcaggcaggcgcattgggaagggctgacagtgattgaaggctgaggctggagcatactctttgctcccgctgacccaccacaccggctgagtcaagtctgcttctgccgttccacaagcaagacaagatattttagcatctcgggctaagtggtgccgcaggaaccacaagccagacaaagccctggatcaatctccggttcactgtctcccatgaatgagctgcctggggatgggggaggaggggtggtcaccagccaccaggcggccaggacagcaatctactcccgttgggacacttttttacaacgaaaggcagcacttcggtctctctgaaggctgggagagctgtctgccctatttatcggagactgtgaaccagaagctccgaggtacttggtggaagacagaaggccggtgctgggatagaacccacactcagacggacaaccatgccccacccactgtcagctggcacagctgcacctagaacagcgtgccctgctcgacggtcctgcaaccagcctttccttccaaggtggcaaccttccaggatgggcaggggaggagtgctgggaagaggacccggaacgttcttcatctgggtcaggagactggcccgtgggctggccccctgggcagtagcccagagccaccccttccccgtgcgggacggcccctactcaacaacctgtactgaggttcatgggagccttgccttctgggtcttcattcctggctctccgccagccggaaggaataatggattcgcttattttatttcattggcttgtaaaggaacataaccaaatcgtgatggggaaagaagctggcagtggcagaggccagcaaaggctggggcgatgccaggagttaagcaatgcttggccattcgctctccctgaagaccagcagcactgcggggccaggatggatgattcgagcgctggggctggggaagcccagaggcacaggggctggaggtttacttcccaccccgggaccaaacgaccccagcccaccaaggcaggggcagagctgtccgctgacctgctctgctctaggatgagccacggtccttacccaacctggctgttcctttttattgggtcattgtcattatcatcactaccatttatttagcacctaagtcttaaccctttcagattatctccaatctttccgtctgccctcaaggcaggtaatattatcccaattcgacaaatgcagaatctaagattcggcccagtgaagtcaattgccatggcctctgcatcagcgagtagctgagctgggatgcgagtccaggtccatctgcctccctcaaagcctagactttcctctccatcagcccctggaagggcaaccaggctaatgtaagatttagcgcgaacacagccctggataagcctccagacaagggaggccaaacgattgatgggttatccttgctgctaagtgtgggggtctgggatattcagagagtctgcagtgaggagggggttgatgtctagctccatcctcatgagcttcatcctcttgagtgactcacgtgacctctacagtcccagcttcctcactgaggcctgagatttcagtctgcctttctcactaccagattccctgtacctagaacctgcagtccaaaaagagacttgtcaaatgaatgaacgaacagtggaaatcccagtggtatcttccctatccatcttattagtgagataacacagagcgctttgcacagagcaagacacatttcaagtggaccaacaagcaggagttcctggttattatcacttcttaattatttatttagttggttacttagtgttagctgtgttgggtgtgcagtgtggtgcgggcttttctctagttgtggcgagcaggggctactctccagttgcagtatgcgggcttctcattgcaacggcttctcttctgaagcacaggtctaaggcacgtgggctcaggagttgcagctcccgggttctagggcacaggctcaacagctatggtgcgtgggcttagctgctccatggcatgtgggatcttcccggactagagatcgaacccatgtctcctgcattggcaggcaggttctttcccactgagccaccagggaagccctcctgactattatgcattttattattataacactattactgcttcacaagggtattacaaggatcgatgcacttacaa

SEQ ID NO: 31742 - DNA, 694 bp, Bovine  19866880848164
  misc_feature (1)..(1): n is a, c, g, or t
ngaggtactgttgtctcatttcttacacacacacacagtatacagaacacactacacacacacacacacacacacatgcacacacgcacttcacagttactgctctctcctttctccttctaatcccagctcttgccggctcttgtctttctccccacccctccctttacacatcagttcatttctcttttgtctgttacgggggctcctgtcttgggcaggacagttctcccctcactccaaatctgcacagctgagacccagactggcaaagatgccacgctccttggagggtgtgggaacaggcaggcactcagaagaaaggctagctttttatacggtcattcattgaccgtggtgacgtcaacctcaatcgggttagacttcctatgacaccacgtttccacagaccctggacacacaccaaccttcctatgccctcacagaaatagccacacatgctgctttccataatccccttcacctaagtctctcgtgggcatttttacatttcttcaatatcaagtactgatattcatagccatgactctgattagtgcaagacgtcaaagcaccttttgaatcattaaagaaagattaaattacattcaggatagtttcagcatgaagtgtagctgaactaattcagattctctgaaaattggcaatatgataaattgcaactttacacaag

SEQ ID NO: 31743 - DNA, 797 bp, Bovine  19866880861898
  misc_feature (1)..(1): n is a, c, g, or t
ntatcgcggggtgtaatctaattagtatgaagtcaattcagtcgctccttttgtatctcgtgattaaataagtggggaaaatggcttgaaaattaggtgctagaacgaacccaattacatttctgtagctttttgtattcaatttcataaacaattttgctcttcgctggttaatcagtgaatgcctttttccagtttgaaaagcacttttgaaattataatgcaattaaattgtgtgtggatgttctggcatagcgagtgtgaaagctgggggcttggcaggctgccgtgttgtaccttgactgtaatgagtccccaggctggcagcttgctggtgtcattcataatattgtccgtgctgggtcactgtaaagtacagctgccttaaccggcagctaaccagcgaccgccagtcccctctgtcgagcagggcacgcatgccttgtgtgatagggctatgctctggagatgacagaatggcagggctcctctggaggcttccccagggcactggacagtaaggcggcgtcttgatcgatgaggtcagcgcctctgagataatccacgtacctgtgcccagcaacgtgtgggatggatttgtttctcttccacatggccatcctgttttctctgccggcagcttgcttcttggaagaaaagctatgacaaacctaggcagcgtgttaaaaagcagagacatcactttgacgacaaaggaccgtatcatcaaagctatggtttttccagtagtcgtgtacaaatgtgagagttggaccgtaaagaaagctgagcgccaa

SEQ ID NO: 31744 - DNA, 1078 bp, Bovine  19866880886859
  misc_feature (1)..(1): n is a, c, g, or t
ntagcccttcccttctccggggatcttccccaacccagggatcgaacccaggtctcctgcattgcaggcagatgctttaccagctaagccaacagggaagcccaaggatactggagtgggttgccatttccttttccaggggatcttccctaggggtcgaacccacgtctcccgcattgcaggcagactccttaccctctgagccaccacagcagccaaagcagaacagaaagaaagttgtccccagagatgagagccgggtgagagagtcagggcctggctactcagttgacctccataaaaggagcctgtgggaggtattggggcattgtcaggggataaggctggtatgagggaggcctccttagctctggctgggaggtagaaggccaaggccagggccagggagtggggaggcctgggagccccaaagcagtgcccaccgacccctgggacagttttcctgaacggcccggcaggctgggggctgcggcatcaacagccaatctcctggatgatgtggagggccatgcttatggtaaggtagagagggcagggaggctagagctttgagttgccatgatgggtagtcctccaagagtagggcctgggtgtttcacaggtgaacccaacctgttagggcaggggctcctaactacgggacacgtatcagggttggtgggtagctgacccaaagaaatcggtccccccaacttggtcccactttatcgactacaccaaagcctttgactgtgtggatcacagcaaactggaaaattcttcaagagatgggaataccagaccacctgacctgcctcctgagaaacctctttgcaagtcaagaagcaacagttagaactggacatggaacaacagactggttccaaattgggaaaggagtacgtcaaggctgtatattgtcaccctgcttatttaacttatatgcagagtacatcatgagaaacgctgggctggaggaagcacaagctggaatccagatttccgaaagaaatatcaataacctcagatatgcagatggcaccacccttatggcagaaagcaaagaagaactaaaaag

SEQ ID NO: 31745 - DNA, 1264 bp, Bovine  19866880923114
  misc_feature (1)..(1): n is a, c, g, or t
ntagtagctggttttttttggagtgctttgattccttttaattctccaatgtttctagccttattttggagttggaggaaatgaatttgaagatgttaaagtgacagaacttgagtccatgtcttctagtgacaagttcttgtttattttattactatattgctttttaaaaacggcctttttccagtggagaggttgcggggaaagagaagtcttcgacccaagtgatcactatctgtaatacccacctgatgccaccagggtgccctgtggtgctgtctttgatccatgttcttagccaggttgatggggctgttttcaaagtgttcatcttgtcacagtggccatcgcccagagcccaacagtacaaagtggggtacttagctccctggctttccagtgtgcagtgcacagccaacatcagagaagcccttgccctcttttgaccccttctggtcacactggcccacagaaaacagatcagtgaccagagcctggctagctacttttaccaagctacagtctcagaggatagtagcacgaaaaagatcctgagaatgggtaaatgtaaacatgcacttgttttgttagctaagtgtacacttaaattcatattagcaaaatagatgtgatacacaaaaccagattgaattgctttatcagctttaaaagcaatgtgtgatgactttcagtttgcggtaacagtctgctttatacttggtcctgagtgtacagcctattaggcattagttgtgatattcaaccctagatgacagcccagtgtcaaagctgccagttatgtgagaaccaatgaagtgaagtctcatttagcagggaaagtagcccctttactattttgttttcttcccagtgctcttataatcattttgtataaacatttaactagtctatagttatttccagttttgatttctctattggaggagattcttaaacatataccagtgactgactagtacagttcctggccttaaatagatgcttcataaatatttgcttactgaaaaagcatgatagttatggcatagttctacacatgagccatttttctaaggagagaatccacattaggaggtctttgttttgtccaatacattatgaactgaaaagttagtacctagggtgtcttggctagcctttcaaaacctagaatatatcattctaggttggagatagcacagcctgaattttgggctgaagctgagctgattatctttagatggcatccatgcagtatctctag

SEQ ID NO: 31746 - DNA, 1191 bp, Bovine  19866880987921
  misc_feature (1)..(1): n is a, c, g, or t
naccagggagttttttaaaattttattttgtatcatgaaactgagaaagatgcaaagttttctgctcttgctggagatgaaaacacctgaagtcagctgcttatcagtgctaagtagagagaatcgtaagagggggatgttggtatccttaatctacccgagttttcaagagtaaggcagtgcttttattttgtcaggaaccttagatggtgtcggcaagcgtttcaaggcaggcttgttcctttgacctccaagtggtgcctggactcactggctgaatggttgaagaggtttggggaatgtttagaaggaaggaataacttcagggaaagacaggctcccaactgtgaccaaggacggttgagagggagggaaaacattagtatcggggtggtgttaccttctcacagagccttttacctgaggactcggagtaagaggttttgatccacaaacccatgggtcccgtcatgtgtatacgtgatgggaaagtcactcagtcatgtccgacactttctgagcccgtggaccaaggaattctccaggccagaatactggagtgggcagcctttcccttctccaggggatcttcccaacccagggatcgaacccaggtctcccaccttgcaggcggattctttcccagctgagtcctgagggcagcccatcatgtgagtgggcgtctgtgagcagagctccaggacacactcccagcccttgcctggtaggtccctgcctttggattttctgctgcgggagcccccagcatctcagggcatctaccggttgcccaccttgatctctttgttcatttccagatttgtcccctcagcttcgtatctgtcgggtggagtcaactggctgggtgttgtcggagacagggggtgagattctgactcttaagtggatcgtggtggaggcggggagacacggggtgtgtgtgagtattagtgtgcagaggatgggaaggggtggcccggaggggcaagctcgttgtagattacattgactaattatagggaaaaagccatatttgctgctccattaagtgatcactaggctatgaagcagtttattgtaattaatgcagaaacagcaaataaatgttgggtttggagtgggagggtctccagacacccctcccccttcggtgctctgcgttggctgcccccatggttatcctgcaggtaa

SEQ ID NO: 31747 - DNA, 1216 bp, Bovine  19866881060686
  misc_feature (1)..(1): n is a, c, g, or t
ntgttgtcggacaaatgaggtttgactgggcagatttttcttcctggagggaaggagctagattttatgaagcgcttgccaggtgcagggtaatttccctgtagaagaccctggtcttccaggcagaagtgcccttcagagagaccggtgccatttgtcgggccgcgtggctgacttgacagccctccagggtgaactgcaaaacgagcctgccaccatttggccggcggctccaggtccctggttacctctctgccttcataaacagccggcccagcccagttagctggggtgggcaccttgggggacgtagcttttccttctctctttctcgtggttaggttggccgagcgcaagtgttttaaatagaacagagctcacagctataacacatctgtaacactgcacatttagtcaggttcctggtggaccgacttctgtttgatgggcgatgtttttgctgcgactgttgtttccttttcctcccgtatttatccctctggaaaataaagttttcttttatgtgaggatttatagaactatgttcccggcatgaggtgtgcacaggcatgttaggatatcggtgtcgtggagaaatactacctccgaggcacgtacagcttttacctcttatggagaatgaccttctaacgtggagcagtctgtgactctttgcagggtgaggggctgcctgggttaaggcggatgaagacgctgctttacactgagatggcacccttttctgagcatcatcagtccttggaggaccttgattgcccaggactgctgctgggggtgggctgattcagggtggtgtctgggaaatccaaagaaagtcgactctgtcacgattcgttcttaaatttgcgatgagcctctcccagatgctttgccttttcttttgtctaggggacaggcttggaagcttggattcccactcccagccaaaccgagagagctcaagtggctggtggggcagggcaggtggcgggcaagaaggacttcgcgtgccgtctctccagccccgtgctaagcgtgcttcatgtgttcgcctttttcattctgtttcggacccctgtcagggtcccctggtgtatctttgtcagggtcaagattcctgggttcctcgtcctgctctatcactgctcggagtgctggggttggaacccggccctcccatctccagaatctccaagtcggatgctcttttcacccc

SEQ ID NO: 31748 - DNA, 1139 bp, Bovine  19866881066828
  misc_feature (1)..(1): n is a, c, g, or t
ncagagccgctttctctcatttctctcctgctcctttggccattgtttagggtttccagaagatgttgggattcctccctgcttttactctaccctctcatctcgtttactctcacggttttagtggccactaaaatggtgtattcagtctgggtcacctggctcagtctttctgctgagctcccagacagacacacaagttgtcctgtggacactgcacgtttaatatgtccacactgaacacatttatcgttcctatgcaaaccccttatcttggctggtgttaataccctcattgcctcagccacccagtaaattcaaaactccttcctctgtctcatctctgcatctggccatttacccagttctgatagttttgactcctcctccttcttaaatctcttcctgctttgttatgcaaaatatccttgctttagttcagggccccttcatcttggactgttaagataagcttctaactgttcttacagtgtctatttttgagcccttcgatctgtcctctacagagtgacttattctaaaacacagagctggtcttggtaatcctgtccttcataactttgacctcttgtcttcaagatgaagttcagtctcctttgtcatggtctataagactccagagtctccattctgtatctcccatcaaactttgctctccacttgattcgtcgtggtgctggataagcaagggtatttcatgctattatgactgtgcctgcccttctgacttgtcttcctgggaaattcctacttacccttgaaaactctagtcgggagtctccgttgtgaagccttttctgactcttctgacgtggttcattgtatttccctctgtgtgggttgtgcacactcttgtccttgtgtgtttttgttagacctctaggagatcttcaagggcagagaactaaatcttttcatttaggctcccagggcctgatggagaccaggtagtcactactgtctgatgtcagacagaatcatgagccagtgacacagaacttgggttgttgtcactgaatctgtgactgccagggttccaggcccctcccttgactttttaaagtggtttcttatcagggggtcacgaattgtcctttttatatatcaagatgactcta

SEQ ID NO: 31749 - DNA, 922 bp, Bovine  19866881074336
  misc_feature (1)..(1): n is a, c, g, or t
naaaaggttgttggattgggttattattgttgccttttagaacaaaatctgcggagaaaaacctaacgtaaacacatagccagactctctcttagaaaatacttccttctcagtcacttcctacatggacaccatgcaaaaccactcccattgatcaagctgtcagaatgaactgcaaaattcttaacagtctctctcacacaaaatgtccacgtaatccaacgcatctggggggcctggccctagttttctaaatgcaggcacattcagatggcctttgggcttcccagataactcagttagtaaagaatccgcctacaatgcaggagaccctggttcgtttcctgggtcaggaagatctcggagaagggataggctacccacacagtattcttgggcttcccttgtggctaagtcggtaaagaatctgcctgcaaagcaggagacctgggttgggaagatcccgtggagaagggaaaggctacccactccagtattctggcctggagaattccatggactatacagtccatggagttgcagagtcagacacgactagcgtctttcactttcactttcagatggccttcagaagtcctcatagcagcactgctgttggcaaacaggggacagatacaagtaacaggcccagagtctcgggatgtcagaggagaagggaccacccaaatggctcagcccaaacccctcacgcttcagatgaggatgttgagaccccagagatgaacagacttctccaagtcaaaggatcaccccaacatcccaggcaacaccaagtttcataactcccctccccaaacaccctcccactccgtcaaatttgagtgacagggccggccatgcatgctctctttcctaagctcaatagtttaacaagcagcaaggaaaccacagtgtaaatggg

SEQ ID NO: 31750 - DNA, 3556 bp, Bovine  19866881076987
  misc_feature (1)..(1): n is a, c, g, or t
ntccctttgcctgtccccgctgcatcctgaattcttctgcacacttgtctgccgttgagagacaagccctcctcctcgactcctgagctggagaacccaatgggccacagacctggtaggagcctcgctgcttcctgccaggagggcagggggccgccctggcacagcagatgcgaggggtgaggggctgtggaaaaggcaggttggccgcagcctggcacgagggagcattgcattggagactggacttccaccacgggtagaagtcaggttcgtgaagctgaccagttgctgtgttgagtcaattggtccccaaatgcacctgtgggtcacgcgtgtgcccaggggcccattcttagaccctcccttcccccactcgctgctgaaatagctttcaagtgcaggtgtagaggttaatgacaagacatttcccagttggccctttgctagagaaaatagtctcgctaggctccaaaggagaggcaaggatttagaggaaccacaggcatcaaagctggaaacagtggcgtcctctgctggggcaggggttggccgggaggtgattttacacgcagctgcgtcctgttgaagagagcagcccaagcagcaggtgggcccttcctatcccacccaagccacctctcaccatctctcaccgtctggcggtggcagtacccacactgcagtccttcagcttctggggggactgaccctctcgctctgctgcctgagagccttactggatggtgctcgggacacagcctcggtgggtctacctgcactgccccaggactggctccgccctggggtgctgtcccccacttcctcgctggaccataccacggagaaaccctcataacccgcggaggagttgccgcactttaattacagttcagagtcctgtctcccggcctgtgattcctcactccctttctgagagggtcctgggaagcccagcatggctctctgcctgctccgtgtcactgagcgtgaagactggccagcacccccatccggccccctaacccggctccctgctgcctgcagacccagggtcttttgcctctgggcgctctgagcctaagcctgaaggaatcaggcccgacgctccaggtcaccaacctgatcctgctcggtctctggaggtcttgatcggcatcactgagccctgcgtctccacttttaaaaacctattgcccggtgacagctctctaggttagagacagtctcacatgcttcctcaggtgcacagaggaacttggtgtttccagagtcaggagcagttgcagaccttcggctcctccagcccaccctccagcctgcccgctctgagccccgacgtgggacgtggttgacccttgttcttgtctggagagcacctccagtgcagcttggattcatgtttttcttgtccagtgttgaacgtgcttgagcgttgtaaggctcctcaagtacttttagaaagcccggggaagacatcaagtaaaaataactcgatgatcccgtgactgctgaactgctcagaattcgcagggtcgaggagacgggctgttccaagtttttagtgctgacacagcttggcgctggggggtccttgctttggagaggaccgctgctgatctttgagagagtgctttaacccaccaaggaaaggagaaggatccaaatgacttactgtttgcgtcttaagaattttgagcatccctgggaataataggagattcctggtatgttcaaaagtggcatcagaaactgccaggttggaaaccgggcctttggtcatctgtccccagccagcacacccccaccccccaggccaagttcttgatggctcctgggtctcagttaagcagctctggttgaaccagactgatgggcacagaaccctgaacggagaccggggagaatgccaaggcacggccagcgaaagctgtttacgaagccagaaagaatgttggtatcatctttcacttgtatagttaaatcagccacaggtttttctggagccttagctggggtttgattttctaggctgggacgaagatgaaagagacgtttatttggtaggaggaggattgggacactgaactgcttttaaacgatgtgaggaaactctttcttctccctgctttgccacttctgctctggcgctgactttgaaaccccttcctagggaggcgagaggtggggcgctctcccgagctgctttctgagtctggctttttgaaataggctggagatctatctcagctctgaatcatctgctggttctcatcacggagggcaggagaggggggtgtccggggggctctgccggtgggcctttgaaagataacggcgcttgaaagtctgtgtttatcgctggagagcagcgtggtcagagaggcgtagagggaagggctggtggcctggctctgatggatggggagaaaacttgccttgtgaagcacaggccgcccaggagtttgtctttttcaagagcggaaaagaaatttaaagtgaggctccagtgagataagttttttcggtctggtgcttcatggaggcttaacgtttctcgtagggccctgaaaatggcagagacctcaatttccccccttccgggctccctaactagagaggtttgcaaagcttaaggggattaatgctctttaaacctctgcactgcttcctggtcctcctgggatctgggtgctaataaagatgtaccagcttggaaaggctggtaaatactgctttgttgccatggcaacaggcgaaacaagaaggacgcggagtattgctaacaagagtccttgtgatcgagagtttaaggagggggacaaaaaaggttcttaaaaatgcagagagtcttggcgaggtaattagacttggtgctctccaagtaaatttatagttttacggagcattactggagtgccttgctgctcgcaatgtcaccctccatcaagcggcgaggcggcgtcactgctaagagccgccagcgtcttgctgccgttgctccactgaggccggggcggcgtcccgagacaccttcccttcttctcctcctcctcagcgaggagtcacggcatgcgttcccttacttggggaaggttaaacagctccgtctcctgcctccgtggtgtggacagatacgagggaaggttctacacctgccttccaggttactgttactgttgctagcaaggatgggaggtgaaaggggaatcgctttccctgctttggtttgttgcacctgctgcctgaccctgtgaggcgcggttgttgctgacccagcttttccggtggagaaacagaggggtcgaggaactcgaaccctggagacaccgccagcccagggggactgagctctggggagtctgtaaagcctgggctttcagcccctggactgtgtctttacggcactgctcacagcccactgccgtcatccccattcctgggtcatgagcagcccctgctgggatctccttcccagacgtgctgaggcttcccaggcaaccgagggcttgctctcgcgtttcttccctgccgtgagatccgtccactgtgcaga

SEQ ID NO: 31751 - DNA, 892 bp, Bovine  19866881106498
  misc_feature (1)..(1): n is a, c, g, or t
ncttgcttaattttgattaatacccattggtgtaaaggaggatgggtttgaattgcctctgtgtgttagtaatccatttgaaccctggagagtctctggggccttctgtgtactgaacccctccactctgtagccagtgctgggggccaggggctctgagaaggatggaggcagcacctgcggatgcagagcagctcggtccctgggatgagggtgtgatggccagccgaccacctccttcattcagcatcggatgatgcacgggtcatgaaccttaatttcctgtgctttccaaggcagcactccatctctgtacctctctctgttaccccccagcaccccccgtctgagtgccactggcgaggatattactgtctgataccaatctgtggacaggtcaccctctctggctgcagctgttcccctaagggtaagaggaagtagtattttttaaattagcctgggagggagccgggcgaggtctccgagaggactggggagtgagctccctgctgaagcaggcgggctcatcatttcattacaagatcacgctcttttaggtgagttacgttgttttaatcagaggtagggttgtaacccggctatgtcgcctaattgtgtgtgaattgtattctagccccatatagacgaaggctatttttttccttccacttttaaagttacttagagtaaatgccaaattgtagcctgaaccctaatgctgtctggctaatagctatagatggggagagagtgctctgaggaacatttggggttatgaatgtgattagtttcctctgatgttagattaatttctgcagttgacaacatcacatattgttacaccctttgtccagtggtcagggtgggtgagtcaaagtacacagaatta

SEQ ID NO: 31752 - DNA, 1011 bp, Bovine  19866881110628
  misc_feature (1)..(1): n is a, c, g, or t
ncagactggaatcctcctggagaaaaatgcccaaaggagtcattctggttttacaggtacaacatgctctccataaagaaaaaaaaaaaagaaaaacccataaagatgttctcttcttccctctgacctcaatttttcactgattttttcaggggcaaagagctgccatcatccatcactgagagccttggaatctccttttgaagccaagtccaccaggttctgggctcttagaacagcaactaccatcagctacctcctgcagggggtcacatggaagcaatcaagaaagcaagaaaactgaccccagagaggagatggggatggacaagaatcctgactgagttatcatgtcagccaaggtcaaaggtgtgtgtgtgtgttagtcgctcagtcttgtccgactcttgcgatcccatggactatagcccgccaggctcctctatccatgagattctccgggcaggaacaccggggtgggctgccatttcctatgccagggaaggtcaaaggtaagatcaaaaaaaaacacagtcaaaagaaacagcaaagtgcctttggctgatccaaaatttaaaaaaaaaatgtattaatctggacagcaagcatttctccctgagcattttctctccatgtttgctgatcaaacctttgtaaatgagagcacaaccctcttactggataaagaaagacatacacaaagcccctcaactgaaaaatctcgtcgggcagatcgtgatgtcacctttgcgtgaacaggacgcggccacaaagggcttggatggggagcgggtggcacggctcccactggcgtcatcgtgaataaggaagcggcagcgcctgcacccagctcgcccggcctgaccagcatgccgcctgggcacaccccgcggtgccagggaaggacagggtctggggctgagcgggagcatggaggtgctctggtgactccagggggctccaccctgctctgaaccgaagtccttcaccagccccacctcggccacccat

SEQ ID NO: 31753 - DNA, 1795 bp, Bovine  19866881134111
  misc_feature (1)..(1): n is a, c, g, or t
ntcacgtgcgacaatgaggcaggcaataaaaaggttcccggcgatgtttccaccacatctcccaccccaattaatccgtaacgctttgtccagagagaccaaagcctttccaggcatccgctagcacagtcctgcatgtgggcaaaggctgggatggaaacgtgtgtgtgtgtgtgtgtctctgcacgtgttggggaaggggcaaatacaaagtttccccgacatcaggcagaagatcagcatgtggcagggtctgctgagtgctcaggctgccctgattctcagaacacaaggggaggcgatgatgcaagctcggcccccaccccggctccccacgctgacccagctctcctgctgggccaggccccatctcatcacatctctcaagaacatctctgtttgctttggactcgctctacacaaaaaaacttacacactcgacgggcacgaggagagaaaactgctggtgtccagtcgatttctttttaacagttgtgatcttcagtccctaacggccccaagaaccaggcaggcagtggacacggctgagggccaccccctttcttgggtgtgggggggtttaaacacaagcggccatacaggaagttggttttcacaaaagaaaaaaggagagaaaaacatgctcatttacaagcaacagcttcaagctccccgtctctagtcttgttattgttgccaaggggtccaaccatgaccgtgaccacagctccctgcatatgaggttgcggcgagggcagaggcatcactgtatctaattcaggggtgagcacaaaatcatcttttctgcaaagttaccagagagaggggctttcctggtagctcagatggtaaaggatctgcctgcagtgcaggagacccaggttctatccctgggttgggaagaccccctggagaagagaatggctacccactccagtattcccgcctggagaattccatggacagaggagcctggtgggccacagtccatggggtcacaaagaatcggacacgactgagcaactaacacacacacacacacgcaaaccatagagagatagtttcacatatgaggggcaatatagacagctgtctgaacttgaaaaggaagttcttttcacacacaggcccagagccacaggacggaactcacagtcacggggcggctctcacgcgcctgagcgcatgcccggtgccttacgggactttctcaggtgagcgggggaatcccaggctctcagaagttagctgacagcctcaaggtcgtgaaactaacaacagcaggagcagggttccaaccaggccctctgatcccgcggcaggagacggggtgggacccccagatggagccatgccagcaccacagccccagggcggcgggggccggactagcagctctgcaggttttagcctcatcacagagcttgagggccacacgggctacttggctatgaaaacctgcttggttccacggccacggtccaaagcacagacccaggatgactcgggcctctaacaaacacaccgctggcaacgacaagcagagcaaggcgggctggaaccacaggaccgccctggaggatgctcaatggacgcacgtggccaccacatgccagcagccgcgtctggacacgaaggaggggcggccttgggtcttcgtggctgctggtcttgggggccgatgaacatgcgctgatcgtcgctcagcccgaggctccctcgggtcgacggcacacccagggaacgcgctcaggatccacccaggactccaaggggaggcggccctctccatcag

SEQ ID NO: 31754 - DNA, 1028 bp, Bovine  19866881140841
  misc_feature (1)..(1): n is a, c, g, or t
ncatccccaggagaaggcaatggcaccccactccagtactcttgcctggaaaatcccatggatggaggagcctggtaggctgcagtccatggggtcgctaagagtcggacacgactgagtgacttcactttcactttcatgcattggaggaggaaatggcaacccactccagtgtttttgcctggagaatcccagggacagcggggcctggtgggctgccgtctatggggtcgcacagagttggacacgactgaagcgacttagcagcagcagcagcagcaggagcatcccccaccacccccaacaccttccctctcaattcttactctttcatagaaaaatgattgagatgaggccgggggtggaagacatctgcagtgtggatttaatcaggcagacacagagggacacgtgtgtgcaaacgtcctaatcccgctcgaagccttcctggaaaaaggaaacaggcctcaaatctccctcttccctaggctgacatttccacagtttcccagccagagcttcaaatctatcagacaagagagatgaaaacaggaagagaagggaagtaagaagaaaggatagagaaagaattcggatttctgcttaattttcaattctacctcctaaattccttctggaatagaaaaggtaaaaagaaagaggcaaaaaaaaaaaaaaaaaaaaaggcaagaaagagaagggagggaaagagacatcatgttctttccctatgacccaaaaaaatcccaaccttgctattttaaacaatgaaaagcacagtgtgtgaggaacagcttgcagacagctgaagccggcattatttacctcgggttcttacactaacttttacttcttaacgcactttttacaacaaatgagaagaaagaggaaaacgccccgagtaggtgcatatccaggagatggtgcttgaacgggctctgaagattgccaggatgacctcctgcccaggctgcacgtggggccctgccagctacagccagtcaccaaatccaggtctaaagtcaggt

SEQ ID NO: 31755 - DNA, 1572 bp, Bovine  19866881151160
  misc_feature (1)..(1): n is a, c, g, or t
ncctgcgccttgcacgaggaggggagactgccgaggaaggtggaggccccaggggagcctgggcgggggtgtgagaggctcccaggtccgggggctgccggagtgtgaggcagggactttctggctgggcctgaagccaccaaccagcctagcccccagagggaggacagagatccacctttgttcccgctgtggttggaagaggtttccaaacaggaatggactcgaggtggggaggtggggagctggggagctggtacctgtgctgtcaatcagacggacctggggcaagtcaatggactttgagcctcagggatgaatatctacttcaaagctttgtgtcggctccaacacgcagtaatagcaataacttatctactgctgactccatggcagacactgtttgaagagctgtatgtgtgtgaatgcacttaatcttccaatgacttcattaggtgggtgctattattactcccattttattaatgaagtaactgaggcccagagaagttaagtgacttgcccaagatcacagagctggtatcaaagcggggtttgaacccactcttgtgccctttagaccatgttcccatccctcacacgaactgccttcacattgcaacagagtttgcagtgccaggcctggcacagagcaagtgtttcatggatgtgagctcttaccatgacacccccagagcagctccagacaggggacctaggctccgacatcctccccagggatgccatggggccctaaggtggtcttccctcccatctttggtccgtatgaccttgcttatcctaggaggaaagattcctgctttggcatgagagaggctggccttccctctcccctcctcctgcccgccggctgcctgtctgctggaggcagagcggagcagaacagcggaattctcagcttcctctagttaccatcagtctgcaaagaaaacatagtctgctgtgtctgctgccagctcctctctggtgacagccacaacccatttgctcagcgccagcccaggctgtgctgtgaggagagctggcagctgggctctagtctcctgcaggagaaccccgggccggtcactgcaaggctgggcctcggggactgatgaaagggggaggcctgggccaaatgacttcttgagacctttatggctctaagagctatgcctgaagctggttgtgctgctgtgtggcctcctcctagggtaggtagtctgtctcataaacacattccccacacttgacacagggggagctcattaatgcccccttgcaaattagtaaccagctttccaagaccaccaagctctgctactggccacccttgcctcttaggagatacggggaatgaatcctttgccactttctgggaggccagatgagcctccagtcagctgtgaggtggttaagctagagccaggagcctggaatactgactacctccaaggcctgagttccccccacatcccatctttcacccccatccccgctccccagatgattaagtccgaggtatcatggagggaaagaacctcagagcagatgtctcagaacaacactgtc

SEQ ID NO: 31756 - DNA, 1083 bp, Bovine  19866881163427
  misc_feature (1)..(1): n is a, c, g, or t
ntgatcggggctctgcagagccgcagggagagcccttgagcaatgacaaagcggtgctgagctgctccggatgcatctgggaaatgaaggaggccaccagccaccttcatcacatctctctacgtacggatacatacggaaaattacagactcctctcatctaccaaagggacttccctggtggctcagaggataaagcatctgcctgcaatgtaggagacctgggttcgatccctgggttgggaagatcccctggagaaggaaatggcaacccactccagtattcttgtctggagaatcccatggacagaggagcctggcgggctacagtccgtggggtcgcaaagagtcggacacgactgagtgacttcactcactcatctaacaaatgagccataataccacacacggtttccccactcgccgccacctgctgcccaataccaggagacagaacacctttcaaaggtgggaacggggactcaggacgtggcaacccaccccgccagggtctcacccaggacagacccaggtggggatgtctccaaagaaaacatcgaacttttcctgaccacggtgccacctgaggcttgcccaccatccttttttgtgaacacctgctgggtacatgtggagataagacgagtattacattatgatgcttcctcatgcatgaaagtctattttaaagagaagtctggaggaggggaggggcccagcagcaggaaagcggggggctgctgaggaggggagggtaaaaggaaggctcctttactttgcaagtctcagctacagaaaaaaactgtgccttccctgtaaagcaaaaactcattactgtttctctgcttgcagagaaagaaacccacaggtacaggaatttcagagaaacggatccgatttcctcatctgcttccctcgcatcgtcctcccaccctgacttctgggctaactcttggataaatgcacaacaccccccaaccgtacccaacagggatgaacacaagtcttcacctgcaatttcattctgaaatttcaccttccgtttccttccctcccaggcagagtagcacacaagctgcgaag

SEQ ID NO: 31757 - DNA, 1733 bp, Bovine  19866881174283
  misc_feature (1)..(1): n is a, c, g, or t
ntatgtgtaaataaatttgtctatatttactgtgtttataacattataacttatagtattatacattatgtagtacatatcacatagtatatatatatattacatattaaaaaattatatacttatttgtatatgtgtatatatgcacacacacaaataaataagcatgcacacatgcatgtgtgctaagtcacttcagttgtatccaactcttttcaaccccatggactatagtcagccagattcttctctccatgggattttgcaggcaggaatactggagtgggctgccatgccctcctccaggggattttcctgacccagggattgaacctaggtctcctgcattgcagatggattctttaccactgagccattggggaagcccaatatataaatatgtatgtatgcaaaaatatatcgagttgatattttttatttaaataacacatttatatatgcaatatgatatcaagttgatatagatgtatctgattttgaatctatcaagtcaaaattcatctgactcctcaatactgtttgatttttaagagagaaaaataattttaaaacaaggtgttagagaacactctaacaactcctatcacttcacagctgaggactctgaagatctaaaaggggcagtgttcttagaaactttctcaaggaatattccaggagatattagtccccttaaaataagttcaaagggccaaataagtccaggtaacagcatctaccttaacctaatcttagaaaaccagacttgttagcaaagtaaaggctctgagaagtcttgcatttagggaatggagcagttgctaaactttttataaataaatttatttggccacacaatcctgtgtctcctaacataaccatgtacagatgtgagaggtggaccataaagcaagctgagtgccgaagaattgatgcttttgaactgtggtgttggagaagactcttggactgcaaggacatcaaaccagtcaaccctatagggaatcagtcctgaatattcattggaaggactgatgttgaagctgaaactccaatactttggccacctgatgcaaagaactgactcactggagaagaccctgatgctgggaaagattgacggggggagaaggggatgacagaggatgagatggctggatggcatcaccgactcgacggacatgagtttgagcaagctctggcagttggtgatggacagggaagcctggcgtgctgcagtccacagggtcgcaacgagtgggacacagctgagggactgaactgaactaactgaacgttttacacgcctcgggggaaacgtagccctaggagaaatgtccaatcttccatctagagtccaagtctgcttccaagaaatggcgaacatggcaggagtggtcagtctgaccacacatgaacactctgggccttgggacatgacactgaccaacttcccatccccgcccctcccaacagccaggaactttccagacgagatgccaataaaaacacagggccccagggtgcacggaaactgggtggggaaacatcgcaccatgctccctcctcaaggagccttggaaggctcacgtaagcctcctgccaagcatacttaaatggttgagaatgacctagaaggcaatcatctgcctaaaataaactctgagatggtgcagcgctgggaaggccatcaacattctgcagtcaggatgtgctgagccacaggcggcagg

SEQ ID NO: 31758 - DNA, 1722 bp, Bovine  19866881208035
  misc_feature (1)..(1): n is a, c, g, or t
ncctcttgcctgcaaaatcccatggatggaggagcctggtaggcttcagaccatggggtcacgaagagtcggacacgactgagcgacttcactttcacttttccctttcatgcattggagaaggaaatggcaacccactccagtgttcttgcctggagactcccagggacgggggagcctggtgggccgccatctatggggtcgcacagagtcggacccgactgaagcgacttagcagcagcagcagcagactaccatgagggctgtgattgagagtgatgaaaatgctcccaggggcctggggttggaggagagcaattgaccagcctagaagagtcagggaacagaagagctggcatttaaggtaagtcctgaagcatgacaggatttgtagggggagggaaggaaggaaggttcttcagtccagagaagcacacgtgccaaggcagggagtggtaggaagccaggcctggcgtggacagactgtgctggggaaaggacaggccggacagaaaagctagggccagactttggaggagcctgaaggatgtgctgggcttccttggtggctcagagatttaaaaaaaaaaaaaaaatcctcctgccagtgcaggagacagcttcaatccctggatcaggaaatgacaacccactccagtattcttgcctggaaatcccatggacagaggagtctagcaggccacagtccatggggtcgagaaagagtcggacacaacttagcaactaaacgccaacaacaacaaaggatgtgctccagaaactagaactgtgtctttaagctgcatggagcccactgaagggtatcgcgctgaaggatgacatgtccagcctttattgaagctggagaccgcagcagacatctaggttggtttatttgggctctctgatgccttcctcacctggaggggcaagcagagacggcggtctttacccgtgttggtcaccccatcctggggattctctcctccctatgcttccatacagcagctcttccctgattttcttcctacctgtctggtggctccttttcagtctcctcagcaggctcctcttcctctgcccatcctaagtgctggtgttcctcaaagttctgttctagaacttttcttcatctcacaagaccattcttccttggagatctcataggttaccatggcttcaaggaccaaatatggattgggcgatttctcaggtctctctgcttatttagacccatcagatctgtccattggacatctccatttagttattttcattaaaattagctccagccatgagtagagggaaaactctaagtaaaatggcccaaacaagatagtttatttctctttcagataaaaggagtccagagcctggtatatttccaagcctggtataacaacctgggagtcacatctctgaaatctctccctttgtctctatccccaagccagcatcctcccccttggtcacttgcaccaacttccctgttcttgctcctctcaaatgcattgtccacatctacactgctcagcatggtggccaacaaacacatgtggttattcctaagtactcaaaaggtggctagtccaaatggagatgcactgtaagtgcaaaaggcacactggatttcaaaggtttaatatgaaaaaaaatgtaaaatattatggtttctctactgattatatgataaatgataatagctttgatatattagagtag

SEQ ID NO: 31759 - DNA, 867 bp, Bovine  19866881235334
  misc_feature (1)..(1): n is a, c, g, or t
ntgaacgcccagtcccccccagattcgggtcaccagtacaatgccgttgtgtctgctttctccctggcacaggaaggacgaaaaatggtcaagttcaccccaatctggggcctcaccccaatcttcccggacatgtcaaaatcgtctcctatacaacaaagatgagaatttggcatctgcctgagtgggggatcttatctccaccccccatcgccgaacatcctctgggtcaagcagatgaaatcataaatttataatacaacattacttcaattttcctcttcatttacttctgtgcagcccagctctgctccagcggctcacagccccggccacacgggggaaattggctggctgcatatcaatagcacattacagcagccccatgcagacgctccatcaagccacattatggtgagatgacccagccaccacttccattaggagccaggccccgcccgcactggccaccgcacaatttatttgctccagtactctggatgcctgatcaatcccacagtaattatctcttgtcactaaagaaaaaaaccaaaccttctgcctggatgaccacctttcgtgcagacgggctttccattgtgtgtgtgggtgggggaatcagaaatcaacaagagattttgaatttgccagtccgatcatttgggtgatgctggaaaaattctcagaattgtggctctagatatttgctccaaccctaaaagatgtctgtgttttaaatgggcacatgacgaattctcttccaggctctgtgactcagctaactcagagtcaaggaaaactgctccaccgaggtacccgactggaagagacaagagacaagggctgtttatccagggagctgccagt

SEQ ID NO: 31760 - DNA, 745 bp, Bovine  19866881292152
  misc_feature (1)..(1): n is a, c, g, or t
nggtgtgcgctgggggccaggtgcagctctagagtaattttcaagcaagtgtgggtccagcccagacgtcccccctggtgcttgagaaaggcattctcacaactggtgtgctgtgcattgagatggtgaatgttttcttgcagttgaatgtgtaattcatttggtatcgggctatgaaaaatcctttctgagttttctgccttttatttcagccccaagactcttttatgatgagtgggcctcccccagtctctctgtctcacccatctgtccctgtctctctctctctgtgtccttctctgtcagtctctgtctcattctgtctacatttgtccccaccccctctcctacagtgacttggaagcattaagacccgtgctttttccacaaatgcaatgtgtcgtcttcaaagtgggagtctgtgtacttcttccaaggatctcgcctttgctctgaacattttcaaagctttcactgtgaactcatgctccgactctgtggcattttcctctgaatatcctcactggtgataaatctttggcctttgaaagtggatgtgatttttggaaaccgtcaccagccccagctccaaataacttgtggccaagattgattatgctgtttttggatcagaactcagcaggactataaaataataagactagttgtctcgcgtgagttgggaaatgcctggaagggaattcctaccccacccccacccaaatctcaaaaacacatttgaagt

SEQ ID NO: 31761 - DNA, 776 bp, Bovine  19866881353193
  misc_feature (1)..(1): n is a, c, g, or t
ngaatttctgcagcagcagctccggatcggcctgtggtccagctctcattgagggtgtgaggggggaagggcaggtaaggccagggtagacaggacccggctcctgcagggtgacactggctatggtttgaatctccaggatccaacaatgccagagggtgtgagggccagaattcagatgcaggctgtccccagatgacccccagccacacttatgttttaaaattatattcttactgtgaaaacatgttgtgaaaacagcatgagggtgactttccaagaatgtgtttcaattgcctgtgattctccccaggcctgtgcacaataattgcttacaccttttctgtgatcccttctggtctttgtctacattacgcataaattggtcatagctctgatcctcctgtccgtatcactctgtaagcgctctgcctctcctaaatggtgttgcttgtttctacatagcgtgcataattatccatgttaatagctgcatattatgtaggatcatttttaattaacaacagcaccctgggttaacagttcatcgttctgccaagaattactttatttcctaatctcggttttgtataatgctgttcctttatgagaactctttcttaacaacctcaaagtgtgtagcagggggagatgttattgtcctggcttcatatatggggaaattgtgacctggagaggcaaacctgcccaaagtcgtactgccagcagggttgggccgagaggaaaccttcttctgagtcttttcgagttgagag

SEQ ID NO: 31762 - DNA, 1243 bp, Bovine  19866881380316
  misc_feature (1)..(1): n is a, c, g, or t
ncggtggtgagggtgtggaccagtaagctccgaaaagaaatccgtgtgatttggtgggtgaaaaggcactggcataagggcagccagctgcagaaggccggcccagggctgggtgtggccacagctttagaagctgatgcgaatgagtcaccacgggctgcagtcacaccaggggacagagagagctggaaaggcagagaaaagcaaccccgggggcttgaggctgtgtcagccctaaacaaggcctggccagctcgctgggcaagaacaacttccaaatgccaaccaggggctcctccttgagtcagaggactcagccctgcaagtccttgagctttgccagggaaggacactcctgggtttgtggcttttcctgcgtctagatcaccagctagagcgtgagccttcatttgttcattctgagcccaagcaaacactgcaagcttgagacagcaatgtaaagggaagcagcattgaagagaggccacctcaggaagcctagtgcaaatccctgccctgctgcttcctagcatctgactcaaggaaagttactctcggagcccccagttataagggggaggctagtggtgccaactctattgccaacctcaaaagggaagtcgttgcattgcagtaaatggtgtgtgtcaagccctccacaaagtacctggcacataggaagtccttcccccaatggctgctgcatgcaggccatctggaattgccagcatcatccacttgaccttgaagctgcaggtggtcaactggccgagaaacaggacgatgagaggcctactgatgtgcccacagtcccacagctgacacctggcttcccctctcccacccagcacaccttccatgactagttagaggacatctctgcagagtgtataaggtgggattcttcttgctttctttttagtttttcagtcttggttgttgctgtttgatttggcttctaaccaagagttaaggcagggctttcagaagctgatatctccccatctcttctgttgctcaaggtcgctctcagagggacccagacttgttttggggatcctgtgagattacagaagccctgctcttcctaacaccctatccagagcagggcaggggcctcacttgcaggaacaggaagcaggcaggccacaggcagtgaggccactacagcagagcctgaagggcctggacgaatgtatcttccccatgaatctgtgtactgggaagcagcccgggaagtcat

SEQ ID NO: 31763 - DNA, 1136 bp, Bovine  19866881414906
  misc_feature (1)..(1): n is a, c, g, or t
ngccctggtctcttaagtaaggggtctccctcaaacccttctaaaagacgactctggtcctcccgtcgttcacaagccttagggattccagcctagcttcgggtacaggtaccgcatcttggatggagtgcaacatccttcctgctcttgcccccagaccacctgtccagcctccgctcccacccaaaccctgaccccactctccagccccctttcccagaggccgctgcctgactgctctctcttgggctctgaaagtgaagtgaaatgaaagccgctgtgtcctgtccaactctgcgccacccatggactgtaccgtccatggaattctccaggccagaatactggagtgggtagccattcccttctccaggggatcttcccaacccagggatcgaacccaggtttcccgccttgcaggcagattctttaccagctgagccaccagggaagccctctcaggtgccccgatccagtccctataagtgcacccctccacagggatccatctcctcctctgttctcctgcccccgcccccaccacagcattctcccagccccatggagcgtggaggctcttgcactttgtcttcagccctgtctctccatctccagcgcggtgcttggatggcggcggggaggaggcctcaatctgtgcagttaccagccctgtcccgcctgcctcagttctgagaatcgggtgctagcgaggctgggtcctgggttccaccaccctgggcaaccttgccctccatttgggagaagtcagttcaaggaccagccacctgatcggcagtcctaagaggggtgaggccggagcgtacaggcagcgcgacaggacccatgcccagggcagcgagaaccgcgccagcgtgtgccctgctgatgacaggtcaggtgcgtcagctccgcacataagaaaaagcagcagtggatccatctttcagcatcctctaatggtactaagcagcgtgtttagctgttatttcaataagccttattaagacccaattttcttgggtcttctttcagattctgcggcattaaaagcctcgctgcttaattacattaggagcacctgtatatattatgtgcaataaatcaactttaatttaccaccgcacaaggctattcat

SEQ ID NO: 31764 - DNA, 1925 bp, Bovine  19866881610128
  misc_feature (1)..(1): n is a, c, g, or t
naacagattctgactcaaacccttgagacagttgggccccttcccaagaaacgctggcctctgtgagatatctctttcagttctctccagtagatctccttggaatttgccagataaagaggcaatttatcatgtggccgaaggttatacgtaatgcattatctgccttccaccaggattagcgcatccatgtaagaaccctggttgggcctccatcttgaggtgccatagcaacatgaaatcaacaaggagaggactcttaaatgaataatttactgatttcataagaacctgtcttgcaatttatagttctattatctttcctacccgtgtcttaatgtctctgtgtaacagctgcaatcagactgaataatatttgagaatctaataagcatatacaaccctggactcaaactgacaggtggagactggttctgagggtagtaacgttccttggaggccaaattcgaccactgctgtcttttccttacctcttgcgcaaaagcgtaaaagttagggagcaaatgtcctccagtaagctttatattttcaaatgaaatgtttttcttccttgggatatctggagccaatcaaggcagcgtcgaatggcattcagaaaggaagaaatatcactggctacaatttaccaattgtcacttttaaaattccccagagacctagttactagcaaaggagagaggaaaaaaaaagtatagtttcaatgacaattgcgatattttaaaagctctttcagtatcatcagtgatgccattttagtggcaaaagcacatcttgtcactcagcctcaatttaaaggatatttatgaagaagacgatacaatgaaagcagatttatttgctggcttatttatttgggtggaataggttacagattattttggttctgtgctgaagcagaacggatgtacactttttgaaacacattacccgctacctgcttctctgtagtcttctccaaaaaatcaacccaagagaagaccactgactccggggagatgcagacgtctagtggtcacagcctcagggaggtcgctgcagaaatgcgcactgaccacgagcctggaggagacggtctccccttctccaatgccctgggtccactttcctagcattcctagtgagccaccggcatcctgaaaggccatcagtgtccctaccaatgtcctttcctgcctccaaagcctaatggccacgagcaatacaaacccactcctctgtcttattttatacagctgatttatgacactgtgctaatttctgcggtataaagtgactcaattatatatattatttttcatactctttcccattatgatttattacaggatattgaatttagttcctggtgctatactgtaggagcttgctgtttatccatcctatatataatggtttgcatctgctaattccaaacctcccccctctcttcactggctggcaagaagctctgtcctgtcttcaggacactgaggctaaggctgaagtcacctctcattaagtgactggagtgtgagctggcagggaaacaaactcatgcgagtcactttgcaaacctcatgtccccaagacgaggacagtctggccccaaaggtagaatgtggcagttctgagaacacaggatttttgtgctgaatctcttcccctcgcctatttatagcgcctcgtctctacagctgaggtctgaaacccagccaaacacaggcagaggtagacctgttaagtcctgctcaatgattcaatctcaaaattctgaatatattactccagggctgaggcagatactcagatgaaagcgacaagaaatctcctctccagcttcagaaactctcgctcttctggccggagcctgaacctcggctaatgtcaatgagggtcccgcagactggcttcagaaacactgagga

SEQ ID NO: 31765 - DNA, 1827 bp, Bovine  19866881611669
  misc_feature (1)..(1): n is a, c, g, or t
nggtacccactgagatggcgcctggaaggaccatgcttgctgggaaatgccggcgaggctttgcgttgatgctcgtggtgcacgtttacagccgggagctccccgttctcccagggccttgggaagacgcggtggcgtctccctgcctgacacggcctggtccccgcgtctcccgggccgtgtctcactgggcccactgtttttccagaagcacggggtcaaccctgagtttgcccccagactgtaaaccccacccccgtcagttatgctctgtccatggtgctggtgctgccgcctcagaaggaggcattacaagaactttaatctcctactgtcaatagctttaaggtaaagtatattcagggtaagctctgcaaatgtcagcaccagtagcgggcccagggtctggggctaacgcatggcatttactctgcaggttcaagaaagtatgtgggttttaggggtcgcggggcaggtacgcgcgctagcagctcgctcccggagacaggcagtggcggagcggactcccgggatctagggagcctggtggggcggggcgggagaaagtggtagtcgggtggacatcggcatttatgcgtggcggagcggaagagtttggcttttcttgcgcgcctttgaaaaccgcgcctgcttgtgagttgagaggtccgtccgaagccaagctcgcggacctgagcagcgtgggcgatgtaggaagcgcgctctactcgcgccccgcgcccggaaccacccccgccccacccacgagtgcccatggttacgcacgtgctgaccatgagcgcccgcctgggacccgtgccccagccgccggccccgcaggacgagcaggtgttcgcgcagctcaagcccttgctgggcgctgcgaacccggcccgcgacgcggccgtcttcccccgcgactagctgaagcagccgaaccaccacccgcaggcgcagcccgctccgccgcccgccgcaggaccgcggctgcccgccaaggagctggtccagacaagatgtgaaatggagaagtacctgacacctagcttcctccagtttctgtaattcgagaacataaaaagtatagacgagacagtgcctcagtcccagagaacagtgcccagttcttcactgacagtgaagggttgccttacagtatcaacatgaacgtcttcctccctgacatcactcacctgagatctggcctctacaaatcccagagaccgtgtgtaacacacatcaagacagaacctgttaccattttcagccaccagagtgagacgacagcccctcctgcggccccaacccaggccctccccgagttcaccagcatattcagctcccaccagaccgcagctccagaggtgatgaatattttcatcaagcaagaactttctacaccagaccttcatctttctgtccctctccagcagggccatctgtaccagctcctgaatacaccggatctagatatgcccagttctaccaagcagatagcaataatggacactcttaacgtttccgtttcggccgccatggcaggccttaatgctcacacctgcgccgtccctccaaccgccatgaaggaattccagagcatgcccccttgcacatacaccatgccaagtcagtttcttctccagcaggccacttacctcgcccccgcccccgtcaccaccaagctcagagcctggaaatccagatagacaagcagagatgcttcagaatttaaccccacctccatcctgtgctgctggcaattcataatccaaatttacctgccatcctgccagttacttcacaaaacatccagcctgtcagatacaa

SEQ ID NO: 31766 - DNA, 1022 bp, Bovine  19866881678791
  misc_feature (1)..(1): n is a, c, g, or t
ntttccctcaccactgagactaggctccagaatggatggtagcatggccacctcatcctgggctatcctcctaaagcccacctgggagcagatggccatagggcaagcagtgtctaggccagatggctgaaggggggtgatacccatactcacccccaaaacagatgccccagaggttaacataggtccacttatctacccatataccggagagattccacagtcctgcccctccctcccctctaccccaaaccaagatacacacacacattcacacacatatacacagaggaaaatcaagggaaacattgatttggtttgattgctaagacctaactaagaactagtcatcagaaattcccttgccagccaactaacaggggctgctctaagagaactccagaggaatgagaaaaccaagggctaagcagggagcagacaggagggaagaatgaaaacaaacaaaaaaaatcgagctaatcctaccctcaacatcctccaagcatgagctctggctggaagaataaaagaagataatccacaaagacacagcccttacttacaaactcttctgacaaagacagcaagacaagtctgctccccactcccacacaccacagacaaacacgtctcagggccccttaaagaatccagccccactccctgccccaagccgtggaatcacagttcagtggaatattctccctggtactagatcatccccctaccctccgtcctatccctctctccttgtcaatcctcactgtccctcccacagccttcctggccctcctaaagcagcatccaccaccagaaaaggcagcttgcagttttagttccacctccagaaacctatttcttttccccagccctcctagtcttacaggctttttgagggctttttatttgtatagggagagaaagagaaaagggaggagtgggagagatttcctagtgcaatacaaccaaaaaaaaaaaatttaagtcttgaaaaataaacataaagcagccttcttccccag

SEQ ID NO: 31767 - DNA, 1694 bp, Bovine  19866881679053
  misc_feature (1)..(1): n is a, c, g, or t
ncacccccctgaaagcctgctactccctaaccttgaaaacgagagtgtgttctggtccctccggcaaccctctgagctgggctggacaaccgcattgaggagccctctctgaaaaggtgagtcctagcagagggaagcaaatcattttttaaaagttggaaagaaaaaacttctgggaaaccaaagctaatctatgcactaaacctactctcccttcctcctacggaagctccgagaaaggggagggtttaaggcagaaacaaacccaaaacctgatccctgctcagctcacagcttcaaaaaatggttaccaagttgcctccccgcaaggcacaaaacagaggcagttttaattctccacctctccgctcccattccgaccaagctgcctccccacagcgggggcaggagatgccatccatcctttagcacttcccctccattcttctcatctccatggtgaccaaaaaactccttcacccagataaacaagaatcccaaagtctaaaactttcttattcccagtaactgtctttgaccgtattttaattaaacgctttctttaaaaacgggggtcagagggcgtccatggcaggcctgtggttacaactccgcacttccactacacggaacacaggttcaatccctggtctgggaactaagatcccacaggccacgtcgagcagccaaaaataaatagataaattggggtcagagtttttatgtgtgattacagtcaaaccacaccacccccatctcctccttcaaccagctttacgcccatttacaaatatgtatatttttcaaatttcaaagccagctgtggctgcacacctgtaggcaacaaacccgtcaagagaaaaaaacacacatacacacctctgaaatacatacctagagcacacaggtttattttttgtttggagtgagagacacgtgtgagtgtgagttctgcgccagcagctgaactgcaacaccctggggggagggggagggaccagctcagggctgagccttaaggacaactgaagccagggcccgcataaacctcccagccagaacaaaccccggggtggagagctggaggggccatcagagcaccttcattaaggagaggcaagcagacaaggaggaaaagaaaccaacaccccaaaaccactcaactccgcaggccccttttctgaatcaaaacgctgggctgtgctgatccagaacatcagagccacaggcttccccagtgagagccaccacgaacaccctcgaatcgctcgaagctgcctgcttctgttggcaccatgtccctttaaagactgtttacaaatagacagcgatcggtatttcctaactcgagggtctcctgaatagaacagggccccgctgggcacactgtgaatgcgaccccagtccccagtgacctgccacctcggctgggagcccctgggctcggggaacacccccccacacacacacaaagatcactccgctggggcagccaccgtgtccgatacctgcacatcctccacctactctgccgcccctggagccccatctcctcttcccctccactgcctctccagctctggatggagctttgtcgctggtgccgtctgtcgtcctttgcagacgtttttggtctgggggcgtgggaagaagctatttctttcccctttctctgccttttttttttttcttcc

SEQ ID NO: 31768 - DNA, 772 bp, Bovine  19866881692424
  misc_feature (1)..(1): n is a, c, g, or t
nctcttccctgtctgactcccctttagattacaaacttcatgagagcacagagctggctgtctcattcatgtctacacctacaatgcccgggaccatgctcaacacaaaggggacagccctgaacagctgtcacgaatgagggacattcatgctgtcgtagaacaaagtgtggtctcccaagcccctggaaaaggctgtgtattctagaaagtggcctggttcaactgaggccaggccaggcaacatggagggaatgggaggacttgggaatttggggagacacccccagggtgggaaacactcggcatgaatgaacaaaaactagttgcacgttaatatgtgctgccttctcctatgaacactgtaattttcttcactaaaacactgtctaacagaaccaactcccctaattacagacgtttgtatgcattataatctttatacaattaaacctacttaaaagaataaatgattaaatgccccccttgccctgtcactaacccatccctcccctacccaccaccaccaaaaaacaaacaaaaaacaactaacacagcaaccaaatataaaacaaagcgaaaaaaaaaaaaaggatgctaaattagaatgccaagttaagttgcagacacacaaagatcccaggaaattgaaattcaggctgacacagaactttgtagctacaggggggatagtcaactttcgacttcaaacccagcatctgacagctcaacatctgactgcaatgtcaaattaaaggcttgtatggatcgt

SEQ ID NO: 31769 - DNA, 1599 bp, Bovine  19866881722496
  misc_feature (1)..(1): n is a, c, g, or t
ngagctgctgtttccccgctgtgcataccctctctcacttcgatttccgtggaccccaggcctgagctctgggagggaggcagaggggccctggatctgcctgctgtctccctcccactggaaccctggcctgctcagttcctctgatagattgttttccatgtggagtgctaagcccgtattgagaggctgtggactgcagggtgatggactcagcgctgtgtttagagaggtgggcttggctggccgagtagggagaggctttgtctgagtcgcaccagtagttctgaaatgacttgaaaaagtttgaccttggggaatttccattgtgagtaaaacctagaagattctcagagttttgagaaagccactagtttctgtctgcaccatctaccccctcagctgctgtctttgcttccttgcgaggctgtctctagttcaggtcctgatcgcccatcacgccagggcttttgccccagcctccagctggtgtggtctcctcccctgcagatactctgcttctcctcgaaccctgccttcacagacgttccagtaaattctctcacctggccttccagccagaaaaggagtcccactgcttttccaccttcttctctgttgatgccacagtgagaactctctgctccaggccgctggtctgcccggggtcccaggcagcgtgtctgatgtgcccagttcggagtggtcccccacctccatctcggctaacttggcccacccttcaaagccagttctgttcactcacctgccatattatccaaacaggacacccttctttgcatttattgggcacttacttcttagagtggaatattccatactgggtagatttttgttctgaatatcttctattttcgtcacctccgcagtgtccccacattgtcacttgggctaaatctggttcagtctaacaaactcacaatggtccatgaatattttctggtctttttagttgatattggggatggggcaggaagctgagtgaggaaagagccctgaatgattcccgttccttcctcttaccctgaggttggtccagcgggcatcctgcagggcctcctgcttcagcatggcaggaggacatctggagcttgctgaaaggtcctgggttcagagctgaatcggtccctgttccatcgtcaggtaccacggaggcctgtgaacactgcccagcgagtctgaggcctggtggggaagctttgcagcttccctcttaagtggtgtggcgtctttgcttcctaacctaatctacccgaaagatgcccccatcttggaccatgggagtgtttctctagaaagaagaagttagtttttttgaagaagcaacctggaatcgttttaagcgtgtgatattatgatgatcattttcattgccgtcatatttctgttgaacgtgatttggtgccttttttcggaaatctatggagaaggcaatggcaccccactccagtactcttgcctggaaaatcccatggatggcagagtctggtaggctgcagtccatggggtcgctaagagttggacacgactgagtgacttcactttcggaaatctaaataaagcatggaggaagtgtag

SEQ ID NO: 31770 - DNA, 744 bp, Bovine  19866881747702
  misc_feature (1)..(1): n is a, c, g, or t
nctgacctgcaagcttgtgttgctaatatcactgctttattatttatcaaatcaatttcttcatggaatgactaataacccagccgcagctgctcttcctctccctcccgaccccagctgctaccgcccttgcagcggcaagatctgcggggctacctgcagtgcctcaagccccacagctcgaaaaagaaccttattatttatttatttttaaacagaccctcgaggtgccacttaggattcaaaccactttgtggcggctgcttatactatccaggaaaagttaatacaaggccaggacacgagcctttatcttaccaggggattttaattgtagtctcataacaaaggaaccacaaaccgaaaataaagtaaaaaacagagacaggtatctacttttctattttgatcctttataacatctttgattccagtctattttttttttaaaaccaaccaaacgaaagtgtcagtcgctcagtcgtgtctgactcttgcgaccccatggactgtagcccgctaggctcctctgtccatgaggattctccaggcaagaatattggactgggttgccatttccttctccagaggattgtcctgactcagggatcgaacctgggtcccctgtactgcagtcagattctttactgtctgagccaccagggtagcctaaaccaaccaagggccacaaccaattcaaatgtgcactgatatgatgcaacccaaggcaggtaatcccagaaa

SEQ ID NO: 31771 - DNA, 1212 bp, Bovine  19866882050419
  misc_feature (1)..(1): n is a, c, g, or t
ncaagtggggaggaggtcggggcctcctctcttataagtccagcttggattgtttgctcggtagaacattccagttggggtgctgtttgagcatctggctttgagtttttaagtactggcaggtgcagggggctctgccagatgagtgttggggtgcgttgtgggcgaaggcacggctgagtcttttctcggacagatgggctctctcgctgacatccccaagtctgccacactgagaccagctctgggggcttgtggtcctggggaagtgagctggactggtaacatctccagggtgctgccagctgtgggatgggcgtggccccccttccctgcggcttgcggcccccttcaaggcgggccgtctcgtctttggaccggcggatgtcggccacaagtcagttgaccccttctctgtgctcccgaaggacttggcaacttggctaacaaggagatggttgttagttcatttcttcattcattattcatgcagcgagcggtgattagcatttaggaatgtggtttctgggggttcgctgagttgtgttcattcactgaacaaacatttgttgatcctgggctctggactgggtgcagggcatggcgctggggttacgattttgaggaaggggtctccttggcccgtgagttgcagtgtttgagaaggcaggttatcagcaggtgtaggtgctacagcccacaggtgaaggatgctgaaagaggtacaggacctgcgaggggggcgtagggggagagctgggaaggcttcacggggggagagacactggacttgggtcttgcagagtcaatgggaaagacttggactgtgggaaggtgctcacctttcggggcaaacgggattcttggcattttgtttcccatgagggatggccacgtgccttcctatccttccaggtcttcctctgtcactcaggaattaacactggggtcctgccaccgtggggcttggtgtggaggctcatggagacggagagaggtgcagcgagtcctgcaggtgcccgtggctgaaaagaaggctggcttcagagcctcgggcatgtcaaagatgcacgcccgtggagcgctttccacaaacgagaacccagattctgactctgccccccaaagttggtctgctttggcggcatcttgtttccttgaccaacaggggaggttgagatgcgtcactcagagcagtgggctggactggta

SEQ ID NO: 31772 - DNA, 1410 bp, Bovine  19866880615553
  misc_feature (1)..(1): n is a, c, g, or t
nctttctattatttttaatcattccccagttttacctataccgttgttaatgacagcaaccatcccataaatttagtatagatatccagatggttctgagggagatattcaaatattctgaatcttgaatgtttcaattccattcattcaaattggcttattttctactggttccttcatgaaccccactagcagaaagcactatgcctgacgccctgtggccgatgagaagacagaattcttactcccaaattcaccaactggcagagtgaggacgctttaaccagcttcaccaatttaaccaactggagtgtgttgtttttctttaaaaaaaaaaaaattttgaaaatcaccatcctgaaaaggaatattttattcatgctggtctaagtaatgagggggaaaatattcagtactcaaatggaataaaaaaaaaaaaaaaagtcagcatgaatttccaaagacatctggaaaactggcagaagaattaaaaatacgaaagcaccggtaatcccagctgggctgaaattgccttcctgtggaaaccctgaatagaaaataagcttctaaaaaggcccgctcaatgcattttctttatatgcgttaccagacctaagactgctttaggaattcccaaagacaatcctctggaaagttcatttacacagtgattccgatttaatcaggggaaggcaaacctacaacgtgtccccagggccccatacgggctttcagttcacgaacgtattcgattctgcattgagaacaagaatccaggcagagatctgacctagaacagaagtcaaatctcaccctcccccaacccctttacccacgacagtcaaagactgagcctcttagcacaccacacctgagaatagggcttcctcactctaagaagagagtgatggctcaacccacccatctggaggcggccagaactgaccctcaatcattccctccatctccatgccagattttgagcccgcactgaaccccatcaatttaagacaaactcaacactacgtatgacagcattccattgtcacacacactgagtccattcagaatctatgggctgggaggaccacccaggtggtaaggctggacccacacgtcataccaggatcagcagctcactggctgtgtgacccaggggaagtcacttaacccttctggatttctgtttcctgatgtgtcacttacatactggacaagatgctcttgctctcatgtaacctgagtgtcaggggacaaagagcctgttaatatgtgtcttcagaagtgcttctggaggcgtgatggccctggccttgccctcttaccccatttcattcctgcatgttgggctctgttctgttcctgactagttgtatattcccgagagacagggttcccttttttgtgccg

SEQ ID NO: 31773 - DNA, 956 bp, Bovine  19866880654119
  misc_feature (1)..(1): n is a, c, g, or t
natttatttttaaacaagtggggggaaactgagtattttgaatgtcatgtgcaaaactgatccacgtcaccatctcaccgtcatgactgaacatggcaaggcgggtacactggtttccagcatcacaggcaacactgcatgtatgtattttaatgagtaatgtaaacttcagtgttaaggcagctggtactaacgctgcacacaggcttagctccgtgcccacctcaggaatgggatggtcagcacttgaaaacaaactgagagagaaggaaaggggagccagcattatctgacaaaaacaatgcatccaaatatttttcctttcacacacacaaaaagaaatattggaacacttagaaaaacaaagcacccatcccaccaacttcagcctgttccttaacaaatatttcaaaatactgataaataatagtgactgcaagcagaattccagtgccagagccgatggccccgaggaagtcggccaacactgacagggcgccgatgcataagcccccaaatgcagctgctgtggggatgtacctggaagacaaaaaccctgagtcaggcggagcagcggaagggtgagcaactaaagggagctgtccgcagtactgacggctgtctggggccacccagttaacatgctgatgaaaactgatgaagggcatgatcgggctcccttatttcaagaaaccagttaacagccaagaaaggcaatacatgattttcatgccagaagaggagaatcctcaactgtcacttcagtattggaatatttaatattgtttgtaagtgagtaaccttttacctccctcttttagataaacagtgaatttcaaaatgttttcctaagtagcaaatttatgtgataagatttggatgatcttaattcacccctggcaacatgttggaatcacctggagaactgttaaaaataatgggactggggacttccc

SEQ ID NO: 31774 - DNA, 3505 bp, Bovine  19866880664284
  misc_feature (1)..(1): n is a, c, g, or t
nttttctgaatgttgagctttaagccactttttcactctccactttcactttctcaagaggctttttagttcctcttcactttctgccataagggtggtgtcatctgcatatctgaagttattgatatttctcccagcaatcttgattccagcttgtgcttcttccagcccagcgtttcccatgatgtactctgcatgtaagttaaataagcagggtgacaatatacagccttgacgtactccttttcctatttggaaccagtctgttgtttcatgtccagttctaactgttgcttcctgacctgcatacagatttctcaagaggcagatcaggtggtctggtattcccatctctttcagaattttccacagtttattgcgatccacacagtcaaaggctttggcatagtgtctattacataaaaaacattgcgaatatactaacaaaagagcaattttttaaaaaacattgtaatacaactatgacaagacttccttctcttcctgaagacaggaatatggttacatttacatcaatctctgataacatttagaatatgaaattttctgaattatgtaagagtacacacacatttcttcacttcaccatgaagaatggaatcaaatgaaatattaacacaagactaaaacattgctgcctaaactctgatattataaagaagtcttttaataaatatctgtaattgaattttgttatctacacatttatgaattcttacagtcaaagaaatgggattaacatatatttgtttatattaaattaaagttctgggcatacagggtgggcaagcaatttttggatgcaatgattaaaatgtcttgttcctgaaattacaatttccaaatgactcctttactgtgcccctagaatcactaattccaaatcaaatggcctgtatagacaaattaaacttcccaatcatctctttaaagaaaatctcactgagatcacaacacaatctatacaactgagtagttgtatagatttattactgtgaaattatcacagtagtaactactgccaaagtttatcctaggtggcgctagtggtaaagacccctcctgcaatgcaggagacataatgagacatgcgttcagcccctggtcgggaagatctggagaagggcctggcaacccactccaggattcttgcctgaagaatcccatggacagaggagccaggcaggctacagtccataggtcgcagagtcagacatgactgaagttacttagtacgcacatcaactcttaaggggagggacagccctttcccccaccacagataatccaatttctgtaaaatgagtgaaaaaggagtctagttgacccttgaacagttgcaggggttgtggcactgaccctccacgcaggcaaaatccatgtataagttatggttactcttctgtgtacatggctcctctgcatcgcaggattcggcctgctgcaggcggtgcagtactgaagcatttattactgaaaaaaatctgagtctaagtggacacttgaagcccaaactgtttaagggtcaactgtattatgggtgaaggcaatcctatttctttcaactggcagtcaagttacagtctcatcctattaaattttatattttaaaaaatggctttcagcaaaagcagaaagttgtgtcactacaacttataatgcaaaagtagcacattaagacaaatgcacagaataagcaccatacttcaggaatgactaaaaaaaaataattcttcaggggaatacaaattctagaattacatactctgaaaacaataaaggatcttactcttctctaattctatagttttaagagggaaaaatactccttggtcagttgaaaattttaactagtcaaaattcaatctacaataactcacatcttgatcacgatgtggctggagtgcttcagaaggagctatgatgaagaggaaggcagaatttactggattccatttctagcaactctgttctttcttcactagtaattacatacctttctccagctaatcacagactagtttactgccattcggactacgaaaaaccgcaggggaggcaggaaaggacgattttagactcccatataatcagcaaattgtttctttgaaaaaaacattatttgagacaggagtggagtaagattacaaaacagggaatcattttcataagagcaactgtaatcttaacctaaaaggtcacttaaatgagatgtgaaaatgcttcttagatgtaaaataatacaaagtacttggccagtcttagtttcacaatgcttacaagcttacaagttccaaataaatgataaactgtgctatagataagtgaacctgaaaatgttacagcaagtgcttcaattatggctcacctcttccaggtaaaaatatacgcacgaaatgcaaattacaataaatctgaatacttaagaataaataatgaaatactcacggcccactgtcctagtaaatttactagaaagttgccgctgaatcgaactgagagcatctgggaaatcacgtacaggttggacaccagggcggactgcaggatgatagggatgttggacgtgtagaagagcttgatggggtagctgctgtactgcccgcggtaccgggctgacttgatgggcaggtccacacggaatccctgaaaaaggaagctcaggagtgagtcagggactgcacacagcacgaatctggacagtcacagaaggaaatctgcaaagacagtgctagcaaactcccttccacacagacacacagaaatagaaacccttctctacttcataaccatggatactttgcagctcagcgtctactgaacaatggaccttttgcctaactagattctgaaatgctgacttgttagctactaatattcaaatggcatactcctcctttaagagcagaataaaaatccacaccccacttacttcaacaaagatggtatacgtacctgaaaatatataacaacagcgaacacgaaaactgtggcaatgaggttcatgagattgggcaaattctgacgatagaaagcctccctcagggctcggactttgtctgtcctggtggccagtaaatgaaagagagctatgactgcgccctcaaactccgtacctgatgaatcaagatagaaatcagctgcagcctcatcacccaaagttgtcccaaagtcaacaagcaaccctaaagctccagtacagggcagaaaacagcagtcaaaataattcaactaagttttctttatgatacagccatgtgtggagcttctaaaaaatactgacatccctgaggcaaatgtaccttttgttagcgtaaatttgaagttttctcaagagactattcttgatgaaaacagtcaaagaagaataaaccaaagcaaatatttagttcataatggttggcctcgcctttactttgggggagggggatgggagatgggggaaaagcagcagcgaagcagcaaacagatgtcagaacgaaaa

SEQ ID NO: 31775 - DNA, 2914 bp, Bovine  19866880773501
  misc_feature (1)..(1): n is a, c, g, or t
ntgttgccctcttctcctcctgcactcaatgcttgcaccagtactttggctacctaatgtgaagagccaactcattggaaaagaccctcatgctcggaaagatttattaatgaaaaccatgttttagaagggtgccaggtccctcactgaagagtcagcacaatatcccaccgcctttatctctactagactatgtaacgatcatgcacgccacatccttatggtgtggattgcttcattcataccagcttctaagctacttgtggatgaactggacacctttttcagtccctgagacaggatgttgcatatgaaatactttgaaatgaaagatgtacctgccttccctggtggctcagatggtaaagaatctgcctgcaatacgggagaccttgggttcgattccctgggttgggaagatccgctggagaagggaacagctacccactccagtattctggcctggagaattccatggactgtatagtctatggggttgcaaagaatcgacacgactgagcaactttcacttcacttcacttcacctgtctgtctactgtaatacagagagacgaacaacagtaatattgttgagaaggatttttcagccacaaaagtttgaaaaccagaaatcagaatggattggaatattccatttcgtgaacagtttaattaagaaatactactactaccactagtaataatggcatctactgtttccaggtgctttatgagtaatatgtcatgtaatcgtcacaacctccctgcagaaaagtttttgttcttaaaaaattcttagtagtctgcacatagaggataagtatcttgcccaaaatgtaaagctaagaattgaaagatctggaatttgagtccaggtcctttaaagtccagctgttttcccctgtacctctgtctgtgtccaggctaaccaagatgttgctctcatgtaatttgtttagaggtcaaactgggtaatctaggtttcagggtgatgtttttaatctaaagtatttggtatgactaaataatcaaattaagtaactgtcaaatccctctttgttcagggatttacagatttaaatacaattagaacagatctttccaagtgccttttttttagccttttgtggtagaactaattttggtgagcagcagaatgagaactcagggaacattcaagcaaggaaattgacataatttcagaacatgctcagaataaagtcttcctttctacagggaattgagtggctgacaactccaggaaacgtcaaattgactttaacttcatgcccactgcttgggctttatattagcatgtgtttatttgaccagacacaagtgttgaatttcattaaatctgtccatttcaagtctcctttaacttgagaattacttgagattttcttttatcttatcactatccttttcctacctagtacaagtacagagaatgttgaaatatgtttagggaaataaatattgaagatgttgcatattaggaagtggatgcatctagtatctcttatgaatgggtgttatactgaaatagcctttttattttggcacaacaaatacatttaaggattatgctctcagaactagcatcatacttagtggtgagagaatgaaagctttcctctccatcaggaatgaagcaaggatgtttccccttgccacttccacttaactctgcactggaggctctaaccaggacagttaggcaaaaaaaaaaaaagaaataaaagacatccagattgtagtggaagaagtagctctgtcttgatttgcagatgataaggtcttgtagagggagacccttgcctgcacgcatgctaagttgcatcagttgtgtctgactttgtgaccctatgggctgtagcccgccaggctcctctgtccatgggattctccaggcaagaatatgaagtgggttgccatgcccttctccagggaatcttcctgaccccagggatcaaacccatgtctcttacatttcctgcattggtagtaggcaggttcttttccactagtgccatctgggaagcccaggcaaacccttaggaatccactaaaaatctattagaactaatgtgtgaattcaccatggctgtaggatacaagatcagtatatggaaattattgtatatatgtattgtggcaatgaatcatctgaaaatgaaattaagaaaccagtgccatttatgatagcatcaaaaggaataaaataggaataaatttattatactaaagaagtagaagactcatatgctgcagattaagaaatattgttgaaagaaatgaccagagaggactaaataaatggaaagacatcctgtattaatgtattgggagacttagtggtgctctgatagcagaagtccccaaatttatctacagattcaacatagtatctatcaaaatgtcagcccagctcttttgcagaaattgatgagctgatcctaaagttcatatggaaatgcaaaggacctaaactggccgaggcaatcttgaaagagaatgatcttggaatatgtacatttcttaattttagaatttactgcaaagatacaataaccaagatagtgtggtactggcataaattatgacaggcatatgtagattgatgaattaagagtccagaaggaaaccctcacatttatggtctattgacttttgacacaggtgctaagacaattttatagaggagagaatagtcttctcaacaaatagcattgggataactggataccacatgcaaaagaatgaatgtagatggttccctcataccgtatacaaaattaacttaaaatggatccatgacctaaatatcagagctaaagctatgttaacaacttagaaggaaacataggtgtatgtcttcatattggagtaagcagttttttttaggacacag

SEQ ID NO: 31776 - DNA, 1086 bp, Bovine  19866880780691
  misc_feature (1)..(1): n is a, c, g, or t
natgtctgcaccaaataagagttgtaaaggcgatgcacgccaggcccgccctcagactccactgtgagcgggggctcgaaacccaaaacttaacagctccacaccccacactgtctgcaaccacatctcctgcacggtgctggctgagggggaataaaaatgccatctgcatctcactgctcatctgccagacacctagctactggtctgcaccccctcaggcccttcctggaactggcactccaccttataatggctcaagtcatgtcatagatcaacaagaggaggttatgaaaatgtatcaaacacacacacacacacaatgtgatactaaaatgatttaactttcttttttcatttgtcacagtcttgaaaagtctgcttaaaaatagaaactggatccacaaattgttttcaccattaaatcagatccacttcttgagcagcagcaaaatgaactcccttcctccaaccctggctgtcttcctttcttctccaggaacaaatcactgtgtctcaaccatcttaaatgacaggagagcagaatggaagagatcaactgtcaggaggcctcagtgccagcattctcccgagggtaaatatcagggacgattagaatggccttacttgatttttcaaacaaaatctttacttgatttttcaaacaaaaataccaatccagaacttcctcctaagtgggagcaaccatcggctggctgtgcctttctccctctccgagagcttcatagcatttgaatgggaaagatcaaagtgttgtcttgaaagagaaaaagatgagaacacatgtcatggcatcgttcttcagcagagcatttgatacagcatccaagccaatgctatttagtcagtaagttcccaggccttagccaggctgtatttacatatcaagaaaacctgcattgcttaaaattcccagttaaaaaaaaaaaaaaaacagaactggtggaaatgctttaagaaaaaagaattagaaggtatgcgtaagtcaacatttttaagcagggcacaaaatgacaaaaaaatctactccagaacagaaaatgttcaagtcttatgaattaaaaa

SEQ ID NO: 31777 - DNA, 1242 bp, Bovine  19866881038804
  misc_feature (1)..(1): n is a, c, g, or t
ntctggtaggtgtgtgcgtgcacacatacacgcatgtttacatctggtgtgtgtgtgcatgcacatatatgcatgtttacgtctggtgtgtgtgtgttcgcgcgtgcatatgtgcatgtttatgtctggtgtgtgtgtgcgtgtgtatgtgcacatatatgcatgtttacacatttctccatactgctgggcacatgaagagcatctttcatccccccggcaggtgagaccatgaggccaaagcctttgagcagctcttctcaacactgacttggctgcatgtaagagtcctgagacggagatggggtgctttttaaaatttcccagtagccaccataacctccaattctatctcaattggtcaggctggagcctgggcgtcaggatgtttgcaaaagattcctgggtgattttaaagtgccatcagggttgagaaacactgatttagagggaaaaaggcagagaccctgagctgagactccccagtgtatccacgatgaagtacttgcagtttaaaagcaattcctacccaggcgagaattctcccccaggaaagatcatctcggcagccaataaagtaaccattagaacagcatggaatcctggggccatgtttcatgagtacagtaactcttgaaacagtccaagccttggtaaccccaactattaggaaaagggttactctgaagacatcggttttgcttctctcgtctcctatattccatctctatgcattcccttcatccgtcatttcagtgcaggctgttcgtatattttcctttctacttctccataaatgctttatgtgttgccttgaaattagatttgagcactgcctgccctctaagtaaataataccacggaaacgataagctccataatccagtggtaacactaacattgtgatattccataatgcagagaacacgcccttcacaggacctgagctaaccattcctccagggaaggctggtgctgagccatacagaccctgcctcctgccggtcagacagaatccctcgatgtcacatagcaactgcctaccatgacgcctgcctctttttatcccctctgagcttggtttaacatccacttatcaagtaggagattcattttgggactattttcagggcaagaatagagacatccttaaggatatattagctacgttactttaatccaatgaaaaacataaatctctcaccctgcaataaactcagcacagaggagggcaagcagtct

SEQ ID NO: 31778 - DNA, 1392 bp, Bovine  19866881073426
  misc_feature (1)..(1): n is a, c, g, or t
ncttgaattaatacactgtgaaaaatgcatgcttgcaaggcttttgaggggctcatcagcagctctagaattgctcagggctagaggttccaaccatttttcagataagctgtgccagcgtggaggtctgtctgctatgaaaaggagaatctcacgcctgagaaagtcccaagctctggcatgaatggagtgtattaccatgcttctaggctctcctgaaaactgttgttggaagaaaatgggtaatgagccccaaggaaggtgaggattgtgaagccaattgcaaagattttcattaagttgatgtgatttacatgccagggagacccggctgcatttccactgaaggggcttctggtctgtgtggtttccttctgcaggatctggccgaggaggcaagatcatctggctggagaaggggctcttatttgttgcattcagctcccatgctgacgattgcatcactcactgtgtggtcctggagtgagttgaggctttgggtggaagggaggctgccgcatgcgtgtttcatgtcacgtcagtccttgatgtgtgtttagacctccagctacattctgcacactgctctaaagacaggctctttaagatatggagaaatgtcatgatattactcacctggggagggtgtggccagaggctccttcctcaggcttccccaagagatgctgagcgtgacagacccagctttgcccggcaccactaagcagccgccgagtggcttcatccacacccgagtgggaacgtgacctagttactgtgccttccagtgctttggcacaataaccagacctccttctcccctccccactgcaagaatcattctgctgagcctcttggaggctggagggccagttttagtaacatgccctttcctggtcggctcctgtccagttattttgggtgagtgttaatggccgtgagtttgaaagttttatttataaggaaactgtccttcttgaccctggagtccttgtcaactgttattctgtctgaagccctttccttcttggggaagagcctgagagcacagtggtcacaaaatctttctggctttgaattgtcccctgtggtcttctgctttttttcaatgctttccatgtggagggggttgaattcagcatctgtgttggtaatagatctcccagagccccagtgaggaggacatgtttcttacaggttttttttttttaatcttttggccataccacagcagcatgtgggatcttagttccctgaccacggattgaacccaggccccctgcattggcagcttggagtctttaccactagactgctaaggaaagtccctctttttcaagagggaccgtgggatgcaccctgctgaggtccatggtgacttgatcttggggg

SEQ ID NO: 31779 - DNA, 1814 bp, Bovine  19866881207313
  misc_feature (1)..(1): n is a, c, g, or t
ntttttaaaggaaaatggaaagtgttagtcattcagtcatgtccgactctttgcgacccccatggactgtagcctaccaggccgctctttccatgaaattttccgggcaagaatactggagtgtgttgccattcacttctcccagggatcttcccaaaccagggattgaactcaagtctcctgtgtctcctgcattagcaggcggagtctttaccactgcgccaatgagttgatacattttttaaaggcctacacaagaaagaagaaaaagcacaaagtattctatcatattaagaaaaagaaacccaattatgtgtggagaaaatgaagatttttttttttctctccgaggaaaattttaattgttcactagaacacccagggagagcatgatcaagtggaaatgatcagctggcctggtcaaagctctccactgggtagcatttggaacattccctattgcaaagacttggaatagggatctgttacaaatgacctaggaaagagctcctggattataattctttgtaattagagacagaaaatctcctttgagtttgctatcaattccctggcctcagttactagaccccaactcatcagttagttatttaccacatcaagcgccccatgaggaaagccagcaaaagtcattttttagtttatgacagacacagacagaacattatgagaacacaatcaccaggaaacaaagaaagcaaatgtcaggcgagaccaagtcttgtttcagttataattacactgcattcaatagttcgttgtttcatgctattttgtgcaaaatgggtttggtttgattcagtttggttcagttctgatgactcctggttgtctctcctgctccatggctgttcacaatgacgacactggagccactgtttttatcattaggaatctggttccaaataaccggactgtgcttgctgacaatctgtttaagccattgtgatgcatacaggtgaggaagggccaaggcacaaggaaacttctgaggttggtaatttccacacatccccagcaatgatatctcatttcagcacaaggtggacaaggatgaatgcactcaaggcaggctggggagagagctttgcttttttgcctgagtggtggtggtggtttagtcgctaagtcgtgtccaactcttgcgaccccatggactgtagcctgccaggctcttctgtccacgagattctccaggcaagaatactagagtgggttgcgatgcccttgcctgagtgggtccctaatatacactacatcctcctgaaaaaaagtatcaccagctcatcattaaattgtgatggtccagattaagaatactgacatgaatgtaaacttcatacatcttctacttcctgttctatttgccaagaagaagcttgacagtgagggtcctttaagcctgtgctctaattgtttgatcctggataatctcagaattcttaacacctcagtctccaaaagtaatggaaacgaagggaggaagcttggaattataatgtggaaggatggaaggggtccacaaaagtaatgcacaaaaatggcccctggcagaaaatacatgagaatccctgccatcttaccctcaaggccatgaggaccctcttcctgtaaactcttccaagtcctatataaaccacaacaggaccttcaggcctcttcatttgtaatacactattatcatgcaaattagcaagctacattttccaaccagaatgtctactatgctgaatggggaccccaatcaatttcagatgacaaactattagatgaatggggtgtgtgtgtgtgtg

SEQ ID NO: 31780 - DNA, 994 bp, Bovine  19866880200960
  misc_feature (1)..(1): n is a, c, g, or t
nctagaaacatctaaatccatgggaattggaaggtggctgtcaccacataatttctgtactcagttctctttactttttaatcatttcatattttaatgccaccaatctaacatgagaacttaactgattgactctttagttacaaaactcttctttacaaaaataaatatttacaaagctttaaactcttgagagtcccttggactgcaaggagatccaaccagtccattctgaaggagatcagccctgggatttctttgaaaggaatgatgctaaagctgaaactccagtactttggccacctcatgcgaagagttgactcattggaaaagactctgatgctgggagggattgggggcaggaggagaaggggacgccagaggatgagatggctggatggcatcactgactcgatggatgtgagtttgagtgaactccgggagttggtgatggacagggaggcctggcgtgctgtgattcatggggttgcaaagagtcggacacgactgagcgactgatctgatctgatctgatctgaaactgagttatgtttgcccagtgtcattgatttctaagatttggggaggggaggcgagggaagaagaagagctggtcacaataattctaacacacacagaagcctgaagatatgattacatcttctctccacttatgtacaaagaatctacagtatgtgatcctgacaacacatgtttcctattttgtcagttcaataaaagcataccatgtcaatggtttttagcttgtgatttggtgattgtttcagcactgattgtcaatgacctatatgtcagctgatacagttgacacagttaaatcagaaattagcatgcagtctcctaaaatgccagacacatggaccctctgcaccagagagatataatgaaacccacatgatacccccattaaacaatgaaacatgtgacattaactaaaaacaggaacacatcagcaaatgtgcctgaggaagtt

SEQ ID NO: 31781 - DNA, 2175 bp, Bovine  19866880216454
  misc_feature (1)..(1): n is a, c, g, or t
ncttggttttccagtggtcatgtatggatgtgagagttggactgtgaagaaagctgaatgccgaagaattgatgtttttgaactgtggtgttggagaagactcttgagagtcccttggactgcaaggagatccaaccagtccattctaaaggagatcagtcctgggtgttctttggaaggactgatgctaaagctgaaacttgaatactttggccacctcatgcgaagagttgactcattggaaaagactctgatgctgggagggattgagggcaggaggagaagcggacgacagaagatgagatggctggacggcatcactgactcgatgcacgtgagtttgagtgaactcttggtgttggtgatggacagggaggcctggcatgctgcaatccatggggtcacaaagagtcggacacaactgagcgactgaactgaactgaactgaaacttcaattccctcatctcaccagaataatacctaaatgcatagtggatgtaaagataaatgagataataaatcttaagagtctcaaacatggatgcaaacattcaataaatgtcagtactcttcttcagtgtttaaactggaacagtccatttccaacacagtattttttccattaaggtaatcaaagatcacatttagtgaggaaaacaaaagctataggacaatattgttatatttctgtaaaagcacatccctatgtcaatctggattgagtgagtcaactacttttcaataccaatactgaggcttacacagggaactagatccactgagacttccaggttgctatatttaactctttggaaaataaaataaattttatatatattccatggaagcaaagagcgccaggtgctacatatgtacatgcttgcttattgccatgaaaaatgaagcaaccaaccctcaatccaagaagactgtttaaaggatgatagcataattttaaccctacttgcttacctaagcctaggaacatgtctcatttgttattggtgctcagtcgctaagttgtctctgactctttgtgaccccacagactgcagcacacctggcttccctgtctttcactatctcccagagtttgcacaaactcatgtgcactgagttggtgatgtcattcaaccatctcatcctctgctgcccccttttcctcttgccctcagttagtaacacaataacacagcactctcattcttttagacaaaataattttgggttatcaccagacagtttctttgaaaaaaagagtgcatccagctacatgaagcatgaaggcatttcagaatccttcttgatcttcctataagatttaggcattttactatatcacatattattaacctaaaaagtgcatatccttttaggaacaatgaaacaaaatagaaagattcactcagacaaaagaaagacatgtacccagatgctgaagtaaaaatggacctgaaattcagtggctgcatgttagaagatattgtggtggtctggaaatagcctctactatctagaggcttgagtttaaaactcagtaaatgtcataagaagagaggaatctttgagcatatttgactaagaaggtagaaatgagaaccctctgaggcagaaccatcaatggctccatcctctggaacgagctgctagaaacacacacattgagccagggaaatggcaggaaattctgccattgcctgggaatatgagtcaaaaagaaaaaaaaaatcagcatggaaagtgagaggcttgattttacatgttttatgggataaaagaatgatcaaaccaataaatttgtagaaaaaattgctatcagtcaacttgcatcagtacgtgctaagttgcttcagtcgtgtctgattctttgtgaccctatggactgtagccggacaggctcttctgtccatgggattttccaggcaagaatactggagtgggttgccatttccttctctaggggatcttccctacccagggatcaaacttgcatctcttaagtctcctgccctgggaggcaggttctttaccactagcaccacctaggaagcctaatcagcacattcaaactcaaaacccttttggggaaaaacaactaaagcttatttagtactctctctatcatacacacacgcacacacacacacacacacagcctggttctaatgacttca

SEQ ID NO: 31782 - DNA, 715 bp, Bovine  19866880361702
  misc_feature (1)..(1): n is a, c, g, or t
ntatggtgcatacacagactttagttaaaagctccctaagcacagacaaatacattattgtatgcttattatactttagaaacacaagataagaacataccaatgtgtgacgtaatcctaatatccacacatttctatatctatcaacctgctaaacaccgaactacctgacatctaacccttaattgctcctgggaatcagtcgggttgcctgctaagtcttcaggacagtcctccagggtgagtgtgatagaactacagtttgtccactgcttcacgcaggctgtattccaaactaatatcttagctaagttagctggcaaattattgggatagtaatcaaaatctgtaatcagttgtagttaccttttcctctacaaagtaatagtgaatcaataaaatgaacaaaggcaaatatcagaacatcctgaaaatatactatcaaacttaaataggtttacaggtgccattaggtgacagaacgtgaggggaaaactttcctttgattcacacctaggggttacctgctaacttgaatgtatttatcactaatgagtacaatgggtttaaaaaaaaagaggctgcaattaacctctatgaatctgtccctggtaataagtattttattactctggccaaactttcgggtaaagtactgctaatgtcagaaatattcttgcagcccattaatgggtaatttttcacagtaattata

SEQ ID NO: 31783 - DNA, 923 bp, Bovine  19866880381060
  misc_feature (1)..(1): n is a, c, g, or t
ngtaatctaccccgtggtgctagtggtaaagagcctgccaatgtaggagacacaagagactaaggttcaatccctgggttgggaagatcccctgaaggaggaaatggcaacctgctccagtttcttgtctggagaattctctggacagaggagccaggcaggctactgtccatggggtcccaaagagttggacatgactgagaaactaagcagcatcaaacccaaagactagacataaaaatcaaaaccagtatcatctttttctgtttttacatttctctgatggtcactgaaaattcatgtctggggttaatctgattataaattgggcagaatagatattgctgtaagtcacttatcatttctggaaacccctctggcatttcacacctagtgccctttacctgttctctaatccccgtgtctcccctggtaccccttacacatcactgtttattctgcaactaatgtagccaatactcaggcactgggtttcttatcctctttttaaccctcaccacatcctactctgcatttgtcatagaataaaacagtgctgtttctaaagaaatgccaagctagtcagtctatgctgaaagggatggagctttctaattcgattggcctttttgtgcttgtgctgagctacacctgttgggcaggtggcattccagccgctcttcactgaaatagatagtgtatgaagtcctttgtgcagctctgcaggtgcattaattatagactacctggatgcatctagaacacttggcagtagcaagacagtagtgaacgttctgttaaacagtgtttccaatggcatgttctgtgggcagttatgaggcagtcagataatggctcagtataattcaggagtcactggatcaccccaattgaacctctactcaattttgttgcaaaataaa

SEQ ID NO: 31784 - DNA, 1897 bp, Bovine  19866880455091
  misc_feature (1)..(1): n is a, c, g, or t
nttccttctgtattcctttgcatcagactttgtgtaaatggtgaaaggaaaatcaggcatggtccctaacatcccctgtatttatgaattccttctgaggagacagaaatctgttgattaaaacaaaccatgaaatataacatcatagaatgtattaagtaggtagaggatgttataagaaggaataatagggagagggtggggggattgtggtaatatggcttagaaaacacttaagatgaccacattgagggccagttctagagtttagttttgaatctgttgaatttggagtgcttttgagaatgtttgttagataaatgggtctaacacttacagcaaagatcaggccagagaaacaaatttgtaatcacttgacatatgtgtggacatatagaaggaaaggaatagagtctaaaattgagcctacaacattgaatgactgaagagagccactgatggtctctgagaaggatcagactcagaggtaggagtaaaaccaggaaaatgtgatgacagagaagccaagggagaaagttcaggcaagggaaagcacttgagtattgaattctgatgaaaagtcaagttgtggggactaggaaacacttcagaatttaacaaattggaagtgactggtgactttattaagaatccatttagtagaaagtggggccagagaccagaattgaatgtactgaagactcgggagttaggggtttgtgggaggcaaaaatgacgatattcaccaagacacagaaatgtaccaacacctcactaaagaatacagcatcttttaatacttggtgccactctggactctgtttcataaacaggaggatgtgtgacattattttcgttttctaagggctgaagatgtcagagactgtacctccttactagattgccggaaagcgggattttggaaactctagcatttcaaattggattggaccactgttgtcttagacttcatttgttttaggcctaaagaaatgtaactgttcccaaagtcgaaatatcttgtttgatcctacttaaggatgaattgctggtcctgtaggggcgtgaacacgtctattttcatgagcttaattgatgtcctatcaaactttgtgacacagaacactgggaatttccccctgggactgcaatacactcttaaattttctgtgtgccgtttctccacagatcgcaagacaacagcagcagcttctgcagcaacaacacaaaatcaatttgcttcagcagcagatccaggtcagaaatcataatttcatacggacttccaattaggaagtagattttgtttctcagatgacctcattgaagtgagctgcagaattaaatctgctttcagcccagtcatgacatgtggcccccctgtgtcgggagaatcttactgtcacgggagtggcagaatcttgcttgtgttgaggagtgtcagggatagcaagctggtggcaatttttatcttacactgaaaggaaacttttgtggagaaatgtttccttttctttattctttaatgttgaaaacaggcatgtaaatgttgttaatgagggatgctcccaggaaccaaagcagagaggcatcgcaggttttctgttagccgtggcagagagaactttttccattaggctgaagagccacacgaatttaaggtgaaaatcagtgaaggtaatgatttgtgttcaactcaaatttcacccttatactgcctggagaaaccaggactgactgagggctctgtaacttccgtatttttcttctatgaaaatttgcagtgatgagaagcaaagctgcttggggtagcctcgtgccaccacttgcttatgacacacactttgacacaatctgtttccctttctgaatactccttttctgaaagcacttattt

SEQ ID NO: 31785 - DNA, 997 bp, Bovine  19866880463309
  misc_feature (1)..(1): n is a, c, g, or t
naagcaaattttatcagtcatttggtgtacagacatataaattatcttacagcttagagaaaaaaaaaaagactttatgaacaaggactaaagccagagggatgggttggtgggatatgggagggtggttcaagagggaggggatatataaatacgtgtgtgtctgtatatacatgtataatatatatacacacacacacacatatataatatatttatggctgatttatgttgtatgacagaaacaaatcaacacaatattgtaaagccattatacaattaactaaaattaaattttaaatatatgtaaacaatgttaaaaaaaaaaacaggtactgaaaaaatgagagaactagacaacagagaataaaatttgtaatgcacctgaagaaaaagtgagagccttttgtcacaatcaaagacacaactggagaaaatattctgacctaaaaaagattcatgttagcaaatgtataggaaattccctcatttttttatgttaaattactgggagaaaggcatgtcattaaacactttgagaaaaaatatttaaaatatgaggcatatgaacatctcctcaagcattgtgactaaatcacaatgtcatataactttcctacacaatattaataaaaggtaatatagctaaatatacagaaatctgaggaaaaacctttgtagagtaagatgccagaaaaattttctttcatatgtgaaatatattttatatgtaaaatatattctcaaatattcaagaacatggaacataccctgccttctatataatttgcaatccaagacagaaaaaacagacataaggtaagataaaaaaatgtgaaatgtaagcatatgcaataagtaatgaaaccagttaaattttattttaaataattattttatacaattcataatttcttaaaaataaaagatctcaaactctcagacttggagagagagtactgatataaattgatataaccatttgtaggattgtttt

SEQ ID NO: 31786 - DNA, 1888 bp, Bovine  19866880491322
  misc_feature (1)..(1): n is a, c, g, or t
ngtgtctatttagatctccaattgctacaggctatgtgcttctatttttttctattttttagaaaggagtattcagtgtcgttacttctttgtctcactattgcaagcctttgaggcaatataggtttcagaatacagaaagctcaggatttcggaaaggttatttggtgcatgcaccattcgttaagcaatacctccaaacagcatttggagcaggactcaatagttaaatttcagcaaccaaaggtgtggatgttcacagtaaatgagacaaaccttgaaagtagctttacatcacttcaatcaccaaatggataaaaaattaaaattttggatttccagaagattctggacttgagaactgtggagagagttgtggacctagaaaaaccccatgcacatgataggcaattgacatattaatgagctcattggatcccttgcccattgcagctgcagaaatctgtctcagctttacaagttgacagaagtaaatcacacactatattttccatactatggtccgtttcactggctctgtgttggtacagctggagtatagcagattcagattcttatgaatgcatgtgtaatgcttgtttccctgaaccatgccagcagtttctgatcatacccatgagtatgaaggatactaacaattttctctagtccatcaccccactattacaccgttattcctgggtttctaccttctccctccccatctccatgcacgttcccaacgtggggacacccacagctcagaatctaccctgaaaatgtgttgtggagcttgaccgctgccaaaagccctgctggtgctgggcctcctgggcttcatcattcctgtcacttagtcactccttagctgttgtttttattcccagtcactttttcagatgcagccactaccatcagtgctgagcagtggaagtggaattgaagttccattgttcatctcatcccttaggtgttttagcctaaacaaattaaagcaatctctctttatgtctctctctgtctctctatgtctccacacatataaatctttcaagtctaaaatctctgctatagaaaaaatgagtggttactgtttatatgggtggcactagtggtaaagaatctgcctgacattgcaggggacagaagagacacgggcccaatccctgggtgagaaagatcccctggaggagggcatggaaacccactccagtattcttgcctggagaatcccatggacagaggagcctggtgggctatagtccatagggttgcaaagagctggacacaactgaagtgacttacacacacacacgcacacacacacacacacactcacagtacaaattaaccttaaggactttagtattccataaacaaaatgattaaaaattttctacctcaatacagttttcccttcatcatacatttcccctggaatttgcaaaaagtctctgtatcaaaaacagccagttatgtatctgttttctcttttgtcttccaatacaagaagcaccttggcttagtgcagaattgaatgtagtgagaaataatatcaaaggcacagacaagattgcagtaattgtagaaatagataaccttacttggactggagtgatggctgtgaatatggagagcagtggatgggtatgagagatttttaaggatttcaaaacataggtattgaaaagagaatatatatggggtgaagagtgaaagatattgaggagttcaggatggatcttgattcccggcttgacaaggctttggcaatgttccagtgtttccaatccagtattcttatatgtaatataaggcctacgaatttaagagaaaactttttctagctttgtgttttcattcatacaaaatatctttgttttctttc

SEQ ID NO: 31787 - DNA, 1366 bp, Bovine  19866880499490
  misc_feature (1)..(1): n is a, c, g, or t
nctatgtatatggactttttttttttttttttaaaccatagaacaatataatgtaagcagaaagaaaattctgcaggtttttaaacatagatttaaagtgatttcctgagagtagtcaacatagagaacttgtgatccaaggacctggaatatcttcaagaatcagtacgttcaaggatgagtgggtgaattaacagctttagagagacaggactgttcattcatttattcattctctcattcactcagtaaataaatatattctttgtagacactggtgactcagaaatgaatcatttgtttataggttgacaataaccagttgttcatctacagttttgcctttatggaagatatttatccccaactagaatggtcccttgtcactggtgttaaaaccaggctactgttctaggttgtcctaacccaacatgacttttctctttggtttttactaaaaacaaatgtgtactgacaaaaggaccttggcatacagacatccactttctaaatgcttgtgaagaagtccttgaagtaaataagatctaatggacaaggggcaaatttgtaaatgctgctgcttgataagtgtgtgtaataaaaattactgtcatttgtgcttgtaaaataataatcactttttaaaactagttttcagtaagttctctaaatccttaactaaataagtctcatgtaaatcaatatcctttctgaaaatctattttacctttccgttttaaaaggcctatccgttccattgttcaacttaggaagctgggctgccagtttgataagactctgagtgtggtctgaatgctctatgctaatctactctacatcaggctggaagcttatcttgacaggaaaacttggagcgggccttgtggaaggattttggcatcacacattggagtggaaaatattcacaggctgtaacaaagtctggcttgggctgctgtaggaaaggcagccactggctgggagacaattcgtgtaggaaagtcctgggagcctctgtgagaggcctacaggatggtgttatccaccgagagggggcaggatcagggaatcatgtgtgttttcatgagaattgagaggaacggcagctaacacaagccaagttagaaaaagaacacaaccactgagcacttccatcacagccttttggatccaaaacgcttcatgtgcaaaaataatgtgccagctgaagaaagaatacttcaggggttttaaaaagaatgaagtctagaaaaaccctcaggcacaggtgtaccttgtttgtgtgaaggatgtcaaaccaaaacggcataaagcagccctccatttctctcaaaaaggttttgaatctattcctgacctttctggt

SEQ ID NO: 31788 - DNA, 1558 bp, Bovine  19866880553605
  misc_feature (1)..(1): n is a, c, g, or t
ntccaagggattctccgggacaagaatactggcgtgggttgccatgccctccttgaggggatcctgctgacggcagggatcaaacccatttctttttatgtcgcaggcaggttctttaccattaatgctgcctgggaagcgcaccaattcatactggagtgcatgtatatgtgtaaatccctgttagcactaacagacaacacttatcatattaaaagacttcttcctatagatttccgccttatattttccctcatttacttcattataaacctttaacattaagaaaatattgcatattattattagtgttggttgagtacctacattaagatgaattagcttaaatttcaaaagaaatctacatacagaatgataatagcagcagcaaaaataatcataatagctagcgtttataggaagcttacagtgtgccaggcccaggccatgtctctctgaactttctcaacggccttaggaaatacattactgttttgtagaggacactaaagtacacagaaaataaaagttgtttgtccaaagtcacataggtaagctgaggttaaaatccaaattttttattagcacctataatgcttaacctctgtgccttatgaagctcttttctggtcatttaaacacagtagttggctctgaggctttggagtaaagagatgaacaagcctggggaagacaattctaacagtacttctgacagagatggggctcttctgctggtaactacattggtacagatatagggagggaagggagtggagaagtcccagaggacattttccctagcattttcatcctcttccttccacttggccagtgaatattaacactgcttcagtttggttttctacttaattaataggggagaatgaatttaagagacagggaaagaggagaacatttaagaaacagctatagtatgatcagacagaccaagaaagtcttccctttaaatatgattccttggagatcagaaggatgctatggtgtgactacatacatggagcagaaaaaagtactggccgaagaaccttgtggtaggagagagaaagacaagtacatggaaggtcagtgaaactccagtgtcagggaaggagtgtttggaaaggtgggaatttggaacagtttaggaagaggaatgacgtaactagatttgcatttccaggaggttagtctgtgtacaatatgaagaattgactggaaggttttgattcacccataccccacttttaactaaaacgacatttacctaattgcttttttacatgatttaaaattgattcaaaatatagaataaattttgatataaaattttcaactttctgagtctcatccttatttaaatacttgctctttcctgtataatttatgtcgttattgtttaatcattaagtcatgtccaactcttaggaccccaaggactgtagcctgccaggctcctctggccatgggatttcccaggcaagaatactcgagtgggttgccatttccttctccaggggatcgtctcaacctgggatcaaacccatgtctcctgaat

SEQ ID NO: 31789 - DNA, 1325 bp, Bovine  19866880561992
  misc_feature (1)..(1): n is a, c, g, or t
nattaattaatgatttatggatggcttttggagatgttgcctttggctaaaagaattagagaagtcaaattagagctagacattccagtggtaagaggaaaaactccctcttaccactgaaatgaaggaggaaggaggaagccatgttagggaaatcgttcaggagggaatgagatagatcattccaacagtgggacaaaataggaggtttttcttggggtgtgcatgggtgtttgtcaagatgtcccttgacttttcaaaccttctgattagaatttacttaggaacaaattaaaataatacaaatgattaagattttgtctttataaaaataagagtatatattatttttatttctacatgtaattatttatttggtaactttaattaaaagctacatgaaatctgaaattgaatatttgcctttttattattggattctctctaaatatgtatgtaaaatggatagagaactgctttctaggcaactgattattaggaaatctagaccagctttttatatgcaagttggcatttgatccttaggttttcttttcttttgtttttctttcataaaatcttcttaattctgagtgtcttagctagggaacacttcttatgggacaggaggggagaggaaaaccccttggtgaatattatcagcacagagcagccagttttcacagaccatgacaaaaaggcaaataggtattatgtcatcacccatccatcactctatatgtcagcctttcaataattccaatcgacattctcgacaggctgatgcaagttaaaggggctgtttgtttctagaaattgagtataggctgtctatagccttttgttccagatggttttcttctgtgtcttttcatttctttctttttctttcttttctttttgggggtatttaattgaaatacatgccgagtttgcagactgcaaagatcagagctgttttcgtccagcagtggtaactatgcattaaacattttgatttgtttgagcttgaagtttagtccttttttgccatttgcttcatggagtttgtgtatatttacagcctctgcatttaatggccacatgccttattttcacagatggccagtggaagactttttctttctcttagtatagcctgctttcagctttgctacatttgtcacagtgccactacttgcagctagcaagtgcccacgcttggtggggagcaattatggtgtgagtttttaaggagctttttaaaggttttttttttttttctccagtaaactttttatggtttaattttcaagcctagaaaagctgggcatgttttcaaacag

SEQ ID NO: 31790 - DNA, 1949 bp, Bovine  19866880585086
  misc_feature (1)..(1): n is a, c, g, or t
ntataacctgtaatggaaaagaatctgaataagtttatgttttgaatattcactttgctgtacacccaagatgttgtaattcagctcaacttcaataaaaaataaaaacaaaagtctccccccaccaaaatgttgtctagtgtaatgaatagaaccctggatgagatattgtgattggattctacttcctgtcatggggctaaatttctgtgcaactttagttccgactatccttctcctatctaagtttttgcttttataatctgagagatgagagtgtctctaatgaagactatcagcataaactccaatagcaaaccccacgtgtcagtcatatcagccagaaaatatctgcttctttctcccaacagatcctttgttaacctcagggcttagacactgcccagcagggagaacattgaagtgtcccagtctgttgctgttctggctttgtgctaccatgtggtatcacatgtgacaggtgatagcagtccacctggggcttcccaggtggctcaatggtaaagaatccacctgccaatgcagaagatatgggttcgatcccttggtcaggaagatcccctgcagaaggaaatggcaacctactctggaattcttgcctggaaaatcctgtggacagaagagcctggctggctacagtcaatggagtcacaaaggagccggacatgacttagctactaaacacaacaacaaccagtccacacagtgatgatgctctcagctctcacagctcacacttctgctgtagttctacagggagggagggtaattaacaatcacttgagtcagcttgggcagctcttaggttgcaacagtgagttctcaactctttgaatcttaaacctaactgactcccaggatgcccaaccaggatgagggcataatttattacactatttgccatccttctgaaccagaatcaccactttctttctttcacagccttcactactaaggagaatgggctgctttcttttaaactttcagatcagatgaattttctgatcatcctatctgttgactataatacattcctattgtaatgcatttaagtactgctctccactctcctccagtttgtgtctatttacactgtctttcaccaccccaggggactgtcagatagtcaagaaggccacctacaatttccttggtgtcaaagtctgacactctcttttatcagggaaggtgggagagtaattgagatcaatgctgattagatatttgggagcagctggaagcatattggttcagagggtataattatattttatactctggcaaatatggtaacaaaatctttcctcaggcaatgggcactttgccagccttttaagaaaaaatatctcatgatgcttccagagattccaaaacctaccttctggaagggactctgcttctttccaaaggtaatttaccattttagaaattagaatagtaatatacccttgtaatccatccctaggcagtgtgaatggagaaaaacaaagcattattcacagcattggcaagctatgacatgtctgaatttaattttgagtctcattgtcaaagccaatttaaggaaaaattatgaaacaggtagagactagacattaacacctcaccctctacctcatcagctctcttttccattcaatttatcctataccctacaattttaacaatcaagccccctaggaaggccctcgcataggtatgtttctctctgtcttttagtgaattatcaactaattcctggataagatcatggcatctgatcccttcatggcaaataatggggaaacagtggaaaccgtgacagactttattttcttggactccaaaatcactgtagatggtgactgcagccatgaaattacaagacacttgctccttggaagaaaatctatgaccaatctagacagtatattaaaaaagcagagaca

SEQ ID NO: 31791 - DNA, 1074 bp, Bovine  19866880590404
  misc_feature (1)..(1): n is a, c, g, or t
ntgggccttttttttttttgaggagttaggctttgtagaaattgtgtgaacagttcatacaccatcatgtgacgttagtcaagtggaagacttgggagcagaaagctgtagaaatgaacaaaatgcaccctttgcaatttagagtcctgtttcctttctctgtcttttttttttccttttcccaaccataattttttcacatcagtctttgctctgcactcttagtatttttcatctatgtcaagataccatggttaagggatgcaaagcacctaaacagggaggtagcagttttgagagcagttccctgacaataggagggtgggttctcagccttcccttacaggaccgcactccagactccccagagaagtcacgtccaacagcaaagttaaacagaccagaattggacacctgcttgcacttcacctccccgacgctttcgtttagctctgtgtgttccgtgttgccggagcacggtcaccgtgctgttgtgcttagtttttcctccctccagctcattcccattagaaggaaccaagagaactggcgataaattgaagttgtatgtctttttttaagtgcctgtttttcacttaaagaatattgtccatgcatgtgctaagtcacttcagtcatgtctgactctttgcaaccctatgaactatagccttccaggcttctctgtccatgggattctccaggcaagaacactggagtgggttgccctgtcctcctccaagggatcttcctgacccaggggtcaaacctgagtctcttatgtcccctgcattggcaagcgagttctttaccactggcaccacctgggaagcccaaagaataatgtaattagaggttaatgaagaacattaagtcaaaaagcatagtagacctgagagtccttcagttgtctctgcaggattttttcttttgttttctgaatttaaaatattcagattaagaatatttgtaagtttcaaagtatattccattagatagggaaatattgctttttgaaatggtttatttaaattccaaacaatgtgaactctttctgaaataatgtctaataat

SEQ ID NO: 31792 - DNA, 2576 bp, Bovine  19866880607883
  misc_feature (1)..(1): n is a, c, g, or t
ngctgatacaacctaaatactaacttccccacatccgatccccctgtatccctacccctcctaagtaaaacctgtcagtgccaagccccgcaaaacagcacaagcgtgcacttgattctgactgactgctctgcagaagcaaaatagtgcattaaagaactcctatttagaaacagacccacaaggaaaattgcttctcttttcaaaactgcctgtcacattttctttttctaattccccttttcctcctcctccctgtcaccaaagggcccctgggccctatgagtttagatgatacaaactcaatttgtataaagaaggcaagaagcagcaccactgagaggtggggatagtttgggaggatagagaaataatccagtcaagacacagtgcaattttctttccaaactactactacaataatacctccactttatttccttcagggcaactgtcatttctttttaaccagattgctactagatatgatagaaactaaaatattatatggtcactgactcttcctttcaatggctcatttcactattacatttttacttttgcatgatgtgtttattattggcattgttactaggatacgaccactttcaaatgatgcagaattaagacctctgtcactaagaggcgatgaaatttcatccttaatattatgcaagtttgacttaaatgttctccttgtctaatagaagcctttattttcaaaacttaaatgttacattcttataaagagccattttcatgtattaaactcctgtcaaccaaaatgatgatacttactgtacaaataatacatgcttaaacaaagtatgtctgttgacttcaggaaagaataaatctattttaaaagtggcaaaaccaatacaatattataaagtttaaaaataaaataaaattaacacacacacacacacacacaaagttgggaatcaaagaaacttaagggtggcaaatatagcattcattaagaaagcaattgtgagagtatggtaaaaacagggctattttatttgccaagggaaattttaagctgaataaaagtattttaagaggcaatgattaaaatatcttaaaggatgtattatttaggattaggttatcatttgtttcttaaaggtcatattttacagggcttccttggtggctcagtgataaggaatccagctgcaaatgcaggagatgtgggtttgattctttggttgggaagatcccctggagaagagagtggcaacccactccattattcttgcctggaaaatttcatagacagagaaggctaggggctacaatccatgggttcataagagttgcacacaatttagtgactaaacaacaacaacatattttacatagcttgatagtaggttacatgataaaaatggaagtctttatactgcaattctgtttcttcaaatgtgtgtgactgtttgtattatttaatatggtttttgataataaaacaggctggttcctatcagtatgcatggttctctgttcacatggacagaattaggctttgcagtaccaatacaatcttattttacatcacgcattgctatgccaattgtcatttacacacaaatgaaaggcaacacaaaatagaatggtcaacatgaaatatagtattgtttcaattacatttctcaggagtccatgattagaaaacttaataaaattcactaggtattgatttctaatttatgacattttgctcaatggcctataatacattattagtggggttttttctcatgccatataaatctcagctcaacagaagttctttaaaatattatgcctcaaaaatcaccactttatagagaagcttgaattaggagtgactgctaatgggtacacggtttctttttagagtgaagaaaacattctagaattagtaatgatggttacaaaacattgtgagtatactaaaacccactgaatcgtacacacgcaaaaagggtaaattgtatggcatgtgaactatatctcaaattaaaaattaaccaaagtaaaaactaaatattatcttaaaatatatcacttcactactgccagaagtaaaactgaatttgctttgaaacactcatgtcttatattagaaagatgtttgtatttgtataaagcacttctacatgtgttagttcatttctgctttatccagtctcttggagatcagcatgtcagatattgtcatttccaattttaattaatgagcaaaactgacaaaaaaataagtaatttggaaacttacacacgatcatacagctagccaaaacaataagcctaggacataaattcttcaattcttctgaataaattatataacttcctaaaataaaaatactgatttatataatgactacagaaacattgtgacaaaatccacatatattttatcagcataaaaatgagtcacatttaaattatttctaaaaaataaagttctattataatttaaaacatttttatagcaagggtggcatttgaccttgatttacacctttatgttacattttattttatgttttctgtacaaaagcttttcaaattttcaatgt

SEQ ID NO: 31793 - DNA, 2683 bp, Bovine  19866880610926
  misc_feature (1)..(1): n is a, c, g, or t
ntccttccctcctcccctcctcccttctccctttctccgctataagctttataaaagtcacaatttttgtcgtataaacatgcagtgccacccacttaaaaacaactttcataaagtttatgtaaaacttctataaataatgtgattattttcttgttaaaaatcattaaatgacctatttaagcatgatgcacttaaaatcctatgttgtacttatactgagtttacatacaaaattctaatgtatctattttattgtattatattcaataaactaaggttcctttttaattatacttcttttcacattttctcaggcacatacaatatggtagtggtattgaacaaagttaacgtaaggagaaatagggactattttaatccaaagtataagaagttataaaatagtggatttctccatcgtcattcttatagtttcttatttcttctaataatcaactaaagaacaccagtcattcttaagtatagttttttgaataaagaccagaaaaaatgtataacttgactagtattaagcgtgggaaaaaaataccttcttcagatgcacagtgagtagtataattcacactgactatgaattattgtctagagtctgattaatataatcaaagaagtttgcaaccacatagtccttatctccgtatctttgtttgggacagagggaatacagaataggattcaaaatataaaacaactttctttttcttttgaaatggggaatcatcttttaattatcttattttacctaaaaatatatttgaaattttttatatagtgaaataagacttttgctcataaaaattttaatcataaatattacatttgaaaagtacattattaatggctcagaatattgaacattcctaagaacttgtttaacagaatgcttcttggaaagcagcatgcctaaaaatgcaagtgaaatatgaaaagctggcaattttccttaacctgaatcatgtcctagcgtgtcctcaggttctcatgggaagaatgtacccctttcctagtcctggatatccttgtagataattagatgcttcttaaaattctacctccgcctccccccaccctggcccgcatgtgcttcaggacttagaattgcaatgtcccacaactttcagctcttggacttccactgtagactagatgaaaacattgggttgacttttttagaacccagacattcatcctttatgatttggggttttcaaaagaataaggattatatctctaaatttcgagaaaattaaagatcagaattctcattttagattttattttaccaagtaatataaaaggaaaaaaatgtatacttaaattttaaaaaatacatgttccccaaaattgtttatggataacagaaaagactgaaaaccttacattttcataaaaccacaaaatatttttattaaagctcttttagagttgtttgcaagactaattatcaatgagattctgtatgagactttcatttaaattgaatctctcaatagccaaaaagtcttgttttttctattttagtgtataatctgagctgttatggtttgttgtacaattttgatgacttttggcagtgtagagatttggtaaataggaaaaaaagaaatggagactaaaaatagaaaggatgaaatactgcaagaaaaaaatttgtcttgtggtatttccagtaatgcttaacataaggaaaaaaatttgttttgtgaagtatgtacaaaagcattatgacagcagtaggaatgtctttaaataggtacagatttttattttctgtacttccccatgcaactcttttgaggatcagagtttcattttaagtctgcaggagctcaacagtcaggtcaaccctatataaatacagggcaggacaaaaattttgggtcaaacaatggaatttttagtgccagttttcatgcaaatagtgctatcatttatctaaaaaatgatagttctcattcaattttaagagaacctctggggtattcttgtttgatttgattttgcttgtctttttctattagcatacatatgaattgcagcgagcccaaattctgatctgttatacctgagactataattcacaaacttgcaacaaactaagtgaaggaaatataaattccaaaagattaattgttttagaaacactctctttacccattgagttttaagtgattgatccataatgtacactcaataaatgtttactagattaaatgtttataatgtaacccaatcttaataagaattgaaatcttagttatcactatttgtgatatagtattcactatatgtcagattttgcaattaaaagtattagtatgttatctaagataatatatttgtgttagttttttttttttttaatttagttacatattctgtagctattgtcattttgggctattttgggcttttgttataaccaagttattttctagaattctagacatataaaaacattaagaaatttaatgagacaaaaatattaactttttaaaaaatgttctttcaaaatgtatttaaatcctggttttaaaaacaagatccacttagaatgcatagatagtaaaatatggtttatcctagatgaaatatcttctagtgggaaaataggaatgggaatatgttccttggaaagagacatactccaagcaataga

SEQ ID NO: 31794 - DNA, 1428 bp, Bovine  19866880627007
  misc_feature (1)..(1): n is a, c, g, or t
naataattcacttgttaacagtgaacggagctgtggcagcccaccatgaaatgtggcaaaacaattgaaaaaactattcctgtagtcacctggaatgatgtgtacagggagggaaaaggaccattccctacaacactatcaaagccaggaggcatgctgaggcttcagagttggaagagtcttcaaactgcactagagaatagaaggaaagagaatgactatctcagactactaaactccaggctcaagatgtgatcagaccaagagaatgctccaaaataaatcttttgactaattcattgggaaaagattatcttctaacattgtttctcttgatatcataaagatactgaccactagtgatatcataaataaactcattgatgttcataatattctcactctcagctacaaccttgcagtaggaattatttttaagatacatgtctgcctcagtctaacaagaactaaaaaagtttacaaaattagactttgtttcaagattgctgtcttctttccttttttcttaaagtctatttttgcagaaggtagacatgccaagttatttcttcattggcataaaacttaataatataacaagagaagaaagcttttaattaaataggtgtctgctttggtggtgcttcccaggtgacagagtggtaaagaatctacctgcaatgttagagacacaagagacatgggtttgatccctgagttgggaagatttcctacactagaaagtggtaacccatttcagtattcttgcctgaaaactctcatggacagagaagcctggtgagctacagtccatggggacataaagagtcagactcgagtgagcaatcaacccacacacacacacacccattgctctggtaagtgccaaatggtcaaactgtctccttttaaagaaaatactgatatgacctattagtctcaattgacaatatggactaattattgacttttttttctacacagcttttttttgactcttcaaatgaatatttttaaagccctaaatggtttcttacttttgtgtttctgctttgtgtctttacttttaagggggaatgtttttacccttaatgaaataacagagtcacttattagcgtttaggaggaagaatgccaaaaagtggcaatgatctattaatctgaacctgaagccttatggagctctcaagtttctatactatttataaaatagtctacatgatgtaattttacattctatttatatcattattctttatacaacataaacatagagctctgtgatgttattacatgtcataaatgtcatcataaattgtctttacacatcataaatatcttagtttgtgacattattacaccttcgggtgtctctttcccatattatatggtaattacatcaaagtatttactataattatgtcattt

SEQ ID NO: 31795 - DNA, 1301 bp, Bovine  19866880632448
  misc_feature (1)..(1): n is a, c, g, or t
nctgctctcgtcggcttttaatggaaataccattcagaaacctaaggttctataacccaaaccctaaaaactactggtaaggaaagtctgatagagaatatgatcatgaccttaaatatggctgtgaaaatgtggaattctgtggaatccaaaaataaaactaagttttcccaatcctaactccaaaatgatgatgttattttgcaattcaattcatctaaaatgtcttcttttatacttttttcaaattgccctcaccatcatagggccctaagaactcagcatctcaaatggtgtgattaatattggttgttaaaagtcaagatcagagatttctctccaagccttcactccctgcttcagcggcttcttggctttacaggaggctcattaataggccaactcgcccagtttgtcatctatttcattatgcaaaatatatacttttcaattacttttcctgtgtgaaaatctcttaactctaacctgatataatgatttctttgggtttcttctcaacctctgaatggcacagctttcctaaaatctcaactgggggtagaatacttggaaaccctgatgggaattaattttaatgtaatgatctttatgtgcccattaaaatagaagtgaaataacttacaaagctgaccactgggcaaacctagtgttgacctcaaaggacaggaaaaaaatgtctaaagcgttctgatcattttgtttaatctatttaacatggaatgtaaggaagttatccctaagataaagctttggtttgcaacactgattttatttcagtgaataaagtagaaaaagttagaataggattctctcatcttcaatggtctcatccaaagttaaacttttaacatcagtagtaattggaatcacacacaaaaaataagaaactgtaacagttattacaataataggtatttggtgaacaaccttgctttttaatttgccatgtatagtctttttcctgtataagaatcaggatacctcaagagttgtccaaatgtagatccttttgtctgccttctaggtagacccagaccaatatacacacccatcactccaggcccccataatatatgggtgcattaatcttgttatcttggtgcacttgattcaaaaatattttacttcccaaagctctgctgcacaatacatttttaaaacgtactaatacccacaaaattgtctaatttttaagaggaggcatgaaaagcaagcctgaagaccttcctgtattaccatgattcttcattcggaaataagcaggcagtgcggcctaaaag

SEQ ID NO: 31796 - DNA, 834 bp, Bovine  19866880640959
  misc_feature (1)..(1): n is a, c, g, or t
nccttcaggcctgcttcaattctattctgacacaccctgaaataaatttgctcttcaagacataatggttttatgacatgaattcatcaacaagtagaacaagagggtatcctaaatatcctctaatgcaacctgctgtttttctgtccattagtataaacaaggcaaactaaaaggggtgagaaacctttatgacacagtcagacaaaaacatccaagaagtgacggttattgtaattatttcaattaacaaatatttgggccatagggaataataatattttggactagattctgaccttttgggtttatgtccagcttgacacccactgtgttaattatgttttattatgcaatgctttttgcctcggagaaggcagtggcaccccactcctgtactcttgcctggaaaatcctatggatgaagaagcctggtaggctgcagtccatggggtcgctaagagtcagacctgactgaatgacttcactttcacttttcactttcatgcgttggagaaggaaatgacaacccactccagtgttcttgcctggagaatcccagggacgggggagcctggtgggctgccgtctatggggtcacacagagtcggacacgactgaagtgacttaacagcagcagcagcagcattctatttctagtcgcacttagtcttatagcacggcccctgatgagtcctatgtgggggctagaagtattttctggtatcttcttcttggtgggctctcatctttattttcttaatcccctgagacccctgaattctctgttgaactctactcagctttttgacctttgagttgcttcctctttga

SEQ ID NO: 31797 - DNA, 1208 bp, Bovine  19866880664695
  misc_feature (1)..(1): n is a, c, g, or t
ntcattataatagcattttctagtttggagttaacaaaacaggaaaaaaatgcaacaaatttttattattcttgtttctgcctctctcagatgaaggaaaaaattgagaaagttttgcaaaaacatgatttggttcagtatctaagtgtttaattttggccatgttatccaaaatttttaccttaatgctgctccatggcttcaagtctgtttctgcattaatgctgcatttgtaaccatatcttggtaggagtgttagcttgaagggattagaagtaagatatggaatctggtctccttaggtcatttgtttgtatccagctgaagtcagcagtggctaaaattcattaccatctggcagtttttccatggcctctgtgacagaacctgcggttctagcctagtacatactagacagatgtccgggtcataaaaatcacaacgattcttggcattgtgtcacccccttgttgacagtaccatcacacaggcgagagatcgaagtggaataaagaatgagctgtcttcatcccatccagtggtccattggcaaacagatactcagaccttatgtattctgtgtgggggaataatgctcttggctatagtcaaagggaatggaaataatgctaatggatacagcatctcagagcacaacatgatcaggtattctgatttatctccttgcaccagtacaaaattagataaactggttaagctttcaaatatttccttttcaatggcaagtgatgtttcatgtactcatgttgtcttaaggcttcccagttattggatgaagtgtggatagcgaggtacatctgtaaacttgagcaagccatacacattgaatgtctttacaagtcagtactgtaagccccccttacctacacattccatatccaaggagtcaaccaaggaagctcagactgtgttgttgttattcagttgctaaattgtgtccgactctctgtgaccctgtggactgcagcacgccaggctcctctgttcaccatctcccagagtttgctcaaattcacgtacgttgagtcgggagatgttctaatggtctcatcctctgccatctccttcttttgccttcagtctttcccagcatcagggtcttttccaatgaattggcttttttttttgtttaactttacaatattggattgggtttgccatatatcaacatgaatctgccacaggta

SEQ ID NO: 31798 - DNA, 1964 bp, Bovine  19866880684847
  misc_feature (1)..(1): n is a, c, g, or t
ncttgcctggagaatcccatggacagaggagcctggcaagctacagtccatagggttgcaaagagtcagacacaggttaaagtgactgaccactcacgcatgtattctagccctacagtaaggatttctacagacctattctaacaaaagagttaaccagtgttgcatccagcaaatgatatataaaaaaaaaatagacctgtaaagaagcaggaaaatcaagaaccaaaaaactcaatagatgcacactcaaagatgacacagatgctaaaattagccaagaatttagaagtgctataatgaatatattaaagggtttaaaggaaaagctgaaaacaatatgaagaaccttataaataaattaaaataaataaataaataaataaataaataaaccaaataaaaattctaagacctaaagatacaatatctgaaatgaaaatttctccggaaggacttaagagaagattaagcactgtaaaaggaatgattgtcaggcttaagtacatagcagtaaaaactggacaaattgaaacagaagaaaaaagtcttaaactttaaagagcttcagggacctatgggacaatgttaggagatactatgaacatataaatgaaatcccccaaaagggggcatgcagaaaacatttttgaagaaataatggctgaaaagtttccaaatttgatgaaaactataaactgatattataacctgtaagatatactttatgaaccaagaagcaggactaatcccaagtgtgaaagagacaaagaaaactgcactcagatgtaatttaatcaaaatttttaaaaaatcacaatgagaaaatctataaagtagagagaggaaaaaaaaatacattgcctaaattactgatataggtaatataccgtgaaacttggaagagattttgctgggtgaaagaaactagaattggaagaatatatactctatgattccatttatatgaacatctagatcatgttgttatttatggtaacagacatcaaaacaggagctacctttagcagaagtggagagttttcagggaaaaggcacaagagaactttctagaatgatatgttcagtatcttgatagatgcgtttgtcttcattcattaaattgcacatttgttgttgttcatcagggtttttccaacgaatcggctccttgcatcaggtggccaaagtactggagcttcagcttcagcatcagtcctttcaatgaatattgaaaggttgatttcctttaggattgactggtttgatctccttgctctccaagggactctcaagagtcttctccagcacaattcgaagccatcagttcttcagcacccagccttctttatggtcaactctcacatctgtagatgactactggaaaaaccatagctgttactttacagacctttgttggcaaagtgatgtctttgctttttaatatgctgtctaggtctgtcatagctttccttccaaggagcaaatgtcttttaattttgtggctgtagtcatcatccacagtgattttggaactcaaaaaataaaatttgtcaccttttccacttttcccccatctatttgccctgaattgaagctacgatactttggccacctgatacaaagatgaaaagaccccgaagctgggaaggattgaaggcaggaggagaagagaacgacagaggatgaaatggttggatggcatcacagacttgacggacacaagtttgagcaaactccaggagagagtgaaggacagggaagcctggcgtgctgcagtccatgaggtcacagagtcagatacggcttagcaactgaatgataacaatggggccagatgccataattctagttttctgaatgttgagtgatctctataatacacgacatattattcaccaacaaaaagtaatccaaggtgggaaaaggggggttagaatgctgcaaggacctggaggagagaa

SEQ ID NO: 31799 - DNA, 1799 bp, Bovine  19866880686614
  misc_feature (1)..(1): n is a, c, g, or t
nctttaaaaatacttctcataaaatgtttatgaaaatgtttctatatgaaagcacccaaacacagtatgtaacatataaagaagaaaaaaagatggaatagaaatcttcaaatggaagttactgggagaactaaaaaaaattattttctaaaagatgtgaagaaaaatacctcaaactgtattgcacttttcccttacactcagttctatcttaaagtaaaaattacacattttcagaacatctaactgtatttctcaagcgttaagttccaattttggggggtttcttttttggtttgtttttctgttttacagtcatttcaaagtttttggtctattgggaatacaaacagtaattgttgatctattcagcctaatgatagattggtccactttgtataaaataaaggacaatttcttctctgctttttatctttttacacaactcagagactcaaagaagataattacaaacaatgcctgaagaacggttcagttaatgttaatttatacaacaaactaattactaccaaatggtaaaaatcacatgtggaagtccctttctcccacgcacacaactaaaccagcagccatctgtctcagcctgggtagagctcagggacaccccaagaaggataaggaaaagaaagggtacaaaaacgtcggctcattcacctacgtaaaaattacagaatttttctgaacattattttcaggaaatccaaaagcagagatatagaaataagttgtttcaaatgtcttttaataaaaacacatgttgttctgtaatcgtcattgcaggtagaaacccaccttcagcaagtaaatgcttactttgttttagacacaaactacatattttttaaactctcattactcattcatataccagcttgctaagaagaaagaacatgtatccctgaattttctgaaggaagttaagaatttctaagttctcaaaaaggtatgtctatatacttaacaattagcaaaataatctccttgcatattatgaatgtaacctgagagatgactgctaaattattcttactgaaataggttcatacattttaacaaatagtgttactaatattttgacatttatatgccataattatatcacatgaagcacaatacggcaaatatttttttcatttagaatcacaaggtgaatcttgacatttaagcaataatagattttcagatgaaaaaaaaatccaaatgggaatgtaagagtattgagatcctttttatttttttaattaaaagaatacttatttatagatgtgtttcaactatgttttaaggacattcagaattccaaatagagaaatcagcacttggcaaatatttgagtgaaaaatggaatgagaaaacttcaagtagtggcaataacactaatttcccctaacatatatcccctgtagaattaagaatgctttacatatagcatgttctgatctcactgaaatccgttctcttgaactgccctttatatacttcctagtagctgacctgattgaatgacagaccataaagcaaagactgaagcaagtggattgataggaaatgtttaccctcttccacaaggagatgtcccacactgaaggactgcagtgcttcactatgagattcctatagaaggcaatggaaaaagactctacaaagcagtaggaccgtaatactacaagtgaggagactatgcaaaattacttatttattatctcttgaggttatgtcacagaagtcggcacagaacttctacaaaagatttttttcctgaagttcttcacggatat

SEQ ID NO: 31800 - DNA, 663 bp, Bovine  19866880715288
  misc_feature (1)..(1): n is a, c, g, or t
ncatccttctaagtcctccgtttgtgtgtttatgagaagagttctacttgcttcctgctcatacatgagtttatctaccaacaggactttgtcagtcactgcaaacatgtctttactcaaatttctaatatttcaaaagcctttcagataaatgaagtacccctgtttcccttgtccacacatataaccctctcagttccagagctggagttttaatgcatggagcacttgaaaaagacccattgacccaggttgaatatggacattagccaacagtgccagcccttcttgttgctctagtccccgtagcttttggagatgtcacttattcaagagtcaagagccagccacctgttccatcagcctcttccccctcacattagaagttcaggcccttgctgaatagtaacgctctaatctggggaacacatacagcatttttctgaagctgatttgtcaggctcagctagctggaagattctgtgtgtttgcacgagtgtgtgtttttcagctacccttgaggcacttgtcacgaccgtgcatattaaaattaatcagacctcctcggcccgagtgtctgtgtgtttaacacgaagaagtgggtatcaagcaaatgctctaattaaatgggcctgcttggttttgctctagtggatccttggt

SEQ ID NO: 31801 - DNA, 1145 bp, Bovine  19866880779533
  misc_feature (1)..(1): n is a, c, g, or t
nttgttttgtaaatacttcatgagatacttacttagtaaaaaactggataatggaaaattctgacttttaaagtttaaccatgtgtaagttattcaaattgactttcacctaaagtaatttcttctactctttcctaggtttttaaccatttaaagtttttccttgagcctttccaaacttgtgtcttcttttgagccaagtatggaaaattctagctcaaaactaaaatttttcaaaaagttgaaaaatacactgaggcatgttaatcaatagtttccaaaatacaatctagcttagagtatctattgatataaatgatatatctaatagtaaataacccaataacccctcagaaatcatattacatatgttagtagtaaaaagtaatgaatatttagaaaataattctttccagtgatactattgaagagactctttttttttttttcctatatacagagtaagaaaaacaacagagttatttaggttgaggaagattgtcaaagagcttccctggtggctcagtggtaaaaaatccacctgccaatgaaggagactcaggtttgattcctggactgggaagatcccttggagatggaaacagcaacccacttcagtatccttgtctgggtaatcccatggacagaggaagaggagcctggcaggcactagtcttgtggagtcacaaaaaagttgaacactacttgatgactgaataacaataacaagattgccaaaagcaagaatgcttttgctcagggtcaccttcacaaaccctttcatccactgaactaacataaatgatctggaaagtctatggcattataaaaattaaaacgtatacacaaatgcaaacacacacacacacacacaatccctgccctagaagagttcctaaaaaagttacagaaatgaacatgtaaacaaaccattccagggatacaatgagaaaagtagaacagtgcaaaaggcactctggaaacttccagaaaagaagaaggtagggtagattagcctggaaagagcattgaggaaggttatttgttaaactatctcaaaaaatggcacttcaccacaaattatctctcaggatccttttaccacctactttccatgtcttctaaaagtcacacaatagcctcca

SEQ ID NO: 31802 - DNA, 1639 bp, Bovine  19866880813813
  misc_feature (1)..(1): n is a, c, g, or t
nataaataaattttttaaaagacacaggaattaacagaaattttttttttaaaaagaatttcctgtgttgttcaaggggttgaggagttggtaaaataattctctaggctgatgaagtttggtgcttgctggctacactgttttgtttatttattggctcaaatgtggctcttggcttttgaggacttcgtatgaattggatagaattctttctaaaggacattcctaaatggttgaaattaataaatgaatgaggttagtgataaccaaatagaggtgggaagagacaagatcttgttccttggatatatactcaataataagacaggcatttttctcctctaatgctatagatagcattttgtgatatggtatttcatcttagccagtgcttcatcatcaactcaacttttttccttctagtcctattttgcatttgaatatacataggtatagtcttccgagtaaaaagtatgaaaaccaaacttccatgtttacatacaaaaatatactggttcattaagaacaacttgtgtttccacaaggagatttctagaatttgggggtagactacagatgagaataatcaatggtctacaataagtgtcatgtagtttagggcatgaaattcataaaaatggccttgattcatgaagaaagtttcatataatgtttaagctacactaagcaaaacctggatatgcttctccattttaaaaaatcctttcttcaaaaaaaaatccatttcaaagagaatgttttagttatctggaaaattcagggatataaacatggatatttcaacagatctctctacatctgtaaaatcagtgtagacatttggatttgtgaacagtatcagaaataatagagtgccatgaaaagattaattactgtatgccaggaactatactggacattctgtggtgctacatatgcataaggccacactcttcttcttatctagctagttagccagcttaattctcacataaaactaatttgtggcaatgtttgtgcttcagtctttgattcggtttctagaaacgaggtgttctcatatccaatgtgttgtgatcaatacatgatattcacattctactttttgtgatttatattgtgaaaagaactacagccaggacagtgcagctatatctgtttaaagtatgatgcacatttattcagatatagagtttatttcattcatttaataaaaagtgataggcatgatagtatgtaggacaagttcccacaagacagatgaaaaagtgtaaacaaattcctgtaatgtatatggtgaaatctcatatctgcttaaaaactctacagtattctgtttaaatatttttaatgaccattccactaagcttagttttgtaactccaaatactttcaggaactgagtatgtgattggctaagggatttgctcccatggacagtggagcctggtaggctgcagtccatggggtcgtgaagagttcacttttcactttcatgcattggagaaggaaatggcaaccgactccagtgttcctgcttggagaatcccagggatgggggagcctggtgggctgccatctatggggtcgcacagagtcagacatgactgaaggacttaacagcagcagcaagggattt

SEQ ID NO: 31803 - DNA, 1676 bp, Bovine  19866880815701
  misc_feature (1)..(1): n is a, c, g, or t
ncctataccttctgaaattgtgaggagacaaagatggaaaagatggtaccacagaagtgtagacttgggaggccatactgttgtgacaatggggaagacacttaacgctgggtagaacacttgactggactttttctcgaattgtggttattagcaggggaggggtaggtaggtaggaaagagagttagctacagactgagctcaaaaatgttcttggagaagccaaatggcttcaggttagaaaatctatgacacactttggctgtttttctaaaggataagccaatggctgatctagccagatcacagaccatcctataacacgggtagaaacataggttcccttggaaagctcttctttggtcttttaatgaatcctgattccatattaattgctatgcaaagaaataggtttttcctgaatcctcctctcccatcccatattctttttttttttttttcaatatttttccatatttctaatttcctgtatgttaactcactcattgtcagcattttctcgtgacacttgtaagctccctaaagacagagattcccgaataaagcttagtctcatctacggtacccagtagaaagctaaaaaaaatgtttgatgacaatatatcaatacattaatcatttcagcaaaaacggtgaggaagacatggttctattctagtttaatggagcccagcttctggtacccaggcctgactgctccatacgtgttaaacggtgactagaacttactggagatgttatatgagatgcattacagacaggagtcctgtcttcagcatgttaatgatctagaaggacccaggtcgaacaaatctctcatgaatgcatgcttggtatgaattatctgtgctgtgtttctgaactgctttggggaaagtgtgaaagcttggtctcattgatctgcataatctgtaaataagtcccttatgacaaagatctgctgcagcaaattattcctttccctagagtctgttgtgtttttccatacaagtatatgaaaaggttcaagcatcaaacaaagcccaatttcacaatgtcttgtagattaaacaaaaaaagaacaacaaatcaatcctattctattacaaccaggaatgggaagtaattactaaatcattccctcaaggtatttttattttgttgactcatgagagttggccctgtctcctccaaaacactctgaagccatatttggagaattttgagttggtgagtttactcatgtgcagaaaatattgagaatttttcatacattctttgctaaatcattttggttttcttaaacaattggtattcctcccactttttcttgcatttatgcatgtaactaaagaaagatgtagctgcatttgtcagtgaactgaaacccacatcatgcttgtcttttaaaaaatcatgactttccatctcaactctgatcagctaagactttttgagagtaaataattacccgagtcttgttatttaaagatgttggaattctgacaagaaagttgttacataaataaaaatgatatcatttatattaacaattaataacacaatgacagtgaagatgaatattcatttggaggaacacaaaaaccctaactagtattgggtattcccaagtcacatcgagtaatacccatacaaacttgttaacatattaaat

SEQ ID NO: 31804 - DNA, 2385 bp, Bovine  19866880820519
  misc_feature (1)..(1): n is a, c, g, or t
nagtgttctttcctctgtggtttctgtatttctttgttctcactcaacatatctctctcccccaacttttctctttttcctatgccaccctgaggcagaatggcaagtgggcaccagacagctagctacttcaaggcaggagacactctcatgcaataggtgcattgctctgtccatggaatcctccaggcaagatcactggaggggcttcccttggtggctcagatggtaaagaatctacctccaatgcaggagacccaggttgggaaaatcccctagagaagggactggctacccactccagtattcttgcctgggaaatcccacggacagaggagcctggcaggtccatggggtcacaaagagtcagaaagtgattaagcaactaaaactttcgctttttcataggtgcattcattcatgttatgatataataaaattctgaaacatacaaacaagattgagctttaattttgtatcaggtggcatctagctacagtctcttttctcaccctgggcttcagtccatgccctccgcttggccagtgtcagtcagttccctgcctttacacagtgcttgaccttgtcagcctaggatccccacagcaggtgcactatattccccccagtttgccaagtgcttcatttgatttctttacgtaaagagttattcaagctccagctctgtgataagactttttctccttaactaataatgaagatctttcgcagtgaatgatataacagtgattttttttttcatatcctaatctgttgtatgggctaccctgatggctcagtggtaaagaatctgcctgccgatgcaggatacaggagacaggagacgcagatctgatctctgggtcgggaagatcctccagaggagaaaatggcaacccacgccagtattcttgcctggaaaattccatggacggaggaacctagcaggctacagtccttggggtcacaaagtcggacacagctgagcacgtacacacgcacacacacacacaatacgttgtacattacaactcaatttttcctttctgtttgctccatgctttaatttcagtacacgatcttacagtgttatgagttgtgtcagcccattgtcatctgttctcaattgtaaacttgaaagagcagcggggagcgtgtctgtgtactgctctctatggtgtccaacacagcactgtgcagaggtcagtgtgaacctggatgttcattaatgacagtgtccaggaggttctgatctcccagttccctcttttattgaactgtccactagtgaaaaagcattttgcaaaatacctttgttagagtctaatcagaataccataggactgtttcactctctgtgtcatgccctacagtggccctggtatttgagtgagggacaaagagagagagaacagcaatgtttcacataggctgtgttagggaaggtttaggacatagcgttttattggtatggaattgtgatttttatttgaatctcatcaaactctctcctgaaaaggatctttcattcattatttcttctcttctctttctttctcttttctttctttctctttctagacccgttcagctctgaacacttacaatggagaagattttattatcaccaaagacacaattacatggtgaatgtacgaaataacagtttggtttctatagaaaatgtatttcgcattgttatttcaaaacctttccttgtcttaccttgaaagaaaagctctttcaaagaagcatttggctttttctcatctatctgtttagccatcgctccttagtccatgcatacgtgagcgaacagaaacaaccctttttgtttctcttgaagatatctaagtaaagtttcaagtagccaattagctttttgacctaagctttgttggctgcagaaagcctgtatcccaggaacatttggttctcaaggcatttggatctcataagaaagcctcggtgccagcaccaatcagaatggctgccagctgttattcttcttcacaactggcggccatttccagcactgttacggagctgtgatcaatctctgcacctgtctatcagtggatgttcatagagagaactgtgtgggctgcatctgcagataccacatgtaaccaaaagggagaggggagagaggagagtgcaacccctccccccgccatatataaagtgagaaaagctacagggagaggaaaaacataggaaaatacgcaagggctaggtataagttagaagaaaagagcaaacgaatgttttataatgggatgtttatggtgggaatgcatagttttcacctcatctgtgagttgaggtctcagtttaacacttgcacgggttttctcattctttcttggatagtccttgtctttg

SEQ ID NO: 31805 - DNA, 1210 bp, Bovine  19866880820703
  misc_feature (1)..(1): n is a, c, g, or t
naggcattgtaaacagacatatataagcaagaaaagcatggtagctgcaaaggcacgggcaattcagcattactagaacaagtcataaagaatgatgctacgaatgctaggaaatgagaaatgaggctggagagtacgacaggaagtgaactcactgcagctgcaggcgaaccgacccacccagtctaataaaggtctctgggagacccaataaaatacataagatggcacaagtaccatatcacatgccaactgaggctctttttccactcttgagaagaaattaaatgtctacttccatattcctgagtctgttccaccattttttctttgggaaaataattttaaaaatatgcactgcattttattaactgccagcatgatatgtgagtatgtcagggaaaatgtattaatactttgttccatatgtacctgttatatacttgtatgtattagaattaagcagttttgtttaaaattgaggttatataaatgctggagagggtgtaggaaataggaaaccctcctacactgtaggtgggactatgagttggtgcagccactgtggaaaatagtacagaggttcctcagaaaagtaaaaatataattaccatatgatccagcactcccactcctgagcatatattcagacaaaaactacaattcaaaaagatacttgcatcccaacgttcacagcagcactattcacacgagccaagacatggaagcaacctgaatgtccaccaacagatgaacagataaagaagatgtggtacatataacaatggaatattactcagtcataaaaaagaagaaaacaatgccatttgcataaacatggatgcaaccagaaattatcaaactaagtaaagtaagtcagaaagtaaaagacaaataccacatgaaaaaagtgaaaggcaaatatcacttatatgtagaatctaaaatacgatacaaatgaacccacctatgagacagaaacagaatcagggaagtagagaagagactcgtggttgccaagcaggaggggcatgggaggcggatggattgcgagtttgggattagcatatgtaaactggtatatacagactgaatgaacaacaaggtcctactgtatagcatagcgcattatactcaatatcctataataagccataatggaaaggcatatggaaattaatatatgtatatgcacaactgagttgctctg

SEQ ID NO: 31806 - DNA, 1211 bp, Bovine  19866880885423
  misc_feature (1)..(1): n is a, c, g, or t
nttgttactttaattattacatttagtgcatagaaaaaagaattgaatgatctatcatgaactaagaaattgttgacattatctctttttcccctgggagggttttgtgttttggtagtttttaatgtttgttttcactttatgagttaatagatgtatgaggattagataatatctataaatgtcttgagattccccaatataatttgaatatacatagctacgagatatatacaccaaaggaaagagcaactacatgttcattttggagggggaggggtacttagacttacagtcttgactttagaatcatagttaccttttatcgaaattcatccttctttggtcacaagaagggtaattcagaaaaattgaaatgttttgaagacaacgccctcattgatcttgatgatttagggagactggctgatccttcctttcatgcaggattacttctaatgttttccaggggaacccgagtgcatccatgcactggccccctaaatcttttgctttgcaaaataaccagccaaagttctcgggatgggctaggaaagaggcaaagacattaggattctccaatgcactaattgatttagcagcagtttaaaacaatgttgagcattgtcagagacgttccttggaggtattaaatcaagtttcccaagatggattgcatgctaaccacatactatctaaaaatctcaagggctgtttattgttctgcaatttatgatcgtcttgttagaggattgcacatcagcttccctcgagcccaggaagaaacagagacaaatagcatgcaaactatattgaacaattcattatattatattgtagaaacctaagcacagtgtggagataacccttttatgcgtgctgccttattgaacagtaatcactctgtaatgctttagatatttaaatcatatttataataacacatattaatgtaacatccctcataaagttctcaaggcattttatggggtatataaaccatggaaaaatacaaaattttaaaattcagatatacctaccctggggtcttggagacaacctaatgaggaatatatacaaaatcccaggctgacagtttaactatttaagtagcatatagaataactcaaagacattttaagatattggctggttacgaactcattctttatctaaatatttggccagggtggataagtgcttactttcag

SEQ ID NO: 31807 - DNA, 1890 bp, Bovine  19866880886362
  misc_feature (1)..(1): n is a, c, g, or t
ntaaactataggagaactgaggactaagctctctcactcactatgtacttctgtttcctacatggaagcctggcatatattagtcacacgtgaaagtaactgtcgaatggataaatgagtataggaatttctgccagattcttagagatcttctttgctttaagatgactcaagtttacgtatgatttggaagttattgccccgtgggaagaccatttttcaagttactgataattaaggcataaaatgataaatatgcattatcctagtttcttaattatctcccatagatgctatacatcaaaagagttatactgtagatataggcaggactatatttattatctctaattaaatacattaagtaaagaagtacagaacagcataggttacagaaaactaatactcatttaatttctgtgtcctttaaatgattttgtgcttatattttccctaattttgaatgaatttaggttctttttgaatgcatccattatgtcacagagatataacctgtaaccataaatctacttctgtatccaaattgcattatatatgtacatatacttataaatacgtaacttcttattgcagtgtacatttaacatatctacagtgtgcagtattctctgaaggagtttataaaactatgacaattattcagataaattgagtaaaaaattccctttcttttccttcttatggagtcttgttatataaatatttaattcatctataaaagaacagtaagttaaaagtaacagtttaggtagggcagatgataccgtttgtcactgctgtcaataaactgcactgagtaaggtgacacatgacagatgactggagactgctgatgccttagctggtctcagctcctgtttgcctctcccagtttgagcatctccttctgccaaacattggtttcatgtttaaaggcaaaaacttttcattcaatacaaaactcaagtcaacaacttcatttgaggctcaaccaaagaaacagcaacatgctgcagtggtttggtggactgaccacatgatgatggggggatggtcctcattgtggcaagttccgaggtatttccaagtgtaattccatccttcctactgacttagaatctgaacccagtttaaacgtaactctccttatcaatttcaagtaaaagaccaattgcacattgtatactatgcacatataggtgagagtaagtaatttttctacttgctttcatttctctaaaaaaattgggggcgtaatattgcaaatttttataatctcttcaaaaatcgacatgagttaggaactgagagcaggaatacctgctgttcactaacttaacttacataacaaatactcattttatgcccactgtgtactagtactctcctaggtactgtggatacaaagacaaaaagatatattcctcattgtaaaaatgcttataagttagaaacataaattatcactgtactagaagcagtgacggaagaatggtcacaaaatgagactgttcagctcagggaagaaaggatattaaggcaaggaggtctacaaaggaaaactagtttacctgagctaagttttgagaactaagaggagtgtttcatgtgactgaagagaatactatcatccaagcaggggaggcaatctggtaaaggggagggtaacgagagctcagcatgctcagttaaccaaaagaagtgtgatatgtttagggcataagatggatatcaaaaagtggagagagctaaaactagaaaggcagaccataaagaatcatgaataccttctgcatagtcgttcagtcgtgtccaactctttgcgactccatggaccatagactgtagcctgccaggcttcactgtccatggcgattctccaggcaagaa

SEQ ID NO: 31808 - DNA, 1977 bp, Bovine  19866880937145
  misc_feature (1)..(1): n is a, c, g, or t
ngggaaggaagatgagcaggtcagtccatggttagaccacccaataagcaacctaatcccagccttacaccaaggaagatagggctgtgtggaaatgtaacctaaagtggggtccagctgctcccattcaagaagtcaataaagaaacaaggttggtgaaaaggaaagtttattttattttggatgccagtgggagaagaggggagagactcctctccaaaggctgactccaccccctcaaccccccccactctgacaatcaatgggctagagtctttatagacagacaacgtgaattactcgcagaaacagcacagtcagctctgacagtcatcttgaaattggtcatcagtggtctgactgatcagtgtcatcttgattattttaagtacaattaatcttcagtgccagggtcagtttgtttccatttcttgaggccagttctcaaaattgtggcaacttatgtcatggttacagtctagtcctcatatagttaacgtcttccacctgatagggatttcagtatctgtaagacagcgcacaggatatggctcagaatattatctgtagtccttgagaaggaactaaagatccttaattatgtttaatgactaatctattattatttggtctccttcgactcttttctgtttgtttctacatgttctcacttttctgattaaacttattctttggctaaaatttttccacagacgaaaggcaggctgaggacatgggggacaaggaccatacggtcctgctctatgtcagaaataaataaataaagaacagtttgacattaaaaagcttcatagcgctaatcagaatgctgtgttattttgaatgatacagccaagtggtttggcactgtaaacattttaatccttaggaatagtaaagattttaaaataggaagctattttcaaaaacctacctcttttcctcttggaaatctctctctctcttacttttatatcttcctgtttccctctctttcttatcttttctgctgtatatttttagttgccacccctctgttagtccttctctacctgtcttccccttttctctgtccttcagttttttcctcctctctcttgttcgtcaagatctgagacactagttacccttttattctcccacaattgtgaaaaatggagctgccatctcctttagaactatttgcttgttagctaaacaactataataataatctgctgagtcaagagttttcattttgaatagcaaatggcaaggatggaggctatcagagcaaaatgtatctgggctgattttttcactctaaatggaagatctcctggagaaggaaatggcaaaccactccagcattcttacctggagaactccatgggcagaggagcccaataggctatagtccatgggattacaaagagtcggacactactgagctgttggaggcatagctgataacattctaaatgattgtagaagatactagcctagagataccttcatccataattcatcttttgttataaaagccatgaacacatcaatgatggaggcttccgtttagacgataacaccaactcttccgagattagggaaaaactgtggattctcttggaaaacaaaagtatagtgatggaaacacagctcgttatttttatgctaagaaagtactgaacaattggtttcttagcatcagctgaaatggaaagaattatttttcactttgtttatttaatagtcttctatcagtactttataatagttatctcagatggtgggtggtgacctctggctacctgctctcctgcacactcacaccatttattattcattatttatgcacatgtggatatatgaaagatagagattaagtctaagggttgtagtgtttttaaaaatctttataatctatgaaagaaagagttagttgctcagttatgtctaactctttacaaccccaggactgtaggccactaggctcct

SEQ ID NO: 31809 - DNA, 842 bp, Bovine  19866880991776
  misc_feature (1)..(1): n is a, c, g, or t
ncaggatcactcagccagcagtaatagttattatttttatttattagcactgtagccctgttctccagcatagccaattcaccccaacctccaagacaggaaaagcatttttacttttaataaaaatgggagtgtgcagcactcctgtgtcaggctctttgggtaaagtgcacatctaatgaatattgtccatctgtatccaaataatttatagtatcagcagagtgtgggtggtgaaatgtgaattaagttctaaccattaggcacaattagagggggtaagagtggaaggtaggaggaagtagcagggttactaaggcaggagggatagaacaggaaagcaaaggtaacgagagaaaattgggaggaaggtggtcatgatggcatcaattaacagtcaattataacagttaaaatattcctcataaaagattttcaagactatttcatacagcaataaccaactttctcagagaccaactgtaatgtacctgttttttccatctattttatttgaaatagtaccatttcaactctttctctctctctctctatatatatatatatatgatagaagaagaaaaatagaagacagacaagccataagaactcaattatagtaaacggtatataagaatgcggcatacttaaaagtcttaacttcagaagacaaatttataaacaaacaggaaacgtttgattgcttaaccatatcacagtttagtaaagaagcatagttctaagcaaattctaaatgcctactggtatattttcagaattacctaaatatgtgtttgaattataaatgaagcaattaccctactcttagagtgtgttcggat

SEQ ID NO: 31810 - DNA, 1254 bp, Bovine  19866881008943
  misc_feature (1)..(1): n is a, c, g, or t
nttggcatgttgattgttttctatgtgtctgatttggggagggcttccttacattttgtaaatttatcaacttcattcctacaaaccaggaaactgaataatcattttgataattaatagaatatatcacaatatatcttcatgcaggagtccataaagtgtggttatatatatctgtattttatgtttgtgagtgttgtaattctttcttgagatttgaaacatgaaatactaaatgatctagcaagataatttaaaagctttgcttatttgttatctccgcagatgtatatatttatgtcttttatacactagcacaatctgcaatgtatgattcctgaagcccttccattctgtgttgaaagctgggttcacattgcatgaaatttctgtttaattgccctgcaatgaacttagcccctcagtgcttctctctgaatgagtttagaatgctttgcatagtcaatcaataaagttaacaatttaatgtccctgatcttatttcataatgctgttttataagtattcttttcaacttctgtgtttaataaaattcccttgaataaatggattcatgttagtttaaaaatggaagaggaaaaagcgctttctaaaattttaaacctagcaagacgtttgataccgttgaaagatcaaacagtctgaaagaaagagtgaaaatacagaaatatttcaaacctaacaaaacattaaaaaatactccacatctgtccaaggaactcagccttttcccaataccagttacaccagatcaagcaatagacattttagaaataaaaggtaaatataggggaaattatatctatgtctatcaatctatatttcttgagatcatgactgtatggatttctacaggaaaaattgtggaaaaaacattatgaaactctagcaaatagaatattcagactaattatatgcagataaattattttatttaatttccaatatctgtagactcttctctacaaatccaggctcagatataaatattactctcaagccagcctacagctcacttcttcttttgataatacttggtccaaaaagatagtaagttttatatctttcaaagttcagttatgattttcttctggaataacatttgcttttatcagtgcaaatggaggcagaattttccttaataaaatctcaccacttacagaatattttgatttttttttttttttagtgacaaataaaccaagatttctgaggattcaaaatagagaaaat

SEQ ID NO: 31811 - DNA, 1011 bp, Bovine  19866881016066
  misc_feature (1)..(1): n is a, c, g, or t
ngggtaaatagctgtacctgagctaagtgttagcttcagtacagattttgcctggctagctgattcataagttaaaactgttacagaaaagattaatatttgtggtatatattttagctttcttacctaacctatttcaagagctaagttatgcactgagagcctcaattttttaattatcatgttagaaccaattaccttcatagtagtagtaacacatagagaactaacctagatctccgaaagctaatttcctagtgtgctaatatactcagagttaccatttaattctcaggataatttatttgccaaataaataaactttccaaagacctaggaaagaaaatcatatttacaaatgtgtcaacttcaatttcaaggtctgcaaggagataaaagaaaaaggtaatagaacacagaataacttttactattgtttggatataaataaaatcaactctccttgatctgactattactagatatatatgaggaggaaaattaaaatacacacacacacacacacacatatatatatacacacaaaggaccactgagatgttccaaacttttcaaaatcaaatctgtgcttttcagtgaaatataacacttcagctttatcaagatcaaccttcatcattcttagaatgaattatatggtaactatcccatgatatattctacaagcattcttaagagaactaaccatgtaaaataaaccagtgataaatctttaatttgtgtataagaacatcaaatatagaaatagattcatataaaatgtgtctaccagttgggctcagtaagttaatcactctaactataaaactggaaaacaaatgtatgtaattgaataacatttgttttaattttcccagtttatgtgttctacttaattgcgagaagatgctatttttcttcatttaaatattcttttccatgtttatatgagttttattatttcataatcacatcttcagcatcatgatttgcaaatatacataagcattt

SEQ ID NO: 31812 - DNA, 1089 bp, Bovine  19866881034019
  misc_feature (1)..(1): n is a, c, g, or t
ntttagtcgctctgttgtgtctgactcttttgcgaccccatggaatacagaccccaggctcctctgtctatgggattctccaggcaagaatacaggagagggttgccattcccttccccagaggatcttcctgacccagggatcaaacccacatctcctgcactggcacgtgagccaccaggaagccctagttaaaggtgtataattttaaaataaacagtgagaaaacaaactaaaatgctttgataaaagttgaaagttatacacagcaaaggttggaaagggcagtaaaggaaagataacatctggccaaaagattctaaaattatccatcattcttctgaagtattcatgctttttaaggagctttcaatggtgctgcctatcatttgcatatcatacaaaagtattcttatagaatgcagtgtaatactgctcaccaacctcaaaaactcacactctttatttgtagctaatagatatatagcaaagagccccatgtcattaatgataacttaagttatctttcaatccacagttttccctggcttattaagggcataacacattaatttttctttcaggggtgacctttacaacaccattaatgctcacagcttttatcccactacattattactcattatagtttcagctttcaacatctgcatttgttgaaaagagaaaagtaaattgtagtggcatcgaatcctcagaaaatgtgagggatgtgtatgtggtgaagggccttctcaggaaaagaaaatacaagtttcagtagtggaaaaagtcagatgataaatgtcattaaatacattcttgcctttctaaaatattttgtcatacttaatcctcagaatgctgaaataaaaactcctcacatgacaaaatgcaaatatatcagttattcccttagttaaagattccagttctgaggctattacaaaagtatctcatacaccaacagtgtcatatttatgagctttcatgtctattatggaagtgaatcctttttgccaaacaaaatatttttccttttacatgctttggacatgaaagcaaatcttatcttggtgtctactttgggat

SEQ ID NO: 31813 - DNA, 781 bp, Bovine  19866881063351
  misc_feature (1)..(1): n is a, c, g, or t
naatctgaggagtagagtcattaactgggaagacatttataaattagaaataaatttgagagttaattccttttgctgatgccctggatactttgtggagttgacatgtgacttctttaagaacagtgggatggaattgtccatatcatggcctacatgaagggccagtttatatgccaaatatcgttaccctttattttttcaccttaaggggcagagctcggggttggagaaagagagaagtcagtcatattcatcagggaaaagattaagtgcagataagtcataaaatccctaccctgttaaattcccatatccttaggcaattaatattctgccaataactttctatggcttacattaacaattcttggtctgatataaattctcatgataatgtcgtctttttgtgtccatatagcattttccttttctggaatcatagcatcaatgacaggattttgttgacacatcaggcctttattttgcctacttcttgatcataatatctctctgtgacattgtttggcatttgctcatgtactaatcttccatgcaatttttaattatttcatccagatctctaaatgttttgacaagttaagctgctctgattcatttgcaacaacctcagctctgagagagaatgccttcaattaaaattataagtgaacagttcaaggaaaatattatagaaaaaaaaaagaaaggaagacgtaattctattgtctatggctcattgttgaacaaaagctttttcccatagagatgtaactttttg

SEQ ID NO: 31814 - DNA, 1275 bp, Bovine  19866881079296
  misc_feature (1)..(1): n is a, c, g, or t
naggtagcacaaagaaatctactctgttactgcctacgttgactaacatgaagcttactcaaaaggttaataaaaaggttaatagagtggttaataaagtctttcatcttcaagtcaggataaaacatatagtattaattttttctaaactttttgaagcattactatcataggtacacttacatatgggtggaaaaatataatttaacagtaaaaatagttttttaagaaacactaaattcatacattatatgtggctattctaattgtagtttaattaaatatttaaatgccattgaaataataaattgccttctttttaaaatatggctttttaattgaaagaaaaatgtacaaagacattgaaatattttattaatggccatccaatttcattggaagtttagagccttagttcttatttctaactttcctcagctcaggaagatgtagattttcttggcaacagttgctgtgtaaaatattctgagatagaattttttatcataattaataatagatgaaaatttctaagtttttgatgttctaaactctatgctgtttgatttacggtgtctttatagttgtttttctggtaatgctcagcctcttcctgttggaataagggttagtcattttttttttccctagatgggtctgatttatttttccttttccccatatcttcatgttttactttatgtaacttactgaaaaaccaattctgttgtaacgagattagattacaagttttctaagtttcaggtggaatttttagcacatccctctaaagtttccaaagtactcctactgtctgcatccttgtaatggaaacacttcatgggggcatcacaacttttaaaacttagttccaaaacagacagcagctcttgtggcaattatcagagctaatatataagtcttattcattatgaaaagttcagtacaagcgcttgcacggtattatcactatatcattctcattaattttttttttttttagttctttggggtcatttaaaatgaaaagctgtcacatagtttcaattcatgaaatgcagacaggaatttttcaaaaaatgctttccatagagagcaatcagagagaatgtaatccctagaatgtcttctgttttttcctgtggtatttctctcttttttgaaatataggttcttgagtaggttgcaacaatataagtttctatcatggactccagctctatcgtcttctccctcgctagtatctgcctccgactactaatttgcacccagcaa

SEQ ID NO: 31815 - DNA, 1269 bp, Bovine  19866881108616
  misc_feature (1)..(1): n is a, c, g, or t
naccactgagcaactgaacaacaacccagctcctagaggcttcaacagtccttggcgttccttgacttatagatacatagctccagtgtctgcctccatgctcctgtaacctccttccctgagactgtatgtcaaatctttccctcctttctcttagaagaacacaaatcattgaatttaaggcccatcataaatccagcgtgatctcacttcaggatccttaatttacacgtctgcagagactcaatttccagataaggatgccattcaccaatactaggggttaggacacagactagctttttgagagacaattcaacccattacaagtagtttgctgtttttccttctaccttttaacaggctcttcccttgtggaacagccattcattcactctttctgtttatcccctctagattggactttccagttagtcctttctttggccccttaaaatatataatgtatgtgtatacactcagtcatgtccaactctttgtgaccccatggactgtagcacgccaggatcctctctccatggaattctccaggcaagaatactggagtgggtagccatttactcctccaggggatcttcctaacccagggatcgaacccaggtgtcctgtattgcaggaggattcgttaccgctaagccactagggaagccccaaaaatatataataggtacctttttaattttgagaattttgttggtggttatggttaagaaggaactccaaggtatgaaaaatcaaactgttgtaagtgtaacacagtcacagactctcacacctttcttacattaatgattcctaacctgcatttcccaaatatcatttgaggtgctaactggaagccatattggtctttgccgtcccatttgcctcataagaagcttaccaaacctctcctaaacacttacccttccttctgatcctgtcttgagatgcacttactgctcaagtatataattaaggcagaataaaatgtatcaagtgatcattcagggtcttttgaactctaatgggtgactccatatctccctgaacctcagtatcaacaacaaaggatatcccctcaaaagattttatcatagtggtcaaagctgtgcaacaggactgctaaggatgagcatatagggaaaaatgagagaggaaaaaaatacaagaacatttttttactgcctcctcaggtgtaccaaatgttatctactccttcacgtggtatgtcattgattcctccgttagccttatgttcattttaca

SEQ ID NO: 31816 - DNA, 2819 bp, Bovine  19866881126681
  misc_feature (1)..(1): n is a, c, g, or t
natgcctggaagtgggctggaattggtaccccacatggaagataaaacccaaacacagatgcagtggctgtgaagaaagacagtggaggatggattttgagggatcgaggaagaaataccattaaatttggactgtacagtctctgacgtcattttcagtcctgaaattctaggaccaatgtattaactcctgtttgggtctcagaatgtcagtgaaatatattcttaaaatgtttctgtctttccaaaattaaacacaaaaaatttacatcacttagccaaaaacacaacttaactatgcattatacaaaagtatagttttcctgggatgcagtcagactgagaaaagtgctctgattgggtcaccttgaatagagcagcaaagtggatgagttgtgtagacctcagactaaaatatcctaataagcttttcctgctctgtcctcatgacatggccttagatgaatacactggaagttaaaaaatggcccacccttaatttgggcccacatttagtttgagaggaattgatactagtatttccatgcatgctaagtcgctcagttgtgtctgattctttgtgaccgtgtagttgtagcctgctaggctcctctgttcatgggattctccaggcaagaatactggagagggttgctatcccctccttcaggggatcttccaaacccaggaactgagcccatgtttcttaggtcacccacattggcaggcggattctttaccaccagtgccacccaggaagccaatatttccatattcctccttttttcatggtcaccaatgtatatgtttttgacatatcatttattaggactttaatagcaataaataaacaaatgctgatgtagcagaactatgaattgccagaaggctaggatggagtaatgggtaatataaaccaagggctagttggtattaagcctggatgaaacagaaccacagaaaggacagatataaggaatactaattgaattaaccaatctttgagtgagatgagcatacatgaatttgcagaaactgtttagaccagtgtttattaggtctgtgtaaattcctttcctaattatctttaacgtatgtcatcagaaaacaccgaagacggaagaaattccttcccagtcccaagggatgatccctttgggaaactgtcaagcagtggccagaagacaagaagggggagagtgtgacctgccaaactataactattcagtggcttcaaagaaaatttccatgtccttgccaatgtggtatttttctttttgcagtgaaaattagtggaaaaaatatccaaagccataacaagtcatttgaaaaacttgagggaaagggattattcacatgctttaaatagtaatttgttgatttatttcactttcaaaagaagaaacagttccatgaatagttttccttatttccagaagagtctttatatatacttcaagtgtctcaaggaccttatcttgcacccccaacacaaacatcgtattaaaaatagtttcaaaactatttagttacttcaagtttgtagcacatgatcctcagaggaacatttctcatttctatgcagagatttttagctaaaatagatacaaaataacagattaatcccattaccgagattctgacctcagaatgatggcctcctggacaagtttaacctgtgccatatgtccagtccctccagctaattaattattagctattcattgctagcaatttctacacttaattcaagtgccagctcccctgggttgagccgtttaatataaagatcttagtcttcctcatccacaaaacagaatttatattacagcttccacacaatttgttttgtaaagagttaactaaaaataaaaattatttttattttgtttttcaatgtgtgtgtgtgtatgtacgttagtgtgtgtgtgagtgtgtgtgataatagcactgccaattatttttaagatggctaacttgccctttccctaagccatcctcctagaggtaaattactactgaaaaatttgctaatttacaaagtgtcacacgaacaattcaagggtacatactgtactttcaaaacactttcacgtctttgtaatcactaagttcagatcttcatctattgagggagccaaaggtcatttttcctagtacagcaccacagttaaggcttctccactcgctagttctatgtatcctaacaggttgtaacctcactgtcttagttgcctcctctgaaaaatgggaataatcacaggactgttatcatagcattgctatgactcactgactggtagatgttgttaacaagaagtttcaagagtgatttccagatttctaacaaggataactgggagtatagagctccatcatttgaaatatgatctccagggcaaggggatgatataaaaggaaagtcacaattaaggtgtattcagtttgagctgcctgccaattctgtggacacgaggaatgttcagtacggctttgaaaataaggctaaaattatgttggattttgaagtccattttcctgaaatatactgtgctgaaaaaaatggctcagggaactttgttctattaaaggtacacttgaatctagtacaacctcttcatttgacagttgaggaaacaattctttaggtcacactacttatgataaagtagcgtgttatgttggtggtacctcatgaaccacagctcctgacagtcacatgcttgtgcaatctctgcccagtgaatctatgattcctcctgatgaatggaatttggcaaaaggtgatggaattccagtcgagttatttaaaatcctaa

SEQ ID NO: 31817 - DNA, 3290 bp, Bovine  19866881126683
  misc_feature (1)..(1): n is a, c, g, or t
ngaaaaggtgagtttttattccaatcccaaagaagtgcaatgccaaagaatgaacaaactactgtacagttttgctcattttgcatgcttatgaggttatgctcaaaatctttcaagctaggcttcagcagtacatgaatagagaacctccatatgtataaactgagtttaaaaaagacagaggaaccagaggtcaaatttccaacattcactggatcatagagaaagcaaggaaattccagaaaaaaattctgtttcattgattacactatagccttttactgtatggatcacaacaaactgtggaaaattcttaaagagatgggaatccgaccactttacctgtctcctgagaaacttgtatgcaggccaagaagcaacaattagaatcttacttggaacaactggctggtttaaaattggcaaagggatatgacaaggctgtatattagcaccttatttatttaacttgtatgcagagtatatcatgtgaaatcctgggctggtggaatctcaagctggaattaaggttgctgggagaaatatcaacaatctcagatatgcagatgactaaagagtatcttgcctggaaaatcccatgggcggaggagcctggtaggctgcagtccatggggacgcgaagagtcagacacaactgagcgacttcagtttaacttttcactttcatgcattggagaaggaaatggcaacccactccagtgttcttgcctggagaatcccagggatgggggagcctggtgggctgtcgtctatggggttgcacagagtcggacacgactgaagcgacttagcagcagcagcagcagcagcagcaaagagcctcttcatgagggtgaacgaggagagtgaaaaagttggcttaaaactcaacatacataaaacaaagatcatggcatctggtcccatcgcttcatggcaaatatttttattttcttgggctccaaaatcactgcagacatgagtgcagccaagaaattaaaagacacttgttccttggaaagaaagctatgacaaacctagatggcgtattaaaaagcagagacatcactttaccaataaaggtccatatagacaaagctatgatatttttcagtagtcatctatggatgtgagttggaccataaagaaggctgaacactgaagaaccgatgctttcaaattgtggctctggagaagactcttgagatttacttggactgcgaggagttcaaaccagtcaaccctaaaggaaatagaccctgaatattcattggaaatgctgatgctgaatctgaagctccaatatttcacccacctgatgtagagagttaactcattggaaaagacccacttgctgggaaaaactgaaggtaaaaggagaaggaggaggcagaggatgagatgattagctagcaccactaactcaatggacatgaatctaaaactctgggagacagtgaaggacagggataagccggatacgacttagcaactaaacagcaacaacaatagttaatttacaacattgtgttagtttcaggtgtacaagaaagtgattcgattacacatatacatatgtctattctttttcaattcttttcccatttaggttattacagaatactgagcagaattccctgtacaatacagtaggtccttgttggttttctgttttaacacagggcaatactctgaggtgtaaagcttgagatgacttgcgtgcttctgtttttgtgctgttggaatccgtaagttcccctgagaagtctggcttttctgtaggagcagtgacaaggagagggcgatgacctaagatggaggagaaagtccagctgacccagtgtctttacaccaggtgacctcttcttcttccctggccccagctgaatgcagctttggctgatcactctcaagactcaagactgggtttggctgagtccagccaacacacagaatcataagagagagactttttttagcttctaaattgtagggtgatgtgttatgtatcaatagaaaatcagaacaacccccagaaccaggacaagaatctaggtcttccgagttccaaaactaaggtcatctagggcaagaaattcttactatgagattttcctcttaactttccaaaaaacttagtaaagaatgcagggtgaataactctattgtctggtttgctcaagtggaaaatgtatataataattaacttcttgattaaaacatactatatatcctgagatgaatgagttacctgttatttaactatgagatagatttatcttgccattattccttttgtccatccatccatctaccccttatccatctattatgaattaatctatatcaaagaactagactacaattctatatcaaacatctgttttactctatgactttctgagctaccagaaaatacagcagaggttgaataaaaaagccaaaatttggtctttcttgtcacctcagttttaagtatttctaattctgattagaggaataccagtggatacagcttttactttgactgtcaaatgtctcaaactattattgaattttaattctttgtgaaatgtggttgattgagaaaaatcatcagaattcaatagtcacaatcttccaaaaaaacctgctttccaaataagtgcatatctggcatgcatctttaaaaggaaggaaatcactttctcctttttattttattttttagcatgcagtccaatagtttgtgggttcaatattagatattacttttgaacaacaggaatcctattcatttctatattagaattatatttgtttggaaactgctcagaagtcagtctgacagcttgacaaggcttgttgccatggaaaacgtttgtgatgttatataaatatattcccaggtcatgagttgccatgtattttttggacattgatgctaagaggaaaatgactgaacattttttttagaaaggaagaataacatagtaaacaaacaataataacaagtaataaatatgtgtatccaataaactgaggttctgtttttttaagaattagacttatgttctcacagccattttagttataaaagttcatttatggccaaggctccccccccccttaaaatattcttattaccagtcattttgcaatattaatagccccactattaatagactaagagacaagggagccattatttttgctctctatctgttattccattaagtaagactgccaacctgtgactgctagcagctctataacgaaccatgtgctcaagccacggggtatatcctaag

SEQ ID NO: 31818 - DNA, 1644 bp, Bovine  19866881129030
  misc_feature (1)..(1): n is a, c, g, or t
nttttgcctaaccgcccattccctggcctcttgccaccaactaccacttcttcaagcatctcaacaactttttgcaagaaaagtgcttctacaaccagcaggaggcagaaaatgctttccaagagctcgctgaatcctgaagcatggatttttacgctacagaaataaacaaacttatttctctttggcaaaaatgtgttgattgtaatggtttctgttttgattaataaggatgtgtttgagcctagtcataatgatttaaaattcatggtccgaaacaacaattacttttgtactaacctaatgactccatgcagtactctttgtgcaggaactctggtgaagaatgttttttctccaggggcttggtaaaatcccaggaatatttcagtactccttgtggatttaagtctctggctgcggctcagttacctatccttgaatttggctttgggagttagagaaggcttcacacagaggaggtggcatttgaacttggctttgaaggattagtaggattttgccagaagtaatggaagaattctcactggcaagaaagataattactggtagcactttttttttcctgcttcataatattcaggaaaatttagacctctagtcctatatacttatacatcatgtgtttatggctgaaagtaaatatgattaactagataaaacccaactttacaaatcctcttttatgtgcaaagtatttcaaggaggaggtttgatttatttacatttttaattaaatgaaaattacagataaaagatgctataccactcatcttcctaggaaaagaaaatattgcaatgtaattaaaaggatgcctcaaattataattagattggaaatttaattatgactagaatactttatccttatgcacactgacaccttgttgatacacaacctttaaagtatttttattatatttactctaagatcttaatctgtggactaaataaaatccttaggttcctaagaagagctagaatttagcatagaatccaaactgcagttttttacctggaaacaaaaaaagtattgtgtttcagaattcctgttctgattattactggatttttattacaacttaatactgcaaaaaattctaaaaatctctagcagatatcagttagtataatattaataacaaatttcttagctagagagaacatcctttggttcatacctgatagagttactcacttccaaatgaaaggactgaaggaattcatatatatacactcaggaatcacattttccagaaagaatactcttcctatggaatgtcagctgtacatatagaaatgtatcatagcaatttggtggaatttcttctgcagatgagctctggttaaatacatttgctataattaacttcctgtggcaccatttgacacttcttgcagcttaggaaacaataactttcacagtaaaaatgatttagttacagcataatgtgctctgatagaaatgttttgagataaagatcctcaatatgcaattattattagcttgatatggaaaatactgtgtgataaaaactgtttgaagaattgccactttaacttatctggggttgaagaatgcacttaataataaatcgaaggtctttattcatgagtcaaagt

SEQ ID NO: 31819 - DNA, 621 bp, Bovine  19866881133840
  misc_feature (1)..(1): n is a, c, g, or t
naaacataaaaaacagaaacaatattgtaacaagttcaaaaaagactttaaaaatggtccacatcacacaaaaaaaaacttaaaaaaattttttttctgactttaggtcagtcacccccttagcagttatgccacaaactgcagctttccagttccctttattgcacttggtttgattctattgttgtacataccttattcagtggctaggaacacatcaagtgttccaggaaaggaagagaataaatgcaggataaccaactcccaagttgttcagtagtgtttctagggtcagaaccctttcttgacaacatcatctgcaacacattaatacaacttcgaacgtttcatgtgaaggccatattccagtgtgaatgaatggtttcatttttgttgaacccagcaggaattagttattagcattgatgctcaattgtttaaacataatgaaaattttctcagtggtatcctgcaggctgtctgggtcggtgttcttaatttttaagaaagatgttaaatcgagaattctgctccctagcattgccatctcctgtttaagttgcagtggatacaaacctctttttatgaaagtagggctttctggaaacacaactaagctca

SEQ ID NO: 31820 - DNA, 1037 bp, Bovine  19866881141484
  misc_feature (1)..(1): n is a, c, g, or t
nttttttccctttaattttacagtaatggaatactattggctgagcatttattattcttaatgttctaatctggggcctgatggaaataaaaagaggtttaaagcacagttcttggctttaagtagttttttaaatcaaattaaagagtcaagagaaaaacctgaaaacataataacttaagttattaagataccaagttatcattatcagagatatctccttttcttaaaatgagaattttgaaaaatcagaattaaggaatcctacatttaaaaagaaaaaaaaaaaaaaaacaaaaactattaacccatcaagttttagacagttttctcaaatgccactcagaggctttcttcaaagatagaatagagctagcagaaaaaatattcaagtttgagaatataaatttatgttatcatgaaataatgaaacatagctgtaaaactaacattatggcctctcaaggttacagttaaatccaagatttggagaacaaatcacacaataatttaaaataagcagtacgtttgagatatttaaaccacgccagtgaatcttctaagtcaggttaaaatactgatttgttacaccagaaatgtgagcggttcactgaaatagaaacaatatcacttttaattgttcttttaagattcatcagatagacaagacccctatggtaaagaactagcagtacgagagaacacactttctaattacggttttcaattcaaacctaagacactaagcactacctcaataatgtatttgccacctgtatatgtgaattagatagaaagatctattataactcagtcaccatttcccatctcactacatttcccttcatcaatttatgatgaaaaaacacgtgcttttaggaagtagtagctataagcttctaattttcatgtgcccatttgaaatggaaataaaatttcaaatataatttacataggctatagaacagatatccagaaaggaagttctgagtggaacagaaggcaagaaacatatcatatactccttattatcaatt

SEQ ID NO: 31821 - DNA, 681 bp, Bovine  19866881152556
  misc_feature (1)..(1): n is a, c, g, or t
naacgacattgtttatgctaattatctttgtttatgccacaattctgtttgtttacgacattcttttaaaataccatatccctataaacagttctcaccagaattcttctaaatcttgtttcggtctggtccttctcggcagcccactgagcagaaatgcagctctacaatgaaggcgcaagaactgagaacaactttgagtctctgactcctcaggctggcaaaggcagggagtaccgctgaggttttactctcaggctccgagggaaaaggatactgattgtggagaaatacaacatccccctattggacaagcagaaccacacgccacagtatctccagggatgtatggactctcaactagtaagtgaagagaagaatagataatgctaaagagaaggaagagcagcctccaaactacaggagaaaacacagaagtcagaaaggatgaaaaggtcacctcctgcaccattattagttcctgattgaaatgaagaattagggggcattctcttaaagaatgtccaaataaatgctgtttattgaagcaaaatattatcagtctttatttttttttttcttctccaggaatatcacttgattatgttcatctatgtaacattcaaaccttatattcagtataaatgacaaagctctcaatcagtgaaaagaaaaaaaaaa

SEQ ID NO: 31822 - DNA, 1011 bp, Bovine  19866881171277
  misc_feature (1)..(1): n is a, c, g, or t
ntgaggaggccgtatgactgcagaagaacagagagaagggtactttgaaattaggccagaaagttgtgtgggatggaaaggggcagaccatatagggatttacaggccatttaagagctttgggttttactttaattgcattaatggtttccagggataaggagagaatatgacaggcatgatgaaatgctgatgctgggaggttggcaagactcagttatgagttaggcaaaccagcgcgcagtgattgaaacgcatgcctcaacaaaaagcatggatgattacatattatgagacctgcgggaatactcatagatccgcagaatcatgaatggttaatctccacatgcacggatctcctgcatttaaattttttacttacggaggatgtcaatggaaagttatgctccaaaagacctgtttgccttcacatatgttgtttctgcctgaattcaatgtccgattcttaaaagcaaattttacatcttggaaactcattttcatggtagttctttgaaaggaattaataactttcaccagtactaaatatttaggctgttgaaagtgtatagattttgtgtctttttatagtcttattgaatggtcttcaagataaaagttcaagttctacatatatgaagctagttaaagacacattgaaagttttaattttacttcttttaaaagtagttcaaagttttaattttacttcttttaaaatgccttcaaatagtaacttaatgtacctctaaaacaaaataatgttatgtatattagtaaatgtacaggaaagcagatcattttactccatttctacagagaataggaataaactttcgaaactgcacagatataataggaggagatggtggctaagtgttaaagaatccacctgccaatgcaggagacacaagagactcatgttccatccctgagtcggaaaaatcccctagagggataaataacagccaactccagtattctgcctaaaaatcccaaggacaaaggagc

SEQ ID NO: 31823 - DNA, 1255 bp, Bovine  19866881179141
  misc_feature (1)..(1): n is a, c, g, or t
ncatataaaagtttagtaagtttagtaatccaaatactaataaattttaaaaataagttgaatacttttatatctgttcatttttaaacatgcttttctaatattattcaatttacaccctgacatctaaactttatgttacaaaaacatcctcatatattttgtcttatttcaagtctcccagcaagagtgtgagacattatcaatcttacttcacagacaaagaaattgaagttagagttattcaaagatttgccaacagccataactttattaaacttgggactcaaatccaagttactggcctgtaagtctaggcaggttttcagagtttcatctttatcagctaaatgccaatggggaaaaagttgttaacaataacttctttgaagaatcagactaataactgaaatcttgcaatttcttcataattctgaagaaattcttataccacattattataggggccattatgagctcaatttaggtaatattaatctgggttcttgcaaaaagtttataatatcaaaacttgaaatattttaataaaatagctataagtaatcatataactaaattacattctttttacaaaagagtaaatatttcaaataaatgcataaacatcctcaacactgttatttaagtggacttgtttcaacataaaacatatgtcaatttatgtatatatccaaatgctctccattcatttagagaggaactaacattgcaagaaatgaagcacagtttggaaaagacctttagctcacctactggcttgaccaaaggctatgactccatcccaggtttatttcaagtgagttatgtcaagggttacccacaggccattttatagtgatttatagctgatatctccaaatcttcttttattttaatgataacctcaatagaatcatgaaggccttctttgtcttcatggcagtgaccaggaggaaactgatgtctttaaaaaattctaagggatgaggagtatttatacagaatggcagttaaggccagtttttaatgttgcaccctggagacgaaccattttttctcaacgtattgaagatgcttggcttgattatatattctgcctattcttgttataatattaaattcaaggtatcttccaaagaaaattcaaaagagatgaaaagacttagaattgagcatgcggtttgagtctgattttaattataatgatcttaaatttgtattaagctctcacagcataggattctaaagtgtctgt

SEQ ID NO: 31824 - DNA, 673 bp, Bovine  19866881192252
  misc_feature (1)..(1): n is a, c, g, or t
nctacagttcccttttgtttctttgtcacacactcactccagacaagcagattctattattttagcttactcagtggctcttagattgttcattgagaagatcacatcacatctcaccacagctgctggcaatatgtcttgtatgaaataaacagattttatttcttcaatatagagttcagctaatttattttatcagcaaactcaaatgtcctttggaaaatctgaaaggttttgaatttaagatacgaaactatgccagtctctaaggtcttcttttaggatgagaaaaggaacctgaatatccataatactatctacgtataagaagctacattttttaaagtaatgaatactccacattccatttttaattactaagttttcactatgaaaattgttataccaagtggaaaccttgaagtgttttcattttcagtccctgtgcttggagtcaggctcccttctcagtttcaggagggactatagtgttccaccctgtttgcctgattggtgcaatgctgggcacatgacatagcaatgccactccaagggactttactagaactaaaaaggtctgtataatcaaagctatggtttttccagtagtcacatatggatgtgagagctggaccataaagaaagctgatcaccaaagaattgatgctttcaa

SEQ ID NO: 31825 - DNA, 2547 bp, Bovine  19866881213727
  misc_feature (1)..(1): n is a, c, g, or t
ntatatgagcatatgtatttcattatgaatatgagcacatcaagaagagaacataggatatttggacactttcactgtatgccatcgcttctccaaccctgtcaaaacccctgaagtctcaggaaatttggatgctaatcacctgtgaatcttctcacataaaatttccagtagttcctgaagttaatatgaccaaaaatgccaatagaacagactttgctatattacagaacatctggttctgatcctggcaagagaaaatgaaaagtaatggaaaccaatattttgccagaatctgtttttttcaaggttcttttttagaaatgggcagagattcaatgggcatcaattccaggaatcgctggttccctccccattttcgtttctatagctctttcaattatgcacacaccccagatttatatgcagccatatcttcttttatttgtagagcaaatcttcacttcactagaaatttctgatctataaggtggtacacttgcagtaaagtcaacatgataaatctttcaagtaacaggattatagctactaattagaatgtgttttgcatttactatttaaaaaacaagtggtgggtgttcacgatatgtcagtgacattggcctcttttattgtattcatatttctcaaagcttataaatcttcaagagatctcatgtttcacagaaacaatactgttctaaagacaaaatatgctattatgtttgccattagaaatgaatatttaaaatgctacatttaaacacagaaaaataatagtctaaatatatatatatgtatccacatgtaacaaatttaatttcatacagaagaaaacatctctcttttgaatcctttaatgaagaggaataaatttgtccatgaatttaaaatcataggaatacttatccataagccacattcctagaaaagtatgaagagatgtaacaaggcataataaggtgtttgtcttgggaggctttacaattcattttatttgaatacaatgacaaagaacagtcagatgtttatgactctgctgggaaaaaaaaagaggtcattttcattttcccatctctgtatatccccacttgccctgtaatcaaagtaaatttcctgtgaaaagttgaattttagatactttgaacagggaaggacaagtcagtggaaacaatggggttataagaaagaagtcaggtaggacgtacgggcaaaatagggatggagagaaggttggaattcagaaaattagcactaagtccttgaaagcaatctatggcattgcaaatgttttgttgttaaactaaaaattatatttatatcgcatttatataatttcactgtttcatgattcatgctactaaagattcttacagagtcaatcttaattcctaaatcatctctctttagtatttctattcaacttctagttttagaacatatctggaaaatattaggaaaaaaaaaattgggagtcaagtttgcttacagtgttgcaataaatctgtgaactatgccctcctctgtttctttcagattcctgttagtaaaatggatctacagtgctgcctttctcccaaagcttgtatttattcaagaacaaacacaattctatttttctcatatcagcaaattccctaggattggagaaaaatctgcactaaatccttcaaaacattaagtcctatgtaaccaaaattaaacctacataaaatatttttcagttttcagcaccccctgttatccttccatatgtttagtgtttgtttttcgtgctgaacaaataaaaatgaaacttgtgttaagagaagtatgttagagttactttagtgaagtactgtctatctatcaaagccgttcccagtttcagtgcaaaactggtgcaaaacttaattaatctaattaacttgtatatttaagggaaaatgtgtgcacctcaaaggtttaggcaggccatgatctctcaggtaaatacaggttttgatccgtgtccaaaccccaaataaaattttgaaaccatttgggaaggtctcaagtaaatgttcttgatatttaaaatatgctctgccttaccatatgtttgtagaattatgaatattggccagtttctctttgtgaacagttgcagtgctaggactgacttttagaaattcctcactacagtagagtgtctcaaggatcctgtgagttctgtgcatatgaactgtatgaatttttaagtttggaaggatttgtagcagggcaatggggttggttgaaattaaaggacttggaggcaaaatagattgccaagaaggatgttgtaccctttggaaatggtggcagaataggctctgggcagcaacacagggacggtttcctttgtgagcagcttggcaaggtcttgtgtctctggaccactagcaaatggctggaggcaaagtgaggaggtgagtgctatggacacaggcctcagtggcaatggaaggccatcagctccagatcataaggaaattgagaggagtatccactgagaatagagtaagagctttcagacccaatggactg

SEQ ID NO: 31826 - DNA, 900 bp, Bovine  19866881247220
  misc_feature (1)..(1): n is a, c, g, or t
nttgaaagcatgcagtgcttgatttgaattctgagaacatggcatcacaaagtaaattattttcaagaaaaatataatgcttaatctaaaccacatgagatttttaaactatttccaagttaagtaattgggtgattttaagcacagaaaagcatacaataaaaggtttacaactttctctagcactctccatcattgatctgagggtgatatggttccagaacagctttcagaaaagcacctattggatttcataaaatttgcccaggtttctttttaattatgcacttcattttctcaggaacacagtcatgaattacacaaatgaatcacatttactgcagaacagctataaaatgacacaataaaatgttcacagaaaataatcaactatttaaggtaattattacagggaagggacccaacgaatgtttctatcaagaaccaacaggatattgaaattcttcatacagtatgtactttatctctacaaaatctctgacagtagtacaactatactagatgaaaaattctcttaatttagtggctttggaatccatgtctctgttcatcaaagctggataaatgatttaatagacaaaatattttaaattttcgattgatataaaatacaataggggaactggaaacaaaagagtttatatcaattttagttctataagattatatactactgacattgaaataaattatatatttaaaaacatacagccttgcccaatttattttggggatgaaaacagtactttcagctgctttgtatgttctgaattttttttgctgaaagtctgctgtatatatattcagccaagcccaggagcaccaaggacaccagcttaacaggctatctttatagtaaatgtagctgcctaaaataga

SEQ ID NO: 31827 - DNA, 1051 bp, Bovine  19866881248888
  misc_feature (1)..(1): n is a, c, g, or t
nttctgtgtattcttgccacctcttcttaatatcttctgcttctgttagtccataccatttttgtcctttattgtgcccgtctttgcatgaaaagttaccttggtatctctaatttttttgaagagattgaactgtggtgttggagaagactcttgagagtcccttggactgcaaagagatccaaccagtccattctgaaggagatcagccctgggatttctttggaaggaatgatgctaaagctgaaactccagtactttggccacctgatgcgaagagttgactcattggaaaagactctgatgctgggagggattgggggcaagaggagaaggggacgacagaggatgagatggctggatggcatcactgactctatggacgtgagtctgagtgaactccaggagttggtgatggacagggaggcctggtgtgctgcgattcatggggtctcaaagagtggacacgactgagtgactgaactgaactgaactgattttcctaactacttgtcccaatggcttaagagataaagatctgcctgcaattcaggagatgcaggagacacaggtttgatccctgggtggaggagatctcctggagaaggaaatggcaacctacttcagtattcttgcctggaaaatcccatggacagaggagcctgatgggctatggtccatagtgtcgcaaagagttgaacatgactgagcacacacacacacacacacacatatacatgcagattgtcctaactaacctattcataaagtcttcccattcagatatcttttaattaaagatggtctaaagaaagtggagctttcaatcaaaactccaaaacagttgggtgctataaaactaatttaaaatgggataaagtggaaaataaatgagctggttacaattacactacttaggttttaaaaggcaagtaattctagtgattaagaaactattgatttaatgaggttttaaaaaaaagcatagagcaaaacggagctgaaattgagattggatcacttttcacatctgtccgggaacattagtagg

SEQ ID NO: 31828 - DNA, 1689 bp, Bovine  19866881256384
  misc_feature (1)..(1): n is a, c, g, or t
nataatgaggctgtcacaacacaaaatgttctttgtttttataggttctattagttaatatattagaattctctaaatgccacttttgcttattaagtggttttgagagcacatgaaaacatacattttattcttgaacacagcatttctgagattgttagtaaatgtgattctggaaaaacagccattagacacttctgcccatgtagcatccagatgcaaatgaagagatattctgaaactgtttttcctgtttctacaatctcttattaaatcagaaaatttgcctttaaatttctgtttcactcactggtattgaattagatggcaaatatgatgctgctttaaaaatcaaaagaaatatactcttattgttttatttttattttataaatgagattaaactgttaacaaattcaaaccaaatttttagtacatttctaaaaatagtctatttcctcaatgaaatagacataaatctaattctttaacctgtacaattagtatgaaatcagcaaatcctcctcagtttcagtatatttcagtatttcaacatggctattaaaaaaagtcagcatcatttttctccaaaaatgatgttcagtcacgtctggctctttgcgccccagggtttgaacccaggggatcttcctgacccagggattgaacctgggtctcctacattgcaggcagactctttacctgtctgagccaccagagagggtttgctaataaatcttccctgcccctcaggctcatctcccctctgggatatagtacctctgagctcacctctcagtctgtaactttatgattgctttcatcaccactgtagcttttaatcatctccctttttcattctctccctctttttctcttttatcacttacaaattttcctatatcagtagttctctaactttaaggtgtaccagtctcccctggaagtcttgttaaaatacattttgaggcttcacctttggagttgcggattcagaaagtctgggataaggcccgagaagaatgtgttaagtattcccatgtgtgcgttaatcattcagtggtgtccgactctttgcaaccccatggactatagcctgccaggcttctccatgaaattctccaagcaaatactggagtgagtagccattctcttctccagggaatcttcctgatccaggggatcgaacccaggtcttctgcattgcaggcagattctgtactgtctgagctaccagggaagcccaaagtattcccaggtcatgctaataatgacactgctcactgaccagagtgtgaaagttacatttgtacgcatcacctgtcatcttctgttgttgagtaccatttgaatgcatcttaagagagaattcacttttaaatgtttagtcttctgatcagtaattgagtgtgaatcataggtaatgtttcatcttaatgtttggtaaaaaaaaaatgcaaactgagttagacttttacttaatgccaatctattgtgcaggaaaggaatttttaaaagattttatatttttaggcttggaaaaaacatcaaatagctttcacttctttcgacattgtccaaaatacattaaaaatacttgaaatatggactggattatatattttaaagtataatggagccctttttataaaataattatcttttacctaaacttgatgaagccggtca

SEQ ID NO: 31829 - DNA, 1075 bp, Bovine  19866881268027
  misc_feature (1)..(1): n is a, c, g, or t
ntgatgattttgttatacctaaaaatgaaattagggtcagtgaactcatgtgaactttctagcatacacatatgtttaactataatagaggtaaactaatgagctaattttgatattgtagacatataattagagatttctattatagtatctacatctatacatatacataagtgtctgtacatacatctttttgaatcattcttttcccttcatttcttctatttaatgcccaaatatgtattaaaatatttcttctcccataaccaccatctagtcctgaatacatgttttgctctctttatcttctttttcacaactttgccagtacctgtatccatacctgctgcttgactgtctgatatagctattagttatcttctttactattttttatttttttctcccccaaagatcttttttctggctaacttctctcctgtttcttctcattactgaattaggttttctgtttctattgaataaatatttgttcacaaataagccaggtgagtctaaaagattgttttgctttaatttttaaagtaacttatttgaattacaacagggtgactcaagaaggagagaacacaagaaaacgtatatacaggctcaaatagaggttgcactggatgttagtataatatattgttgcagtctttcatgatagagggtgtgttgtcctgagcacttgtgtcaagcagccagaaaaagaggaggaatggtgttgccataaggtaaatcaagagataacaataaaatttttctgttgcctggtggaggtgttcaggatgtgttttctttatatcttcatccgcccctaattgagaatgctttaaaattgaatgactagcagtcaaaacgtgtttgcttcaagctgagaagaaaaatgctggtgtctccgcttccaaactgattgcgctttgtacacaactgacagctacagtcactttgagtgactgataagtgggaagctttgccacttatcaaggaatgcaggctgagaagaaaagactagagccgtttagatgctttggcatgttcaaaataacatcttacatcagtcagactcaga

SEQ ID NO: 31830 - DNA, 1120 bp, Bovine  19866881293868
  misc_feature (1)..(1): n is a, c, g, or t
nctgcattgcaggtggagtctttaccagctgagccaccagggcagtccaatattagttataagtcaataaaatgaaagagaaaaatattaataggaacccaaaataactccaatcagaaagcagaacaggaaggcttttaaaacaccatattgataaataattttcctaacacaataaggcacatctggctcttacttcaggatgaaataaaacaaatcactttcctggaaatcccatgtcttatcatcatcatcatcatcatcatcctcaccacatagatcatatcattttctttttaactaccattactttcttttaactaccatttctgataatattttactttcaactaccatttatcaagcaccttctgttagctgggtattaactaaattggtgctttatttataataattataacaaaatactagtgctatatcacatgtattttagacatgaggagagagagtgaatagctccaatcacactactagtgacaaggggccacttaaactctgttctatgtgactgatgagtccttgcaattctccccacgccactcctgtgatataacaaagtgagaacagtgccaataccccaggcaccactgttaactcaagaaaacttagtcaatcctcatcttttggttaaaaatctgagtgattttatcaagtatgttggcatcataggagtcacagcccaaacgtaatacataattctctttccagatggtcaggagtctagcctatgatgatttgaataaagaaaaatatgtagaactggtattttaaaatttcttaatgatgaaggcaatttgtacagatttcatcggctgaacaaatgtggattaggtacaaatgacccttaggctacgtccacatgctcagcaattgagctatacgacttgtctattggttgtaacctcaggacaaaccaggcagccagagtccacctggaggaaacatatgattacaataaccatcattaattatgaactttctcacatgctactattacctaaaatttacaaatgaataaattggaacttaaaaaagattaaacagctttctaagttcatgcaatcactaagtgacagagccaagatttaaacaaagtcca

SEQ ID NO: 31831 - DNA, 1245 bp, Bovine  19866881314507
  misc_feature (1)..(1): n is a, c, g, or t
ntgtgacctgtctgctcatctctaactatttccccataaagacctgatgctttcatttcctttaatacgccatgttctttcatgcctccatttgcaacactgtttcttccgcttggaatgttcttccctttgaacccctagtcatccactgggacactggccaaggactatgtagtctggcatcctccatttccccatttgactcatagcatctgagtttccttgtcccccttcccactagtcaagggtatcttatgagcaaggcccactcattatttatctcagtatccctaatactgagctcacaggtttatcaaataaaaaaagaatgttttacctttattgacacagacttaataactatctgtacccaaaacaaagctaaagataacaaacctccatagcaagaagaggaatggaacttaaggtcagaacgtacatctgttgtctttcaggcaatgatgactgtgaagggtaagattctgcatcattttcctaagcttatagaatgatagaaccaccccccaaatgtatacctttcatattgataaagtcctagtaccaaaaattcaggacctaaaactgatatatcagaagtgcatagatatttatgagttctgcaaaaaggcagaaacagctgcttaattctaagcctttaacagacacccttataaatgttttttcacaaaggaactatatacaagggaaagaattcagccagcacttgtgaaagggtgaggtcactaactagcttggctactctcttttgagtcacattttcatggttctggggtgtggtcagtaaaaagagaacttgactacaatcagaaaactggacaagcacagtttcttaaagatgtttctctctccttctttgatgccaactttttagggatgtactataattaagttaaaattgcttatttcccctgtctaaacagggcaggtggttccctaatattgtatgtcaatcctaattcaattgattgtattataagtaaaacggcaggtaaaaaattcaaagtggattgctaatgtttattttaattcttggtttaacattattaaaaattaaattctagaattatatgaagtgattcccaatgctgaaatcctagcctaagtagctgaaacaagtttataaacaaatatgccttaggaagatagctagaagttcaacatctaatttcatctaatataaatgaaagtatatctttcacgtatataaatacaagttcatcctta

SEQ ID NO: 31832 - DNA, 1070 bp, Bovine  19866881318614
  misc_feature (1)..(1): n is a, c, g, or t
ncacgtacacaagtaacaacaacccaagttggaccaagatcagctctaacggagacatgcagagtgaaatgactgaggaatagagtttcaacaggcagaatgtgaggaaaagcattcgaagcaactgtgacaacatgagcacaagcaaagcaagaagagttggtgaatatattcagagaaatgaaagtgatctgtacacggagtggatggtagggtgtggtcagagatgaggacagacagctcaggcacgtcctctatccacacagatcacccactgggatctttccttgactctgttctttttacatgttttctcttattcctgttgccagagaagatttttcagttagtttatctcttcatgtatgatctgtttataactagattataaaggcttaaggaaagaaaccacgtcttctgtgtttgcttgtatatcccaaacaagaacaagtattatacacaaaaagcagtcttagtgattctgtgttgcactgagcacattcctccagtgcccgtggttttacagacaattttctgcacagagactccaaaggagaggtcaaaatccttaggaagcattgctagtgaccaagatgaggggaggggggaaccccatttttgttaaataagaaggaggcctgacaaatgataacattcatgattccctgattactaggaaaaggggaagctcttaaaaggctgacatttcttctgcctctttcaacaactatctgaaactagaaacaatggattagaaagtccaatttgaagatctactgaaaatcatcagcctgagacattttattctttttttatctcctcctacaacaatatttcacagttcaagttttgtctttacttgtcctttttacaatctttttcacaattttaaagaatgtaacatgcattctgtggcagggaaaaaaaaagacaggatagcaccagatttactctgacctttttaaggttccaaatttagttagttagccatttctatcctccaagcttttcagaagctcatgtgcggagagaactaaaaatggcaaacccctccaaattaccagcattta

SEQ ID NO: 31833 - DNA, 1138 bp, Bovine  19866881333182
  misc_feature (1)..(1): n is a, c, g, or t
ncctggcatgctgcaatccatggggtcacaaagagttggacatgacttagtgactgaacaacaacaacagcaaagaacagggttctctctctctccctcttcccctgaagcaaaaggtactaaagaaataaacaaataagtaaaagtaatcttaaaactaacaagtaccatctttaccaatgcatgcacaggcctgtgtgacaaggaagtcaacctgcaaaaaagcaaagccagagatggaaatggctgtgccccaatgacaccatttcatcagccagatctcctgggcttgagctagaaatagactccgacttccacttttacatgctctggatttctgccactcgccaacaaaatgactcctgtaagtgtttgcagacaacaaaaatagatgaagtgtagtccctcattatatacgctattcatacaaagttacttaaatcgaaaatgtgaacttgatctatctgcctgcagcctcccatcatgatcttttctctgctgcacctcctctcacacacatgcccactgcccttctcctgttctctctgatccaccttgccctttcccaaatccaatcctgttcataagcaaagtgctgatagaaatcagttacatcttagtgtaaacatattcacgtaactaaccttcttaggggcatttacatgttaagatagatctccaattgcagactagaagtcatattagagtttctcatgttatcctattttctttctgctcacaccacactccatctcccaggctagaaatctctaacatttcactcatcttctccagtcaatctaatgtcaagtcctaattattaaaatttcttttgcattattttaaaaatgtgcccttttatctcactcaatttcttctcattttagcctgaagcaatttctactgactcctaactagtctccctgcctgtcctttggagatgttttctcccagtctgtggcttgccttatcattctctaagtgttgtctattgtggagcaatttttaattttaataaagttgagctttatcaattatatctttcatgaatcatgcattttatattgtatcaaaaaagtcatcaccatatccaaaagcgtctaggtttgatcctatgttgtattctaggaattttaca

SEQ ID NO: 31834 - DNA, 2611 bp, Bovine  19866881337506
  misc_feature (1)..(1): n is a, c, g, or t
nattgtaaagtaattatcctccattaaaatatatacataaattttaaaaaagaacttttctaagtttaccctgacctccactccacttaatagaagatggagaatttgattctacatttgtgatgtgttttcttttttcttctctaagactgctcaaaactggcatgaatttttgatgggaagaataatgtggttagcatgtttataaattaacagtcaaggaggtgtacaaacccaaaattattcccacaggaagcaagttgctggctctgacattctttctctttcttagcttgccagaagcagatgttgacagttctctcatttggggaatatatccagaaggatgaatattacccttgagaaacacaatatactgtacataacttcatataagcaaagacgtagtttgtttaaacttagagaaagtacatactgacaacctgggcatggaaaagaaagccattgaagcaatcaaaaagctaggcccgccctcaacttcatgggaagtttctaagctagttgaaaggggtgcttgatagcgttagagggttgcagatggaatcagacctaagagaccaaagtcttctccacacaatgccagaattctctgaaaagtgaaaactatcaccttccagctggcagttttgcccacatttcacaaagacattcaatttcttttaacacataaaaaactataattaaccctgttttcacttaaagcaaagggtatttataaggagctgctcatataccaaacaccatacatgctaatatgtttgcacgtatgcataaaaattgcatatgacagctcctgttcccaaagacttcaaaatataaattgttagacttctgaaaagtaaaaagtctggtgggaaaaaagaaaactaacttatttgtctcagagtgcccagaaaaatctagcctacattttaagtgttaggcattctcagcatacatattttttctttttttaatgaagcatgcctgattttgctcgggttcaaaactgacatgcaactcacagaagtgtgtctgccctgtggcatgaatggatccatagactgggaaagaaatggaatagctcagagattccagtagatgaggaaaatattgaagccaccagagcccagtggtgtgtggcaatcagagatggatgactccttttgaacagaaatgtcacgctgacctggtagagaagatggcaggaggcaaaccctgcaaataagatctggcagctgctatcaaaagaacagagtcaatgtataatcaaggtgacccgaaaccgccaatcacataccactgtctttcaggggcacaaggctccagcactttctaatatgcagcagtcccgtctgctcatcaggcaggaaacactgatgcatctggggtttatagaattcttcccacagccagttcagggacactgagctgcagactttgatgagtgtggacagagtcctacctggtatttggtttcaacattaaatggtcgttaaaatatgtatcatattctaatgatacttattgaagtttcaaggtcctcttaggaccagaagttttgacaactttattggtttacagtgaattgagactgatttaagagtagaacctacctaatatttttagcttggcgatgattcagttcaggatcagtgctgttggccatgcttgtcaaaatacctgagaagaggaaagcttattttataaaataatagatacgatttgacacaaaatttctatttctgtgtatctgctgtgaggatgtaatcataatgcagcagaaatttacattaaataagtttgtgaaaaaattaaatcaatgattacattacaaaaaagtaaatggttctatatattagaaacatttgtaatgaagtataagaaaatgtttaaaaattgaacttgattgtcaggaaaacattcctaaaattgaatgttaaatgataaaagcagattataaaacattcattcaacaaacatttgttgagtgctgaccttgtaacgagcactgttataagtctagaggtattattgtgtatatgtgtttgcaagctcacacagttgtgactgactctctgcgagcccacagactgtagcctgccaggttcatctgtccatagaatttttcaggcaagaacactggagtgggttgtcatttcctcctccaggggatcccttccacccagggatggaacccgggtcccctgcgtctcctgccctggtaggtggattctttaccactgctctacctgggaagcttgggaagcccagaggtatttttaggaaccaaaaaaagaaaaaaaaatctcttctttggtgggctaatacattctggtgtatcttataatgtccttccaactatgtaaacagacagctatgcaaagaaaagaagcaagcatagaaaagacagcggaagagaaacgtggtggacaccacccacacccgtattcctaggatttctctgtgcacagtgtctcccatgtgcttacactcccaaagtcagcctctgcatctctgttgaaatgcttctgtctggcttgctatagagactgatttgccagaggtaccggaatataccagtcaccaggggaagccattaaccacgact

SEQ ID NO: 31835 - DNA, 1343 bp, Bovine  19866881375661
  misc_feature (1)..(1): n is a, c, g, or t
nctacagtgataaacttgcaccttttatgactgagtaatattccattgtatatatgtaccacattttcttcatccattatatatatatatatataatatatgtatattgtattacttagtcataataaataatgaaattttgccatttgagacaacacagatagaccctgagggcttcccttgtagctcagctggtaaagaatctgcctgcaatgcaggggaccctggtttgactcctgggtcaggaagatcccctggataagggataggctccataatcttaggtttccctggtagctcagaaagtaaagaatttgcctgaaatgcaggagacctgggttcgatccctgggttgggaagattccctggaggagggcatggcaacccactccagtattcttgcctgtagaatcccatgtatagaggaacctggcaggttacagtccatggggtcgcaaacagtcagacacaactgaagagactaagcatggcacagcacagatgcacctcgaacatatcatactaagagtaataagtcagagaaagacaaataatgtacaaatgaaattacttttgcggaaacaaagattcaagtggtatgtaattgcagctgcctcccaagaaatagcacccacaggtgcaagactcagtatccttcactcaataaactggaagtaaatgttgatgcctactatatgcaaaggtctggaagtgggtatagtgaattcagagagtaagatgaattgtattagcgtctaatgacagaggctggcatgggtagttattttaaaagtaagtttgagaaaataatgtgagtgttagctaaaaaaacaaaacaaaacaactcacactctgtttttctttttcctggactgtagtattttatgtgaccatggtagtttgttaagaagcacttctgcacatgtgtatatttctagggacaaagcagactaacttaaaagagtaaacaaacataagcacaaatttccgaaagtctcaagcatttaaggctaacctttgtttaaggtttatcatctaattcctatttgcttttatgtgtctattaagtgctgttccattgaatattttatcactgagacatgttggatagaataatttgcctgctagctaagaatagacaaattggaagatctaattgtttgcttttgtattaacaaaacatttttgccttttgactgagaaatatgcttactccactaatttgatcatgatataagcttttagtttcaatatttttatatttatgtatacttatttaggatttaagaaaggaaattaaccaaaactcagctaaagttgtttcgataagcaaaaattctttt

SEQ ID NO: 31836 - DNA, 1165 bp, Bovine  19866881385599
  misc_feature (1)..(1): n is a, c, g, or t
nctggggtgggaagatcccctgaagaagaaatggcaacccactccagcactcttgcttaaaaaatcccatggagggaagaacctggtaggctacagtccatggggtcacaaagacacgactgagtgacttcactttcacttttcatcttcttttcttagaatcgtgcttgcagcaggaatctgatgccatatggaggtacgcttccttaccgtcaggatatggacctgtggtggtgtacaaaactcccttttccttattaaaggtatacaaaagtctaaaaataaatcttctgttctttcattcttcactttttagcaaacctctgggaacaactgccacccaggcagttccagggaggaaagcaaagctgaagtgttcagagggtaaagcggggaggcaggtacttttgctatgggattggaattaaagccaggtgggaggcccagaactcattagtaaactattgaccatcatgattacattatgttagttttggaggctcttccttccctaaactctaagaagaaagagacagttggtgagtcaactgggctgttgctgttgtaaaaggacttaccattacagcaaaagcaataggtgggaagtggtgagaatgggcattcttgcttgtcctcaaggcctagcatctgtgcaaaagctgtgactccttgaaagagtggtcctccttattgttctgattttattattttatttatttatttttaatttttgactgtgctgggtcttcattgctacacagactttctctagcagcagtgagcaagggtgactttttagttgcggtgtgtggccttcttgttgctgtggcttctctggttgcagagcacaggctcattcgttgtagtacctgggctctagggcacagctcagtagttgtggctcatgggtttagttgctctgtggtatgtgggatcttcctggacccggagtcaaacctgtatttcctgcattggcaggcggattctttatcactacgccactgaaactttaacccccaaaagccctcacttgttttgccattatcccaaaacctccgtgatacttatcttctttctgtaataggcaggtcatctgggaagaacatcagataaaaccacttcaaaccactcagattttaaatccagttaattatcagtttagttt

SEQ ID NO: 31837 - DNA, 1045 bp, Bovine  19866881421156
  misc_feature (1)..(1): n is a, c, g, or t
nattatatagcattataattatctttttatatgctaacttccacaagatagggccccctggcaaggagtagacactcagtaaatattaaatgaatgagtgaatagttcagcctctgtcctctaaaaccacatgatataaaatccaaaaattatttctgccacagcagaaggttacctttcaataattttctttgatctgtatagagagctgtatgtgcccataaatagcatgcaaaaagaatccatgtataaaattctagaagttaatacttctttagatactcaaaaatccatgatagaaatccccgtaagcagaaattgccacccggcttggtaaaaatgtttaaaatctaaactttagtcattactccaggaatgatgcccatgttaacaccgaagtgggaattctaacaatacattccttgataatactctggtttcaagaatcaggaattctacatggattatttattagaaaacatactttacccagggtttgtcattaaaacaacattgctaatattaaagttcaacaagcgatataatttaaatgtaatttcccttagaatataattctttactgttttttatatttgctcacagtaccccataatatgaaagagagtttacatttcttgacagtactatgacatcagatcagatcagtcttgtccgactctttgcgaccccatggatcacagcacgccaggcctccctgtccatcaccaactcccggagttcactgagactccttaagactatgacatcagtgcttattaattctgagtagtttctaaatactccatgagctgaggggatatagtccatatggcaggtaattggtgatgtttaaacttatctggatggctttcccatgtggctcagtggtagagaatctgcttgccaatgcagaaaatgcaagggatgcaggttttatccctgagttaggaagatcccctgaagcagaaaatgtcaacccactccagtattcttgcctggaaaatcccatggacagaggagtcctagcggattacagttcatgggg

SEQ ID NO: 31838 - DNA, 1341 bp, Bovine  19866881450288
  misc_feature (1)..(1): n is a, c, g, or t
nattcaaaagataagctgcttggcctaaatattgagagtttagtttgtttaaagtaaaattaagtttagttaaattctttttataataacattttaaatttgctgaggacttggtgtgctcatatcaagattatcaggtgtgatgcgtgtgtgtgtgtgtgtgtgtgtgtgtgtgcatgcatgtgtgttataaagtgcagccctctgatcaatgcgcactttttcctcccattttcctaaatacatcatgaaaaaaggatgaggtttccgccttaattgcttgtgccttttattcacattcctctctcagccagaattgtgaaaagagtgttagtaaaaagctgcacaatagagcttttcattaggcctaggcaaggcacacaaaagaaggcttttggaaagagtgaatgcatgagtttaatttgcaggtggagagtagataaaaggtgctgacgcctctattattctcttacgtaggtgacccttaccctgtacagctgatcccaactaccatggcagctgctgccgcggcaacaccaggcttaggcccactccaactgcaggtaagtcaggagacaatacactggagacaaaggttaagtaaatatcgaaaacagctattatcctgttaatgcagaatataactgactacggatatttgcctcacacttttttgtttttgaatttatgtgtactgattctcaacccaaagttggttttttttaatttttagtcctgttttctgtattaaagataacttgtaatttttttttttattgcctggtatgatttaacaaaatgagctgtagttttactttgattactgtatgtcataatttcatcacagaacgttcttcatcaagataaaaagaaggcaaaagctacaaaagatattcagatacttacagatcaagacagcttaacaaaaattacatttaaaattattcaagatgctcagtatttttgaagcactctgtagatctctttattttcttgctgatgccagctcagttggataagcaagaataagtagaccaaataagtagatgcctaaatgagcacaactttatcccaacatccactttttttggcccagcagaagctatattcccctatatccttgaatgtcagtgataactctgtcagatgcccaagtgattttagaaattttgtctctgaagttggaaagaatatcaattaaattatattaaaggtaactttcattaactgtttaaatctttcagtcagcatcctaccacccttgtttctgttgtttgggactttatagttttacacagttaatgggaataacaaatcatctaataataggattaatctccc

SEQ ID NO: 31839 - DNA, 2099 bp, Bovine  19866881492424
  misc_feature (1)..(1): n is a, c, g, or t
ncatgttagctgatctacaggaagcctgtgaaatttagctaacccagccccgcttgccatatctaagctgcccctacagctccatgtctagtctggccctgaaagcagcccccacatgactctgcctggtaatttggagctatcagtaacagagttcttcctttcatctatatgaacctcagtctgcaagtctgctatgtcccaccatcataagagtctttaaattgtaaagtatgaaggcagagcttccatccttgtttcctaccataggcaggcaagtacatggtgccgccagggagttgttctctcctccttcccttctccttctcactgtgtcttccataaacaaacttggccacgtggttccaggattcatatacagggaggaatgtgtgagagaaaaatgggtgagatggcagagctgttcaggccagtggtgcttgaactgtcttcacctgaagtcttctggtgcatttttaaaatataaccaaatctgagaccctaatctggaccaattaaatgagaatctctgggatggaaccagtgcttcaggattttttacaagttccactaggtgattccaatgtgcagccagattttgtgaactgtggatttaaactttgattcaaaagcccgttcatgtagctaaatgttagttgagtctggcttcctcagttcaaaacctcagagggctaattgacagggcagagttcacacatacctcattcactggctttgtcccactgtaatgccattgggcttccttggtggctcagatggtaaagaacctgcctgcattgtgggagacctgggttcgatccctgggttgggaatataccctggaggagggcgtggcaacccactccagtattctcgcctggagaatccccatggacagagcagcctgctgggctacagtccatggagtcacaaagagtcggacacgactgagcgactaagcacagcacaatgcaactgaaacctcacctggacactcagcaccttcgaactataataattctatcaagacaatagtagataatcaccttgtcgttttccttaattgattcctttatggactcatttttaaagtgtaacacgtgactgtgttagttgcttagtcatcttcaactctttgggatcacaagaactgtaagccaccagacttgattatccatgggattcttcagtcaagaatactggagtgggtagccattcccttctccaggagttcctcctgactcaggtatcgaatcaaggtctcctgcatcacaagcagattctttaccatctgagccaccagggaagccaccacaaaaaagcatgaagcatagtttcaactttgtgtcatttttccttcttgtttgaaaaataaaaagaacagggcaaagctgaattttacaaatgtactgatagaatacaccctattccaaattcaggttttattactcttgctttttaaatattgaggttactagtagatgtaaattgtagcattcttcagttatttgaggtgacattttactaatgtaccccaacagatttctttaactacatatgcttccaatcagataacttccaggcagttgtctacttggcaattttagtggatctggaattgtcctttgtagtctttcctgttgttaactgacattgttttgtgtgaagatggttgtagtgggttgtataaaagaccctgattcaaggatcttcctatactcatgctatgtgccatctgacttatcatgtttatctgtggcagtgagggtttgcctgttctgagactgagctttaagaggaatatttctacttgttctcttgtgctgtctgccattgccatgagggtagcctcctccagttagctgctgccctgtcattacgggtccaagaataaacacacattaagtaggtctaagcacacatccatagaaggggctgaatctaacttgaagatgaggaatccaactgagcccagccaagagcagctaactccccatacaaccacaagtgttctgtttaaataaatgcttttataacagtgtgtttatttattatgcagtcctactgggcaatagctagctaatacagctgtaaacgca

SEQ ID NO: 31840 - DNA, 1065 bp, Bovine  19866881518043
  misc_feature (1)..(1): n is a, c, g, or t
nccaggagcgtcacacattgtttcagctagcatgaaattccattacactgaagggtcattgctttggcacttcacctgaggacagtatctggggatccatggcagctttggctaatctaaacagatcatttgttttgcaacaaagtcattgcaaaatgtgtgttttactgagttcaatttatttgtagaattataacaaaaatatctgcatgcaaaaattctcttaaatatttctgttttggtcaggttctaaaagcagggcattgtttgagaggtgttctggctagatcactcagaaaagcctaaatcagtctctttacctgccttgtttgaagaattctttactcgcgttctttaccattgatatccctgtagacgcttctcaccctgctcaggatacattaatttaggtcaaccaactgttgtatatgatactcaggaaaatgccagctgcagttggtataatgaaaaatggctcttttggaaaactgtactttttttttttttcctaaaagatgggacataaaagcaaatgcaccaaacagctctagaatgccgataataagttcaaggaaattatttagcaatactgtggtctatcagaactcatgaattacagacatgctatgtagtttcaacatgccaattaaagtagaccctctcttaggtgacataaaattttgaaaattaagagatatgtagatttagtatatgacttgtaagagacaattctctttaaatagcattagagaatttgaagataagcaggcttgaaccagaatcaggtcttaggtcatctagtaaaaggtatccttgggtttttgtgaatttaaaacaaggaaactaaaaatctcagcatttagatacgttaggatttgtacaacttttggaagttgttttaaacccactcttaaaaatccagtaactatttaagaaacacatgttttgctaattaccttgtgactatttcatttgtgcataaaatatatacatatatatatgtatatttatatatgtcttcacattttttcagaggggttggaaatgctgattattttctgaggg

SEQ ID NO: 31841 - DNA, 1374 bp, Bovine  19866881592376
  misc_feature (1)..(1): n is a, c, g, or t
ntggtgctttgctggctgccgctggagttacaggggtaattgggcccgtgtctcttatctccatcaagccagcctaggcttgttcacaaagtggtggcagaactccaagaaaacaagcaaaagctcagagtcctgttgaggcctaggatcagaattggcacatttttacttctcttctattttattggccaaaataagtcacaaggtcaattcacattcaatgataagagaacagaattacccccttgatggaggggttctaaagtcatgatgcaaatggtgtgggtataggtaagggtggagcactgggccatttttgcaaatcgtgaggctatgaatatgtgaagctaagagataagattctaacgggagttggttcacttcctttatttataaagaaagaaaataaaacctaggactagggatcacctcacccaagtcattcttgctaggtagcacagccctggagttacttactaattgtgtgtacaactaggaggttatggttttcctgaccccttagaatgtctatatagggccttcagtgttcctaacacaattctgaagtttcttttctacacacaaatcccagtcaggtaacctctacctcaaagtccccaattctagtaaaggtacacttaggatgggaaatacttattatctaccaagatcccttaaaaatccctcttatattcagaaagtccttattatatgtttagaatcttaactcctaagttagcatatcttccagcctaaaatgcctccaaatatctgtatcatttggtcacatgccatgaatgtggagtagactggtaataacaggtccagtgagaatgactcttactcaaacagttgagccaagacttgctgtaaacacacttagaatgagatgactacaggctacaaattactcaccagctgccacagttataggcaaaatccctactagtcagttcataatccatagggacttatgagaatgttcaagctaaatccttcccttctattctcaattgctatgctgttggaaaaacagaagaattatctttcccaccctgacttaatggcttctggtaaggatacagccctatattaagtgcaatcttctattcacaatttaataggttataaaaataaagttcttctgcctagctttaccccatggaccagattgacttaagccagagcatatgtaagaagaagctgggtccctgactccaggatcttacattacaatttgtcctagaatctggactatacccaacctagctgctgcaagtcattaagttaataagttactctgatgtctatgtttttggactcaaaaaattctaacattcctttgggctacttgtaagtcagcattctttccag

SEQ ID NO: 31842 - DNA, 1538 bp, Bovine  19866881917926
  misc_feature (1)..(1): n is a, c, g, or t
ntttcatgatggttataatggaattaccatttcaagtttgtagggggtgcaggagaaacatgataggaatagcaggaaggaatggctcactcatgaacaatctcctgaaattttgaattgattaggtttgagttgctaaaagggagagtgggggaaatgtaccctagttttctttccctccagtttcctgttgcattatgtggcttcttgaatgttgcatgatataaatcatcttaccactagaagacaagctttcatttgcagactcagcagatttacttaatttcatttttccagttgggtatcttcaccaattcaggccaagagagtatctcgtgtcatctaacgcaacaaataggtcctggagcattcacagcaaaatccacaatattggcagactgagatttcctttcctctgccaagcaccatcaacgttatttttgggtgggtctgaatccgaatagcccagagtttccattacatcgtcctaattgttaaaaaggggggcctgctgtaattcttgaaaactagtctgtttagttgtagtcgttaccataacatcaggttgaaatactgcctctctccattggtttggccacagcatagcagtcagcctcatagcgtcaaggcattaggaaggcaaagcaatccacagtcaacagtatgaatggaacaattcacactgttgtacatagatatagaggttaaacccaaacacatgaaaaagtgatgctggaagcacttgggaacagctgggccagatgaataactcaattggatgccatgaggaacaaattaaacaactgactggagaccaggctgctcctgtgacagacactttaatcaggaagtcaaaagctgattgacaagatgaaaagctggatgacatgaaaaatggaaacagaaggaacaacacaagaaaagggcaccccgggtcagcatgctgacaaaaataatcaagtacgacaggccataatccaatcttcgaatgtttggcatggtgctagttatgagaatctgcagccaagaggaaagaaaactattattaagcaaagaaattatctggctttctagaactcactattacatgctcactagaggattttcttctccttttttttttaaacaagcatgtaatagcttttgttgagttttataagatcaattaaaaagtgctaacattactgtaaataaagctttaggaagatgatgtttaatagtgttttaaattcacagttaaaaaggtaatatgcatattgattgcctcaaatcacaaagaacagggccttctcatactcttctattcaaggcacagaggaagaagaggtagcaattactggaggaggtttttttgtggcccagttaataactcttatactggattcttattgctgagttactgttggaatccaagcaaagcttcctgccagagaagaaatttgtctgtgctacttgaattatttctgatatgcctcaggataccacctgcatccccaaacatacattttgagatgtactatctgaagaatgggaataat

SEQ ID NO: 31843 - DNA, 2959 bp, Bovine  19866880387930
  misc_feature (1)..(1): n is a, c, g, or t
ntaaaaaatacaaatcaagctgttagaaaagcaaatatgatggcttatggattaatatgcttaatacataaagaattcagatttattggcaggaaaactgttcaaccataggtaaatgagccaagggcatataaagacaattcacaaattgggaaataattattattagttaactgaccaaatacagggcaaatcccagtctacaaataacagaatgtgtggattaaaacagtacatttttttgctagaaaaattggtgatattttttaaaataataatactctgttgagtgacactagggtgagatggctacttttttttctattgccagaaatattgtaaattgtttgtctttctggaaaggaatttttcaatatgaattgatacactatttgatctaataattctaaggatttccccaagaaaaacaattcaatccagggacaaagtttatatccattgatattcatcactgaattatttattatggcaaacttggaaattactcaatgttttagaattgggtacagtactctagggattcagaatgagtctccaaaaaatgtttcactcctgcatgaggatttttttgagccaaagaccctgtgggttaagataacctaatctcctcctttaactacctagaagaatttaaactgggaatttttctcaggaaaaaaaaaaagttattactggagataaattttagctaagttgctgcatctatattgcagggcaaatgtctaattgccaaacatctgctcttattgtcttgaaataagacaattcctatctttggacgccccaggcctctatcccattccttagctcaggatgacatgtatacctcattttatcctttctgtctttgaaccttctcatgtatgtcaggttcctgtatgtatgaaattaaattagactttttctggctaatctgtcttatgtcagtttaattcttagactaatcagaagaatctataagtgtaaaggaaagttttgttttcctttctgacagtactaattaaataggttgtaatcacataatgagatattttatatatttatatattccaccctttagaaagtccatggatagttcttagtgtcttgataaatcttcttatttaaggtcaaggaaaatcattaagatacaaaattgtatgtgtatttttcctccatacttttagataaaagtatggaggaaaaaaagcctgaagaaactgttaaatgctataaaagttggctagtgaatgctgaaattctagatgatttccttcattattacacttttcaacatttttcagtgtagcaagcatggtggtttataatcagaaccacaaggaaatatatattatttaaaaatgagtttcaggctcatttccttatttgcatgggatttggtcccatctctaaaaaaaggaagttgcaaggcacataattaaaaactcacaaaattcaaaggactaattttcccataagcataaatataaagaatgtgggatgtattttttgggtgaataactctttagccactgtgttatgtatttgtacttttaattttttcagcattatgtctagtatttctcatgttgcttgtttccacattaacagcacagcatgcagcatgtgatggcagttgtttggctttatttagagttttgttcatttacttctaagtttcttgtcaaagtaattgactttgagcatgttttcagtactgcttctagcacccccatttaataatgcttgcattacattgttatagaatataaaaactattttaaattgtaatgacagtgaatggttaagtaatagcagaatagtgactgaactcagacttagaagataccattcacataaaaaaatatatgattcataaaatactgacaaaataaagagaatattttttacttgctagagacctcaccatgtggcctttacataaacacaactcaccattcactcagtctatcacttttgcaattatgcagtttctggagaaatcttaaaatattttgatttgtattatctcaaattttatgcatgaattgaggctttataaatttttatattgttgtctcttacatttgcttaattcacatttgcataaagtaggatggaattataagaagtcttgaagtgaagtgaagttgctcagttgtgtccgactctttgtgaccccatggacagtagcctaccaggctccaccatccatgggattttccagacaagaatactggatgggctgccatttctttctccaggggatcttcccaatccagggatcgaacctgggtctcctgcattacagacagacactttaccgtctgagccaccagggaagccctaagaagtcttaagggaatccaaataatctccctatatgaattaataaatccaaaatattaggaagctatgaaattatttctaaggagagaaaagaaagagaattgcaagtttcttcttcagaattccacttcctaaagggggtatttaatttcaatgaaagataccttctcttaaaatctttcctatccgtctcccaaagaaccaaaataaaggaaaagtcacagagatattacatcagaagattggtctaagactggatgtttgtagggtacatgaatcttttagacaaaggacaagtgaggatagggtaatggtggagagtcaactgaacacacttaggattagtaaggaaaataattatttcaggcatggactagcaaactcaggaagttgaggagtagggaattaaaaaaaagaacaagcatggcaatagtgaaggagtgagagagctaaaagaattagaggtagtgagtgaaggggatgtactggaatttattgatatttctgatttagaacaatctgggggaatcacagatcccaagatgtggtcatgggaatgaggtgttataaggaatctaagccatgacttagaaggtaaaaaaggtaagta

SEQ ID NO: 31844 - DNA, 1408 bp, Bovine  19866880394753
  misc_feature (1)..(1): n is a, c, g, or t
nacttgcatgcagataattgagaccagattctataaaaaattgatttcttatatttaggatagagtttgcctagctctggctctgggaagtctctgctggcacccccacaccaccagccctgccattctcaaggctgggttcactgtccccactgtttgtaccacctccaacagcctggactttgcccttcgtggcactcatcacgtggagggcaaatgcttgtttgctaatctgtgacctggacctgactgaaaaatctttgaaagcagggtctactgaggtcaccagtgtatccctagctgctacaacagtgccaggctcatagtaggtgcttaataaatagtcgttgagttgttatgattctgaacacatcacaacagagtttatttaaggttttcaaaatcaactgcacaaacaggaaaactctggtgcttccaaaaagaactccacccagacaagagctccagcaggaaataccaaaaagtcagtatctagcaccgaaatcactgtgtgtgtttcagggcaaactctcgtgagctgatctctgagaggctgtggaacagtctggaaagtccaaagctttagaaactctacataagaattctccaaagcaagtgacactctccaagtgggggcaaggtagggggtgggaggggaggctccaaggaaaacgccctggggctctggagaaaccctgaacttggtgacagtggacaggctgggcacgtagactctcagaacctctgtaaatgacattaatgacacctcccacagagtcccgtctgtcagtgcatgaggatgataacacattttagctgcctgtatcatcaggaaaaacaacaaaatacaccgactttaactttgatacacaagaagacaaagaatgaggaaattctaaataaaaatcataagttactcctcatttttcacacattgacttccaagataaaaaccaccccagttctttcttccccatggcctcctgggtgctcacattgggctcatttattccgcatgagtgaaaagagagcacaaagcgcttaattcactcattgtccctacgtattatccacattagaattgggaaagagacggtttaaatgagcatatgatctgaatcccagcgttcataaattcatcctggtgggcacctaggcctcaatataaaaagaacaaaattagttccttgattcatggtgcctctttcactaaaatgctaagaagcgacctcttgaacttcacagagtactgtggcctagacccatcaggtaaattaccttgaatttagataatgaatcatgccagtatttggggaaaagtaaaaaactgcagattatcaaccatcaggtcaactgctagagaacatgtaactggtgcctatcatgatgtcaccagtcatccattcat

SEQ ID NO: 31845 - DNA, 1010 bp, Bovine  19866880418881
  misc_feature (1)..(1): n is a, c, g, or t
ncagttctacatcattatttcatattatttctaatgcccaacttatttcaagctttaaaatattgtatgacccaaatgcttattaacaattttaagttatgcattgacagtacatcgatgagatctcatcataaaaatgcaactgggagggggcaattaaaatcatttatgagttttaataaaagcgcttcccaggtggctcaatgctaaagaatgcctgcctcccaatacaagagacttggggttcaatcccaggatctcgaagattcccaagagaaggaaatggcaacccactccagtattcttgcctgggaaatcccatgaacagaggagcctagcaggctacagtccatggggttgcaaagagtctgacacaacttagcgactagaacaagaagcttcaataaattatgatccagaagaattgggatgtgttccaaactgcattgtgtcaacctgccaggccaatgaacactcaatctcaggtttttcaaactaagatgaatactgtacattagaattctttctaacctcctccttaatttatttaagaaattaattctttaagaaaaataaccccaaatgataagaaaacaggcccttcgtttgtccaattttttttcttgaggatgtctcttatttgcaataaagctctcattctcaaaaaggaactgaaagactgatatacaacaaggcatcaaagcattctttagaaggcccagtaccctctatggttactgccaggaaatgattccaaacactctcattctgaaaaaaggcaccagtcacaaggggaaaggaagtggatgctgtcagaggtggcaggtgtgttttgaggccagcagtgtcctgtttttaatgaggcacagctgcacgtctccaattgtgtgccccaagggagcaagacatctgagagcatcaccttgaaggaaaagaacatttcatttagatgaaaggtttggcatctcttttaagcagaaaaactgaaggagttagaatgcttaaaaaga

SEQ ID NO: 31846 - DNA, 1923 bp, Bovine  19866880512455
  misc_feature (1)..(1): n is a, c, g, or t
nataaactaggacttagatactatactgaaactactctgagttcagatgaagaaacacagactgaaataactataaaacaagatagaaaatgttaagtgccaatgaaaggtaaagaaacaacccatggtagtcaaaggaggaatagctggaaggagagagtcaggggaaggtgaggtgggtttgatagaggtagcatttgacctggggcaggcaggatcagtgcatacagatgatgatgctgggatgttcattgtatacctatattcaattatgtatattatatattaatatgctacgtgcatacatagctatacttgatttccctggaacaatattcatgcactattcattctgtcagtaggtattattggatgcctacatgaaggtactattctagatgctaaagacagaaccatgaacaagcaaagtctctaccattatcaaatttatatttcagggagtaatgtacatgattgttaagaagaaaaatattctgaatggcatgtgcaatatgatacatttttacatatatttgaatatataaattaatacattaaaaaatgagatcaagtgtgtataattacacttaaagagaaagtgagagagctagagcaacagaaatctggaaagagagatatagaatgttaactgtgattgtatttcagtgccagaattatcttttctcattttgtttatctgtattttccaagtttagggacaataaacttatgttttatacataatatttggaaagttgtgtataatgtgtgcagttaaacaactaagtactaaaagttagaacttaacaaaaattgcaaagagcccttccctacttccatctcctagatagttgtcacatctctaacctgaaggcttggttgttgttgttattcttgtttccacctgagggcctcttgatgttcaactttcccgaatggctgctaccacccacctaccacttgcttgtggtcaataaatctttttattccataaaataaaatcttcagcttgagggtattgctttccccaaacaacattgtgctcaaactctgaagcttcaggcttttaccagctgagcctcaagagaagccctttagaaggaaaaatactcaataaatgtaaattattgctgtttctatttgctttatagatcttaagtacataaaagatgttcaagcaaagctgacaagaaagtagctcatgtattttatcaagagaaacaaagcccacagtatttggaggtacctttgaacagtacaagtctcctattcacaagagggcttctgatgtaaaagcctggtgcccttccaggcccccatatgcgtaggagatggaccccgactcaccagctctctgcccaggacctagccattgagtgcataggcagagcctgtttctaggctgaggttcaggaaaagttggtcatggcatcacttctggcaaacccaagtaagtctttttttccactgaagccccgatttggtttatccagcaaagttagttagtggtggtgtagctttccagagctgcccatatcccgtaaatagggtgggtgtggcaattttaataagctcacagcttagagtgtattttcacatttccttttgcttatttactctggttttttaccctagttgctcttgtcttttctccttatatcaaatgctggaaattttaactataattttacaatgcatgtatttatcccatattcttttaaccttattagtcacttgtgattgtggtcactgctatcattttgagtaaaatcaatcaaatttgcttatgttatttattttaaagatgtaggcctggtggggggtggttattatttgaataatgatttatatagattctgggcaaaagagaatgagctatttaaatattgaaatgagcatgcataaggtatgttcatgccactg

SEQ ID NO: 31847 - DNA, 2217 bp, Bovine  19866880547786
  misc_feature (1)..(1): n is a, c, g, or t
nttttgcctaccaagtctgtaacctcccaatcaacctcctttctgggagctctgaagcttactctcaggaccagatttagaagtcttgagtctccccagtagggcagtctaagtacaccactgaactgcccactccaagctggactcttgctcctttcatgtctgttttatctaaataactaggtgttgggtatagtacatgcactcactctctacatgtctatgtaagtaaccacattcttattggctgagaagtcctcatttgccaaatagactctactgagtttgagggccatcatgctctacactccttctaagtcaggcattctcaactgtggtacatcttgaaatcaccgaaggaggccttggtctgcagtgcagacttgacatcagtccacattctcaggaatccctccaaactagatgaattggcctgactggtcaccctactaatggcagagttttcagaatccctccccaggtgatctaaagtcaagccaggcttgagagaaacactcatcttacctatcaaccttcttttttgggcctaccatggctgaatctcagccagcccatgcattcaaggaaggcaggatctaggtctgtttcctcactcctttcctctaacacctgccacatactggcaggtgttagatatatgctaactgaattaagtcgtacactatgccactcaacttagggtaaaggtggtttaaaataaaggcaaaaattttaagtccccaaacaataataaagtccctgttaacgtattttagaaatctttcttgcacctaatgaacagccaggttctggctcccactaggataaatgaaatgtataactaaatgcctgtggcttagaagaaatcacagcaaaactggcagaaaacaaaacactgagtttcaataagttgtctaccatggagactagggttttgataacaataacatagaaagcagctgtgttcattctttataattttagaacacttagttattcaacaagcactggggtatatttaatcctcaaaacaaccccatgataaagctggagagttattatccttcatttcacagctcacgaaaggcaggctcagagaatacacgcagactgatgagcatctgggttctggatcccactcaaactgccagattaagcaattaaaaatacttattgtgtcccaaattctgcaggggacatacttatgctaaaaaaaaattacctttttatttgaaattcagactgaacctggatttcctctatttacctagtaaccctaggctccaggccaattttttttttttctgtgaaaatagaatatttgattgggagggtcactgtggaccctctcagataaaagggctcaactgtggctctttcctctcccattctgactcctctggtattaggccttcctgagggttccgtgcctgctggcctgagacgtgtgccttactccagtgcggcagggagccagagcaggcaaaaaggacacgaacaatgctcaggactccagggccacactctccatgtggactcaatgctttattattatttgaaaaggtgatactgaatggtgtaaaacttaaagatatacgacagtgaagggaatcttctttcttactctcagtttctgggacatccttccagagactttattaatatattaatacatgtatgtatatttaaacatagctttttgagttcttatacaaatggttaacaaaaatattcctctaacatgctttttctttttacttaatagaccttgaagatgattatgattatattattaatatctatcaatctatctttatatatctaaagctgcctcatatttttaaactgttccacagctttccactgtatgtgcgtatgtgctaagtcacttcagtcatatccgactctttccaaccctatggggtatagcctgccaggctcctctgtccatgggattctccaggctagaatactggagtgggttgccatgtcctcctccaggggatcttcccgacccagggatcaaaccacttctcttctgtctcctccattggcaggtgggttctttaccactagagccatttgggattccattgtatagctatgtcattaattattggtgccctagtgatatacattcacatccctccaatctttagctattaaagcaatgtggcaataaatctccttgaacctacgactaatgcacatttctag

SEQ ID NO: 31848 - DNA, 1568 bp, Bovine  19866880554691
  misc_feature (1)..(1): n is a, c, g, or t
naatcctggaggttttctagtcctgatttcagcagtctctgaaactcaacccttcagtgcactttcccagggttccgtgaggtacttgagtgctgttttcaatgaactcccttttgggcccaaggtaattttaattgtgccttctcttacgtacagccaaagggtcctattacaatcaggcattcaaagtctgaggccattgatcactgtaatcatatagctaatccccttcactctgattccaaacagactggcagccttctgactagagtttggctttttatacagctttttttttttttaatgagagagaatgcttttattagtctgacatgactggaatgcttgaagattttatttctcattataaattaactaattagaattctggcttttcttgtaagtttaatgtgcacaactcaatttccatgagtcagataaattctgaagcacagaaaaaattgtctttctgggaatgtaaaactgaagaccagatgctggtaaattcaccaagatatgccatgctgaaaggacacttggaaattcactagctggctttaatccagcaccacccacagtttgccactcatgccctcttcaacctttaacagttgtaaggtagagaacaactaaaagtgttttgtaagatgagaaaggaaaaggagtctgttatgacagttaccattaaagccatgtatcatttaaaacaccaacaccaagtaacatcagtggtaacatgtatgactctataagatgatgcaccaaaacctaggatgagatgatgcaccatggaatcacagcttcttaagtctggaagaattttaaaggttaaccgcttcttttcttttttgtcaagaagaggggcagattttttctcaccccgcttcccaacagccagaaaagtgacatgcgacatctattcaactaatcagatggtcccacctaagaacctaagttaccaactcaattaacgaattaatttggaattaatccaatcactgacagcagtagaagcagcatccatttttagaacgagtatagccacagagggccttgaattctacttgacactgtgtgatacaagggaagggaaatcttatagccactctgggaaatctgtctcactctggacaagcaaccatcattttaaaaaatctcctatcaagctaaaatggatatccctgtcatttcctcctcctatttactgaggaagctgtgaagacaaatctgatagttcttccacaactgctgaatgccaagactatttttcagaaaccaaccttgaaaaaactagtgagtaagagatggggaagaaagaaaaagtggaggataatttgaatctgcttttactcctgatccaacccaagctgtggtttagttccgtagcagcttagaagcagtattcccctctcatgaagaacacagaactgaaccccaaaattctaatctccgcttttacaagcaagtagtcatggggattttggcaagcaacttaagccttctgcatcttaatttcctttattagtatctgatccatatgtatttatagaatggatggattaataagg

SEQ ID NO: 31849 - DNA, 2086 bp, Bovine  19866880558534
  misc_feature (1)..(1): n is a, c, g, or t
nagtcgctcttttctaatgagtcgctcttccatcaggtgaccaagtcttggagcttcagcatcagtccttccaatgaatattcagggttgatttcctttaagattgattggtttgatctccttaaagttaatcattcatctatttttcaaaaggaatcattagagtggatttatcaaaaccctgtatgcttttgaactcctattttggtgcctcattcttcattttaatgtgtatcttttgtggggggggattcattatataaatttaaaatctgtgcagtaaacatttttctggactgttttgctagaagctgccatgttggagatgaaaggccagttgatgaatcacaacgccgggatgttagtcccaactctgcctctagttgtgtggcctcagatgagttatttaacctctcagatcttaatttccacatccaaaaattagaggtcaggctatataattttccaaagcccccttgacatcctaaagtatctatattgctttgaaatttatccaaatctccaactgatatccggcatcaaggttagtaactcttttaaataggcttgctgagttcaaaatgaaatagaaaagagaaagctttagaagtgcaagcctgctagcaagatttatttttttccagtcctgtacgcatttaaaattgttttaaattttcagtggaaaataggaattagaccacactcaggtggatcatttcaaaccctttattgttggtgatactttctccagatggaaattaagtgtgtaaaagtaatactggctaatactaacatttattgcttttactaaatgtcagacattttgctaattgctttatatgactcttctcatcaatcctaacagcagcactatgacacagatattatgatgtttattttacagacaaaaatgaatataataaggtcttagatggctcaactaataagtggcaggaccagaatttgaattcatgctgacttttaatgtccagaggatataaactctgtaatgcacagacattaagattttatatgtgtgtgtgttatacattcttcatgtgtctcaaaatatgtcatagtctcctgtacagtggtccttctatgcacgcctgatctcagtgaaaagcaccacactcatcaataaacaacaagatagaaacttgggaattaacttctcattctcttatttccactccttacaaatgcagcccatcaccaagtccattccattttatttattaaatagctctcacagtggatttatgggtcagggtcccaaagcaagcctggcaaatttgaagtgtttcgcctaagagactttaatgaagatactatagtggtgtgagaaagctcaagacaacctacaagcaagtcacctatgagcaggacctagggactagcaacagtggaatgccgttagcatgtgctatgaaatgaattgtgtccccccagaaaaggtatattggtgtctaacctccaatgctcaccctcttgcttaagactttaactgggtcctcattgctcttaaggtaaaatacaaatttaaaactgagctgcaaggccatgtggggtctggcccctcacaaaagacttctttctcactcttgctgtgtgtgtgtgtgtgtagcctcacggacttcctctcattacctctaatgtgttgtgctctctcccaccagggaaacttggtatgtggatgcttttccttcagcctgggtacagtccccacctttgttcctattgtgttagtctagatttttcttcagcaaacggaacactccagtcatcagtcctaatttttgagtcatctcaggctccagactatgagtgaccaaatcttcagctggtttcagtctccagcatcaagtcagagatttttcctgaataaccaactgagctcagaacattgcagaataggacaagtcatcctcattattccctatctagagttccaacctataggacccctgagttgaaaaaaaaaatgattttttttagccacagaattttgagataacttttaaaactcagtgatgcatatgtgcatagaaaatgtttgggatatatattttaaaatattaaggat

SEQ ID NO: 31850 - DNA, 1337 bp, Bovine  19866880637724
  misc_feature (1)..(1): n is a, c, g, or t
ntttcaagatgaattagtcatagttaatgcattgggtggaagaattattaaaaatctccctaaaagtatgctgcttcccaaaacggaaaaaaaacgaaattgatgctttctcatttgtgtttattcttgggcaacttggcctgataatatttagttgttttctttatttatagactcactttgcattattcatcacccccctgccctcccaatacatatctccattttactatcagcaacacaaagtacaaggatatattcagtttcactacagctcttcccgtttacaagtgtggagcgcttgtcttcggaacgcccttctgattggctaagccaatgtcagtgacatcaaccaacttacttttgattggaaggctggttgctgggactgtagcgtttgcaggaagtcacttaactgtttgcgagctggaaaatcgaaacggacgttatctttttgtcataagaaagaacgcagctgagtagggaaggtgtatcctacaactccgccagctggaacgtgagccaggaggcctggaccggctaagggattgaggggcacttccaaagacgtccggctgctcctttccagcctcccggctgttacccttttaaatgtcagcgttcgaggctgtaggggtagcacgaggcatcgaaacggaacagtcggattggccgcgcgcctcagttctagacgcacctctccaccgaaaggccgttctgactggcagcgggagaaagtaaacagagttgaatcaccctccccactggccaattggagggggttcggattgtgacgtgatgggattctgcgaaattgttactgtgcgagagaatgccggcacggtgcggaccggcaagagcaggggctcagaagctgtcagtggactgggggaaaagtgtctcttagacctggcgcttcgtccggcgcttgccacccgcgtccaggtggttgggtgaatgtcttggggctttggctcgacggagaggcggccgagggcgtgtacctctcttgcagtttcctctctcagcgcctcgggggcgttttcggtcgaataaacttgcgaccgccacgtgtggcatctttccaagggaacgagctcggagtggcgggcgcgcccgtcggtggggatcgcgcccggctctggccatcggcggcggcgagaggcggcagcgcggcggagcccggggccgtggatgctgcgtgcggaggcgctgccggttacgtaaagatgaggggctgaggtcgcctcgcgctctgcgagtcggaagcgccccgcgcccccgcccccttgccaccgcgcggcgcagcgctcgagtccgaggccagggcacggcga

SEQ ID NO: 31851 - DNA, 1124 bp, Bovine  19866880664753
  misc_feature (1)..(1): n is a, c, g, or t
ntcctgtccaactcttagtgaccccatgggactgcagcctaccaggctcctctgcccatgggaatttccatgcaagagtactggagttgggtgccattgccttctccgatatagagtataccagttcttaaaccacgagcaccttgggaaggccatcagccattcacaacttaatatggattcctctccctgggtttgctttcctcctccccgtgagttgagatcaatcacatttggagaagaatgaggcaaaggaaaagaagaatcatgggccaggagttggaatggggagcgtggcctcactgcacagagtgaggacagggagaaggaaggtagaataagaatttaaaagattgatgagagtagcaaacagcgcctacttcacaagtttgcttacagctgatactgctagattcgaatgtgagggaaatgggcttacttttagatgattcattatcaagctcagtataaattctttggaagaaatttgaccctgtcttttaaaggtcaaagatttaaagatttggtctttaatctaagaatcctttccctcctgcagtcatcactgcccacgctttctctctccccatgcccctctttctctctttttcccctcaccaccctttccctctccctctctctctctccatactgggagaaacagattctcccaattgtcactggcgccaggtatcgtcagttaaatctcaatcatttcaacagcattgcctgtagttcacacatcattgggcctgccagaggcagcatttcaaacacatgtccttattcagggggagtcgggaataggagtgctctgaactgcacttttcaaaacctgttgtccacttgtgccaacagaacaggggaaatttcctttcagcactgccatgaagagcatccagatgttcccactgagctgaagtgcacctgcagtagaggctgcttgtaaccgcagctgcaggatcccttgggaaggcaagccagactgagagccacgaaatggtgtcatggacaacttggggccaagtctcaggggaaaggatgctggattttggatctgactttaacttctcatgctactctttcctggagaaggaaatggcaacccacgccagtattcttgc

SEQ ID NO: 31852 - DNA, 4840 bp, Bovine  19866880676501
  misc_feature (1)..(1): n is a, c, g, or t
ntgagatggttggatggccttgccgactcatgtgcatgagtgtgagtaaactccaggaattggtgatggacagggaagcctggtgtggtctacgtgcatggtgtcacagagtcagacatgactgaacgactaaactgagatgtaagataatgtaacactgacattgaatctgtgaatgcattgatcttgcatatcctaaccttcagatatctgagaaatgtatgtttaagccacctactctgtgggacttttgttacaaaatcccagactaaggcaaggacctttttcattcttactaatgattccaaaacctttttctgtgagttatatctattgattagaattaataataaacttagaaataattagcagtttagaaataagaactgagaaccccctaaaaatgttgtataacagaaatgagttgcattttctgtgttcactgacagtgaacagtaaatgcaattaaaatggatattatagcaacaaaggtataagttacatagccgcacataaaagatagtatgcagagattatagtttttattttaaaatgttaatgtttgatacatgtcatgttaagtgtcattccagtcagaatcctgctaccgtctataaaaattacaagctggtactaaaatttggatgaaaatacagagggccaaaaatagctaagctccttctaaagaaataggataaaatggaaaaacttgtctactggatatcaagatgatacaatatttggtaaattaagacattgtggtgttgatgtagggtagactagtgtgatgtgacagaataaagagctaagatacaaagcttagtaaaaacttgatttatgacagaactgacattgtaggtgagtgaggaagagacggaaaatggtactgagacaactgggtattggtataggaaaagatgaaattgagtcctttcctcatactttaacaaaaattagttccaggtggattaaatatctaaatgtgattgcccaggaagtttttagaagacatcagtagtagaagataatatttttgtgacttcgggttaagaaaatgtcttcaagtatagacctaaagggaaaagttgataatttcaactataataaaactaaggaacttctgttcatctaaaagacaccttgtagagaaaagactagtcacaaattgggagcatgtatatatagcacatataacaagattgatatacagactatataataagcaaaataatgacaactcataagacatgtgagcaaaagatccgctttaatgtctcacagtcaagaggcaacccagacaaccagtacattcctacagacatgaaaagatgctcaacttcattagttattagagaaatgcacattagccctagcaaggtatatctatcagacccaccagaattccattggtgccatgtgcttataaggatataaaacagtggaaactctgatgcattcttggtgggaatatgaatttgtacaacccccttggaaagtgctatggtattacctagtaaatctgtaaatgcttatatccagtgcctcaaaaattctgctttctaggtaccctagtcagcttttgtgcatttatactaggtgaaatcatggaaatacttacagaagtattgtttgcagtgaattctggaatagtcaaatacaattgaatattatatgacaatagaaacaaactttggctcactggttaaatatcaaaaacataattttaaggaaaaataccatcttggaaaaatacacgtaatgtgagtttgtttctagaacagtcaaaaacatttggactctcatacagtacaaaacaaaagtaaaggaattatcagtttgcttgcttgcttgctaagtcgcttcagtcatgtccgactctgtgcaaccccatagacggcatcccaccaggctcccctgtccctgggattctccaggcaagaacactggggtgggttgccatttaattaaatcagtttagagattacatttgttgtttcattttttaaactttttattttatattggagtatagccgattaacaatgttgtgatagtttcagctggacagcaaaagatactcagccatgcatatacatgtatccattctcccccaaactcccctcccatccaggctgccaaataacattgagtagagttccctgtgctatacagtaggaccttattggttatctatttaaaatatataacagtgtgtacatgttgatcccaaactcctaactattcctttccctctttcttccccattagttgagagaaaaaggatgcaattagtatgaattaaggaatgtcagatacactgttagtgaccagttccttaaactggtagatatatggttgttttattatttctaaacagttcatgaagtttgtatatactgttggtatatatttcacatgaaaacatgttttaaaaagaaagtctaaaagttgagttacttgactgtaaaatatttttaaaacttgaaatgattgttttatttttctaaactactgtaaatattataatcaaagtgatattacaggtttttaagcaaggcttaatatttaatgtgccggcttacatggtgtctccatgataaagaatctacctgccaacgcaggggatgcaggttgaataccctgggtcagaaaaatcttctgtagaagaaaatgacaacccaatccagtatgcttgcctggagaatctcatgaacagaaggagctgggctggctacagtccatagtgttgcaaaagagtcagacacaacttagcgaataaacaacaggcaaaatttaatgtaggttacaagattgatttctataccccttaacattataaataacctattcaaaacaaaatttttaatgccataagaggggcatttatgagatagaaaagatactgatttattaatgattaattttgtaacctgaaccagttacttgtctggaattcagtttttatttcagagaacagggtttggagtagataatttccaaggacatactcagatttttattaatattatgttgtgtttgtttttttggccacactgcacagcttgtgggattttagttccccaaccaggaatctaacgcaggcctttggcagtgaaagtgccaattctaaccactggactgccagggaattccctatatgtagttttttaaattgtcagaaactgtttattaaatcattctctctctgtaatggtctggattgtattccaagggctgccttagtcagaatggattgggctgtaacaattttcaccaaccttcttatttatttttgtcatgaagatacatctgtccttacccttgagtggtaggctttttaaaggaagctgtgaagtgcagttttcttagatgacagcttgcagacatttgtgtatccacagatatgttcaggggatgtccaaattcttagcaaaaaaattttaatgttgtatttttatttaaatgcaatataaaaatttagtataagcatttctgcaccactggtacaaatactttataataactgccttctaattttttaatttcttccatttggtaacaagtatttcagttattacaacctaatgagcagatgccccactcctaaaaaaatgccattgttttccttatttatgaaaaaactgaaaccagagaacgttaagtaacccagtcaaggtgaaacagcttgtatatggcagagctgagatttgaactagacatggtctatgttgaagcctgtactcttgatcattaaactgtactttcttgttacaggaatagactttctttttcatcttcctggttctcagtttcatcatctgtaaaatggttataatacatatctcataaatttgctcatgagtattaaatgagaaaattgtgtatcaagtgcttggaacataaacatagtaatgcttaataaatgttaactgttgtggttataattgtcatcatcattgtcattaccactattaaaaaaacaattatttgcaaggtgtatttcccaccttttttgagtattacttaattatagcctgattcaagatccaatctgatttttttaggtccagggtcttttttcatactttacactcacatacatatagaaagtagcttaaatacatctattttatgatataaattgtgctcacttaaatcgtatttactgtatttattggattatttaaaaagtgcttggtgataggtgtatactaattaatagcaggatgggtgctattagagtgattattaatatttaatctgtgcagctccatagaagtactcagtctggagctcgataacttggcctcagatttttgctctgcactacttattgttaatagctttgtcatgaagtttgtaagaggctcttaaatgcatagaaagatcaataactcttagaatattaaaatactggtagcttagaatattatcatctgtgagtggaaacagtggaggagcctaaatctggaaagggtacagttagaaagtgaagtaagtgaatgtacagaatagttattgaaagaatcttgatctgacaaataataatgacttttgctatatctcacctgggaatgtcaccacacagctcactttgtctttttttatatcttaggttggcttttttgtgaagagaggatgttccaaaggcatggttgaaattgaattgtaagtgttaaaagtactgaaaccacttttttctgcataatttcttagtttatgtttatgcattcctgatgactttagtcaagagtaataacacagtgtttacagtttgttgttcagtcgctaagtcatatctgactggttgcagccccatggactgcagcactccaggctt

SEQ ID NO: 31853 - DNA, 768 bp, Bovine  19866880682970
  misc_feature (1)..(1): n is a, c, g, or t
nttattttacgttctgtctatattgaagcatagaaatactaattcttaaatgttttgatatttacatacaatttaaaacttagaccaatgttgccctcataggacatgatttctgtttaaaggtagttaagttttggaaccctttttcagaataatcattcctatttttctttggataatctaccaaatgttgctacattaaaaatttcctatgaatgcataataacctaaaatatttttagagcagttttttgtttttttgtttgttcatttttttgaccatgccatgcggcatgtaggatcttagtttcctgaccagggatcagatctgctgcccctgcagtggaagcatggagtcttaaccactggactgaaagggaagtcccatcctaaaatatttttatcaagaaatacatatatgagacaaggggaaagggagatcagaatgggaaacaggtgacataaggctgctacttagaaataacataatttccaagccctgagactaaaattagaacacttactcatggatcatatctatggcacttggcagaggacagaaaagtgggtgcttgaggatggtatttaatctctctgtgtgtatctctgtctccctcctgaattctcacataatgcattttatgcaattacaaataaaaggctcatttctgggaaactagacatacatgaagaatctctgaaaagaaatgacaagaagttaagttaaatggtgtgtgcagaagagaaagtggaacaaaacgatgtgtt

SEQ ID NO: 31854 - DNA, 3465 bp, Bovine  19866880834088
  misc_feature (1)..(1): n is a, c, g, or t
nttgcttcccatatcttggctactaggcatgcatgtttcatttttaatcttgcacttgtgaaaataggatttatttgctttcccatacacataaacctctaaagagtgttctgtaagatgagactctgaaagctatagagcataaatcccaggtttttaaaccccccccccattataaaaaagcatatcagtaactatcaatgatgtcacgttcaattttgatccaaatgggcctcttgtctgtcaagtatgtcattaagcaacttttgggagaggataaaggcaacctatttgcttcataacagctgaaaacggacagcttagttgtcaaaaagtttctcggtctctcagaatatctctcatgcctcttgcctttctacgaactcagctactcacaataaaaattgctaggagatgaaaagggtgtgaaatggtttatatttttaattaatcccattcatttgtcattttggcgagcaggaagtcattcacaagtttgcgacaatattctgtcataaaataagtttggacacattaatgggtgatctcttgctgagcataatattagcctagtagtctaagatttcttagaaaattaatgggtcttggaaaaatagataacattcaccatcattctatccaaatgtgcagtgactcatggcatgcacagtagccactgaatttgagactcaagtgatttaagaacctttcgttagaaacattggacaaaggagagtaaacagcagagactcagagttccaatctcttagccttgatcaccagtcaccagctgaatgacttgccatcaaggtttccctagccaggcactgaggatgatgactggtgtattttatttaaatattttgaagaatggactcatcaatgatcattttttttaatgtttacccatagatctcttttcaaaaggagtttctaaaactcaaagaccatttgcaagcatttactgagcactgggtgaatgtgttggcattgagccagaagacccagtagatgaataatgacaactattttatccaacacttattgggcagttcttatataccaagcaccttgctagataccttgcatgtataatctcactgaattcttacagtgacccaatgaggagatactcagtgcagatgaagaaactgggatttagagggtttttttttttaaacattcccaaagtcacagagcaggtaaatgatggagcctggattttaacctacatttccctccaaagactgggaaaagaatcattctgccagtttatttccacactctcccttaacatggagcctcacaggatctttgggatagaaataataatgatacttataaatagctaactcttaaatactcatctatatactattctatgtttgatgttattaactaatttaattgtcccaacagcttaatgagttgagtcttattttcattctcattttagggttaagggaagtgaggcatccacaggtaacatacctgtggtcacagggatcccaggtggcaacactatattttgtaacaggtcttctggctccagtctgtgttctgtgaaggatatagcaattataatattcttttttttcccactgcactttgaagtgagaagcttttctccttaagttctgatgtgaatgactaagagaaccacataaggatattctttcagattctttcatacacaagggccctatcaccaaataaattctaatctgaagaaatttttaatcagttcttttctttagaaatggcatgggaccctgggacaacagaagaattcctgcctggttccaagttctaaatgaggttacgatgggaactcctgtgagagtctcatactccaagcacccccatgactgccctgcattctctggacaaattccagtagaacttatgttccttgataatcttatggtcttgttttgaaaatatgtcaagtagcctcatacaaaaaaaaaaaaagaaatagaagtgtaatatttgtcttgggttatggaacaaggagcccaaatcaatagggatataagcaggagacaccatatcagcagaaagacaatggaaatccctcatccttggaacaaaggcaacaaatggccccctgataaaacttactttgtaacttagctaaagaaatacatgcatctcagtctcgaggttttctgtttttctttttagtcatgactacatatttatttgtttactttttaatgtctaattactttttaaaaaattttattgaagtacagttgatttacaatgttgtgttaatttcttctgtacagccaagtactcagttatacatatatatgtagagaaagatacatagattctttttcatattcttttccactatggtttgtcacaggatattgtatacagttgcctgtgctatccagtaggatactggtgtttatccatcctgtatataacagtttgcctctgctactcccaaactcccactccttccctctgctcccccacctgctgccgttccttggcaaccgcaagtctgttctctatatctgtgagtctgttactgtttcatagatatgttgatttgtgttgtattctagattccacatacaagtgatattcagttttgagttttgactgaaaatataaaaacttatgagtagtcagcagtgaaagcatagccctagacagttgatcaatgagtttatatctgtctataaaatgcaagggcctgatggacattatactaagaggctcagtattcaattcttggatgattggtcagttatttatgtggtgctataatatatagtatggaaaattacttgtcaatgagatcctcaggcatgaaataataataatgcccatttagtctctatgctgacgatactatggccatgttatctccaaatcctattataattttatatgatccgtgtggccatctccattttaaagacccagctgctgagaaccagcaagatgactcagcgtgccccagatcccacagccagagcaggatagggtccaggtccgtctgtgccaaagccagtgtctgttccattgccttgccattgggtgtctggcactggatttgatgctgcaggggcttccaaagaagggcaacacctaacttctgtcttctagaaggagcaggattccagcctctccgaggttgactgttttgacaacttcttctcccaaaccagcctctctacctcttggcctttgccatcatccatcatgaacgtctctcccaaactccactaggaccagggattgctttgtgctccctagtacctgacctcatcatggttagacatttagggagggcttattagactcaacggtgaaagtgaaagtcgctcagttgtgtccgactctttgtgaccccatggactatacagtccatggaattctgtaggccagaatactggagtgggtagcgtttctcttcttcagggattttcccaacccagg

SEQ ID NO: 31855 - DNA, 2093 bp, Bovine  19866880858515
  misc_feature (1)..(1): n is a, c, g, or t
ntggctttgtgtgacatcttgtatatttaatctgataaataatgaagccttgaatttaaattagaattgtaccactggaataagaaatatgactcaaagtctgggcccagagaaaaaatgctaaaacataaaaaagaaaaaggggacactaaaaggtatcaaatccttaagtttaaaaaaaaatgactcacgggtttaagaaatatcaaaaaagttcaagttgtggagggaaaaggagaagcataaaatgactacttatgcatagatacagatcaacaaatctttgaaatcagtttcctcagataccccaaaagtggctctggctctatgggcaagatctgtcccccaacatcataaatgaatagaaagtagtgttcttaatgaaaatggtcttcattcttctatgaatttttaatatatattaaagtacagttaactgatattatacagctgcatttcttggctgggatttaacaagcataaacaaagtagttcaatgaagaaaaaaatctaaattaacttattctatatgcaatagctgctcctaagtatcatgaaggcagaatacatcattcattgacaattcagtgctctactccatcaatttctcaatcataactcactctatgcatcctgcatgattaattttcccatcttcagttaatcattcataaatttaataaatatttaataagtccttacaatatgcaaggcagacagaatctgggaacacattaccaaaataggtacacttaaaaaagtaaaagattggggaggagtgattgtacagatattttatctgtaagatatttacagatcttattgctttttttttaacttgtcagtagtattcttgacctaggatggtctacaattcttccagtaaaagttggatgaaatgtgtgttaatctaaatcatcttttcttttaacagtgacatatttatcgaaaagtaagtgaagactaatgagtctctaaaaatagacacatcctttccactgcatgagctcattcagtccaagagatattatcatgctacagctagtgagctggatgtccaccactcagagtaaagcacacaactacacagggcaatattatgtttttctgtgaatgaacacttgaaaattacaaattttagaaataaagtagcacacaagagtcagatacaaactgtatcctttggatatttgtatttttacttggtacttaaaactattaggaagacaggagaccaaggtatattaaaggactgcatggctttgtgcaggggtgagttaagagacttaaaacacaagaagacagttaacatcaaagaagggcaagaaactttgtggaagatataaaaaagtgtggaacattataaaatttagctgatgtttcacaggagattgtctatactcatgtcttgacactctcacactcacacaccaaagcataagaagccctatcagtcaggatacttaaaatgattcttggaagaaaactaacagagaggccaaaatctggcaacgtacattagaggaactgactggatctccacgtcatctgtgtgtagtttaccccttaatccctgcagctgctaaaaatcataaagtaatagttttatccagaggtctaggtagaccttgaggtatttgattcaaaatatgctttgtacataaaaggttataaaattatgctcataatgccaatcattttctcacctaaatactacaaaaagttataaaagggtaatttttgctctaggagagaagagcagcttctgtctataagtaccagcctagacaagctttttggtattcttaagtctcacttgatagtttgccactcaacaaaatcatgatacacaagtaaagtacctattcttttcccttaaggcaacgttcctcactcaagtctagagtctccataacagtgagatagaagaggtctgttttccctacatgtcttcttaccctacaggcagcctagcataaaaagaggaaaacaggcaaagcatgggtggtcacactgttccagccactactacattttatacacacaggataattaaactgccccccttaaaagttacccaataacattattag

SEQ ID NO: 31856 - DNA, 1528 bp, Bovine  19866880868652
  misc_feature (1)..(1): n is a, c, g, or t
naaattactatgctatacacctgaaactaatataacactgctaaagcaattatacttcaatttaaaaaagttccttctcacagagccttgcctggtactgatatcctccagccactcagagtacactgggagattctatgctgctcatgctggcaccttggtgcaaacagttggctttgcatcactgcacatgataagagatgatcctctgcggtttgatatgacaggcatatcataaggcatatctcaaaaggagatgaaatcctcatattgaacaagagttacagtaatatgcttctaagtctatactgggtttataagctataagtgatggtaataatgtgacaatagagaaaggaaacttaagagtacttttctttttagtaaagcctatgggtgagtggtagctattgagtgcaggttttaccagaagtgaagtgaagtgaaagtcactcagtcatgtccgactctttgcaaccccatggactatactgtcatggaattctccaggccggaatactggagtgggtagcctttcccttctccagcggatctacccaacccagggatcgaacccaggtctcccacattgcgggtggagtctttaccagttgagccacaagggaaacccaagaatactggagtgggtagcctatcccttctccatgggctgctcatgatccaggaatcgaactggggactcctgcattgcaggagttatcagggaagttatcagggaagcctgatacatttttgtaagtcaatcagttgctgtatatatttaacaggcaccaactgggattagagaccaaacccttttagtcatcttgcacagttgttaagccagcagctgcttaataatacttctggtgattaatagtgctttgcggccttcacgtcatatagagataatgactgaacaaatagtgaacaacttcttggttccaacatagagctcctctccactcctggggcaagaaatgatcaaatatttctgagtgagtggtaggaatagtttccctgcctccaatatttagcctctgattcttggaatattgtcagtctcaaaagtcagagcctggggaacacttcaaaatgctttaaacagaacagcttatgccttgaactaaatcactgcctcaccttaaatgcccctatgctgtccgagctgacctccagtgcctgcatttagattctggccaaggccacaggtgaacacatacttggtccagccccaggttggagcatttccagctgaaggtgtccctcttgcttaagtgcttctgcctggtaaatacttggaacattcagagtgccctctttggccccttttagtgaaagccctctgcagtaaaatcataataagttaatataaaataattttataataaataatttcagtgaccttctgctaaggagccttattcacagcctctgttagaggtactttcagaggtatgactggccactcatctgcatgtgagatacgtgggtaatgggccatcttacaagagagtatggtttaatt

SEQ ID NO: 31857 - DNA, 3401 bp, Bovine  19866880901837
  misc_feature (1)..(1): n is a, c, g, or t
ntcctgtggccctgttgggttttctaaatttgctggcatattgagtgcagcactttcacagcatcatctttcaggatttggaatagctcaactggaattccatcacctccactagctttgttcgtagtgatgctttctaaggcccccttgacttcacattccaggatatctggctctaggtgagtgatcacaccatcgtgattatctgggttgtgaagatcttttttgtacagttcttctgtgtatttttgccacctcttcttaatatcttctgcttctgttaggtccataccatttcggtcctttatcgagcccatctttgcatgaaatgttcccttggtatgtctaattttcttgaagagatctctagtaacattttattattttgagatgaccctattgtcatttaaaatactcatgcagattcctgaattaatctgtcataacagctgatcattcactgtatacataacactcattataggtgtggctcctacagtggccacaagtagagaggggttgtgtgtctctaggaccaaaatatgtgtatacatttggaaacctgaaacttttgtgcaacacctaagagcaaagagaacagtaaggacaggatgaagactgtccaaggccaagataagtaacaagatggacacttaaaaaagttggagatgtggttaaaaatattcacatgaagaggaactacagtgaatgagaaatgatgtaaagttgccataaacagttgccatgttttcaggcagctcaaggggacacagtgtcatcatcagctatttattgtcactgagcagatcacctaaatatccacatggcaaagcattaaaaggggaaatggtactgtttgtagcagaatcaacattcctattctgtccctgatggaaagctagtcaccagaaccttctctctggtcaacaagaacttggagttgacaaaacgaatgtgttgcaaccgtgaggagacctaggttttcatgaagccaccaaggtccaggtgagagctgccataatccacaaggaagcaggcccttgccaggtctccctgtgtagggtctttctcccccaagcccgtcgatcactgataccctctcctctccattttccctgcagagaaccagctcacttggccactagggggccctgttgctcaccacatttcaggactgatcatcagtactggctcacctccctgccaagagagaagttcttaccgtctgcttcgcatcattcaatctatttttagtgaaaagtaacctagggttattccagccttgtccttagaaaatgctgaatgataaacagaaaagaaaataaagcgtagtatggaaatgtgaaaatagcaaagcccagtcacagggcaagaagagccttgaactgggtggcattctcggttacagcgatcgtgtctgcagtttgtctctgtctcaaggcttactcttccctactctactgccaggtctctcagtgcctactcaccctcctctcactgcctccttttctgttgacagagccatgggtaggtcaatatagtggggagatggcaaacacagttatcctggaaaaaggtgtccccagctcacccagttcactctttaaggtgtgatcctgcgggagactagagttggagttccgagtatttcctcctccaacaaaccagttcacgttggggttccagtggttcacaaagccacagagatggttttcttcaaagtcacattctggcagaagagaaataaaaacagacttgatggagatgtagttgtgcctgcagctgcccagactcactgcagtttgctcttaatccggtatgtttcacactcccttctaccaccggggcctttgtaccatgagccctggacaaagtcaatcaagaggagagatcctgtaatgaacagagattataattcatcattgcttctttggattgtggcccatgtggctggaatgtgacctctcctagtctccatgtcttcctatgcaaaatggggagatactcccaccacgcagggctgtgataagggtggacagctgccagcacagtgccaggcacgtggttagtgcttggtagatcagccaattctgtgtcaaagcactatttagagctacacttttagctccagaaattttatccaccacctttctgggaacccattctttcattcccttctctcttgatgatagacaaggtactaagatgagggctaaggcgcatgtttcctatgatgctagagttctctgcttttcttataaataagattttagaatagtcgagacaggaatatcttaggcactgggccctttggcagctactgagtagagaaaacaagagaagacaaagagaccctctctcccctttttagtagcattgagatgctcgcacagataaattgttcccagtcaacagactcctttgggggagcaagaaactcacaaggctattcctctgttgacccccataaacaacagttaaaaatacgaagttgtgattgtgctggtcatctcctattggctcctccagacccatccacctttcttccaccctgctccatcctccagaggttgatgtgtatggacctgtatgggcttccttgcctgttggcttctaaaatggattcaaccaatggaagataagaggagaacaaaggttggggttgtttattcctgcagttccctttcttccaggatgccatgagttggctgtgcccctctaccgagggaccacacagctctatgttctggtaaaccctcctctcttgccccttcagacctccaatgctgatggttcatgagtcatcactctgactagtcttggattactgcattttgacaggcttccttcacccgcccacacctttgtagtccctttggtgagttttcctcaaattactaagggttgagtgtaatctgtttccactttcttgccagggtcctgactgatacagttatcagtgtgcttttgcattagcaagcactcaacatttttaagattttcattttcaacttttctactacaggagccactaacctatgcccaacagtcagtgccaaaggctgctgcagagtaaaagaaaaaagcaaaatattcttcaatgcaccaggcactaatctgagtactttatgtgaattaaattatctaatcctcaaaacaaccccacaaggtatgtactattattaacctcactttacagatgaggaaacaagagaggcaaaaggagtgtacagaaagaaagatgaggtgagagtaagatcatacagttcaacaagataaaatatcagggctccttttgtgttttttttttttttttttttaaaacagaagccatcaagtgatctgaagaaaggaaattaacagttttgactgccaagcacgggaccatccccttcatatcc

SEQ ID NO: 31858 - DNA, 1487 bp, Bovine  19866880997302
  misc_feature (1)..(1): n is a, c, g, or t
ntgaaaattttggatacaggagaataggtccaggttacaaaattaaaaaaaaaaatttaagcctctatctatatagataaccatccataaagcaaatgaatttattgatctcattgaaactctggcaaaagagatcctagggaactagggaaatttctagggaactacagtttaaagactgtaaagggtcatgatcattcttcgggctggtgtgctggttttactcttctttcaggtatatgtgaaaaacatctataagaacttcacaaataattctgagtaagaagtaaatccagcccatctgaagaaaatatcaaatcgttgctagtagacacggcacacagatatggcaacagctgtgaaagccagatggaactgaacagtggctgggaagccctgcatggccaaccccacattatgtgagacccaagtggctgtctgattttctaataagggcccgtctagcactcaacacacaaagtaaacagttcctctcaaaaccatcacgaaatgaatgggcaggaagaagactttggaaaggacattggagggtttttacaattcagggccggaggcccagggcaaataaggagtcatggtccgcttgtgagtgaaatcacatgatgaaaataaaattattttaaagaaatgattatcattattatgaaaatccagtatcactaaacataagtggaatggaccatgaaaatatatggctagtaaaaaaaatgcttatcctttagccaaacttgaaatgatgtgactcagcacagttgaggaaattttaatttaggctccttatatttcagatgagaaaaatactgtctagagaggtgcagtgacttgacccagttcacacagttggaatccacgtctttggacttctccactatgacacccctggtgtagcagcagcccaggcagtcaccagaactggcccagctggagaaatcctcgtgtcccaagtgactctgtaaatactctcctctgagcctctaagctgatctaaagtgaagtgcctcagatctgctgtgccgaaggtaactgctaaaggagtctagaggcaaattagaaaacatcaatagtactttcttcctctagaatgaggaattaaatcaaccaagtaaaattagagcatctcagtggcagagtcaagggagcccctggcaaggcccagcacagcacgagaagcagagaggaagccctatagcctggaacacagaatccaaccactaggtcctcatagatgctactgctctaagccaggacatgcctgggcacccagcggctttctttgtgatcctgtgctgattgtgcatagaagcctagggcgactagggtcaagattttaatcatcttttgaggattcaattcacagaccattccctgtcttctcaccttcactgatttctcctttccctaaattctacccagaatttctggatggaaggggctttgaggagacaatcaggttgaaagtaagtaca

SEQ ID NO: 31859 - DNA, 1229 bp, Bovine  19866880999391
  misc_feature (1)..(1): n is a, c, g, or t
naaaggaagatgaactttgtgtgaagggtaaaaatccgatgccagtgttcatggacaaccgtcctggcctgtgttaacaaatcctattggcagtgattagaatcctattatcccagaaaagctgtaaattcctcctcctagtgggatgacattatctgattggctaggaccctgagtgaagttcaactatggcacagttattttttgccctaggaaacctgctgacaggagtcctttgaaaaaccaaaagcgtgaaatgcattttagtccactgaatgggtgttccacatgacacatactggctgagcctacagaatcctgcgggctatataaagtaccttcggctccccaccaacacacttcacagatttctcttcatgtcaccttggcagcttcatggtgttgttgtcaagcagttaaataaaatgaagccccattaggagctgaatagttgtccctaaactgaacacttgaattgcttttccagattcctgatgggtatcttgacctggatccatctttgacaagcctctgagcctctgatagtttatgtaattgatagtcactcatttcctagcagcaggtgacaaagatcaaagaaggccccgatcagagacaccactgaagtgccctgaagatggcatcatctccaggtaccctttcctggagttggaatttcctaagccatctgactgaaatcaaattcaggttcgcaacaggccacataaatagtatcggtcaaaggaagagtgtcaaaatgcattttcccctcacccggtctgcagtttcctcatcttgggataatatgttagcatggccacagttattattcttgctgcaagcaaaaataagatctgccagtaagactcactgagaaaacatccctgacatttcccttagtgtatccaaaagtttaactcatcacagttctttggggtcaggaaaaaaaaaacaaacaaaaagaagaattctgactccttcaatgatataaggcagcagtctctaaccttcttggcatgagggacccatttaataaaatacaatttttctcacagactgggagaggggggttgggtttgggggatgacctcaagttcatgacatttattatgcattttatttctattattatcacatcagctttacctcagatcttcagacattagatccatgaggttggggacccctgatataaggggttaggaaaatatacagtctgcaggtgcatg

SEQ ID NO: 31860 - DNA, 1677 bp, Bovine  19866881075748
  misc_feature (1)..(1): n is a, c, g, or t
ntggctgcattgtagagaatgttctagaaaagagcagggacaggaaagaaaacagtgaggggctaacctgtggcctagatgacagtggacattgtgggaacggggcagagtgctggatttgaacagcatgtaggagatgaagcgagaggactgggcaaattattggatgcgtagggcaaggaagagagatgaactgtcaaaagtgccaggtgctgctctggaagtggtgggcgtcagaactgttgatcaagataaatgatacgatacggagaagaaatgtgatgggagagaaagacaatcagttactccttggtctttttaagacagctccagggatgttctggtaggaaactccacagagcatccttgggagaattagcatgcaggtagtcagggtcatgggaatggatcgctcagggagagtgttaccgtgtgtgtgtgtgtgtgtgtgtaattcatgaacacccatatttgagaccacccaaggactctcatcagatgtctatttaaagtctcagacccatcacagctctcacagtagcactggctctgggcacagcggaggctgtgcagcagtgtgcattctgcgactgcagagcagggcaggcacctggcaatagggtcctggtaaaggttgcctcaggatgataaatgagctcaggtctccacctgacaagtgcctcccatcaccttttcatttcagctatttggaggcttttgcaggcgaataatcagttttattttctgtttcttacttcaggattagaaagagtattttagaatgttttcttttcttggccacatccccatcctgtatgaggaacaacaaagaaagatgtgcattttttttctttcttacagacttgagctgtggcttttcactaaattcacatcagcaagatttcgggatggctgaaggtagtccaaaaatactgacttccagttataaaatgaatagattctggggatgtgaggcacagcatagtgactctagttaacattagtgtatatctgaaaactgctaaaagagtagttcttaaaagttcccaccacacacacacacactcacacacagagattgtaattttgtgaggtgatgggtatgctgaccttattgtggtctaaaatcattttatagtatatgcatttatcaaatcagtatgttggtacaccttaaacgtatataatattatgtatcaattatatcccaataaagctggagaaaaatatttcatacaacttcaaaagggttactaagtgtaacagagagttgagatttcagaggtgtagccatgaaaaagcaaacatctagtgaaccatatttggccaaagcagaattgatcattcttggtaaatcttgattgtggggatattttttattctgattgctcagaatgagaattggttcattccttatttccacccataataaaatcaatgtggactttcatgctgctgctgctgctgctaagtcgcttaagtcgtgtccgactctgtgcgaccccatagacggcagcccaccaggctcccccatccctgggattctccaggcaagaacactggagtgggttgccatttccttctccaatgcatgaaagtgaaaagtgaaagtgaagtcgctcagtagtgtccaactcttcgtaatcccaggactgcagcctaccaggctcctctgtc

SEQ ID NO: 31861 - DNA, 1464 bp, Bovine  19866881126938
  misc_feature (1)..(1): n is a, c, g, or t
ntatggtgccttctaaagtaaatgctgagcataagaggagtgggtattatgtgctcatcagagttctaagtgctttacatggttttcctcattttgtcctcacagttctatgaggtcattagtattattattctcattttacaaattaagaaaccatggcctccagagtgatttgcctgtttaattgaagtaaatggtaagagagagaatttaagcccatgaagaccaagtcttagtgttttgagtagataaactggtcttagattcgggaggcactgagcatgtcatttgattgtgtcacagaaggagtaagatacaatgtttattgaggtgcttgaatctgaattcactctcattatcccaggaatgagactcttctctggctaatggatcctaaaccattactttcagaagccatggggcagcacacaatttatagatcctaatttcttaaattaaaatttagtaatacagctaaataggtttgtggatggcactgtgttaactgattggaagccactagattaaaaaaatagaggcaataatcttggcttctaatttctcctaaatgtttattctctctcactgcaaagtactgtttacaactttgcattactctaaattcagcactttcgtagcttgcctgacatcttctattgttgtctgggaaaagaatgaaacagttgcactaatctaatcttggtatttactccaaggttttagtaaataaatccctgttctcaaagggaacaatgcccttttgatatgcttcgcatatttcttttccaagggcatcccaaatgagttgactacaaatatttctgctaatgagactgccttgaaatatcactgctgtgattatatgcataaatagtgaatttcattaggttgcttgagtcccacttttgatggcatagtaaatctcagaacaaccgtgggcggtagatagatgaagagcttttttggatataattaacttatttgagtgcaactactagctatcttagcatagcaattgtaacttagtcttaggctgctttaagtacataaaacaatttggcactgttataggaattctacatgagcctgaaagattaataaatttaaaaaagactctagtttgagagaagcataaagatattgattaaattctctctttattttacaaatattcacagtagctaagttataatctaggcactaataccttctaccgcaagtgatattacatggtatacttgaaataaatttaatttcatcaaatatttaatgttttgtcctaaatgacatctgctttgtcagttcttagatgattattcctcttgttgtatatcctgatgaacacaaattttatttgtgaatgtgtgttggcatttagggtggatagagggatttttctaagccagggatgtatgtacatggccttggagataaatctagagttacaacaataatgcataagaa

SEQ ID NO: 31862 - DNA, 688 bp, Bovine  19866881136094
  misc_feature (1)..(1): n is a, c, g, or t
nactttctgtgttagtgttagtgttgaagcagcactgaggggatctcctgcctgaaatgaataatggttgcctatttcttaaactgataaaaaaaaaggactggttatcagaattttctcaatcattattaaaattagtaaagtggcaaaaagatataaatctatagcaaacacatattaagagaaaatttttctgaaattgctgagcacttaatttcccaacttcttatttttaagtaaatacactcctggttgcaatgttatattttatctagaacacatggtcatattttcttccagtaaaattgttcccagtgtgtatgatgaattaaatatgtcaatattttatgctgctccaaccagatgaccataatattcagctgtcttactactgacataacatgggaaacaacaagtgcataagcagatgttaaacagaatgagcaaacaatttgatcaatttttgtctacttatatcctgacatttcaaagacgcggtaaggctcccagtgcttcaaacaaacgctcagatagtaaggtacatcaatgatagcaacacagtctgaaaacattttcttcaagtatgtggtatttgaaataagcctgaaggataaatcaaatttggaaaactgctttagaaatgcaaagtgacccaatagttattttgggatgtcactaggcatctggt

SEQ ID NO: 31863 - DNA, 1308 bp, Bovine  19866881153990
  misc_feature (1)..(1): n is a, c, g, or t
ncagcacttttttcttaagccatggtttctaaacatgcaccagaccacctggagtgattttttaaaatatagaattctggttctcatattagtatttttcgtttcagtaggagaggctcaagaatctggtttgcttttaactctttcactaattcccttgtaaagtaaaaattcaggaccacccctgacaactttcctttttaggtgctttccaacctggaggttctgtgcttaaatgtcatatggaatctctcacttctgatttactggcaatcagccatcattcctaaaaaagaggaaaggaaaagagaaaaaggaaagatacgataggaagtatgggtttgttgtccagactttgagcaataaaatgagcatccagaagagaatgtgaaagtcgctcaaggtcacccatggcctgcctctatccgtaggagagcccaggggttttaactcactgaccacgaggtgatgctgtcctgtagaataagcagcaaaaaggagacctgtgaccctgaatgactcaaccattgccctgcaaggtgaaagtcataatgtctgtgcaccatctcttcatccatgacatgagagtgataatgcttgcctccatttgacagagatgcttataaaaacaccgaaagtataaaagtgttaagagaagacagactgtctttttaaaataactcacacgctattccctcttaagtggctgtgtcaagtaaaatttccatttagatccagcatggaaatatgaactatgagaacactggtttaattaacactaattaaaccactggtcatataacttgggctgcataggtgacctcgcttagtgtggctactccagtttataatttattgaaatcagtctaacaccaagataaaactttatcaggtcaggtgactcttttagtctccagtcaaatccaaaaccccctttatagagcttgcgatatggaaggtacctccaaggcaaaagtcataaacccttcagctacaaactctgggctaagaagttagaaactaagaactggctgaagaccacttcttactgatccaaagaaggttcctataagcattgcagatccctggcagaacctctgtattaaccatctactccatctttgtcccaactcccactaatctgatgaggtgatgggaaacacttaggcctgaccagtagaatgccttaaatagaatcaaaagcttaagaaagccttgaagaacttctctggtagctcagtcgttaagaatctatacttccactgcagagggcacaggttcaatccctactggggaactaagatcccg

SEQ ID NO: 31864 - DNA, 825 bp, Bovine  19866881247984
  misc_feature (1)..(1): n is a, c, g, or t
nagagagagagagagaaaagtgtgtgtgtgtgtgtgtgtgtgtgttaatagggttgctcctgggagtcaaggacttaggttttagcatctgacttccctccctccctgagccttgagggttcactcttctactttatgaatttaccaaaagcaaaaggaatattccctctcacttggtatataaaccagaggagagtattcctgttaacctgtgagggttcttgttagaactggcagagaaaactatctcagtcagagatggctcagtggagtcccactccatggctcttgccctcaccttcctgctactgtggcatcattattcagggcttggagtgaagctaagaaacaaagatggcattctgatggtgaggtgaaatatatttataatccttgaccctaccctgtctgccagctttttgtttgtgtcagttttaaagcttctgcagaattggaaagccatcattaaaatgccccctgctcacttattccttggtcaataaaaagttaaatacaattgctttgtcatgtctattagctagcaaggatggcacaatgaattcaactcatgactgcactttaaatcatggatgtgtaggattaaccattttggcttactcattcattagcatcagattctggttaattgatattccatttctaaagacctccttttactttttaacactacccttttcaacagttttcaccagtgcacttaaagaaaccaattgtggttggttaataaatacatgtctatacctttatgagtgtatgaaatttttgaagaatattaggaagcactgggcttgaatctgcctgcca

SEQ ID NO: 31865 - DNA, 2160 bp, Bovine  19866881262562
  misc_feature (1)..(1): n is a, c, g, or t
ntttaatcactaattctctttttcacttactcctaaatatagatctacgtttgagttttcacaattgggacatgtttatgaagaaaaggtatggtgatatacatgtactggttggtagcaaatctcttagggataccagcaagtttttcatagaaatggtggggattgttaagtttggaacagtgattgtctgagcttcagcaaaactttgtgaaatgtgaactgatcaggacttttcacatccaggaagtcaaatcctgcaaatcctattatagtgaacttctaggacctaaacacactcctcaaaaattaaaagtgaattgtttcattgtgtcctgcctttaaaaaagcatctcattgcctgggtcaggctcagaaattaaggttggaacctgctattttggatgataatcctacctttgtcagaaggttttaaggtcttaagctggtttgggggttcaattggtggtttgtggtgtagggcacatggacacaagatgaggaaagacctttgggcgttctggagccaactgtccaatctgaccatggttcagaatgtgcttcacctcctgcttcttgctcttgagctgtttccctttgattcttgcaaccctctcagaggaccagaaggaagaaagaaggggaagcttctacacatcagttttctcaaaaaggtcattgatagaaaaaaaatgtttgaatctgttttgcgtattttcatggtatgcatgtgtgtatatgtgtgtttgggttttcttttttatcagactgagaatatactattttcttgcttgtatttccttctcactaatatatattgcttttaatttggtgaaatgcatgtagtcactataaaaaaagttccatttagaggaaacttgtggcctattttattcaccagtctgtcccccctgtgcctaaaacagcaccaagtactgagaaaatgctcaaaaataataacaaatgaccaacgcaatactgtaaagcaactaacctttaactaaaaataaataaaatttcacaaatagtaatgaatgaatgaatgaatcatagacagagattgacttgcgtcaggggctgaggtagagagagagaaatgagaatgattgctaatgaatgtatggtttttggagggtgatgataaattgctggaattagatagtggtgatggtacccaaccttgtgaatgtactaaaaaccactgaattgtgcatttttaagagatttagtttatggaatgttaactatatttcagggcttccctggtggctcagtggtaaagaatccacctgccaatgcaggagatgcagatttgatccctgggttgggagaatctcctggagaaggaaatggcaacccactgcagtattcttgcctggaaaatccctggatagaggagtctggtggactacagtccatggggttgcaaaagagtcagacatgacttagcaactaaataataacaacgaaagtttgcctccaaagccttcgtcttagtcaagaagtgatgttttgagagaaggatgactcagaagtttgaagcatggcctggcagtgggggagacaccattgactcacataggtcatcagataatgctaatggaaagagtaagatatgaggatgagacttggcaagatcatagcgaaatgagtacctggagtcatgagagacagaaagattactgagagagaagatatagggggaaaaaagcgagagggtgcacacggggtctttgactcttaagacatagtgactcaggtcaaggatgttggcggcagataatctgtgtatcttgactttgccactttgtcacatgggcaaatcagggaacctttctgagacagcattctcatgttggcaacacggaggcaaggatgctgaaagtacaggatgttgtaaggattaaaggagagactgaatgcctgtgtgaatccatgctcatgaagtcaattgtgcacgagggggcatatttctgtgttgttttcaaataaaagtcattttattcccatcctcatttccacttcatgggcaggaactataatctttatgaagcaaagggtccagactctcacatggttagaggtgaggaagagagggatacatttcctgaacatcactgtgcttatcttctcaacacacagatgcatttcttcagggca

SEQ ID NO: 31866 - DNA, 1340 bp, Bovine  19866881297720
  misc_feature (1)..(1): n is a, c, g, or t
nccctttggaataaatagccctgacaccaactcttggttttattttggttttaaaccaactaggacactttattacaaatagtcagtgctgctcaggtacaagatgtacaagtactacaaattaaaacaaacttggcttgtcaaaagtacagccttctcccttctaagccacatatttgcacatacttaagcttggaaatgagagcttcacccttttttagccgatttttcattcccttacataaatctctgttgcatcttaaatagagataataaaaatgttatcatctttccccttaaaatgtgcccctcttgacttcaatatttagtgtacattttttttattctttgtttcccccatcctgaactccctcctagctccctccccatagtgtacatttttatctcagacttgtccattataatatggcagagataggaaaaaatactatcttttattctcccaatatttcaaaagtttgggaatgcatctatttagagacaatagtctataggtcaagaactcagttgcctagattcaaatcgagtttagtataatcaggttatttaactttttcactgtgcctcaatttcctcatctataagtgggaatactaacagtaccaatatttagctcatggatttgttgtgaggattaaatcagttatagctggtatgtagaacatgtttggtaagtatgaaactaccactattattctagcacatatataattctaaaatgaagacaatttataatctacattggaagggactagaattcagggttttttattgagagcttatcctgagaaagggggcctcagctaaaaacagacatttttccctgggaacttgggatccaggcagatgagtcacacaacggtggggccagtaaaactgtaagccagacttctttgagattggttgtatatggagatggggctgctgggcaggtaatcttgataccttgttcctctcaagagaattaaaaacaagacaaactagatgagtgtcaatatcttctaccctctccaacttaccacagcactaaagacttcctaataataaatgattcttaagctattatcatcagtcataatattgatggcatctacttaatgggcagccaatctgtaatatactctataaggttttaatcccaagcagttcctaaaatagttgaaatgagggctcttttaaatattccacatttatattttaaattcaagcttacaatatgacctccttcatattgcataagttctctttgaaatgtatccctgggaattttggcaaattaaaagaaaaagtgtcaatttatttgatcccttctttggcct

SEQ ID NO: 31867 - DNA, 1243 bp, Bovine  19866881341298
  misc_feature (1)..(1): n is a, c, g, or t
nacctacagactgaggaagggaaactcagcacaaatttcccaccccttccagggtgtatcaccaagaaattttaaagatgtcaacccttaattagaattttaaattgggagaaatgtgtgcgggcattttaggtgcaattagtgcagtagattaaaatcattttgaagtgacctcattcactccccaaactgtttaaattgattttacaattttctgtccatgtaagtggccagatgatatacagatagctggggaactactaaaatattttaatgagattacccttgtcaatcaagaaaaaaaaggtaaaaactattatagcttgtctttttactgcatcaataaaaaaggagaaggggggcttcatactttttcaatgggcttttacagtattttcaataaacctggaatgccgaaattctgttgtatttcatcacaacaaagcagcccttatctctgctgagtggcaccactaaataaaaattttgtttctctataaaaagagaaactatacatccagtcaaaaggctaataatacattaggagaagatatttgcaacagtatgacagtcaaaaggttaatattcttcactcttttttaaaaatcctcttccaagtgggtaagaaaaggacttgatagaaaagcaggcagttcacagaaaaagaaatgcaatggccaataagcctgtggaaaagaggccactctgttagttgtgagggaaactcaaggtaaaacaggacatatcagattggcaaaagtgaaatatattgataacaactattgttttgttattcagtcactaagtcgtgtccaactctttacaaccccatgagcttcagcatgccagtctcctctgtccttcaccatctcttggactttgctcaaactcatgtccattgagtcagtgatgccatccaaccatctcatcctctgttgcccccttctccactagccctcaatctctcgcagcttcaggatcttttccagtgaatcagctcttcgcatcaggtggccaaactattggagcttcagcttcagcatcagtccttccaatgaatattcaggactgatttcctttagggttgactggtttgatctcctggctatccaagggactctcaagagtcttctccagcaccacaactggaaaacatcatttcttcagtgctcagccttctttatggtcaactctcccatccatacatgactattgaaaaaaccatagctttgactatatggac

SEQ ID NO: 31868 - DNA, 618 bp, Bovine  19866881365251
  misc_feature (1)..(1): n is a, c, g, or t
nttgggtaacccctgcatcctgtatcttcctccgcttgcatattcacaaggaaagtcaacttaagtcagcatctcccaaacttacttgagcagggagcctttttactctgcgtaatagctgttaacatcctgctgcaggaaatgagtccagtctcatggtggaggttccgaaaattaaaccacttaagggtaggtgacacagccagtaatgccaggatgagaacccattgatggctgaagcctccctcagaatggctgcataattatactgacagcagtggattcaaaacatcccaaggctttttttcctcctcctccctggccccgcagcatgcaggatcctagatcccccaccaaggattgaaccctttccccctgcagtgaaagctcggagtcctaaccacaggatcaccaggaaagtccttttttcccttgaaatttatttttaaaatcgtttctaaagtgtctaggatcctagtttaatttagagagatttatctcttagcagatggaaaatgtgtcaattggctcattcaatgtggtagtactctctattcatatgcatcagaaacagaacctgaatagtaagcacggtggggaacttaaaggctcagaagg

SEQ ID NO: 31869 - DNA, 1393 bp, Bovine  19866881403409
  misc_feature (1)..(1): n is a, c, g, or t
ntaggttttataactgtagtatttcctttgatccttctggaaattacttttacattatgaagtgatttatccttctatttccccaataactaaccaactattttaagagctcactaaatagtccaatattattccaatgatttgaaaaatcaccatcatatactaagaatgccaccatctgttcctgggcctagattttgcctttttagacttaagaagagatcctaaaagggaataatacagcctgtaacaaatatatttgtgtgaaagagagataatttaaatatatttaataagagataaatgatgactcaatattcaaaaaaacagcttagttctaatactattttaagacttacttcaggtcattcaaagatcttgaaggcgctttgtctgcgtatgaattcttaggagcaataacagcatttactcttaattttttattgtcacgaaccttaatacaaggaaaataaaatactactttaattaccacatactttcaatgaagatttctaaagttatgatattattcttactggcattcatgggataatcaaaaaattgaacactcactagatatttaatggtactcataaaaaaaactttttagtgtggtgatattaatagctatgtgttttcacagaaagtacatttcttttattattttcactgataaagtctatcgaacagataaggaagcagtaacaccaagactccttttcagaacacagaaggacgggatacttcccaagtcattttatgattccagtataatcctgacaaaaacactacaatatccctcctgaacacatacacaaaaatccttaacaaaatattagtaaacagaatctagcaatatataaacactatacacgacccagtcaagtttatcccaggaatatgagattggttgactctgaatgctacatcagtctaacttactgtattgtcagaatacagtacaaaagccataagattatctcagaattttcagctaactaggaacagaaggaaacttcctcaatgtgataaagggcatctatgataagcatacagcagacatagtacttaattgtggattattaagtgcttcccccctacgcttgggaacaagtagagatatcaaatcttaccacttttttttcagcattgtcctagaagagctagacaatgtagtgaagcacaataaagaggtaaaagattgaaaaagaacaaaaagatctgtcaactacttttctgtttgtaatttatgtatgtggagagactaaaaatactctgttgctcatggaactacctaataggtttaagaaccattaatgattctaattgttctttctgtatttattaggttggtattctactatatgagggaagtgctttttcttctttcatg

SEQ ID NO: 31870 - DNA, 1650 bp, Bovine  19866881421339
  misc_feature (1)..(1): n is a, c, g, or t
nacacattacccgcgccaaagttgctgcaagaccagaattacaggacaatcaactataggaaatgctattgcaaatacaatggcgggcagaatacacatgagagccttgtcaaattcctcttacaaaacttcctcttgcaaacatcctcttataaccgtggtgtgataaccactcgccaaaggacaagggacaagatggagagccccctgttctcattataattaattggttgtaagacagacttgaaacaatcgggatcgtgatgcaattccaacacaggcttcctctgatgaaatcttccctgggctgcaggaaatacctcagtggggaaggatgcatgcaccagtcacacaagatagaccgaaatgacgagtttgtagtttctacaccccatgccaactttttctgctgcattcccattctaaagggaattaacaactgatttccatgaaaaataagcacaaatcttttttaattgcgaacgttttgttttatagacccctgtctgatagggtagaaccaagactttctggttcaggtatcctttcagagaaaactcagctgcctgccaactcttcctgtgctgtgtttctgtgctgctttatttgaggttgcaagtacctggaaaagagaagcagatgtttttctttttttttttaatccgagcgcgccaggcactccccatgctcatcttcttcctgctgctgctgctgctgcccaggctgggcgcgagggtcctcgacggcgcggcggcgccgggggcgacccgcatagtgctgctgctgctgctgctcctcctccacttcggggtgctccaggtcggcctccaccgactcgttcacctccccgcctgccgcctcgtccgtcacctccacctccgctgccccctccaagtggttcatggtgggcgtcggggacggctgggagagaggctgggccggctcactgcgctctcattttgctccacccggctggaaaaacaagaagggggaggggctattacgtggttcagactgtagggagaagccgagtcagatgtttttcaagaatgtttatgaaacttctgtttttaaggtgcacattaacgggacccaaactctcttgcatttgcagctcacttcttgaaattacgtacatgtcctctagaatttgcttgggcaaatctttatccaatgggcattggaaaccccttggtttctgcattgaagccgttcctgttttgtcaatggcaccccactccagtactcttgcctggaaaatcccacagacggaggagcctggtaggctgcagtccgtggggttgccaagagtctgacacgactgagcgacttcactttcacttcctatagccatttaacaatgctgtgatagtttcaggtggacaacaaagggactcagccatatgtatacatgtatccattctcccccaaagtctcctcccatccaggctggcacatgacattgagcagagtttcctaaagcacagatcttttcaaaagcacataacatgatttcactcaggacttaaagccaagcttccaggatcccagggacctctcccagaaactgtttcagatctggtgtttggagcccttggtgaccatcaacactggttgctcttttttttctctcctttctttggaccagca

SEQ ID NO: 31871 - DNA, 1363 bp, Bovine  19866881495764
  misc_feature (1)..(1): n is a, c, g, or t
ntatataaaggattgttaaaatgcataatcctttgcctttctagaatgcagagtttatgagacacattcaggaaatgtttcagtgtgtacatttctagattaaagagagctataattttattagcttcacatttcaaggagttccgtaagtgcagggttcagcaatacatcaggaagtgatgaggtcagcattgctcagatgtcttgaatgccattttggtttcccgtgacaacggggaaattattcttataccctgactaacactgcaaaagtagtcttaaaagattacagagcattaagcctagcaaaaagaaaacaaatgccaggaggcaatctgcagtgtaaacagtacacccacatttgaaaccactagagcagatgttcacttctctggttttcacagggtttgggaagggcatagctttgaaccctgttggccccagtggcagttttagaagaaaagtttaccttagcaactaccaatgcaaaagcaagtgataagtccacagtgaaaggtcatggggtatttggaaagggagctacactttacatagtatttaacaaactatgaaaattttaaaaaaaaggctgcattaccagatagtgtttattttaccaaagaccagttctcagaacatagtttccactacatgaactgccaggtggggaagatatttcttggaaacttgaaagtgtccctcagtttaagataaacaatgcagaggatgatgacatcaggggatggttatgcataggtaactgaattctctcttcagtttccctgggtgtacctggagggaaacaagtactgttcttccatggaatatgcattcattcacaaggaaattttctttttttgacttagaagagaccctaactctctatcttaccagttttgctaataacaccactgagagcacagctgaatatttttgcttatgcattatgcaaggcacttctgtcaaacaaaaggagttatacacatttcagcttcaccagcttcattcaaatcagaataaagtaggagtgcctatgaaaatttcaccatggcacaggtaaataaataaatctgaatttaaacaaacatttatacacatgtatatatgtgtgtgtatagatatatatatattacatttatttgcaaattctcatttcaaattctgcattttatgcctattatacagtataaaagctagtaggaacaagaatgttcaacttgaaaatttatctagagagataaacacattttattttgttgccttacagagaagatataacttttaacggtgtgagcataataatagaaagaggagtttagataaaagtaaaccccataaaatctgtaaaatgacggtctagatt

SEQ ID NO: 31872 - DNA, 1178 bp, Bovine  19866881819666
  misc_feature (1)..(1): n is a, c, g, or t
nactcaacatacactctgccagatagcgatttttacttgaattaccacatctgaaacctggcctaaggactcgtcaacatatcttgggagccctctatattcacaggccaatgggatcacactgcttcctaggttgaccctggaaaagtatatcctccagaactttcctaggataatttcactcttttatccacaaaacacctttcaagcaacttctatagtcaggtactgtaatagattggtagcctgaaaagtctattaacagggtggttggatttacaggccaacaacaatagggtattaacagatctagctactccacagagtatctgctagaagaagagattatactatttgataaaaactgaatttcagataggatctccaatgaaatttcttaaaaaaaatctgattacattaataaaaacatctttgattgctatacagcagtttcataattgacccatagcacaagaggtaacaaaagaaaatttcccattgtaatggttctgtaaaggtaagtctgttttttatgtgaatagaagattttgaggatatttaggatttcctctgggctaggacagagcaaaacaggcctttctgaggaaatgaggaggaccagtgctttctgtcatttttcagtgctaagagaggaagttccctagaggaagaataaatgccaaaaaagcagaggaactctcagctctagaacataatgctatgcctgctacttccttcctctagtgataagctttctgattaagtatgttattggaacttgtccccctttactataatctattttgggactgttctgctcatatttacacatactgggccaaaatctacatgttttagccataagggacttccaagtacgtgaatatttttagattacttattacctacctttggtgtaataaaaaagtactgagatgtgttttctttacaagcagtatttacaaccatttcaaacactcttcgttcattgattgggtccattccctaaaaaaagacaataataatgattagatttattgggtttcactctatcttgtaatagatttaaaagaataagcaatacctgattgatttcatcaactactcggaacggacatctattaagctcctgaagtgccatcaagtataacatagtagaaacacttctttcaccccca

SEQ ID NO: 31873 - DNA, 946 bp, Bovine  19866882030686
  misc_feature (1)..(1): n is a, c, g, or t
nccagggatcgaacccaggtctcctgcattgcaggcggattctttaccacttcacccaccagggaagcccccttcctagtacataatatttcaattttactaaaagatcttttttggggggcgggggagaagctattttttaattaaagcgaaaaagagatttatggaatagaatggaaacgtgaattttaaagctaaaaccaagactttgataatgcttttctggaggcattcggcttaatatggaaacagtgtgataaaagaaagaaccctttcccaagaaatctggataaccagagcttatcttcattttaccagataagaacatatgtatgaagatggctttgtgcaaatatcatttcttattattactgagtattcggtgaaaaaggaaatgatttcactcatattacactgccaattacaggtgaggccggcactggaacccaggtctcctgaggcctgtccatcccactgcttttcattaacgcacagcacctgccacctggtccctgctgccaaggtccccgccttcctccttcccaggcatatctgggctgataccctaagccaggctcaactacactcccggcatcataatccagaggctttcttctcttcccgcaggactgggcagttcccctcaagggctgcacacgcggtcagcgccgctccggtccgaacccgagtggctcactccctagtggcgaaatcgcaggccggcagccagctccagacatatcagcaaccctcttttcttagggggccttgtgtgcctgccaggcagtgcagtacaggcatcattttaggggctggaggagcgggaaagctcggcagtaactcagttaagggaatacccctcaggagccaacgcggcggccgggattttgaggtccggcagcgcggcctgtttctgcgcgcagacattggctgcagctgctgctga

SEQ ID NO: 31874 - DNA, 977 bp, Bovine  19866880352372
  misc_feature (1)..(1): n is a, c, g, or t
natggagctctttcccgttatccaggcctgggcatccctgcatttcttagcgtagtggggctggtcccctgactctcaaccccctcaccaggactctgggacagccccatcatcctcccggagtgccctcctccaacccgtgaacccccagtgagctccccgacatgcccagcctcccagaagaacactggtctcacctgcgggtatgcagagctggccactgggaagacggcaggccggggcatatgaggcatggggtgggcggggtgagctgggtgggtgaggtattgagggctgcagggcaggtggggctgtagagcagtgtaggggtgcaggccaggggaatgaccatgccccagtcctggacctggatataaactggaccccaccgagatgactggcaccaccgtggctgctgtcactgctgccgccgccactgtaaccggctcagtccctgggccccccctgccctcaggcagcccccgcccagcctccccagctgccctgatcccactggcactacagcttgtagccccttcacgggctgtggatgagccacctgctgtttgctcatatagccagaaccactggtgagcaacctcaaacaacacttcggggtatacgcccccacccttagccgcctcttccactgccatgcaggccttctccaacatcaggttatcctgaaagggaggggcaaagagggttaaggatgaagggctttactcagggacagttttagatgacaaatgctgatgtcttcttcagagttggctggttctggggaggcagccaaggtcagagccaatgttcagagtcagtgtcagagcagtgaatgcttcacacagacaatgaacaaatctctgttgaccagcagaagtcaagacccaagttgcagtcccagttctaacctaatgtagctactcccagccaagttcatcatctccctcaggccttccccaaggactccaccccca

SEQ ID NO: 31875 - DNA, 1496 bp, Bovine  19866880428001
  misc_feature (1)..(1): n is a, c, g, or t
ntgggaatacagtgtcagcctctactcttgagtgtgatgaggaaggtctgagcattctgatggctctaagggtaagattcaccctcttcctgggagaaggaacttccccacattgcccttaaaattgtagatcacttttctccatccacacagcagaagactagcaaacaaaagtatcgaaggctttctcctaaaacactatccaggtagaggcagaaagagtccagagaggctttccttttctcaccagtaacaccagagattccccaccagctctaaccattaagaagactgctatcctatcctactagatcttagaggacaacacctggacacggccagtactccacagaagagcagaggctaccaggctctgtcccggtggtgacagaacactgcactcaacccagagctctgtgacactgctgatcactcctggcctcccttcctttcctgcccagctatgaagtaagaatacccctaaaatacttctgggacgtcaagttctatttagagagtcaaaaattacatgtaggctctacacctgcaacatgacaaacaaaagggaaaaataatcaggaaaggctaggcaaacatctcatctaggttgactcacttatctggtagccacaagctccttccccaggaccatataagtatctacttacagggctcgggatggcatcagggtccaggcgcttaggaggcaatggctgaggaggcccaggctgactgccaaaagtggctgctcctgggtagggacttccataattggactgagggccccgggctggtccaaaggaacctgggagacaagggcaaggttgatgaacaaaatattccttccctatctcttcttaaggcctcacggaaatgactaaagtattataaacatagaattgagaggtacagtaataacctttcagagaaagcctatgttatctgaactatgagaaaaaaaaaatcttataaatcccacatctgagtaccacatcttaataccctgaagctgtctatctagttcaccacttagcaagtaatactagaagcaaataacaacaacaacgaaaacacctgaatagctgaagcttttggctcctaggtagtccttgggaaaaactcaccattttgctgcagctgatagcctggctgctgggaggagtgcataggtggtgggtggtcctgggggcccagtcatttgggtaccagggggcagagcttgaggaggaggtgaggacacatggttgggctggctcactgggggccccccaaaactctgtccaggcaagagtggaccagtcatcgaaggcatccgaggaccccctgaggcagggggtgtgaagctggaggcctgtggtgggacagatcgctggggaggctgggcccctggatgaccctggccaaggggaggagcttggccctgaggataggagccatacagaccagaattagggaaacttcctgaggctgaggccagtgatgttggtgagcctgag

SEQ ID NO: 31876 - DNA, 887 bp, Bovine  19866880584141
  misc_feature (1)..(1): n is a, c, g, or t
ntgcttctttgtcttgttctgtctttttctctttctctttcctgggtctcattgaggatggctggacacttgcctgctggtctcttatctgtagggtaccactctgcctggggtgtcagtaggtatcacagaaatccagggattggggaggacaagtgtcacagatacttgggtgggaaaggaagcaggggtcaagatcctagggcaggaacgaaggggattgaagattgggccagaaatgagaatcctgggtaatcttcgactttttcctcatgcacccatgtcagcccctggattgtttgggccaggtccactgttgctcttctctttgaagaagtgaaattctagagatgaggagtaaggagagggactctagtccttagacctttagggacatttgtcctcataccccttctctctgctccctccgcaggcagactgtctgagccatgtccttctccctccaggttgttcctcctcatctgttcccacatatcactctagcttccttctgtgtctgagcccctcccctttgctccttaggcttcaccgtatgttgtcgaccatggggaatctggccctttgcgctgcaatcgttgcaaagcatacatgtgcccctttatgcagttcgttgagggagggagacgcttccagtgctgcttctgcagctgtatcaacgatggtacgttcacagagcctggggctgggggatctggactgcatcttcattattctctctctagttagatagatgaggctctgttgtttaggcgatggggacgtgaagtgcctctggggctgtggggcattacagtgagctcagccaggaccagatgaggaccgaaagcggacccatgagtaacactctgccctactccccacagttc

SEQ ID NO: 31877 - DNA, 2324 bp, Bovine  19866880589958
  misc_feature (1)..(1): n is a, c, g, or t
naagaacttggagagcaaacatgatttttcttacttcctctaagtagtcttagtaaaacaaaaggtgatctttggcatagattcatactttaaaggcattaatattgcatttatatcagttaagcaactatacaaagatgctgagggccttgaaaatcatcagttaaaaggtaatagaggaagcctgagtgtacagtaccaacttaagacaagttttacacattcgatgttaggatctaacacacatttgaggtggggagacattcaggcaagggtcttactcctttactcatccagttctggctttgggaagaaatacagtttcatgtgctggggaatgcttagacagcagtgaaaagtacaggaaaggaaaagctcccttctctcactttgctaataggaaccttacggtgataattaaatattatacctattactcccttgaacagctgtacttgggagggaggggaggttgccagggacttggttggtgttggctgagggaggtaggaatttctgaggactgtttcccattgactcatcccccagggtgccagaattccagtctgcaagtaccacctcccttaggtaggaagcgtccttcagacaggattgcctttgcattaaacactgctgggggcaagcaccaattctcaggactgaatttcaaaaggataaaaaggatcttccaaagttacaaaacaaacatttatctttaaaatcttgtctaggaagggtttgagggaagaatacaaaagccaggacaggagacatgattcggttaaaaataaaatgcagcatttcagctcagaaagaacagtaagagctaagaatgaatgaataaggcctcagcgtagacctctgcaggcagtgacaaagcgtggagtggccccgccaggagggtgggcagagccacgccccggctactctgcctctccagtggcagagagcaccagggcacacagtgtgttctgggggatgctgccttggcgggccaaggcagggtgtgggacggaaaggttccctagcacagacactgctctggggtgaggtaaagacagaaccacatgatacagtgatttcctcctgacaaagtgaaatttggctgtgtactgtgggaaactagaaggattgaactagggaaaggaaggaagtgagttcaggccccacaagctggggctccccagaggccaccttcccctgccgcagtgaagctcacatctgaaaaagacccaggaagcacagccaggagaggcaggcagggtcagcagcaacatggaaagcccaaaatgttggaggcacagtgatttccttaactgacttgcctgggccctgggtcttgggagcctagtggaaaaaatgagggggtggaggcggaaagggagctgtcctctaaggaacaagggcagagcagggtgtcaggctagtgttcactcttggattttgagcttatgtgaagtccatgggctagaaacccagtctgcctattgggatagagtgtgcataagtaaaaccgtgtttgagaatacaggccttatacggagacacatttcagtgtccataacaagagtataaatgttttctaatttgtatgtcaggccaggatggtggctttcaaccccccagcaatcttgggtggctcctgggaccacatcattttcgttctgtgcagcaggggcttgcttctgtgttagccaggttcaaccaggtgtctactggtaccagggagtctttctaacccagcgcagagtaaacccagcatctgttcgaattttgattgaagctgcttctgcttctcgaacagtctccttcacagactgcatgaggttctgggcattgtgaaccagcatctctgtggcctgcaaggaaagaggagctctccattactcagagtccctgatggagccctgcctctgaaacaggcttaagccaggaacggaatgcggtttaccctacctgcgcctggcgtcactggtggtttatagctggatcgccaaaaagaaccccaaactggaccatcgatgattgtggactgcactctcagatggcatctagtgtacactcctttgccgatctttgaacaagcccctgccttgggctccccctctgcctagaatgctcttccctcaggtatcccaatggctcacttctcacctccttcagatctctctgcccagttatcaccttattgaggcttttcctgctcaccttattttaagtcacaaaccaccttcccaactcccagtgtgcctcacccttcgagttctgtcttcatttttctctacagaactcgtcatcgctagctgataaactatatgttttat

SEQ ID NO: 31878 - DNA, 935 bp, Bovine  19866880665770
  misc_feature (1)..(1): n is a, c, g, or t
nctgtttgtgccaattgttgatgctgtaattttatatcttgatttgtatacttactgctcagaaattgtataatttctagcacagtggttccacaacactgtgctatattcaactgccctggctcagatactgaacctgcagttctgcaggtattagatattgtatactagggttttcatgccacctccagagctcacactattaattatatgttttttgtggttgtgtctttctttctctttttagtctagtggcaataccagtgtatgtgaaacatagcatcagtttcaaggagaacagttcttgtggtagatttgatattacaattggaccaaagcagaacatggggaaaactattgaaggaatcacagtgacagttcacatgccaaaagttgtgttgaatatgaacctgacaccaacacaaggcagctatacatttgatccagttaccaaggtacagtcacctaaaatcaggagtgagcaagtgtttctgcaatcctcattttgtgatctggggacatgggaggacagagggaagggtctaatatcttggttgaaattaaagctcttaacaacgtagaatgcagactgtgctgtgctctgccacaggagagaatcctgcatctgctgctaagtcgatgaacagaaaagtgagacattccttcttccttcagagtctgccttttcttatccattgataatccagaggttcactcactcttcaatgaggaagatgtaaaaactttttaaaaagagaaaagcattatgtgcatataataatctattaatggttaatagatattacaacatatcaattgttaagaagttaagacctttctcttcctttttaattttaaagcattatttcatactcttccacagaggatgctcactaggaaagttgccttctcaccctccatacatttgcctctag

SEQ ID NO: 31879 - DNA, 1362 bp, Bovine  19866880708110
  misc_feature (1)..(1): n is a, c, g, or t
nctctgtggctgagacaagaaaacagatggtttagttcctctagagtcaccaaagttgcttggatttgactcccaagacctcccttgtcccccagcttggtccggaggcgctagacctgaggtgggctaacactcccgtgacactctggggtgggagcagtggctggacagatgatcagagattatttggagggacccagagacctagccctggaggcatcctcaaggtggaaggagcccaaagactcgtttgaaaagcatctctccagaaatctttgctgatgctaggtgccctgtcattgtacaatcatacttcacgcagagaaattcagattttctcactttatagggggaaagaaatgtagtgtatgagaaagcagaacaacattcagaaactctgggtccctgtgggcagcctcctgctgccctttccatctgccacctgcatttccttccccttacaacactagattgaagcctgatctgaagaggaacaagaagagaaagaaaacctggtcgaggagacagtatccacagaggaaaggggtggaatttgactctggatacaaaaggcaaccactgacccgggggagcagacacagggctgtgctgttggcctttttgtctgactgatcttagacgtgatcagctgggaataagggcagaactccaaagagcagcaggtgggtccaggtgggagctgtgtcagcagtcccagtcctcaggaaacagcaggctgtctagcaggccaacagcagcaggccactaggctatctccttgcctttcagaatatcacgctgagtggcacagcaagggaggcaggaagaggacggcgaggaaggaaggaggccgatctccagggcaaggagctgtattgatgctccctgcctcttacaatcccctaaccaataaatacactgagtctcactgggagtccgtgtggaaccaggagccactaaggagcagcctgatgcctgtgagctcttcaacatgcagacacacaaatgtccagcgaccatcaatgtgcggggtgccgaggagggcacactggcagcgaggacgtgctttttctcccccagaacacatccaggaagctctctagactgccctacttcttcttgcccggaagcctcttttgtggctccttggaccacacctgaagctgttacttgctatcagtggttgagacgttcccaaatctggggctcggcgtggaacctcaagccaggtaccaggtgctttaagactctgctgaactctgcaggctggagaagggggccccaggaatagacagaatgtgggcctaatctcacaaaagctctgctctcttccatatcccccaaaaaagtgcagagccctcc

SEQ ID NO: 31880 - DNA, 1231 bp, Bovine  19866880971028
  misc_feature (1)..(1): n is a, c, g, or t
nctaaagggaaagggattggtgcccacgaattactgcataaagaagtcacccggcgtttgtgagtgccagaggtgtgagcagaagtagactcctcaggaagcgaggagacagacttgaggggtcagtaagacaagtggacaaaagggccgggcccgcggagctctgggaaggggtggtgggtgaggcaggtttcaaggtgaggggcagaagtatcagaagggagaacaacgtggctcctatttaagaatccctggaaggagaggcagggagtcagtagaggaacccgccagcccagaggccaggctggggaggcctaaaaaggagctgagagcaaagctgtcaacgggaggggcgacacccagcttaaggaaaggggctatcagacaacctaacacctagcatttactgagcgcttactacaggtcataagctgggctaagcactttataaataccacctcactgaatgttcacaagaaacccgcaaggcaggcattattaggattgtccccattttatagatgaggagactgaagctcagagaggcccgagggctcgctcaaggtcagagagcgggggagtcaatattcaaacctgaggcgatctggctcccgagtccacgcgcaaactcacaggcagtgaccgggaaccgtgaggcgagccaggaccccaggaacgtctcccgcccccgatccccatcccaggcccagcgcactcacccgaacgaggttgctgaccgccgcctgcacggcggccacaggcgcggtgaggtcagggatggctttgccgtccacctcgccttcctcgtgcataatcaccaggtgcgagatctgctgcgccaccggctccagaatgctctcaatcgtgcgcgtatgaaacaccggcatcgcggcggcgagcggggcggcgaaccgcgggctacagagaactgagaaccgggggccggggacccgcacagagacggactcggagcagcgactacagagtcggggcttccctcagtgtaaccagcctcaccggcgctccgcccacttcgcgtcgccgcgcccaatggaagcgccgctcagacccaggactccactcctattggtctctctttgatattgctccgcccccgcaaccgcgccgccaagaccccgccccgcccccattcccaaagggaggggcctgggactgggggctgcgccgcaaggattgcgaccggattcccgagccttaacgccgggcgctc

SEQ ID NO: 31881 - DNA, 999 bp, Bovine  19866880999468
  misc_feature (1)..(1): n is a, c, g, or t
ntggggacttttcaggccccactgggctgttttcacagccctcagctagtccccaggtatatggatatgaaggaattagaagctgtggcccctgctcttatgtgatacacagacttttgctcttaattggggactttgcacctttagagtgagattcaaagaggaagggctgtggcatcacaatgtcagggtgaggtcaatgggattgtagcttgggattcccaaggctaggggctgtttataagcagctggggaatgtggattatgacaccaaatcccggtgctgcccttgtttctactcctccgagcgatgcctcagagggccagaagggggaagcaagaggagacgcccacacagagcatctgaactgggtgggctgtgggaagcttttcctgatccacgctgggaccacaggcacagaccttcgaaataactccgaaaagtcgaggatgtcattgagatcagaacttggggagggtccccctagccagagcagggctctgtgtcttttcccgcttagagtgggctgtatgtttagatgtcagcaggatcttagttgaagtccatgctagcgttcatggttttagagacgtcactgaatcagcccgtgtgtttctgcagggctgtggagaacctggctggctctccctgcgctccatcctgctggggcaggagtgtgagtttggagtaggcatcatccctcggggtgctaggggagaggtgtttcgaggtctcctcactgtctgcttcctctgctctgtatctggtcacgcctttgcttccttctcttcaagggtattcagcctttgtggtgccctgaccccagtcttaagctcttgttcagaaggcgggggaggcaagggatcctggtgtccagggcctggccctcacctgagggtgctatcaggacggcctgaagggggatcttgataacggccgcttctgctttctgctcctgttaccacctagctacttgagggggaaatccttgcagaggg

SEQ ID NO: 31882 - DNA, 2477 bp, Bovine  19866881022788
  misc_feature (1)..(1): n is a, c, g, or t
nctgagtttataggacaaccctgcagctggagaagatgctctgcaaacctgacttgttcctgaaacattgctgctgcttgtacggagccctgtgcttcttcccagacacacagtggagaacaggacaggaagtgagggggaaagggatgggagacagcagctgcagaggttggggtgctggccgcctgagtgaggatcctcctgaggagcagggagagcgtggtaggcagaaaccacacggctcattgagcagagtttcaggatggcagggtgccacagcccgtaaggctggggccgaggatgaccagggctcccacagacagtggctttaactgggccgtcctctctcggaggttaccctgctggtagccttcccctgcaggctgaagacaccaatgggccccacccaaatgggaggcctgttatggggccaggtcgagggcttggttagtgttccaagaccccgtgactgcccaggctgatggagagtgggtccaactctctcctgtctctggtgatggccgtgggcacaggcccagcctgggagacctcgtctgtcttactgctggacccttgcaaaggaggctctccctgagtgccaggcactctgcggagcatttacccaaaaacgtcatttaagccacagatacccctgccttcattttagaagtgaggaaactttttcccaagctatgtacctggctcgctctgtcacctccgttccatcacatgtcactctgtgccgaggctgtccttgaccatgcagtttaagtgtgcactctcccactgccctgctttatttttctttattgcacttgccatgacatctaacatgccatccagttcttacggactgtcccctaaccaagctccactagcgtatcagcttgctgagggtggggactgttgtctgttctgttcactgctgcatccccagcatctgaaacagcacctgtcgcatagtaggcctcagtaagtatattctgaatgaataaatgagtctcagatgggtttgggactcacagctctaggactccatctggggctgtctgactcaaaaccagtgggttaatagccagactccatgactgagggtcagaccaaggaccacggcacagcctggggttcaaagaagacttgtgcagaatgtggtactcagctccgtggagttagggtcaaactgcgtgactgtctaggaccctctggaccctgggcagctccttcgaggagctgggcgtgtgactgtctcttctcttcccactctgagtcactgataaagccagagctcccttatttttagtgccgttgctgttgtggaactggaaccattagccagtaagagacttaagggaggagataaacattaatcttctgggccttcccctcagctgccacctccgcatcgcaagatactgctctcctgcacctgcccgggcagcccagcccgagagttgcgggttggagggtgtgaggtgagtggtgagagagagggctggggggtcttcagctttagtggcttgcttggtaccaccatcccacgaccagggctggggaggaaggtggggttgccctgacatcccccagtcagggctggaagaagcaagccccctgtcaccaggcaaggctagtgccgcttcctcaactgcgctgccttctggaggtcccggccccgaggggtcgcaggcagtgtgggactacctggggctttcttggctgcatcccggtcagtcaccataccgaactcaagggtgggagagaaggcctgacccagatctctgggcagctgggatagattagctgggcagcaggaactaatctctgcctgcccctacctccttcttccacagagcagagccatccctagagggaacgtttaggatagagctgagggtgcttggtgagacagtaaatatgagttccttctcgtctgtaatccgtatgttatctcaggcaggcctgggtttgaattcacacttctctcccattcctgctataggaccttgggtgaattatttaacttctctgggcctgttttatcatctgtgaaatgcggacagtcagtgtcctgcctggtaggatggttgtgagggtcatgggaggctttacagaggctctttgctgtttaggtagaggtgggggtgggcacaagccactaccaagggactcaggactcgcttggcaggtatggaagggacagtacccgcctagacctgttggagttggggtgaactggactgtgcccctaaagtctggtgtcttgacttgatgctctcatttttcctgatcctgtcatcatagcacagcgatggagaaagagggctctaggctcagaccacctgcctctggtgcctgtttgtgtgaccttgggcaggttacttgaaacttttaagtctcagtttcctcctttgcaatgtaactgagctaatcagatcctccgtttcactgggtttctgtgaggataaataagatgtctgtgc

SEQ ID NO: 31883 - DNA, 1509 bp, Bovine  19866881177810
  misc_feature (1)..(1): n is a, c, g, or t
naaacgtgcatattgtaagtaaaagttgcaacatcaaatcatatgttaggtgtagaactatctccactgctgccaaaagtgcaaagaagaaaaattaacctttcctaaccattttggcaaatgccatccccacatccccgaccccactcccgcaaagcctcggaggcggggtcttggttcctggtagaggatttgcaaaggtaccagcattcagatccacctaagtactaaaaggaaggtcaaagcgcccttccgcgacctttacgaaaaataccccaaaattctgtctttgcctcagggtaggccagtcgctgggcattctcctcatcatcccccagggaagagcaagtggccgcgattgactcggctcagatcgggtccggtccggtcctcccgggtctcacagccaagcgggggcgggctcccacgtggcgcccgcagcctacccaaagccgtctccgcaccccggccggcgctctgattggtcaagggcggcggagcgtctccggagcctgaggcgactgggccaaactgggtggacagcgggcaaagggtcgcagccaggcgggcaactaccagagctacccgtcccgtgcgttggccccataccgggggtttgaggttaccacccagcgcctcggtcgcgcaaccctacgtggcccctggctagcggcagctcgtcgccctccaccctatgtcaggtagggctcacctcagcgctggaggctcttccaccttcagctttttgggctttggctcctcctctgccgctgccatcttcgcgctcccacctcacttacgctccagggctcgccccaccccttcggctccctctccccgccccctcgccgcatcaccgcctccttgtcactaaaccccgccccctttggctcctcccagtttgtgcctctcccagccctagtcttttggccctacctcttggccttacccattggctagtacacagctcttccagaccccgcgcgctcgactccagggacaccccagactggtttaggctgcagatgagcgcctgagtccaaaagaggtgaaagctctcattcttctagacctggatgattcagaagatgatatcctaaaattcaaaagacgtcttctcattcagcgtcttcccgctcgtttactcttcctaaaactattggttatattgacgctgttagtcaggcaatctactgggcatcccaactgcagggtcctcacggctttctcagctgtctcagcttcggtccggagaggaccccgcgtctaatcactgacaggcccaggagccggggtgagtgttgaggggcggggaaaggggggggtggtctacggacaggggacatcacgaaagctgggaagtagactgactagttagacctccgcttccaaccaggggtgtggaagcgcctccggtgctgtggaccggagccgcgccttcctcccggccttccggtctttcttgccagctaggccgggaagggaacggtacacctacagcccagtgtt

SEQ ID NO: 31884 - DNA, 1776 bp, Bovine  19866881205785
  misc_feature (1)..(1): n is a, c, g, or t
ncttaattttttctccttctccgccgagtggctcctgccacccctgcttcagggaagccaggcgggtgggcagcttgctttcctggctccggggaatacgaatgggagcgccatggaaacccccagagtgcacaggacaccgcagcaaggaacaaaactctttcaaggccagaaacaaagtgcagaccctttgctgatggccgcggaaggcccccggcgaggggcgctggcaggccactcgccccgagcctcacacgccgaagacccagccctcagcccagagacggaaggagaggggaagaaagggagcctgaaacacattccgatgcctcactcccagcgctgagatggcaccacaggaagggagacgctcaggtctctaaactagaacaccccagaattccaagctgcgatcctgcttgggtaaaaaaaggcaccaggcagacgcccagggacagaagtggttccccacacaaaaacagtggatctctgttctcgccaccttctacaaaatgcccaagacatgctctatataagggcacttaccgatgtttggatgtttcaaaagtcggcatatccgggcctcacgttctagtttctggtgatctaaaagtggaagagagaaaacgaaagctatcagacatccattctatttgcggccacttggctattcatatgccttcaattcttaggcacctactatggccctctttattttttttttaaacaatttgctgaattaacatagcaggtcacagcaattctggagacaggtattaatgacaaccttttgccatgaagcagtgtcttaggaaagcttcccaagctagtgagcggcagagccaggatttgaatccaagtcttaaaactctggtgctctttccaccacagcagggattttactgggccagggtgtccagaatttcttccttgttgaaaatactaataataatggctaagttttattgaacacctactacatgaacatatattgtgctaggagttttgcatatattctctaatgcagtcttcatggcaatcctgaaacataaccatgctgacaatggagactgataatttgaaaaaaaaaaaaagctaatgtttattgagtgcttacttctacaccaggcagatacatcttttaatttagtctcaaaacaactcttggaggttggtagtattacgatgcccattttgcagaaatcctgcttcttcccaggacccgcttggctgcccactgctgggagctctggcctattgccatgcatgttctggggtcacgctgctttggtgaaatgaccagaatccaagagcccacaaatctaagcaagatgtggtagttgattccttccagaggaaggcagagctccaggcacagaaagagaggctgctactgcttaaaacaaggtagcctagaagccccagccactctacccccatctctacttgctgaactccacaaaaccacctccttcacaaagtcttccctgttcctcccagtagactgtgacttctctcctcatgacccagctctgtctcccacagcacctcttataattctcacatcacacatttaaatcacgtatctttcggtcacaagctcttcagagtggcacctccctgtgtgatgcttcctagagttccttccacatcagaggcttaataatggtttatcaataacattgacagtactagtaaaaactattctttattaagtatttactatacgctgggcagaggcacagacaatcttatttcatcctcacagaaacccag

SEQ ID NO: 31885 - DNA, 1313 bp, Bovine  19866881218771
  misc_feature (1)..(1): n is a, c, g, or t
nctcccatagggagtgggggcggctgtggaccctggttgcccaccatagctggattgatgatacccctgggtagacgggctgtggctgcccaaatggcggcacaggtggagctgactggttaacattcattatgagagcatccccgacttggtctcacctattagatgggagagaagatagaaattagtcaaaatcaactttctaaagtgaaagcactattcatggtaggaagcagagctagaaaaggactgaccttatcaggcagtgattagcctaatcattctcatactattacaggatctttgtaattttcttccccagacagtagacagactgcctcctcaaagcaaggattttgttactctgaaccctatgctttgtcactgccaagagggtataaatttcaacttcagagaggcccagtggaatggagcagcagcctccattccctagtggtatgatttctagtgtctagtcatacaaggagtcctgccactgatgaactattgtgatattacaggtaaatgaaacaatgttcccactttctgttcattcactctagcatccattcattccacaaaactgaataccctgcagtgtgctagtcatttttaatcattcaaactgcatgtctaaaacagatcaactaaatcccctccccctcaaaaagacaaattttagagtgaccatttagaaaaacgacattcttaggataaactgcagtaaatcaggtgcttactccatcctcagtcttcccaccaaaagagtgtatggaccttagtactgaagcattaaaatcactaaatgtaaaggacagctgaaaactctagcaagataccagattagaactgagtgcaggtttggcacaaaaacctcacacaataacccagagaaacagttcaaagatcaatagcaaagttggatttcatgggaaaagatcattcaccttatccttcaagcagaaggactgtaattattctaaatctcaaggcactcctccaactctgtttctgctctccttataggcttgtcatgaatctaggccacatccaaaattattacaatcttgcccaacaacagaggaatgaattggagggtctttccaggatccttccaagaacaggactatctgatcacatctactctacacaacctgatcattccaactatcctacagaagaaggaacccaggaagcaaaagagctcatagctgctgcagtggaacaacgggcctctcgcctgtgctaggaagggccatcttaactacagaaaagctgagctgcacttgcactagaactttttaaattcaaag

SEQ ID NO: 31886 - DNA, 823 bp, Bovine  19866881246484
  misc_feature (1)..(1): n is a, c, g, or t
nagctgctcctgtcgctgctacagtgtgatatcccagatcagggacatcttgagtccccgcagaggtggcctgcagacgtcatgagccattaataaggtcaccagtgatcccagtttcccgggcactaaggtaactccccaggatgtagaactttgggctctaaaactagaacagtcctggacgcgttggggttggtgggtcactctcgtcacaaagccttggcatgagtgacggagtcagagccacatttggccctgccccagtggtcccgtgagaacaccagcttaagtttgggcctggccagagtgccaggggacatgggaaggcatggcaggccagaccactgtgaatctctgtccggctctttggtttggcctcctgggattgctccctttgccttcagtaagagaccttaggccaggttctcagaaaagtcggaggaatgttgcagctcacagctgagcgagcacacccgaggcaataagggagcaagcaaacctttggtaatcaagaaaagaagagaaagcagaaatatataaggcagcaaagaacagtgccttcagggctgccgggattgagatcaggtcatttcagttctggtgatactggcagagtaagcggctccttcactgctgggctctcgaccctgtagccctggtccctagaacatcttccctgggagcagcgctccttgtacaggctgttggaaggctcctctggaagccgcaaacccaggtctgtgccccttcctggggctttcagctgggaggcctctccgccagcgtggacgtggtcccaggtccacagcaacccgaggcatcg

SEQ ID NO: 31887 - DNA, 2230 bp, Bovine  19866881288117
  misc_feature (1)..(1): n is a, c, g, or t
ntcatgttacaggccccagacgtggcttccaatgcctactgtgaaacagtatcttcccccttagcattaaacatgcagagagacccaacatgtcttcagacccaaggaaattatgcgaccagcattcagtacctccttcccagaactgcagaggaatctgtctgtcccacgagtgtgaaagaaagaagagtttcaggtcacggacaactaaagaggagaaggagagagtgggagtcagcgctgtgggggtgagcagcgcacacagctggccggttgctgggaactgttggctaaggacatagcattgccacttgactggaagcctgggatgaagtcccaggaatagcctggacttctgaagccaggacagtcatagacaggaaggcaagacaagcatttgaggtaggaattatagtttacaaatttcatccgtgaatctctagcatctagaaccgtacctgacgcacacaaggcccatgataaatactgagtgatttaataaaggaatgaacaaatgatttcacacacgactatgacctcattcaaagtgaggcacagtcagggcaggcgttgcctctttttgtacgtggtcaactgagacccaaagaattaactgtcttgcctgaggtcattcgacttggacgtggctgacctgtggctagacactgtactttatacatagtaccaagttgaatattcttggtacagcatcccaggaaaacatcctgtgactctacatgaacttccctttgggtcctgctagtcagaaaatagcccttcagtgggccagcttcctagacacagtctcagggccaatttcggcatccgggtcctccttgcacatttggcctccgcctgcttttttatgagtctctccaggaaacagcgcctctccattagtctcttttgccacatctaacttgaggggtctggactgctgagatgtggaagcaggaggttggtgggtttattctgagagtcaggaacagaatgaaaccacatatattcagttccttattttctcacacttgatagaaacctcagataccctagaccactaagttagtttcaggaattcaggcaagagactaactcataatatagccggggcctcccgggagctcaaagtccatggtccaaggtgtgtttccagaaggaggtctccaaagccagcaagagggctcccctaagcaggaacatcttacatctgatccttctcttcagagtcttctgttctgaatccttctctttggaggcagtgaggtatagagcacaggaccaaggatgagaaaatctggattctagtgcttgctttcccacttatcagttatgtctcttctctccacctcattttcctcatttacagaatgggaaaaacaatttccaactatgtaaggcagctctgagtttaaagaggaatggtttgtatcaaggtgctttttagcaaaagacagaaattatgtcagtactatttttttatggcaaggcaaaaaagaaaagacaaaaaggaggagggaaacttctagggcgccccagaatgctttgttctcacttgttcatggattccttcataataaagcaccaaggtgcatcaggtgctgagggagagaaagatacttaagatgtagtgtctgccctaaaagaattaaaagatgactgtgcaccaaaagatgaacacagatttcagagagcaccccaaaggtcacagagtggaaaagaaattctatcttcacagaagctctaggattgttcaaccaggtgaagaggccacaacaggaaggagggggaagaggagtgtcatggtgcataacggtctccaagtctctttgtccgggaggaaatgaggtcatcctgctctcagaatcagcatgacagcctccagccaagtaatctgaagtcatgagagctgccgggagagtgttgtgaatcacaagagtcagctgggaatttcctgataactaacctacaagtttcggggtaagtcctcaggctgcaacatctctgtttacattttgatcacgtttatttacaattagtgggttctaactccaaacaaagcataccacgatcttctagaggaagtagcaaaactggttcggagggctctagcattctgactcagtacgtgaggctggcagctcagagctgggcacagagaatccctccagaggacgatgggtcaccggcctcacaagctggatagtgagcttgtactttccccaggcagagg

SEQ ID NO: 31888 - DNA, 1011 bp, Bovine  19866881293814
  misc_feature (1)..(1): n is a, c, g, or t
nctatgggaaaatgtttatgatgttataattcattctaaaggataaataaaaaataataagtacactatgattaaaacaaacccctaaatcattattataaggccaaaaccctgaaagaatataaaacaaaatgtgtttattaatgcttgcaaaattttgagtgaatctgtatctgtatgctctgtcttctaattttctgaaatgtgaatataaaatttttatcttttaaaaagtaatattaacatattactctgggttacttaggtgcagttatttcctatcaaatgattttagtaattatctgtcattttatactaaaatctttccaaaaagtaatggttaaaaatttttttttaatttaaaatactgtcacattaaccagattgtgtgtatctttatatgtttttactatactacaaatggtatgtatacttaccctttcttcaaaatcattcctatgtagggctttggatgtcaatttttctttaactatatcatattacaaagtaatataaaagaagcaaacttttatataaggggtagtgaaatttaccctattatcaatataaaactatttaggagtgttaaatcacaaatatgaaccagatttcaatgcagaaatttatgaaatttttaaaacccagaatggaaattttctcaatcctattatttaactttttattgagttttaagaagaaaaactagtttaaaaaatcccaaatgcacagtaaagcagctacaataaataatacaataaataattctcaagaattaccagtcaggcatgagttaatgaatacaagtttttttctctcaagttaatagctcagaaaaaagcaagacacatataccactgtgtaatagccagtgcttttgtagacaatagacagtctgtatcataataaaagcctttcagatcagcagctagttctctagagtttctcagatcaaaacatgacagaatatttccagatgtattgttcaccagagtttccaacaaaacttagcca

SEQ ID NO: 31889 - DNA, 760 bp, Bovine  19866881352129
  misc_feature (1)..(1): n is a, c, g, or t
nccccaacttcccactcaggtctctccagatccccttcccgccagctatcatcattgagcagatgagggttttccactcaccaatatcattgtggtgagcaaggctctccgcactatagtcctcatgcaagatgagcttttccacctcaaactgcatctccccacgtgtgtcggagttaagccgtgactgacccaagtagacaatgtagttctccttctttgggtgatcactgtggggagatcagtcagacaatctgatcttgtgagagcctgtcactctcccctccccaccacaatgacctgagagcatcacctctccccaaggccatgggccatgtagagagaggctgagggatcagaaataaggagaatcttttgctgggaaggaggaagggattcctttgggcagaagggtcagggccaagaaagaaggaacatacatgaagcagtgtgtggcgctgaccacccagcagggactgatgaggctgccaccacacaagtaggtgatggagcctcctcgatgcctcctgtagatggctgcaaaccaaggctggttctcggtgttggtgacctgtcccccaacaatcttaaagcgaggcctcagagccttctggccacattggaactcttctttctccctaggagaggagggactttttcctggagaagaaagaaagggatgtcttgggcagggaggtaggataaagtgttttgctcctggtcctctgaccacccagttttcagggccaggcaggcctcc

SEQ ID NO: 31890 - DNA, 1054 bp, Bovine  19866881365680
  misc_feature (1)..(1): n is a, c, g, or t
ntatttgatgagagggcagctaactttgaaaaccattcaggaaggcttggggccacagcagagaaggcggctgctgttggaactgctaataatcaacagtggaaggcattcaggcctcagtgaagacagcccgagaacttacccccccaggtgagtttcgctccctttttatcatgtaagttcacaccgtagtgagtaaaggaggttaactacagaacagtttctatacatttttgaacacttattattataaaatatcatgaagaaaccccacatttacccttagtgtcaataaaatcatttttatattgtttgaattttttttacaatgatatgattagttttgaaagtagaagaaactagtaaagtaccccccctcccatacagaattagagaaaaatttgataatcttgagaggttagttggttttgattttagagtttatgcctttccatacatctctttgaggctatttaaacatttttagttgttttatacttagttttcttttctctttaattatataaccaagatataccagactgtgaacagaatattggaagagtgggaacaaaagaaaacaaatcggacaggaattaaaattctagtacatgatagacgttctttaaaaaaaatcagttcaatgtcatttagtgtgatgtttgtgcattttttttctttcagttgaattatagaaactttattattttttcacttatttactcagcatatatttcttaaatgcctgtgatacattagaaactgtcttggctttacagatttgtgatactagatgtggtgggagcttgtaagcagagacaggggacatttagcatgtcccttcattgttcagcttttatccatgtggcatgttaaaagttagattctcttgaaaaatcaaacatgtccgtaaaacatgagtgtatctaactttcgtgaaaaagttccataaaacatgaagaataaaatatagaatttctgtataaaaccgagattcctaaaacacagaaacacagcagtaggcttaacacaccaactgtaaaaagaaccagga

SEQ ID NO: 31891 - DNA, 1397 bp, Bovine  19866881382713
  misc_feature (1)..(1): n is a, c, g, or t
ncccttggtcttaatatggatgaagaaataagctctctttccctatagtagaaggttaagatcggttttaaagctgcgcactttgaaagctgcaggtactatgcttccatctcagcgctcaggacaacagcagtaaatccagatggtggtttgacttactctattcttctgagacctggacggtgccaataaaaacagctttggtggaaacttttcctggaaagaatttttcaccagcttaagacgacaagtaggaatctggcccttcaaataaagaaactacgaagtcacttattcaacagcagcttttttagggtatattgtaagagtaaagtagcaaagatccatgcgaactatactttctttaggataaataggtgaagataactgtcagctctctcaaacataatgtctgctgtacgtaatttattagaatacatttggcttctaactaaacaagaaacatatccttcaactcattctcttaaattttaagttcaaacagcacatttgctgtccagtccaatatgataaccattagctccgtgtagttatttaaatttgattaaaattaaaacttcagtacatcagttgcattagccacatttcaagtgttcacatgtgaccagtggctgctatatgagacagcagaggtagagaacatggccatcagtacaggaaatattactggacactactgcagtagagtgtgttcatgataattagcttctgggaggcaagtaagaacaggagctcaagattcaactggatgtgggtttgaatcctagctctgatacttactgtatgaccttagataattatcataattatcatttccagacattcttgtctaatctgaaaaatggggataagtatttatagcgttgattatgaggattaaagaagataatgtaagtaaagtgcctaggatagtgcctggcccacagtaagtattcagttttagatattattaattcattcatctttaatgagtaaaacactttgaagctgaaaattagttattgtgaaagatgctatattccatagatggctcgcctgaagtcctcaaacctgggtctcattgcgttcattacaaaagttccactttaatccgtactttatatttcaggtgaaaattttattccacaaaaggtatataaatcgcagatcttatttctggatagccctgttcctttttttttttttaacatgtcagagagcagaggtaatagttaaaaatcagtaggttctgaatagtaagtctctgtatcccagtggtgctattttaacactcaaatggaaactgacacaaagcaaacttactaaacaagatatctgactagataaagtggaaaaatttagcaggttccagatatttatctggaaatggctaccca

SEQ ID NO: 31892 - DNA, 792 bp, Bovine  19866881395626
  misc_feature (1)..(1): n is a, c, g, or t
nagcagctgccagtctgggctactggggaactgagtggggatgatctgtccagccaagactcattaccccttggtgaggggcccccatagccacaggcctgtgtccccgtatagggccctatgggggtcagactcagggggagaaggtggtcatctcgagtgagacccgctgccacagctccttggtctgtttgctgcgcttgagattctgcaggatgtcgttgaactgcatcatacccatgggtgtcaggcagaaggcgctgcgagcgctgcggatggcattcacaaagtcgtcgtagtcggcaggggtcaggtgaatcaggcggtggtggatgtactggacgaggtgaggaggatcagccactgagcacaggatcaggcccctccccctgcctgcccaagtgtttcaccctgctccgtactgcccaggtggtcacctgcatgtatgcctgctggcagcgctgcaccagctggtggaaggccggggcacgcaggtggttgtgggcgtgagcagggctcagccgctgcagcgtctccatgacgatctcctgcagcacaaacgggctcagcacccccttggctgcccccacacagaactggtgcacgtagttcactcctggggggcaggggaggggcatgagacgggggtggccacctctgccctagggacccagctttactctctcagctctggcctggcagagagcctccctccaccccaggagctgaggtcaccccccgccccccgcgcacgcacacatacccgaccaaggcctcaactctgagcaagag

SEQ ID NO: 31893 - DNA, 1752 bp, Bovine  19866881459192
  misc_feature (1)..(1): n is a, c, g, or t
nacttaggctgctagaagctcgcagagcaaaatttaatttatttattctcttcacatttgtgctggggcctccctttctctgggacaatgaaggtcaaaaagtgaaaagtcacttagtcgtgtgggactctgcgaccccatggactatacggtccatggaattctccagaccagaatactggagtgggtagccattcccttctctaggggatcttcccaacccagggagagaaactaggtctcccacgttgcaggtggattccttcccagctgagccaccagcgaagcccatgaaggccaaggtctactttaaaagaggctgttcagaacactgggtaaataaggcaatttatctctctctcttttagatttatctcattttataaatagttgcattagcataaggtaaccatttggtcaatgctacccacagacactggaccgggccattaacaataaagaaccttccaaactctggaagagcaactgaggtgaagtttttcgtttattgctctcattgtatactatgaaactcattctgctggaactcagataaaagtaggtaaacagatggtaccttgggaaccagagtcctaattccagtcataagcaaacattgtgaggacaatttcaaaacttgggggcaatctacctgcatcgaagggccaacactgcaggtctgcactgggccaccaacgaagttgtcagaaggcaagacacgcgggcaaggacacgcccggtgcacgtcacacttccccaggcctcaggccattcggggggtggggggaagacagctacattttcctaagaaatccactagactcatcagcaagcttcaaatcctggaatctgggcgagagtcacctcagctatgcggctactcaaaggtctccgccacgtgcctcagcccccaaaacttctgaggaaggcataaacgaccaaatgaaaagtgcagaaagcctccacatgagggggactggtggcaccgggaggctccagaacacccaagagaaggggcgggcggcagttctcagcagccgagaggctaatgcctacctagcgcgcaattcaggctgccgcccagattaattacctgatggccgtcatagcttcaccttccagccccaagcgacagcgctcgcgtccgatgctctgcgttcgcacgggtggcagcagcaggtaccacagccacggcttctgggctcaagcactccgcgacccgggagcgcgtcctcacacaccccgcgcgcgggcggcccccgcctagccggtcgctcacgctgattggccgcgcccggaaggggcgggcgctccgccccgggctggcggcccaaggacctagccagggcgccgccggccacggcaagccgcctgtgcgtctcgtgccggcatgcgggctagcgggctggctagcgggctcggtggccatcttgagtcctggtaactgcctatccccactcccggcttacggtgcacgaggttgggtgcccgcctcaaaaatggccgccccgaaaggcaaccggtttatcagtcacatggcgcggtctacctcggccagcccaggtcactctaacagggcttgggacgggggcgatgtcagggcagtcttcggagagggggtttaacagcctaaaaacccatctgcagaaaaaccgcaaccgcctggcaacctcagtccggggagagtggatcgcgtggcaatagcagcacgatgtgttaaattagaactcgcagccttctaagagtcaagtg

SEQ ID NO: 31894 - DNA, 1252 bp, Bovine  19866881903988
  misc_feature (1)..(1): n is a, c, g, or t
nccgccaagaaaagaaagaagagcatcccggggcaggaggtgggtgggttgcagccgaaccttatccggctcgtaggggtcacgcagggtcacgcacggcgcccgagagcctgccgggagctccgtgcgcaatggcgacgccaagcctccggggtcggctagcacggcttgggaatccgcggaagcctatactgaagcccaataagcctctcatcctagctaaccatgtcggggaacggcgccgggagaagggcggtgagtcctcagccttggaggccccagagcggaagctggaatagtgacgaaggctactgggtgggagggtcggaaagtaagggtttctttgtgactgaggatcctcccgttctgctcctccagaggcgacctgtatcacggagatgtcgataatgatggcttgctggaagcagaatgaattccgcgacgaagcgtgcaaaaaagagatccgcgacttcttcgattgtgcttcgagggctgaggtgacaggaggcttctggggtgcccttttgagaggaaaatagggggcatacagtagtggttctttctgctcttgcttcattctgaaagggagaggagatttttggaagctacttgatcacgccagagtgggaaaggttactgttttgaaatcgctgtgatgctgagagatttgtttcattgctttcagctttaccgggtgcaaaatgaggttaataattaatattcgttttatagaatttttttttatcaagtgaagacatgcatgggaaagccactttttaaagtttaaattgcttttcaaatagacattattgtttaaactagagacagtaaaggacagattgtttagtttccagactaaattgccgactgggaattgtatactaaattgtataatttagattttacaatcattcgtggatcccaagtcctatgaatgaaagggaactgggaagatgacacagatctccaggctgtaacaccttagcgtaatttgggttgtgtgagaactattagcttaggtcagggccaacttcagagctgtcattttaatttttgttctgtgttttcaggcagcccgaaaaatgagatcaatccaggaggatctgggagagttggggagtttacctcccaggaagttgaataagctgttacagaggtttcctaacaagcctcacctcagctgaaaatggaggagcattttcaatgactggacttagcttctgagaattaaacagaggcattttagagatat

SEQ ID NO: 31895 - DNA, 1692 bp, Bovine  19866881922288
  misc_feature (1)..(1): n is a, c, g, or t
ncctgagttcaattcctggctggggaactgaggaccccacaagccaggggcagccagaaaaaaagagagagagagagattcaatatctacattacagatctattaattatttagagaggatgctttacaagtcatttcattcatgacggaatggatggttttaaatgactagtgaatagaaggcaatacatctgatagttaacagccaagcagtgcccttaaaccgtagggtgaggtttcaaccacagagactgcagaaaaagatccttggaaccataaacagctggagataataagcagcttgtggtaagcatatggatgagatgaaagtaggctctaacaatttaatagtacttaacacctccaaactctattaggctttatacattcattcaaatattaatctaaaactgaataaatattagattagaaaatccataaagcctagctcaataacctatttgggtcttatctttatacaagtcaactttgcttcccaattcttattagcatcatcatttcatctgcttaattaagtattctgttggcataaatggaaatctgcccaatgggaactagaagaaaagagcttttttgcaaaataattacctttctgattcagggaaagggtgaaccaataatctggcaaagaatgcccagttcactttggtttattcctctgtgatgagaggtaattaattcatgcccttcatcctttagaggaccagaaatgcttcaattagtcaaaactatcagagagtggcatatgccctaaatgttgcagtagttatctcagaattatgagattatggaataaattctttttttttttcctccccattttccttctgcctggtttaagtttttttatgtatctatcagaaaagtaaaaccagagggttacctggggaggcattgggatcacggagccaacctttagcctggttcagtttggagtctatggaggccaatgctctcttcatggcttcagtgtccttttgaagaaaagtatcaattattttctttgcaaaaactgagataccatgatacaaagtaagacagagaagaagttacaccattaacatacaatagctacagtagtcctacaacagccttaaaaatattctcatcacaccataacgcttatttctgtcaaaatgcaacatctggcatgcaaatcttcagttaattctattttctggtctccctattactaaactatgaaaactggtaaaactgctcacgtcaaagcagtttaatattatcagcaggaaaaagcccttttgtcacatgcctcattatcagcctttctactagtcaacgttcatacactgcagccctgccaaagccttcctggcttcagagaagcctcattaggatgtggtgccacaaatcacagtttctcttacatcttgttttgaaatatacacattggatgatatttcaccatgtttaattaacccgaggaacctgaaattactggttagaagaaaactgaaaattttaatctagcaatttagttttaattccacaaataaaccactgaatgtatcacaggaaagaaatacattcagccttctctgccactcctcatccgtagttccctcaccacccctaacctggaagaagaggcaggacagaataagggggtctcagtctattgtttacaatcaggattcatagtgactagca

SEQ ID NO: 31896 - DNA, 922 bp, Bovine  19866882150089
  misc_feature (1)..(1): n is a, c, g, or t
naggatggcccctggaaaaagaagagggtcctgtgaattccatcaggctctccagaagcacgctctgttctcaggcagagtgcaacagctggcaaggggccctccttgggtaccatgttcatagctcagctccagccatgagagattgtcccagtcggccgattaatgggggtgatgactaaggaagattcactctctctctcctgttgtgatggggcagggggcgcactgccaaaagatacgatttcaggacgctggcagcctggcccaggaggcacaactcaccttcagttttctccgggcattgaacttgcgtaggcactccactgtctcttgacgatgcatcatagatgccaccgtggaccgttgctggaagccaaacagacaggcctgtgagcccccaggcacatcctctgcccctcaccatagtcccagcaccggtggccttgtgctcagccaccctagttgctccaaagataagatgaggtcatagatgtgaaaatgcttttacaataaaagctctacccaaaactcaaggttatgtaaggacaataatttgaacatgaaaacaccgctggtaattgacgctggatgagggtgcccgagagagcgttccgatcttccttaggggatggaggcgatggaaagtgcgagtattttgtgtgttgtgatccgcgagcagttattccttcacctactatttagcgagcacctaaagcactccaggttctgggcagtgagaaaacaggaaggggtcttgctctctacagagagcattcattctttccaaaagctcctctcagcaggcccctgctgctactgctgctgctgctaagtcgcttcagtcgtgtccaactctgtgcgaccccatagacggcagcccaccaggctcccccgtcccgggattctccaggcaagaaca

SEQ ID NO: 31897 - DNA, 1622 bp, Bovine  19866880210070
  misc_feature (1)..(1): n is a, c, g, or t
natggcatcactgactcgatggacttgagtctgagtgaactcccgggagttggtgatggacagggaggcctggcgtgctgcgattcatggggttgcaaagagtcggacacgactgagcgaactgaactgaactgaatctcctatgcggagaaggcaatggcaacccactccagtactgttgcctggaaaatcccatggaaggaggagcctggtaggctgcagtctgtggggtcgctgagtcggacacgactgagcgactgcactttcacttttcactttcatgcattggagaaggaaatggcaacccactctggtgttctttcctggagaatcccagggacgggggagcctggtgggctgccgtctatggggtcgcacagagtcagacacgactgaagcgacttagcagcagcagcaatctcctatagctttaagaagcattattaacaaatcgaagtcattaaatcagtagctgactttttatcattacatttgcttagtctctttttctctctacccatcactttatcttttcattttcactgtctttgtcacagcagtgttctgatggcttaccttagtaacaacagcgcttgaaaaaaatagcatctagatgtgaataacaatatccagcatactcaatgatccagattaccatcaatgccatgtggagaggtcacctatgccctgagtctagtgaccaagtgccagcagctctgtttataatcatggttactactcacaatactgcatttgacacgtagataatgcattttaaaaagatagtgatatgttgcccagtcgatttagtaggcaatgtttatacttttaaccaccaaccatagttactttggataaaatatcattagtattataaattttccttttcataaaaaagtccattctacaccagtaagaccacaacccccaccattcccctggcaatgctgagatgtacggggatttaaacagatggagtgtgttatgggaatgcccttatttatgacctaaaggcatccttctttcccttgggatcaaaggtgaagttattttccatgctaactctgtcctgaggcagagtctatcaactctgccacatttctgctgaattatatgatggttttgaaatgtgagttgatgttcccttgagatggtgctttaatcaggttcattacaataaaaaaatgaaacctagactaacaaaataaagtgacagtattttataggccataggagggaagatgcactgaataatacttaacagatccttaagataaatttacagtgaatgcaattagcctcatccctcctcaaaataggctgttgccactctcttaagagaattggacgtagtgtgcttcacatgcttcagtgctttgtgtacttcacgtttaataatatattagtcatgctgagcttcagtgttttagatattttgatcctttggcatctctgcaatcataaggcatcagcaatcacatgaataacagttatttcatttttgtcatacagaagtaacagaaaacttttctcagtaacttaaagagtaatggggagaatttttcctgtaacatttatttttcatgacacatactaagtttaactttttgcattattagcca

SEQ ID NO: 31898 - DNA, 1673 bp, Bovine  19866880376713
  misc_feature (1)..(1): n is a, c, g, or t
nttctgaggaagccatttgaaaatatttgccaattatctagttttatctgaaaaaaaaaaagtcacacaatgagggaaaagaaaatctaccttttgtcattatttacttagtaaaagattcattctatctttcctctaaaatgtcatggcctaatattactctgtgacacaaagtcagaccctcatcacacacactgtcattgacttcgtctctttatgctgtatcaggaaatccaggtgataaataattgacagttgcaatgactgaaaatgatttcaactctttaactctctgatttatttttttgttgttgtttatttattatactttataatctgatctcattgttgaaaacatgacagaaatgagctgaaaagcacacatcaacatgaaaaaatgggagagaagagaggttcagagataggaagatagggagggagagagagaggaaagaagagaatctggacctagtaggcaaagtctgtggtcaaatgttttggaagttttttttttttttttccttgctctgcctggatattgctcttccatttgtttgttcataaattcctaattgagcacatagtataaatatatataataacaagttggaattttaacataacggtaatttcaatgcaaaatctgtgttctgttttctttcatagcagaaaaacataatcccctttcttcccccttaccacacactcacatgaaattgaaatcttccacctgtattctagctgaataaatgaatatatttgtttcatccattctgttctttctacattcttcttccccataccgtagataggactagcttttaaattgctaaatgcttttacagtttaaaaatatggcttacatttgtacctcataaagaagtagggaaggaaatgttttatattatgactttaggtggtcaaaaatatttatcactgcagtaaggaaatagctgctgttaacgctgtcttttagatgcttttatggactcatataaaaaattattcatgtcaagattaaaactagtgtttggtagcaatgtggaaagtggccatcagcccagttaatgtgcaattctggtcattcccataagaatcagcaagggcatatcatcatgcgattactaaaaaaatgaacagcactgttcacaagagcttggcaattaattaaatgatatgcttgttcatcttgcaggtcaagcagataattgttctgagaattgctttgaaatcatgcatggttcaacttagctcttttgaatcccaggagagatttgcaggtcacactgcctatcacacttcttgtggatgagagactaatactagctaatcctgttagcatacacaatgggataagagatagccaaagattcacattacttggtacaagttaacacgcccattaaagagacgttgcatgctttcatctacttttttggtaggccagtataatataataataatcatattagatttcacttggcatatattttatgaatctttatggtgccatcatcttcatttgaactttatgtaactttttatctttataactttgtatacccaattatcattgcatagattaagaactagcactttctttcccccaaatagcaagcaattaaaaaataagtaaatattgggttggtccttaatgctaaaaccgtaagcat

SEQ ID NO: 31899 - DNA, 2300 bp, Bovine  19866880392506
  misc_feature (1)..(1): n is a, c, g, or t
ngaattggctgaggatacactctggtatctgaaaacactatgaaaaccgtgagagtcagccttcttagaaacactatctcctaggggctatcttctgtcctcattcctgggggccacttccattctggcttcagtcattcttcactctaactatagtctcagtgttttagttctgcccctcagttttcaaacatacttgaatttggattgcatcagaatttcctgtcctcagaatcatttacagcttctctattggctccttctgtgcttcacttctcctctcttgattaaagtccaaggtccatctacaactctaacttcccttttcccagatttcttgatatccctacccacttgcttggcaaagctataagaggatatcagtccagatcttggcttcacacctgcacacgcacactgcattcatggtcaacaaccttaacttagccctgaacgaggacaagcggatgaagttctgtgtcagttcctactcctgcttctcatggttaaacattcacctgctctctgctgctcaatgtgaagttttggttccttcaatgctttgctcagtcaccagaggaactttataaacaaatggaagccatcacaggaaagtgccacaacttccttcactgagtctatccacttgggtctttagttctacttaaattatacttcccattgggattcaaattacaccgtcccattgggctatggggaagacagcagtctcctttagactcgacacccccttctctgatttcactcttctacttcactatgaaatttcttaaaagaagtgctttctccagttcacctctgaattgcctcccaactactccttctggtcttgaaattcaccactccactataggtcctcatgaaaatctccaagagttccgtgttgaaagactcttagttgttctcttggaagatttcacaatgttgcatttgccccacttactcatctcctctcttttcttggctgtcttggactctgctgctgctgctaacacgactctgctgttgcgtcagtcatgtctgactctgggactccatagatggcagcccgccaggctccaccattcctgggattctccaagcaagaacactggagtgggttgccatttccttctccaatgcatgaaagtgaaaagtgaaaatgaagtctgctccctaccacatggctagcactcagaaggggcacagcaaaggatacataatggccactgatacatatgcagtgcatgacttaacaattaatatatgaatgagagatcctgggtcagagtcaccattgcttgggcagttttcaggcttcccaatggtcacttcagtcaagaaacaggtggagtcttgaattccttctaaggcagttcatttcatattaaattcctgagaagaggctaaaaccacattagtctcttaagcactctatatttaggatatcctagaaacagagggaagcccttgcgtttatattatgcagctttcaaagctgttgcacttggtcagaaataggaaactgaaaatggtgagacatctctatgaaggctcaaatcacactattttgcaaagtttaaaatttgtttgtcattatccataaattacagctatatgttataattatttaatctacatttcttgttaaacatctaaattatgtcacttcaccaatttacaggaattatgtgattaggtataattatcctaaatagctgaacacaattaaaaaatcttacatgcaggaagtgtcatatataatatgttcatttttctatgttaattttttttctcttgtctcactgtccttggtctctatcaaaatgagataaaggctggttcactttgaatggggtaagggaatttcaagctttcggtgacttcctactcagaggtcaaacacagcatttctgtccttctagtaagcacatgttcagactacttgtacagttagagttcatgaatcttataaccagtagtatcaactgtgatgatgctgtggttttatttactgcttgaaggttctatgcaagacttaagagttggaggtttatcttttgatttctctgcttcggtgacttgccagactgctgtctatatctgtttccttgtgagacagccgtgcgcacgagtaagctcagtgaagcagagacctggttcagattcattatttactagaatgtgtgaccttggatagtcttataacctcttgataactttgttctccatctacagaatatggacatggtaatggacaatagatgtggataataatagcacctcttagtgtagatctg

SEQ ID NO: 31900 - DNA, 1715 bp, Bovine  19866880406929
  misc_feature (1)..(1): n is a, c, g, or t
naggcgtctggagagtgtaacctgacgcatggaaaggaccgcgcggcccctttaagtgttctcgggccgggaaagagagggaggaaactgggagccgcggggaaggtgggggaaacccacaaacgaccgagccagagaaggggcagcgtgagagcagaaacttcagacgctgctgatcccgacggagctcgggtgagccgcagcggccgtcactcccacccgcagcggcacgctcctcgcccctctccgctaccccggggaggtccgggagctgcctccctgccgctaccacaagcctgggctgcgggcagccgccgcttggaactttgggctccagcgtcccagccgcggagagtttggggtgctttgcgcacacgccccaacggcgaggggtctgagggatggtgagcgcagctctgggctgggagcgcccgggaggcgtgagtgtgtccgcggaccggctgcagtccttagtgccctccgcatcccccaagtgatgggaacaagggcccgcccagggaaccgctgtcgccgcaccgcccccttgctcgcccccagcgcgcggagtcacccaggcacacccccggcaccctgtgcctgctctccagaagtgctgccgctgcctttgccgccggcgcgggtggccagctgttgactgggctcgccgatagacggagaagcacttttcggctcgccctaatccgttctcacaccccaactttgccgccgcgccggccctcgccgcggcgctcgggcgcacagtgtgggggcgcacgccgggaggcttggagagatcgaggaggaaggaaaccgcacaactgctcttctgcttcggctctttgttgttcgctttggatggtccttggaagtggccgagccgcctcggaaaccctggcgccagagaaggcaaaccttggaatccttagtctgcaaagggctctgagatattgacaagcgtccggaaaggtggaccagtaattgccctgaaaactcctggcggattgacccacgttgcttatattaagcctttgtgtgtagtgtgtgtggtgtgtggcttcataaatttggggacctcatttttactccctcctcttggcatgagactgtatgcaggatccacccgaggacaatgatcgcggagcctgctcacttttacctctttggattaatatgtctctgttcaggtaaccccgcgtcgtctttcttcacccttcattccccccttgcacgcctcctctccactttcccgaatcaaccccgaacggaattttggcgacctctgcttccttccaaggccggaggggcccgacccctggcaggagttttagacgaaagggttcttagatggtactttgtgctgtccttattcccccatcccccaggaccctccaagccttttcgcagacctaggccttttgccaagttcgaggcacgcccagatctctccgggcaaacgcacgtctgagcgcggggtggaagaggcagcgggtggcggtgagcctgggccctgaggatgagccaaagtcagtccgttggctcggccgcgtccctggggaagggagctgtgcgcccagggagcggcagcccagaaacccgtcaggattcctgaacctggtcgtgctattcgcccctcctcttccgagcaaacgggttattagtagttgttttatgtaaccaaagtctgtaattaaattcgatgctaagaaacttcagga

SEQ ID NO: 31901 - DNA, 1151 bp, Bovine  19866880456188
  misc_feature (1)..(1): n is a, c, g, or t
nttcactcaaacccatgtccatcaagtcggtgatgccatccagctatctcatcctctgtcatccccttctcctcctgcccccaatccctcccagcatcagagtcttctcaatgagtcaactcttcacatgaggtggccaaagtattggagtttcagcttcagcatcagtccttccaatgaacacccaggactgatctcctttaggatggactggttggatcttcttgcagtccaagggactctcaagagtcttctccaacaccacagttcagaagcatcaattcttcggcgctcagctttcttcacagtccaactctcacgtccatacatgaccactggaaaaaccatagccttgatcttgcatactttgacttaaaaggaaatcttggaaggcatttaacttatatataatgatctgtataatagaaaactcttttaaaattgctaataggtaattctttttctctccagcagcccactgagaactcccctttcttaaaatgaactatatgttcactttagcaacaactctttcaactgtccttgatgactgctgttaaagagtcctcctaagagttgcttctctattctatttcttaggatatagattttgtgtaaggagaaaacagctgaaataccaaggcctactgaaagatcccagcatctaaatactagtctcatcatctgtgtactttttcaactaagagttgattacaatgaattgagaatagagggaatataataacagaaattagatgttgttatagggaaacagatattgtatatcaagaaagaccagttattgatacaaaaacataaggacatgaaatgagactgtgataaaacttggttcagcagccatatgttgaagataaaatgtggggaagtaccaaccttattagaatcatgccctcagcttaactttcagtagcatctggcctagaaacattaggtccctccttatagcccaagttgtagtcagtgttaccaaattatttcacaagaaatttgtttaattacttagcagcacctataactctgctctccatcctgcatatgagacttttgaaaatctgatcatgccacaactttcaaaacttatgtcccaaattctttgctagaacaagtttatcttaaccaaatgagtctga

SEQ ID NO: 31902 - DNA, 2543 bp, Bovine  19866880458743
  misc_feature (1)..(1): n is a, c, g, or t
ntgtgtcacaaaggtcaataacttgaagctgtagcaaatgaagagaaagtagattccttgatcgtatacattccagtgtaactttgttgcctcaagttcccttagtctcaaatctggggaccaggagaaagcactcagctgttccatggatgcttaaggaaacagctgaactcagctgtcacacacacatgaatagaaaagcaatttcccaggtaatcctttctcaaatcattccatattgaaaggttaaaattccatggtagcagaatttgaaaataattaaagaaatgacaaccttgattccattttgataaagatgatagaaattaagtgtgaacagggattataaaacagtgtgtaatctgagaggatgcacaagatcaatgtctataacttcaggtttggtaaatccaacattcatcctggcttttgccacagagaaatgactctaaattattccagcacaatgattttaactgtctcatctgtaacaatttccagtataatattttggttctaataaatctatttataaatttgaaggacactgagaaatagggagtctataaaattttatttttctcattttatggtgcagatgtgagccaacaaatttggccatgtagcttatttctgtcagttgactactattttccgattgactttgattttaaattagatatttaaactcataaaaatttagcccaagggtatagtaaaaacacacctaagaatataatgtctttgtaagcttgctattttgaaaagagacaagttcaagactttactgttcactaatcctccttagaaacgacctattatttgtcatttgaaattgttcttaggttacagaagtgttaaattttttgtgtgtgctagagctcagttagttttggacagtgtgataaagcagaacagcgtgcccaaagaaatgtggtaatgaatatattactgctctaactggttcaaaatccctgccaaagtagccacattctcttctatgaatctgtttaacactctcaccactaagattctcacactatatgtcagtttgatatgtttaaataatgtaataaaatgctgagcaggctcaaaagtagtacagtcttgattcatctctcattttcaccatgaagaaagaaattcacaaaattgctagcattaaaatttctagctttgttacatttactaatcacagtgaaatagaaacagagggcagaaatggggttttttgtgatgtaggcctgtacagttgagaaatggattcagggagaatgagtgataatttgaagacattttgaagacaataatctgaagcatttaatggctaaatatcatagagtagcactgtgacctgaacaaaacttatgggcaagaaggtcatgagttctgccagaaatttcatcagtcactgccaaggaaatttctttcttaataaatgaagccatcatgaaaataatcatcaaaataatttcctcatgaaatgtaatgcaaatttagagtaaatgatggtctgtccaaccccaaatttaattttagggagaacagttaagaagtctccaatatgtttcaaaatcattatatacagagttagagtagacagatatgcctagaaacagacatgctgctgctgctgctgctgctaagtggcttcagtcgtgtccgactctgtgcaaccccatagacggcagcccagcaggctccctcatccctggaattcttcaggcaagaacactgaagtgggttgccatttccttctccaatgcataaaagtgaaaatgaaagtgaagtctctcagtcgtgtccaactattagcatccccatggactgcagcccaccaggctcctctgtccatgggattttccaggcaagagtactggagtggggtgccattgccttctcccagaaacagacataccaagatcctaatccaatctttcaacctacatgtatgttgtgagaactgacataatctctctaggtctctgtttttatttgttaagtggggataacatttccccccccaaaaaattgtgaagatttaccacactgatcataaagtttgggtacacagatgttcaaatattgattcctattccagtgttgtaatgattattaatattggtattgtgattattgggctttcctgatggctcactggtaaagaatctgcctgccaaagcaggagacacagttttgatccctggttcatgaagatccccttggagaaggaaactggcaacccactccaggattctgggaaatcccatgaacagagaagcctggcaggctatagtccatggggttacaaaagagtcagacacagcgtagtgactaaaaacaacaacagttgggattattaaatttttattcccctgaaaattccttttttactgtttactgcacatacttctctggaatctcaccaaaaggaggaaagctctttcctgagagcacattacttgcttggtatagagcccagatcaccgtatgcagtaagaaatgtaacagtgacagtgaagaaatgctgatatatgtctatt

SEQ ID NO: 31903 - DNA, 1277 bp, Bovine  19866880468399
  misc_feature (1)..(1): n is a, c, g, or t
ntagataaatgactctttgtgcgtactaagtcgcttcagtcatgtctgactctttgtgaccctacagggtctaggccaccaggctcctctgtccatgggattcttctggacaagaacactgtagtgggttgccatgccctcctctggcggaatcttcctgactcaggtattgaacctgaatctcttgaggctccctcaatgcaggcagattctttactgctgaaccactggggaagccctagataaatgattacttaactgtaattcttcaatttcccctttcactagaatttaatagctattgatagtttatctgactgtacatgcttgaagtatttattgaacctacctgtgccaactattaatacctttccaagtctagggaaacaaccatgaacaagatcagtaactgctttcatggaccttttcagactctgtaagagtagtaaaggataatttgagatagtattaactgtggcaaaaatttaaatgtagagaataatgtcaggaattgatggctagggaaatactattttggggcaaggaggttagcaaaaagttttctgaaggactgagatgtgagctaagttataagatgtaacaggaatgaggaccctgtcaatattcaggactacagatctccatacaaggggaacagcgagggcaatggctctttggttgacatgaacttgatgtgtgtgtgaactctaaagaaggctggagcttgatgaacaaggagatggtgggtttaaaatgagaccaaagttatagttacactcgaatagaagtcaggaaaaactcattctcctatccctaggactctaaattctagacgaaataaatcttatataaagcccattatagtagaaagaaattcaattcttacctctgcaatttcataactgggtgtttgggaaatttattgaatcccacattctatgtattttctcactttaaaattgaaattatgcatgcctaatgttaaatagtggtgcatccctgtaagaattgctatttggattaaattagtatatgtaaaaacacatgggtcttcccagatggtgctagtggtaaaaaacccacctgccaattcaggagatataagacaggagggttcaatccctaccagagaatcagataaccatcagctattactcacaagtaaatgagaagtcccattaactatagataaagatgtcaatgcccaatattaattcaaccattatcaaaatgttgcccaggtacaaagcagagtaaatggaaggatgttctgatgg

SEQ ID NO: 31904 - DNA, 1338 bp, Bovine  19866880479128
  misc_feature (1)..(1): n is a, c, g, or t
ncttatagtagcacagaggacgtaatatgactggtttctgaagaaacacattttaaatagcaattcattgatttataggtggatacttgtaagtagagggaaaaaaccttttgcttgatattaaactatgacatgttgtccaaacgtgccgtattccttaattttcatgatcaaaaatatgttgaagacaataaaatacatgctgaatagcacagtagatttctaatttgtaatggcgaaatatataatcattcatgttctttccatgtgtaggaaggagactactattccactcttaaaattatagacccaatttaagaaaggagatacttaaattatcatgtttctgaaatttttctcctttttcaaaatggaaaatgggttacaaatatgcaggtgatattaaatgtgcagtgagacttctatcatgagaaaacataactaaagcatacccagacacaccttggattccaatacatgtgttgaaatccccagacagatttacaagagcaaaatgtattatctgttaaatcggtaaatggagaacttccccaatcacaaagcactattggcttcaaactattcttaggataaccaattatggcctcttgggatatcagtcattctttccaaatcaaatccaaataggagacagagaatgtactcaaatagcaccttccctctgacctttgcttgttccttttgatcccaatgactaacacacctgaatcatgctccatttctctgttccagtaataatagctggcatttatataatgcttgttttatgtcaaacactagtcttagtattttatagctactagaatgcttattccttgtaataaccttatggggtaggtagtagtatcattacaatctcattttacagataaagaaacagaggcaaagagaataaccaacatgaccaaggtcatgaagctgtgtaagcaaagcagacaggacttaaaccaagaaagtgtgttccagagactgtgtaatattcagtattcaaaaccacacacacacacacacaccagcaaacaaacatatcttatgttttttctgggaatacaaagaagaaactgataagtttatatgtagaatgctgtcaccacccaccctcttaattttatgttttattccttgcttgcattgatctgtagatgaaatttgataccatttcttcagtttaagaaagtcagaaaccagatttcatattttatgtatgcagagatactttcctgattcacaaccagaggttagtgctagaggttagtgattgcacttaaatgagactcatttcaaacaaagtcaaaagtaagtaatctgatttggcaa

SEQ ID NO: 31905 - DNA, 1257 bp, Bovine  19866880530755
  misc_feature (1)..(1): n is a, c, g, or t
natagctttgactatcaactatagtccagtaaaatttacaaaaaaaaaaataataataataaagaactactgatttctttgggctcttttagtaatataattttgccagagaggtattcaaacatgttattaagtttcatgtaaattaaatagtgccactatctttaaaaatctttactaatataagttgacaagccaataactccattagctctctcaggcccaaacagtgggatttctcttccttacaatggttaattcagattatttttattttcttcaatgtaaatgctgactctgataaggcaacattctccttggttatgtaggtcaaaagtgatttaattattctataaagatgtcattatgaattgaattacttctcagttatatagtgaatcttgtgattttgctagaaggtggaagggggggtgacttgcaggagaccggtaatttaattacttttcctataactgacaatatggtctgagttcatgataatcattttactgcaatgtttttttctttattgatgtttcttgaaacttaaaaattatgttatttaaaaatggctgagcattatatctctgcaagaaataccttgactatttatatttttgtagatatatagatgtatttttacatattctggttactttaggtcatctcctagttttcagtggtagaatatataacattttattatgttttaatatattttctcataaaatatgagacttaaatttccacagatcagtcagaacacttcagaacagtttcttatgctccattaaatacactgttggtttgtttgctgatatttccttttggttatttgttatcttccatgggattttctaatgtctgctagaatttcacagatcagtaatctgaaatgagattttgatgttcaaagccccagtcctttgctagatattaaatattccatgtgaaggtcaggttagggttgattcatagtacttgatacaagcagcagcttacagtgcctttaaatcatggtttctttattttttttctttcttttcatacataacttctgttttttgcattatcgaagaaaggcatatcatattttctaaggaaatctttgaaaggcttagattaagatccagcactgtatattttgtttttatggtactgtttatagcttaggactgtttatttctgaatgtctagcaccaggttttccctgtaagttctcagtctttgtttatttctcttccttcagtgtgatgc

SEQ ID NO: 31906 - DNA, 1609 bp, Bovine  19866880586255
  misc_feature (1)..(1): n is a, c, g, or t
ntctcctgcatttcaaacagattctttaccaactgagctatcagggaagccctgagtatgatactggtacagaaattacaggttttgtattttcaaattgtttcagactgaaagcttatcacttgagtgagattcacattcttggttatcacctttcattaattcatgaattatcttaaaggaaaaagaaaaaaaaactattcaagtctgttcagtgttgcaggtccactgtcagacttcaggttaccaatgtgaaacagattacctgatcttcagggaattcaccgtctagtggggtaacagactcacggaagccagcaccctagtgccagtgcatttttcagtgccctgatggcttttatcaactgcagccacacctacttcaattcaggcctggatggctctaaataagcactaagtaatctcttgcctcatttatgttctattctacagctcacataatcaataccagttaacaaaaagtttaaatatcttttggactctctcctatggctcacatgctgttggtcgaatggttgtttgctgtcatgattaccttttgacagaaaggaagacaacaaaagagtgacatcttttgtttcctagacctaaaggtctggcataaaaagttaaagtgtgagtcactcagtcatgtctgactctgtgcagccctgtggactggagcccaccaggctcctctgtccatggaattgtccaggcaagaatactggagtgggttgccattcccttctccaggggatcttctggatcaagggatcaaacctgggtctcctgtgttccaggcatattctttaccatgtaaaccactagggaggcatattagtgattaaagacaatcctaggcagacagaatatactgcacaagtaaggtaagattcactgatgcaaagtctgttatttcctgaacctaggaaggggccagaatgttgatgagtagaaacaggaaagcaaattcagaaaccacttaggataagttacacataggtgaaaaatctacttttagcagacttaggtatcttgtttcaaatgatagtgaacttcctttccttgtctctgctgtttttgtaataatgtcctcattctcatcagagaagctttaataaaaaagcgttcgcaggccttatccccaaagtcttataataccattacagacaaattgacttagatttggatagatttttactgtattttcaacagagtggtgagatatatgtgctttcacattaaataaactatctcatcataaattgaaagtagtatttcctttgaaagagggcatctgctactataaataagtagtctaaaattaaagttgaccctaaacacactgtatcttttaaaactcgattgtaaacaggggtggtcccttaaaagccttttaatacatttgagcaagcaccttccgtttatcttcctacatgaacctcttttatttggttagtctatctgagcaaggttacttagtttgagacagaacatcgtcctaacactgcttcaaaatacacaaaaatgcctggttcccattccgtcttactgctgtgacttacatctctgaccaaaataatctgtgcatataaataagttaaca

SEQ ID NO: 31907 - DNA, 1573 bp, Bovine  19866880594830
  misc_feature (1)..(1): n is a, c, g, or t
nttgctctgcgtgacaaatgagagactgctcttcttatgtcactcttgattcaggcagaattccttcatctacagaattcaatgcaatatcagacagcataggggctggggatgaagaggaaatatcactcagattcagctcagagatgttgtgcaggtatggaaagagacatgcacatatgcctttaaataggtgggtcctaatgttttgttttgcatatctggctgtatctggatacaaacaaaccttactcaaaacttcatgtagcaggcaactcatttagtgacaacaaaatgggcaggaaggcagaaaacttttacaggatgaaggataggggaccaggaagagaaaaatagaaaatgtataaagaacaaagaaatagtgtggagcctagggtaggcttggtatttggggattgggtgattgggtgtacagcagttttggttaagtggagcagttgcagagacatgaaagttgcctaatttgggggttcctgacagcaccccaggacagagccaatccattttaggactagaaatgtattttaaccatgtatatgtattacacgcatttttatacacacttatccatgttacatatacatatgtgtgtaccttccattacagattgtaaatacttctctcatacctaaacactctatgctttgtaaacagctaggccaaagaatcagtatattttaataaatatacattgaaaaattaactagcaaaatctttggcataaaaatatataaaacagatctatcagagattcaaagagaagcatgcaaaatatcaatcatagtgggaaaagatgatacagaaatacttatctgatggcacatggatcaaatttggcccacaattatatttgctctagctgccttacgttagccttcatctgttttaatttattttaaatttgattagatgccaatattttaaaatctaaggcaagattccagtgagcaacaatgaaaattgttttgtaaactaataacctcaaaaatgtagtggcttcaaaccacaatatttatttcttcctcaggtcacttatccaatgagggttggaaagaccttctcctcactgtagtcattcaagaatctgagctgaaaaaattcaatctcttttcattcttccaagattatcacattcaaaggaaatatagaaatcaagtttcagcagttaaaattttcaaccaaaaaggagttacacatgtcactttccttaatattttgttgttcaaagtaacaacttgagtgagtctaatttcaaagcaatctcaactcatgccctaaataaggaaagtccaatgactgccatacttttctatcagaatgcaaaagaatctattaaaaagaatataaataaggatacagtgttggaataaaacaacacagaaactaactagatttatagataaatttccacacaaaaatagaaaatacatgagtttatagaaagtatatatattatacttttacaaaatctaaggcaatttaccacaaagaaaattcaagcaattttaataaaaatattacaagccatattccttgatcaactcacacaaat

SEQ ID NO: 31908 - DNA, 2130 bp, Bovine  19866880666205
  misc_feature (1)..(1): n is a, c, g, or t
nggtcatgtacaatacatctgaatatatcttctataatttaaaaaatatttaattttgttgtttagagtatgacagtaataagagaagaacatttacctggttcccatgtaatgtgggagtgtatgctctctctttcgaaccacatgcagctatctaccagaaatgttcctttagaagcatctgtaagataagaaaatttaagaataatcttactgaagatatgtcttaggcaccataattatacagaaagaaaactcttctaaatctctatacatagaatgtcccagtgaaattctaatcaaaaaggaggggaaatcttgtggacataacttgtgtacgtcagtaaggacagttaggagcattacaaaaggaatattttcagtacttctcccatctcacccacattcatccctgtcttgtatatgcttccctgcaattcaaccaatcataggtgtccatgcatatgtatatatggatctccactggatatttcctgagacctactccacacctatagcattagcattttgatgaaaaaaaacagagtaagcctccggaaatatccagtggaggtccgtatgcacatatccatggaaaccatggctgattcatgttgatgtttggcaaaagccaacacaatattgtaaagcaattatccttcaaaataaatttaattataaaaaatgctaatgctaaatcatccaatactttcctattgcctatttataatactttccaatatgcctatttacagtcataaatcaaatgaccgtgtatcatctcaattgagccaagagatttgatgagccaagtactcttaatacatatataagttgagaaaatggaggctcacctaggagggatgatctgctcacatctatttgtctataagtcacatcatcaggatttgaatgtaggccttataacaccctaaagctgtcttttgagatttcacacttcctgaaagtgtgataacaatttaacatatcactacttcctatgaatatttacactttaatgtgaaagtgaagactgtcaatgtataacccaaagtttccttagtagtaaaaaataaaatattttgacaacttgagagattttattactaaagggggttatcttcccattttctaaagatgaggttgactcaactctgattaatcctacttattctcagattgcctcagtctgcaaatgatgaaaacagaatgctgatttttttaaaaaatagtctacttttattgatatataattttcagtggtgtagattgactctgattttaaatgtttctttctattatgatctatgagtttgtttcaggatgtattagacacttgagtaaaatggataattctcaagtttacacagggtacctttttctctgcaataggagaaatatgctaaataaagttgtattggcaaactgacttgtaccacaaggataatatgaattaaacccaaaacagtgtaataaaaagagaaggagagggaagaattctgggtgagtggaaagtttaacacacacacacacacacataaacacatttacacatacacacacaaagtgaacagagaattcttaaatctacttctatattatatcttcacatactgattttgttctgcttaaaaatgacacaaataattttaaaaataatttggggatataggtatacctgctaaaccaaagcaagctatgattacaacatccagtttggatttaaatagaaccctcatttatcatcaggccatccttagacacattgagaaatctgtttttgctattctgtactctcttcacacaaaggcactgggtcaaacatctttaactaacatgatgataaataaatagttctgctttccatggtaaaagattcaatggcacattctggtaattttcctgaagatggttatgtgggtatgtactagctcagttgcaagtcctgtccagctctttgtgaccccgtggactgtagcccaccaggcttctccatttatgggatttctcaggcaagaatacgggagtgtatggccatttactcctccaggggatcttcccgacccagggattgaaaccgattctcacgtgtctcctgccctggcagacagagtctttaccactgagcca

SEQ ID NO: 31909 - DNA, 1750 bp, Bovine  19866880744218
  misc_feature (1)..(1): n is a, c, g, or t
ntatatacatacacacacacatgcacacccaaatattctggccagtagtgtgctatcttactggtttaatgctaaccatatggccttcagtgttcagactagagtatgaaaaaaaataaagttatctgcttaaggatgtagtctggaaattgaaacaattgatattattactggaaactgacatttaaatttttttattgttttaacaaagaagggcatcttttaatacatcttctactgtagaaagcatttacattctatgagagttttcaattatataggaaaataacttcatgtggacttacttagattagacattgtaaatatttctaactactattctgttttgaaatcttggtagtctcagatattggaacaaaagccactaagagtgaaggggttcctatttgcctttcatagaaagtcacatgtttgctattcgagtacaatggcatcaaatatccttgtcaagatttaatatcatttcctgaaggggagaaaagactaataaagcattacctttcagtgtagtaaaatggttctactacacaaatgagaataacacaaattcttttcatttgggttctacacacttttagtgctatctgaaatgagtggaaattggacaaaaatgtggggatgtgaaaggacaataacaggtgaggagaaataaaatactcagtgttaataatagtaatatatatatgaacagaagggtgaaggtcattttactgggcagctgtagaacactaaaggaagctggtccaataacagagattttgaaagtaaggaaagattgattgttcaacattgtttctgcatctggcctccttgatttcaaacatttccagattgttatccaagattgcaactgggcaaacaatgcactcaagtttgcaattatgaaaagacaaacacggcaaaacacacatagacatcaaaagaagtcataggtttgaagtattctgaagtgagaatgctaagtgttgagtcacaattttttaaaaatttagtctctataaccatgccttgtgctttaaagttggaggtattgtcgttaaatttaccattaggaattatgacacccccatcaaagtgggtcattcagaaaagaataaaaactgaggtcattcagaaggatttccttactttctgaagtggtgtaataatagtaaattacaagtatcaggggaatatacttttaggacttttaaacctttcactaagaaaaaggaaatggtgggggttttcccctattattaacaggtgcagagtttggaaactgaagaatataggattttttattttcagtgaaagtgcttagatatcttaataacaaatcaaattaatacatcctgtagagttagctgagtctttaagaaaattactatttaagtatgcatacatgaaaatagaaagttgggtgttgctttgtttcatgttgaatgatcactatgttctcatttatatccatctgaattcaattgagatcaacatgtataaaacatgactacctacaaaaaagaccaaaaatggctgcaaagaaatgtaaaagttgcttccctgggagttacgggagttacacaagttaacaaaattgaaatgcatagatcaaaatcaaagattagtatatttaatttactttcttttttcctttgaaattcattacatacaatgaagggaagaagtcaggaataaaaattaaaaggggagaagttgcaaaagactgaaccaggcaaagaagaaaaat

SEQ ID NO: 31910 - DNA, 1594 bp, Bovine  19866880766330
  misc_feature (1)..(1): n is a, c, g, or t
ntttaagctagtcataagaaaagatgaaccgggaattcactgcagtatcactaacatgtaaccaataacaaagcaatgggattgcattcattttcaatataacttatgaatggctattacttactagtactgtatgtggcacaggagaaatcataaacaaaaagctaaacatctcccttccccttccaaatttcaatttagctcaccctagaatgaagaaggtattcacattctttttcaaacctcactgtcagttcttttcctttagttaggctttattaaaagtcaaattgtttacataaaactaaagaaagtatatttcaggtaattcacagtaactagcacttcacagagttccatagatatttgctgaatggatgaaagaacagcaaaagaaattaccctggatttagttgtttattaattaatctgattaagtaagcatgataaaataaaatggtaaatataaactactgcacacacagttaaaataaatacactttgtaatagaaagcagtttgcactggttccatttaggtgtctaataaagcactgtggaaatattattactatattctaccaagttattattataagtaataacttacattaaaaatctaattatgcattatattatgcaaagtagtagtaactgattaagatgcataatcatacacacacaatggcttccactctttctaaagtccctgacacagaagttctgagttggggcagagaaatggcaatcgccaataaacaagagatactcatatgtttctgctggaaaaagaaagagtgggaatgtgttaggaattaaatagagatttgtagcttagaatctgctgtgaggaggctctgaaaaatgtagaagaggcagcctgtctgaagaagcagcctttggaaatgaagattcatcccacagctactatggaagatgggtgtgaaaaggagctaaagatacgggaattaaattaagggtctgtgtaagggcagctctctcacttgtcacccccttctttccaagtacaaaaacatcaggcagctggtatttacctccagcaaaaatagctgaccctttcccagtgaaaccgaacaacctgccaggtgaaaccgtgcataatcctcactctctaatttgagtgatcctatagtctgacagctggcttcttgctgatccccctcaaggaaagtctcacttctgtttacctcacacataactcctagggagatttccgagtgagaatcagttgtaactcagagacttttattaattacatagtccttctttctattggaaggatgactggacatgcaaaaaagctgcagaatgagaagctagagccaaaattaagagattaaaatttgatcccagagaaaattaagggaacaatcgtgtccaactctttgtgaattctccaggccagaatactggagtgggtagcctttcccttctccaggggatcttcccaacccagggatcgaacccaggtctcccgcattgcaggtggattctttaccaactgagctatgagggaagcccaaggtaactcaagcatcacataaagaaactaggtgggagaagaagaagaaattc

SEQ ID NO: 31911 - DNA, 2871 bp, Bovine  19866880797989
  misc_feature (1)..(1): n is a, c, g, or t
nctaacttgtattaagctgttaaatctctggtatcaatacaaaaggctcaaaaattatgttaaacttgcaaaggctgcaaaaatacttactatgatttttcagaaaatacaatgaattttgtcagcagatatcatagtgttgttactagaagtaagttggctgtccttccattgaggcttaataattgagcatgcatcacatagacatgtgcattaattttaatttaaaatagtctactgtgtaatgaaccaatttaaactgaaatttttgctaaaccaaaacatgtttgggggcatttgtatcactttattttctgaaagtaactgccatctttttccatttttgtaaatgaagtaatagtagtatattttctaaatcaacttttccatttattttcataattttagaaaactgcttctttttataaatttactatttgaatctgaattgcactaaatgagatagcttattagctttattttcccctttgagttttaagaggtatttatctttaaaaaatagtctataatgtttaactttctacacatgctatcaaagattggcaacatatttgatgctatatttaaagagtaatggttgccaaataacttattatatgatttgagctcaaaactatatattattccagtatctgacttttagtaacttaggtttcatctggagccctagatagacggtagttttaccttggaattacttttggccattggaaggtcactcatttacacattattgcctctcataaattgatctaatcttctgaataatggctggacatgcttatgatcaatattttattgcttctacaagctaaaacacaccatgaattacagtcaaaatcgttatcacccaacactgcagacataacaataatatacatgtgatattagccctccgcttgtggtactatttatgaaacaagattctgcttgactgcttttatttcagcactattataatcttctttaatttatagctaggaattctactgacagttatcactcagttctattcaaggccagagaagtaactcatcatgggtttgcactataataatcaaatctaaattttcctttgattcaaattattctaagatgaatcactttattttcaaagggtagtgtgaattaacgataatcagcagtgtaattttaaatgtaaggcacatactagtactaataatttgtaataaagaacattataaactaatgcaaaacagtgttgattctgtctaaagttattttattaccatatagttatatgttcttaatcaaaagcaatgtgtgaagcttattatatacattttgtctttttagtgctgtatttttataattatttacttgcactctcttttcataatattttaatttacttttgtgagatttttgtcattgtttttctttaattttacacacaagtgctctgatctctcttagtcatattctgctgtccatgcttcacttattagtcagtttcaacatccgcctttttgatgtgttatggcaatcaatatttgatgatgtgagagcttctagtaatccgcattttgttagcttcatgactgatcaaaaaatgaaaactttctttctcagagactacacgtggatgtaaaaatagctgcaatcagataataaattttgcatattataatcctataaactgtaattttcaatcaggtttaccccacaggcacacaagacacacacacacacacacacacacacacacacatttcagaagttcagttctgtagaggtaatagaaaatagctcatgtgtttaaacagtggatctagttatgcagtcatgaggtggatgcttgccatcatttttggccgcttcctcagctttcagcttacctccagaagtctggtactgcagaccttcgggaagtatctatgtacaagagatgattcaggtgagttggtttgatcttattagtattttccagttctttcactggttgcattgacctattttactttaaattgtagcaccttaaaaaagtgttttttgttgggcaaaatattgtacgtgtaaacattgaaacatgggcatttaaatgacttgagttcatacagtaacattgaatatactctagatatggaaatataataattttaaaatataaaaataaggctgaagactctatataaattgaattattatcctatgccaattttaatggtttaatctcttgtcagcatataatgaaaggctattagtagtgctttctatatttgctggcttaagcttccataccctttttcaattcatgttagtccctagttttaataaaaatgcttttgactcagaattagttttatcagtttgatagactatatatttaataaattgttagcaaaagaaaccaaccttttaaaaattttggactttgctgagtaaatagtgtaaataaactaaaatatttgattaatacttcaatcaaaagggtgcccaactatcccaatatgcattgttttcttttaaaaggtgtgtggatgttcgagtgtgtgtgagagagagagatagtgtgagagtgtgtgttggggatttagcctggttaataaagaagagaagaatttatagatctccaacgcaaggctattgagagcaaatttaaaatgtgatactactgggagattgggattgacatgaacacattcctttatataaaatagattactaataaggacctactgtatagcacaggaaactctactcaatactctgtaatgacttatatgggaatagaatctttaaaagtgtggatatatgtataactaattcactttgctgtgcagcagaaactaacaaaatattataaatcaactatattccaataaagat

SEQ ID NO: 31912 - DNA, 1226 bp, Bovine  19866880920982
  misc_feature (1)..(1): n is a, c, g, or t
ntaaagaaagctgagcaccatagaaattgatgtttttgaaccgtggtgttggagaagactcttgagagtcccttggactgcaaggagatctaaccagtctatcctcaaggaaatcagtctgaatgttcattggaaggactgatgctgaagctgaaaatccaatactttggccacttgatgtgaagaactgtctcatttgaaaagaccctgatgttgggaaagattgaaggtgggaggagaaggggacgacagaggatgacatggttggatggcatcactgactcaatggacatgagtttgagtaaactctgggagttggtgatggacagggaggcctggcatgctgcagtccatggggttgcaaagagtcgcacatgactgagtgactgaactgaactgaactgaccatgcactatataaatccccaaagacagaattacattatattttgcctgttaaaaatattaggatatttctcaatttctaatattgtttctcaaaattaaaaaccctgcctcaaattaaataggtttaaactaaagtttaaaggctaagcataaatatgtataaaaattgaaaagaggtatgaaaaacatttgcataaagtattattgctattaatgccatttaaaaatgtttgatccttcaatgaaatgaataagtagtatgtaaacattagaaaaggtcatggctatgctaatgcatacagccttcatgtttccaaagtggtgtattaaaaagctttaggagaaatattctctgccccaaataagtacaatttcttctcagttggttagagcaattaaggatttatatttatttaaacattcaacttcttcttaaccttttctgtagtattgaccatgaactggcagtttaccttgggatgtattttagtacacagcttccaaaggacaaggctttctgacatggtgaaccaaatcaggggccatagtttactgtgggtactgatacactttatcctatgtgaatacatttcaaaaacaggacaagtgaagattttgtaacagagaatcaacttagaatctcagaaatctttcaccaaaaactccacacccctttataatgagacagacacacattactctgtaatctgttaaaatacacattcttcttaatagggatcttttttctttccttaatttgtattcttgtgaaaaatgaagttaatacagatattggggaaacttctcactcctcctgct

SEQ ID NO: 31913 - DNA, 1162 bp, Bovine  19866880924421
  misc_feature (1)..(1): n is a, c, g, or t
nccaagatgcttatttattctgtgtctggggctttccagtttaaataagtccttctgcctcattactgtgtccacttttatttggtgtacaaattattttctcattgataccatatattacttgaggagtaggtcttgcagctcacagaagttcgaaggtgcctgtgagcattgtcatggagaatattgaataatttttcttgttgtagactgaagctcaaaataagattttcatctctttatgatcagcagctgaaaagcttctgttgtcagcaaagctcgaaacggcaaagaaagtgggggagaccctgttattgctttttcttccctcgctgccttcaaaaatgtttattttgtgttgcctaaacagagttcttttagtaaatgtacctccttaggtacctttctaagagccatggcggccaagtcctaaattttaccattccaaataaagtgacttttcctttcttctctggtttaaaccatctgaaaaggatgaagttcataagctgctattgatgattctggtatggagtttgactatccgaacagtggaaagttctattttattgagttgaatattttgtggcacatgcactttggagctaggtaatggtttgtttacagagagaaaaagatgccacagctatgctgcagtattttaaaagatctgagtttataggttttccccattgtgtctgtcctggttcttgcaaaaactaaacagagccttatttttctgcaaagctttaagcaataataggaaatgtaaggtctgcagagcattagaggaccatgagatgggtaaagaactgcctcacctcagtgacaatgatggtaactggcatttattgagtgcttactgcataccaagccctgcaataagtgctttatatggattagctggtttaattttcactagaactcatgtggttcctagttatacttgggatcctgttattgtccatatttggcacatgaggaaatggggcagaagggacataagcagcagagttacacagataaaaggaaagaccaagtggctccagagttgcccaatacagaccacagtgaggaaaggacttgcaaagtaagctgttttatgatcaagacgaagaagaagtcactagtgaaaatactttagcacaagctttccaagtca

SEQ ID NO: 31914 - DNA, 1318 bp, Bovine  19866880945766
  misc_feature (1)..(1): n is a, c, g, or t
natatgaattttgctattattttttcatctgaacaacagtatacttttaagcacaaaatatttccacaaaagtttatgctccaagtacaataaattttacctcacaaaattaagggaaagataaaaagatatatagatatagatatatagatgtatatatgaagttattttaatataaatgttcgttagaagtattataatcagttcataacattataatgttacatataaattcaacttacagcttttcaaatgtgatttttataatttttgttcattctttgatattaggaatatgacctgagcttagaacttttagtacaccatcacatgttggcttatgtaaagacacagttttacagaagctcaaagtgagcccagaccttggaaattctattaattatgatcaaattccttctgtgtcttgagaaagtaaagctcgtaaatttaaataataagaacataaaccctccttcacaaaccataagatggccattctgtcaatgtttctcccaaatgacagaagtctttgttggataaatcacatcagtttctgacattttagacaaatctagacaatgaccattgttttaaaatatgatgggaaaaacatgcttccatttatcatggttttatacagtaagactgaaaacagattttccagagaaaattatgaagttataaatatgacttggtagttgctgctttttcacttatttctttctctaagtatatcatatcactctgtctacacgcatagcctccactataggggacttgtgattttgttatttatagaaaggggataattgaagacacattgaagtaccttacatgagggtacccagcgtcaactgacctgagttttctgagagacgctctctcactggacaacatcttgctttattccttcaagccttactagtagcttcatcccatataaaggaagcaaaagactgtactttctctgagttgatatgtgttacaattagagctctctgactcaaattactaagtccaaccttacctttttaagtcaacatagtgtcatagttacctcaaacaactttacatattacatatttcttaaactcaactacagagaaaccattgttgaatatactcaaacctgataatgaccattattagtatatgtgaaagtcttagagccttggaaacatatagcaagaaacttaagaaatatagggattgggtttgcaaaaaaaaatgttttacagcttcagtgataagatgaagaatacttcttgcctcattggtgttggtcagtctctcggacgtgtccgactcttcgtgaccc

SEQ ID NO: 31915 - DNA, 1049 bp, Bovine  19866881043968
  misc_feature (1)..(1): n is a, c, g, or t
natgccagggctaaaaatatcacacgatagcagtcatggttctttgttctctatagcttataatacagttggagacatcacagctataaaaacttagccctatgaagtattaatataataagcccaaaggcctgaaaacagagagattggtggacttcagagtaagtggtttataggacagttggaaagatttctggagttgatgatacatgaactaagtttgaatgagagagctttaatcactagattaaaaaagaaggataatttcaggcaaaggaaattgtggaatccttctggactctatggcagtagcacccaagacaatagaataagagattatgacacatgtactctgaaaaagttttggaggaagttcatacaatcccaacttcaagtttcagtaggtttaattactaaatgcttcttttaagaaaagtctagttatagtcttaattttatgatattggcccatggcttgatgatcacagcagaatgtaaatcccttataaataaaatacatttaattttcttttttttacttttccaataggacttatgaatgaaacatgacaatggaaaaaagagaaaaagatctgtaatcaattcttcattatccatacttaattttcagtgtgactaatttcttagtgaatccagaagtttgttaaataatttatgaagattttatgtgcttcttttaaactgttacctcactttcttcattcttttctttatacaatttaatccatatgactctcactcaatgtagaataaaaataaaataaaaatagatatagcaaagtaatataaatttttataaacttttagtttatcaatataaagggcaactatatttttgcaagagtaaaatatgcccctggaggagggcatggcaacccactccagtattcttgccttgagacttccataggcagagaagcctggagggctatggtccacaggtttgcacagagttggacatgactgactgagcacacaggtcacagaactcgtaagtggcagagtggaagcaagctggctccagattc

SEQ ID NO: 31916 - DNA, 1162 bp, Bovine  19866881157790
  misc_feature (1)..(1): n is a, c, g, or t
nctgtttcttatatatagtcatgctacatagtttagaaatttattcccactgggtgtaacctttgtcgtctagattcagtaaatgcttaacaggcataggccaggaccatgtgtgttttgctttaagggtaaataatctacactgagacagacagcccctgagaatattcctcccatatgtcaatatcatggttctttttcagcatgcctaatatatcatgtcatcagtgtggtcacagcaagacaatggcaataagaacccagtgttgaaagtactgctcctaaaatttctcttagaatttgataatattctctatctataaaattccatacaaggattattgtctctaataaagccatatcaggcaacccagttcaacagaaggataacaaaaagtaaggaatttacatattgacctgtccacaattgtagaagcctgtaagattggaaagtaagctgacacatgggtcattcctcagcctataaatctcatctatgttgtcacaaaagaatatgagaatgaacagacatcctttttagttctcggtcatcaaaccattttcttcccaatttattatcttctctttttagtgagtaactcatctagtatactgaggggaagacaactggcctctgctctctggatagtgtgcaaattaatttgccatgctttatcaagaattcctatgtgaaaacagcaaaaatattttatgatgatactttcatgtaaattagaactattcttttttccacagactgatcaggataaagaaaaatcttaatataaatagttcatcttttctaaagctgatggctatatgatgatgtgtaacagaatgtaaggatttagatggatgtaagaaagaaaatgtctaaaaatgaattaggaatagatttacaagtacattcttgtttagtagtgtttttgctcatgagttttatgcaatgcttttatacacaaaactgaaaacattcactgacatcttgattattatttaaataatatacagcttagtgagtcaacacattggtctttaagatacagttttaaactgacttggcaaatgattaatctaatcatacaatactaaaattgcaagtggaaatgggttagttttccataaacagaacccacatgccacacaattatgtcaaaggttt

SEQ ID NO: 31917 - DNA, 1392 bp, Bovine  19866881168939
  misc_feature (1)..(1): n is a, c, g, or t
natctatttgccataaagtgatgggaccagatgggaccatgatcttcattttttgaatgttgagttttaagacaactttttcactcttttctttcactttcatcaggaggctcttcagttcctcttcgatttctgccataacggtggtgccatctgcacatctgaggttattgatatttctgccggcaatcttacccaataataaattacctctagggtacatcagcttaagaagtataccaaagaagctatgtcttacttaagaaatgagatatcaagaggcaacatagaaatgaaaattctttaagtcttccaagtctgtaaatgagcttatttctgaaagtgcaaagtatacgcaattgtcgttccctgtgacaacttaaatctagtaggcacttaacactgtttgtttggcattttctcatataatcctggggcttcccagatggtgctagtggtaaagaatctgctgccaatgcaggagccataagagacacaggttcagtccctgggtggggaagatccccttgcctggagaatcccatggacagtggagcctggtgagctacagtccataaggtcgcaaagagtcagacacaactgaagcgacttcacacacacacacacacacacacacacacacatataatcttcccagcagcttggcagattggattttatctttacatcatagataaggaaactgagtcagaaacagattaaagcagttttcctgaattgccacttatcatatacagggactctagcttctattctcattcacttcccacatcaaggtaatggttatcagtagtaagcttcatgtattattaataactgcaagtcagcatgcataagctttcaaattaccacagttatccaattaacctctggttacttatatagcctttagtgcttctcttcaggagcaggctaatgaatttcagtataaataattatacaagtgggaaacaaaggtcatgaaaaaaaatggaacacttcataataactgttacataaagggctttttattcccccaaaatcaattttaaagattgaagtcttggcaggagcctagtcgattttaattttagtgctattcagttggttctaataaaattttaaaaactaataataatgatatatcaatttattaagtataacactttaattttacagatgaaataagagaaccatacatgtctagtaaaagtataaaaacatgtggggaatgatttacatcaacttcaagatgctagttatctctggggaagtgaggagtagaaagagagaaggatacagctatagtagaatctgtaaattttagtttctatttaaaaaaggatttaaaccaaatgggggaaattttaattaggtttatgcaaagtataa

SEQ ID NO: 31918 - DNA, 1008 bp, Bovine  19866881266466
  misc_feature (1)..(1): n is a, c, g, or t
ngtgaaaaaaagttttccttccaaatggtaatttaaagctactgtattgaagcacagttttttttttttaatcaaaaaagtttttttatattcttaccatttagtaacaaagttaaatgaatcttacctaaataaatccacaaacttttacaggaaaagaaaaagcaaacaggaaaagtggttttgtttttgtttttttttcccacaaatacaagacaaaagacttcaggtaactttttctttactaaattgtagattttgtacatattcaacaatacaataatatttttgtttaaattatgggtaggggaaattcattctttttaaatcaaattttcagtagaataaatatatgaaaatactttctctaaaataaaatataatgaaaagaaaatattttgcatattttacaatatatctaaaattaagacaaacagaatagttaactaatattattgaaccaacaatagttatgtaataatattgaaataaggcaagatatttggaaatgcctgattcacaatagtctatttaatgttgatcccttgttaaaaaatcagtatgtttattttccacaaaatccataagtaatagtattaaagtgaaaatagatgcagtaaattataatatagtcccaaaacattattactttgtgcctgagttggagggtttttttccctaatttaattgatcttttttcctattaaaaaaagattcaattctgttaaattattaatcatttacagtggtgaatgtcatgcatacatattccttaagttcaggtaatagaaacctatatatttagtcagtgtaatttaaccttacataacctcagaaatgtcattcccttgacacttaatcatatcaaaacagtgagatgtatgtcgtgtcttctgtgtggcaaaggtttctacagacaacatgaagcccgttgtgacatttttctaatcattagtcatttcatttctggggtaagtaaagaacacttgttaaacatgaactttcaat

SEQ ID NO: 31919 - DNA, 663 bp, Bovine  19866881282886
  misc_feature (1)..(1): n is a, c, g, or t
natcctgcctatcaatctctttgtaatatacactattccccagccgacgtcttcagtgacagccattcatgtgtcctgagctgatcaaacgcaggcaatagtgatggttcagcacgacttgcctttaactgaatgaacagaaactgttccccaaccatgcgtctggtgcacaaactctactgttcttttaggcttttaatgggctgtcctccaaatggcacatcagagaaaacatttcatctgaagaacaggtatagaatgcaactacttgttcagccacaaccctggccttttgggttatgtgaagtcttagttctgaataaccgaggataagggggggtagggaagcttttccctcaattctaaacaccctttagtctcctttgagtcaacgccgctaattatgccaggcaggctgtatgatgagtagcggttttgtgatcccaactattgttcagaagggctgagatcaccagtgcattttcttagttatagagaatttgaagggaaaagtctgagtacgtattatctctttcttttcttaaacagtgcctatttacaaacttttcactggtgagtaaaaacatttactggcaataaaacacagcagtgtttcagaatgttaacctcttccctcaaaacctgacaaagtactctgagtgt

SEQ ID NO: 31920 - DNA, 684 bp, Bovine  19866881342483
  misc_feature (1)..(1): n is a, c, g, or t
ngagatgtgtatttatttccttgcagttgtgctgagtgtcccttcagtgtgggcttgagatggcttcacaaagaagtttccgcaatttgtgtctgttgtaggtggttggatgaatccttgtttgggagattctgtcgggcatctgggcttcctggggacacaccggaaaactgcttcgaaggatgctcctagcatcagcggcctgctgggttgatgctgggcaactttgcggcgtaatctcggtgtctctgaccgcgccgcggttcatgatgcggacagggctgcagaaacctccggggtccagggccatttaggctcccaaactttgaaagcattctccaagaagggggatgaaaaggggggctttgaaaatcagcattactgggtgaattttggtaaactcttcagggtatataggggagtctttccagatctgcgttttcaacctgcagtttgggcctggaaatggagtgctgatgtggaaaaggtggcggtttaaagctaaggcggggaggagggggctttttctgtaggagagcggaagaagaagcgcagatagatgaatgaacaaggtgcgtcccatctttcacacacaaaaaccacacgcgtgggacgtgccaggaagcgctccagttgatcgcgtttaactgaaaatgtattgcagggggggtccagtcacctctg

SEQ ID NO: 31921 - DNA, 1585 bp, Bovine  19866881380425
  misc_feature (1)..(1): n is a, c, g, or t
ntgtccgactcttagtgaccccctggtactgcagcctaccgactcctccgtccctgggattctccaggcaagagtactggagtggggtgccatatagacttgatttaatgtgatattgaatggtttgccttggaaacagagatcattctgtcatttttgagattgctttcaagtattgcattttggattcttttgttgacaataagggttattccatttcttctgagggattcttgctcacagtagttgatgtaatgtttatctgagttaaagtcatccattccagtccgtttttgtacagattgtactggcaagattgggaagtaaggaaaagtgcatggttagaaccccaaatcctttcaaaagaaacagggagccctggagcccatgaggactgagcttcctcttgacactttcaaataaaatataaggaaagtcctgaagggatacggttttgcacagacaatggaagagactgctgctactgctgctgctgctaggtcgcttcagtcgtgtccgactctgtgcgaccccatagacggcagcccaccagacacccccatccctgggattctccaggcaagaacactggagtgggttgccatttccttctccaatgcatgaaagtggaaagtgaaagtgaagtcgctcagtcgtgtctgactcttagcgaccccaatggactgcagcccaccaggctcccctgtccatggattttccatgcaagagtactggagtggggtgccagtgccttctccgatggaagagactaaggttatcattaaaaatcaggaaaatgagatcttcacattaccaagaacagtatgttacattatgaagtatcttgatttaattatatctgtgtgcttgctggaagtaaaacatgaatttttttcccctctattatatttttacagtacacataaatcacttttaccctaaaagtattttaaaattccaactgaggggcttttataatctacgcatttagcagaacatgaaccaatcaaagaaaatgtaattttctcctttaaaagtaaatctctgcttcaggcattgaatattctgcttgagtttccatccaataaataacaaactaatactatatcttcaattaagcagacatattcctaaagggcatttaacatagataacatcactctacagaaagttacttcctatggatgaaaaaaaaaattaatgggctaattctcatacctaaatctctaccatttttaacttgaaaattgactcaactaatatacttcttgaaaaaaagttaaaaagcacagcgtttgaaaaatggcagtgactgcctaacatgaaacatgaataccagtatatgtttgccaataaaggtatatgttttttttccagtttctactctcactaagtttaacttagctggccaattcactaaaaaatggctcacagaaggtgcaaattactggagacacattattgctacatttctaccttatagattcctaggatcatatatcaaattgatctagcaacagtcagtatgaaaataaatggactttttcttcatcatgtgtacataaaactctattactccttttta

SEQ ID NO: 31922 - DNA, 1200 bp, Bovine  19866881408612
  misc_feature (1)..(1): n is a, c, g, or t
ntatttcttcctaaagttaggatggatttgtgaaagacaatgtcactctaaatcactgcattcatctatgagctgtcatatgcacatgtatataaataaatctttttttttttcctcttggaaactttcccacacacatctgtttctttcagcagatattctttaagataataaacgacttcagttgcatgtcaattagaataaaatttagtgagaagtcacatgcaattcctatctgtattattttcattaagatatttaattgcataaagactgaaagagcagtaaagagaaaggtaggaggtctgatcaaaatctttttgataatgtgaaaattataagtgatcatagttttaagcctccagaaagtgataaaaatatgtaggagatggaaaacatacttctcagctactggacactgacacgaggatgcatttttgtctctatgggtggtgattgctatagttgttttaagaatctcaaacattctgtggtgcatgagaacataaatgacgcatataagcatggacttcataccctagccggatatttttcttgtttttaaagatcatttttctattaatgatatttttaacagaaatcttaagcacaatgtaatctgatacaacataaattgatgcccaaagtctaagtttggttagtgtccaatgaacggttacagctgcatgaagtcatgatcaaccggtttcatagccttctgtttgaaaaggtgcccaatccattttatactaatcaaagtggatataaactttgcacttatttggctcaacatttcaacatttaaaagtcctttccaaacattgacacaatgaataactatttagaagtttgctctcccatattgtgtagaaaaaattacttttagtgtatatgacatccttctccctttcatttatgccttttatttgcttatttagttcttcctgatgttgtgggaaaaagatatgaactctgtataatcaaaaaggcaccatctgatattgtatgttgcaagtatgtgactatttaaatttatgaaaataaaacttaaaaatcattttctcagttgcactagccatatttcaagtacttgaaagctacattaaaacttttccattatcataaaaagttttataggattctgctgttctcaaaggctaactataaaatagagaaatataaaataaaaatatattctct

SEQ ID NO: 31923 - DNA, 712 bp, Bovine  19866881468985
  misc_feature (1)..(1): n is a, c, g, or t
nttattttaaattgaaagaataagtttcatttaattgtctcatgtaaaatgacagtattgaaatagatacccatcttatttgcttccagttatcaatttacatgattccatgaaatagatttccactggactgaaataactttccatccttcacaaatatagtcattttaagtgttttattttataatttgtgagactcttaatagcatttgtttgtaatactatatttgattttcagtttcctctggtgattaattacatgagaattattctcagatatcaagttatatccatacactcaagataccctctcataaatatagggttaataatctatgtatattttatcagtatgcttatcacttacttctaggcccatctatatgtttgaaaacagatatacaaggtaaaattcaaattcaatccttgacatgacatgttgctttgaaaatcacaaaagtcgttatcttcaattttcaacaggtaggctttgtgttttttacaaaacaaaatattttcttaacctctaacttttggaagtttagggaagtgtaccaccattcccagttacaatttgcaaacttcaattatcattctgatatagccatcagccatgccttttgataaaactgtatagatgaatagaaactgaagggtattccatttgtgtcaacgttagcagaaaatagtatgacagggtgcaagactcaag

SEQ ID NO: 31924 - DNA, 2248 bp, Bovine  19866881652308
  misc_feature (1)..(1): n is a, c, g, or t
ntgaaattatatttccaggagatatatagtatgctgcaatgtttataaatattttacttatttaatacaatactgtatgattgaagggggataatacacatagtaaattcacaaggaatggtctgggaatcataatatcaaatttacaacactggttacctcttggagggagatgcagtctgaaaaagtacattgagggcttcaattttatgtttaatacataattaatctgggtggtaactcacagacttttgtttcagcattttctatgtctttgccaagtgaatatgacataatcataaaaagtcagagtcattaaaagttccaagtactctgaacagcagtacttcaactctaaaggccatcttaggtgacttttaaaactctgttcttgagaagggtgcctttctgatgcagggctctttcatttcggtaggaatgaatcatataatttgactatactgtctaatcaaatctttctctgaaacacattaatctaagaaactatgttcatagctctcaataagacataagaagctatgttgatgattcctcccccaactgctaaattaatctccatattgacctggctgggctgaggaataatcattgtgataaactcttaagtgcctagttacacctgaaatgcttgctaaaatgtagatttcagaatcccaatcccatatgttctaatgtattaaatctagtagagctagggagtctagggagtagtattttaagtgtcatttttgttaatttggaggtcttcttggttcaatggacaaagtttgagaaaagctgcttcaaggaattcacagtctcctgttgtaaatgaataaacaaattccatggaattttggagctattattgagaggataaaaagatttaaatctatttgcttaacaggaaactcttcaaaagagaagtgatgactgattcatattttcaaaggtcacccaagaatcaagaaagtgagaactaatctgggcagaagttctaacataaacaaaagcagaaagttatgacatatcatgaacatttgagaaaatgaaagtcgattttcacagtgattggcaaagtgaaagttgttcagttgtttccgactctttgcgactccatggactatattctccagatcagaatactggagtgggtagcctttccctcctccaggggatattcccaacccagggatcaaacccgggtctcccacattgcaagcagattctttaccaaggatattggactgggtagcctatcccttctccaggggatcttcaaacccaggaatcgaaccagggtctcttgcattgcaggcagattctttaccaactgagataccaaggaagtccaaaggttcctatatcagaggattaatacactgcccaggtggatgctgaagaaaagaagatgtgaaaagctgtgctgaggttttgtctctcccaaagaccaggatttaggactatgagaaagagttggagaagaggaggaacataaatccatttgatcagctgaccactaaggacttgaatgaagtctctccagaaaccaaattagacaagaagtactcctactggcctcacaagtcaattgagaatttataaacttgagtctgggagaaagctctggcccttgaattataaaccgtgtacattaaaaataataatatagggaagttatataacatagtacatatagatagataatggctataatactggagagcacaaaatactcatgttcatcttcaaagaaagttctattgatcattgctattctaggatgatgagaattttctgtatcttgatatgagtagtagttaaatgggtatctaaatatgaaaaaactcaaactacatcacttgaagttcgtgcactttagttataatttataattcaataggtaagtacatagacatgtttttaaaataactaggagaaaacatatacaatgtatataacagattattcatatttaaaatataaaggaatcatataaatcaataagaatagaacatcaaacctaaaggaaaaatggaatgcaacttataggctggaaacatactaagaagacgctaaggttcatcaaaatcagagaaatacaatctagaacattgagataccacttctgcccatcatactggcaaaagcctttatgactggtaatatcagttttttataaaaaaattaaataaaatatgaatacaagtaacatgagctcaagaagtgtactatataattttgctac

SEQ ID NO: 31925 - DNA, 1274 bp, Bovine  19866881770190
  misc_feature (1)..(1): n is a, c, g, or t
natcatttaaatcacatagtagagataaggtattatcttaatgcatatttgtctaaagattcaataacaaatttatcatttttcacatatagaagttttgattaagaaccaccaataaaacgaaatatgtgcatggaactctctgtgggattatttagaaatctgacgtaatccattgttaatttcataacatcagtgcccttgccttactaatatatttgacttgctcttttagaaatttcaggattaaattattgttttctttttgtgacaccataaagtagaaagagtgagaattttcatgacatatatgagtttaaaagcatactctgctcctagttaactgtttggaaagtatttatctttttgcatctcagtttcctagctcaattttcaactttaaaaagataaagatatactggaatgttataaacatcaaattgataggtgtgtatagactattaccctggcgtattttagctgctcaaaatattgttgaataaatggatgagtgtgtgtgtgtgtgtgtgcacacgtgcgtgtgtgtttacttacatagctgggacctctgtgtctgtgtgtgtctggttcttggataataaaagtacttaataagtggtagctatcattctttcttcatgattctgagaaataatatagtgatgactccaaagtgtctctaagatctcagtgctgtgaatatcgcctgcctagaatgtgacaatacagagccaaagaaaagggaaatgtctgtgctacagccccatcttgccagggcgctttactccttctgtcacagatatgaataaagaactgaaagcaacaccaggactttcttcacttccaccaccacagtggccatgaatatgtggccagaacttgggcatgatgttgcttcacattcctaatccctgttagaaggtgtgggcaagtgtgacatctgctcagagaccacagagtgactgacagcactgtaacctcctgttcacagataggaaaatgttaaaggctgcctgtgtgggataaccatatgaacccttccttttggaaaaagcagatctgtcctcgcagcatttagccaagctgtattttaacacgggcatctggtagaagaagggcataaaagctgtcagaaaacaaagcatcctgattggcattctcatgtaaatggttggttctgtttttattctaccttaattccagcttttacttttatctttcattcgttgattggtgcgggttcagaaataggagaagagaaaaatcagtcaaaa

SEQ ID NO: 31926 - DNA, 1427 bp, Bovine  19866881932059
  misc_feature (1)..(1): n is a, c, g, or t
naattgtataagaagatttcagtatctcatgagcatttctacttgtactattatcttttgtttatataatctttacaaataaggagatttctttgctatttcccatctccagcttttgtaactattatggctcagctggtaaagattctgcctgcaatgcaggagacctgggtttgatccctgggttgggaagatccctggagaaagcgaaggctacccactccagtattctagcctggaaaattccatggactatacagtccatggggcctcaaagaataggacatgactgagtgactatcactttcactttcatgtataaggagaagttttctaggtcatattttaaatgaattttattactgccagtagaaccatagattacttaccattatttagagattatttcatttaggatcctatccacatgattgtttaaaagatatttatgtgttaacctttctttaagtacactgggacgacccagagggatggtatggggagggacgagggaggagggttcaggatggggaacacatgtatacctgtggcagattcatttcgatgtttggcaaaactaatacaatattgtaaagtttaaaaataaaataaaattaaaataaataaataaatacaaacaaccctaaaatagtaaaaatgttgatttcaaactcttttcagcacaaatccaatcaagattccctgccccagctccgcaaccctgacaaaatgctcctctttttaaatacactttataggcttttatgttatccatgtggctacttctgtagtaatgatccatggctcaagcaggaatgtagaaatgcagaaacattctaagggtaaagcaatgtaatctaccacccaagatgccagcagagaggaaactgatgaaaatagtgcctgcgctggactaaacagagagtaattaagaactctttaagagccatgagttaggcaagtctaatctaagaatgtgttgcaggataagttccttcaaaggtatttgttaaaatgtcaagtttgagtatcatggtcaaagcctttgctgattttttttttttttttccgaaatcatagttctctcacaatgaagccatatctgaaaccaaagtcaaatcctgtggttaattttagataaatagaagtttaaaaaaaaatcaggtggaatcttaaaaaatgtgtatgttcccttatatcagcttaggagatcttgcagctgttcatactttcacttcatagcacgtgtcactgtgacaaatgaaaaatattttcatccactaggattactgggttgctgaaaagcaataaacaaactgtaacaagaattatgtatgtaactgacagttaatcgggctattcaaaatggtaatgaagagactgagaagattggataagtatttttgcgacaaatagtctacattaca

SEQ ID NO: 31927 - DNA, 600 bp, Bovine  19866882005880
  misc_feature (1)..(1): n is a, c, g, or t
ntggtttcttaattgtgataatgtagagaggaacctgcttttgtatgtgatgaccaaataaccctattatgcgatatgagggttgttcattactgcagcataaaccaacactttttgattgatataaattgctttaagaagaacagagtaataaaaaaaatttcacttgcagaataaagttcaaataaggtaaaaaagatggaagactaatgagtttgtcggtgagaaggtcaatggtgtgttagcaagagcagtttcagtagagtgatgggaggataagtcaggaagattaattgtcctgcaaatcatcagtaccccatggacattctttgacatgcaaacagaaaagcacctccaggtctcatcttgctcatttcacatggcagttcaaattagaagtatatgaatttgaattacaaagcttcatcttccagagaaaattaaaaaataatgatattgctaaaaacattatgttaagccctcaaacaccatcagtttttatttttaacaactttatgaaaaaaatttagctttacataataatgtcctttaaataaatgtttacctcagaattttttaaattgtgaatctgatattggg

SEQ ID NO: 31928 - DNA, 1696 bp, Bovine  19866880466503
  misc_feature (1)..(1): n is a, c, g, or t
natttactgttctttcttttttaaatataaaatttaaacatgcattttctttcataaggaatcacgtcttgtgcttctgagtgatttcccccctgcccccattcctccccacttctttctattgtcatccattacttctgtctacatcccttctctgaatcagcatttgtttatttgggagtgtgaaagtgaaagcgtcagttgctcagttgtgtctgactctttgtgatcccatggactgtagcccatcaggctcctctgtccatgaaattctccaggcaggaaaactacagtgggttgctattcccttctccaggggatcttcccaacccagggattgaacccaggtctcttgcattgcaagcagattctctactgcctgagccacccttgaagtagttgtatataattaattgctttgctgctgatgggattgaccacatggctcccaaatttgatgttgcagtgggccaacacttttgatataatccagacagtactatgaaactgataatattaggtgaagcaatggagaaaaggatcagtacatgtaaaagaatcaatttttgcgggttctaatcatcttgcttttattttcttttatcactctgcttctttctttttcctttcccataggctactttgatcatgatattttttatggctcctctttcccataatctgttctcaactaggatgattgcctagcacagagtaagaaattttctcctgtgagccttctctctcatcaagctcaactttcattcttctcaggagatggattacagaaggagcagatttaaaattcactgcctgctcatgaataaacatggtaaagagagctgttgaggtaaagttatattacaaagtatttgtttaaaaaactcatccttttgttctcatggaatttctctcttaaattcactttagcaaataataacaaccataaaaaataaatatacccaaaggccttaataaaaagggagaacaaatgcacagcattttatgtcatgaaaataatagctctgggaagtccactggaacgtccactgcttcagcctgaccttggctgttggatttccaatgtttcccctcaagttctagatgaactgtgagtgcatgcgtgcacgcaatctcacgtgtgcctgaaacacatctgctgactagaagttggtgtattgagatttcgtgattgtttttgttcatcaaagtgcttatttaagacacatgaagttaatgacagtccactcacctctcattctgccctcctcctcaatctttatttcctgggtaataggaacttcttcttcccaaacagttttgctgcaattgggaactatggccacttgatgtgaagagctgactcattggaaaagaccctgatgctgggaaagattgaaggtaaaaggagaaggggcagcagaggatgagagggttggatggcatccctgactcaatggacataagttggagcaaactccaggagatggtgaaggacagggaagcctggcgtgctgctgtctatgaggctgcagagagctggacacaacttgatggttgaacgacagcaactatactaatgtgtgtttggaagccattttattatctttaaagtgttttttaaagtgtctttctaccctttttattcccactagacttgaaagagtcttaaagagcattgccactatctgcattt

SEQ ID NO: 31929 - DNA, 1976 bp, Bovine  19866880499135
  misc_feature (1)..(1): n is a, c, g, or t
naagagttgttttaaaaccagggataaatcagccatcaagaagaactttctatctccctggagcacaaatgaaacttgataacattgtaatgattgattgatgttgaaatgttttggctttaagtataaatagcataccatatacatctcctccccttagatgtgttttctggagactttgtcactgtataaaaatgtacaatggtttattgacatgtgtattccaataagtttacaagataatgagatacacagtcagtgtctgttgcacttcatgaaaacttcaaactcaaacttaacctagaagttaaatgaaactgaatttctaattaagtaattcttatacaggacaaatcttgatatctttatatacaatgagatactcactacatttatatgctgtccaaacacactttttaaaaaaataacagtctaagaaataagacagaatattcctctttttatccccacccatgatgcaataatacagaattacaaaaagctatatactattaacaatgacttttttttgtatgaaagccagcatcatttttagtccatgggcatggtgattctattattttaattatctataaatgtccaatgcctcacagatcaatgaaagtaatgattatatgcaaatacctcacatgtgtgatgtcttggttcaaaagaagataaactgaaaaaatgaaaaagctttctgtagcaagaattatgtacacagtgtttggcatccttctttctctgtgaatggtttcttttcatggatgtaaaaatggtccatcctgatcctgagcactgtttaaatttcaccatatcctccagggagacaaatcatagaagagctatttggtaattctgtagcaaagcaatttctaattactaaagtcctccaaagtatcttccactacgtaaaaatgaattctgctccacccaacattgctgaaagggaaatgttattgtaatagatatggaaactagcaattttcttattttaatagatgaggaaaatatttttgaacattttaatagaagaggaaatttacctggcagagttgagaatcaacccaaacatgagatttgtcaacccccaagccaagctattcctagcacagcaagctacctcataacaaccccaaatcatcaaaatacttattggggtggatttcacctggacttggggcttctcaggtggcgcttgtggtaaagaacccacctgccattgcaggagacttaagagacatgagttcaatccctgggaagatcccctgaaggaggaatggaaaccctctccagtattcttgcttggagaatcccgtggacagaagatcctggtgggctatggtccatagagtcacaaagagttgggcacaactgaagcaatatcatgcatgcctgtacccagacttagcttttggggaaaaatacaattattctattatatcaaactttagcatatttagtctactttttgctagtttaaaggataagtaaaggcaaacatgtttacttcaactggaaatgccacaactttggaatccaaaaatcttttgtttatttttagccaagcttacaatttactataaaatttaagctaaataaaaactcattttagatacatttttaatttagaaatgatttttgtggttctttaagtacgctaaataggctccatgtatttacattcactcctataccttcacaagaatatactgaaataaaatgactaactaatgtattctcctgcttttataggtctcctgttttcatctctcctcaaacctacaacatttttcttcttttcttcactctcagtcaacaatcttgcttcctactttgagtattttcacaaactactgagttcatttaaaaattttctttaactctattgtgtaggtaggagaaatggataggagcactaaagggaaagtcattcagtcgtgtccgactctttggactccaggactataagg

SEQ ID NO: 31930 - DNA, 2060 bp, Bovine  19866880525144
  misc_feature (1)..(1): n is a, c, g, or t
nttgcttctgctagttgggatgtgtttatgccactataatcaaaagagccttagcaaggactaaataaataatcatttttgtacagatcaaataagtgtttactgaacatttttaccttattaatagacattaattaatgtaacttggaattggattttataaatatgttggcattttagaagtgctcttgtctttcataaaatacagccaactgctaatagctttgatcaaagcataaaaaattacttaaactaacaagagattttgaaatggaaatttgaggagaaggattcttcagttttctaattgctcttccctgctactgaaattaaccagcattttatttttaatgggaacaattatgaagagaaacatttgttagctaatttaatggttagccactatggcatgactaatatctatggggaaaaggatcagtaaattgttacattgcaacaatcagtataattgattgctcctatgaatacctgggatatttaactcctcattttcttcaatggatcataaccactgaagtttacacagagtagaaattccacacaataaatgttattaataggttcctgcttttgcctgctcaaatatgtttctaataattgcaagactttatctttcatctaaagaattttgcttttaacagagaataatcttcactttgatgatcagttttcacatcccagtaactctttctcatgggcaggtaggaagagagaaggttttggaagtgggagggtgtgaaaggggactacagaggatgagatggttggatggcatcactgactcagtgggcatgagtttgaacaaactctgagagatagggaaggacaaggaagcctggcatgctgcagtccatgggatccaaagagtcaaacacaacttaccgactgaactacaacagtaacattagaattgcatcatctccagcatcaaatgtgacccctgggaatacagagactgggagaatgcttcaagatcatttatcaatcaccctctctttagtctttatcaccactctgctcttttccatggtatttccagatatgtaggaagaaggggaaaagtggttttaaaaatcaaccttctcacttggaaaactgaagaaattaagcttcaattttatataattaatgctttttaaataaaaggctcaacttttcaggttgaaaatccacttctctaaagaaacaaaagtcctgtcagattcatacagcttattctgactgtggccacgtcacagaaaagcatctgatatggttcattgtttctcaagcagcacacatctgtgcccctgggatgtcccagtgaagatgctgtcctttccagccaagtagtagggtctgccacttggtataataaagccccttgagaggcaatatgaacttgattggctcccttcatattcatctctgtcaactagtttatttttacaaattgtttattggattttatgtatgtgcttgctttagaagaggcagtttgatcctatgaaagaaagagaatactaatttgatcctatgaagaaagagaatactaattgttcagccatagtgtttgggaccttattataatatttctctgctgatggaatatggagccctatctcacaatgtacaggtaacatgcgttatccagacattcagtcataatgactggatgggggaagctgccagcttgatttttaaagaaggtctccaggtggttcttaaacaaagtgcatcttgagaaatagtgatttagtggacttcagcataaagtcctctccatatacaactggtttatttaatcctttggactttggcatggctgtctatctggcccactgatgagtctgcctagccttgagtacaatatcaagacatcctttattatcatttaggtcctctaatatgtctctatctctcttttcttagctcccttcagtgggtcccaacatgtggttggagaaagggatatcattcaaaaagcaacttcagactctcaaatgcaaacaaacattactctcttcttttaacttggaagtagatggatcctacttata

SEQ ID NO: 31931 - DNA, 920 bp, Bovine  19866880558708
  misc_feature (1)..(1): n is a, c, g, or t
ntaaataggaactgtttctagaaatgatccattatcagtttacaagtctaaaacagagtctatttttttgggggggctttccaggtggctcagtggtaaagaatctgcctgcaatgaaggagatgcaggagatgtgggttcaatccctgggtcaggatgatcctctggaggaggaaatggagtattttatttttaatctgctatctataaagtttagcatgtgcgtgcatgctaagttgcttcagttatttctgaatctttgcaaccctatggagtgtaacccaccagactcctctgtccatgtgattctccaggcaagaatactggagtgggtggccatgccctcctccaagggatctttcccacccagggactgaacacacatctcttatttctcctgcactggcaggctgtgtctttaccactagcaccgcctgggaagccctaaagtttagtgtatgagttttttcttttttaatctacaatgatagatggctaatgtgttcaaacacatttatcttaataaatttgggttcagtaaatctttagcccttagatttttccctcaggccaaatatttcaagttcagaggtaacattgtgttggcagcagaatgttctctagataattttcattttgcccttcactgggtgtctcttgctagtgcattctgtgtagattctcttacatttgatgaaagcatttgaattaatgtgagtggtgcttatactacttactcctcaaaggacttcccccatctctaaccttctttagtttctgtaatgtattaatccatcaggactaaacaaagctataaattggctttgaataaaaataatgcttagatatgttaaaaaacactgataccgaatgtaacctttaggcccttctggaatctctcagaacagagaaaaggcagt

SEQ ID NO: 31932 - DNA, 1072 bp, Bovine  19866880607896
  misc_feature (1)..(1): n is a, c, g, or t
ntcacaaaataatgcatgcttgtgagtatgactcagcattttttccttgaaaattagtcacttcagaagaagacagatcattaacccttgccctaaatatcgaaggttctatttcagcaaagtattttgagattcatgagtgactcaaagtagataatgattagagtttaaatcaagggaaggactataaagcattggccaaaatgctggagaccaaagaagagtgatgatgataaatagcagcaaaaccacttacaaacaagttttttcctttatcaaagcttcaaatacagtgccatactaactcactgtattgcttaaaatgacagtttctcaacatgtcacagtaaaaataatcaaatgggtttgccttaaaacatcttacatgttgttgaaatggtactgaaaaatattagattttcaaccaaaatgtgactggcagactcttaaaattggtgtcatattcactttaagaatatactgctcaacttttgcagatcccctagcttacctttgctcttgcatcaatgaagcatttaatcttgtctgccttcaacaaaaccaattaaacagtcacactgtccagcaagaattgttctttgaaaatatgaagcttaggtgtcagaacttggccagaatatgtgctcccaggcacaactagaaccctatggtcaactggatagaatttttcttctaaaacaccatttgctctttctccaaatccaaagcaaagatcttttgggcaaagtaactgaaaagacaggctcaggataaagggcaaatacagactgatttttttttagaactgaactttccttaagctagaaataaactaatttagaatttgtacacaagaatcagaaagatgtctttccttttttataacttttttaaaaagcaaaaacgtacccaaattttgaaggaaatattactggaataagagctatgaattcaatatttcagtgagtaaaattggaaaaaatctttttagtacagctggcttataattcccatgtattacttcctctcacttttctaccttcctctttgtcaattttctaccttttttgtg

SEQ ID NO: 31933 - DNA, 1555 bp, Bovine  19866880616955
  misc_feature (1)..(1): n is a, c, g, or t
ntgactaatgagtatctttgtcactttggtatttagaggaataaaacaaatattttttgtttcttgcatgtgtgtgtgtatgtgtgtttctcttttttcccctcattttttacctaattttttacttgtgatttaaaaacaaaaactcgtttcaaacattagtatcaaaagttgacttacttgttaaggtttatgagccctcaacaatgaaattattaattcttagggcttttgtagtttcaattaaagttctcagtctccatgtataacatatgtaagtagaatgaataaaaattggttctcaaatgaaaaagagtaataaacctcaacccaaatttaacagtgaaattgaatgtgttagtcattcagtcgtgcctgactttgtgatcccatgagctgtagcccaccagtctcctctgttcgtgggaagaatactggagtgggtagccattctcttttccaacccagggatcaaacccagaccttctgcattgcaggcaaattctttaccatttgagtcaatagggatgcccctaggggactgtatagaaagacaaatattaaaaaaaaatgtattcatttaaaaattaatttcctgccaagaatcttggttctaccataactgttaaccaatccaaactcccctaactattccttccctctggcaactataagtttgctttataagtctatgagtctctttctgttttgtaagtaagttcatttgtatcatttatgttttaattccacatatcagagatgtcatacgatacttttccttgggagggtcatgtacatgcttctatatttaaaatggataaccaacaaggacctattgtatagcacacagaactctgctcaatgttatgtggcagcctggatgggagagagctttgggggagaatagatacatgtatactggagaaggaaatggcaacccactccagtgttcttgcctggagaatcccagagacgggggagcctggtggctgccgtctatggagtcacacagagtcggacacgactgaagtgacttagcagcagcagatacatgtatatgtatggctgagtccctttgctgttcaccaaaaacttatcacaatattgttaatcgtctgtaccccaatacaaaatcataaagtcaattatagtttgctcaatctcttttttccccaacgtaatagttttctgaacttttgtgaagttagtgtatgagtactaatcagaaaaatacttgggggttatttgttgagaatcttactttaaccaaaactgcaaaggagtttttccttggatcaagcactggggcctcaaagcatcgtcatttaatatgcaatttttagtagactttcatctgaacaagttagaatttttaaagtgaaattagccctccaatttcattattatttaattatttatcaaaggaatcaggacgaagggaactttaccttttgcttttacatgcctgagtttttacttttggtttgatattagaacttcagtgcttcaagcacatctttttgaactgatatattgaaacggaatgctattccaa

SEQ ID NO: 31934 - DNA, 3280 bp, Bovine  19866880632605
  misc_feature (1)..(1): n is a, c, g, or t
nacgaactaactatagcttttataagtgttctttgacaacctccacaaaggattcccaggtggcgctagtggtaaagaacctgcctgccaatgcaggaaacataagagatgtgggttcagtccctgggtagggaagatcccgtggagaaagaaatggaaacccactctggtattcttgcctggagaatcctacagaggacctggtgggctagtccatagggtcacaaagagtcggacatgactaaagcaacttaccatgcacaaatgctttgaccttcaccttctcaacttctctaaagttaacaagaggaaagctcttgtgatcccagtggaaaaacagggcaagtctggtgtcaataaacaaattcccttatgagttgaccaaaccaaatattcagccccaacttgctgggtgcttctccctgctacccggtgttccagtgcagatttgcagacttccctgttggccacccgggacctcaacctcacaactcacagtacacaggagacaggggaacccacaacaagaaatgggttcacagccttaagccatcggaaatgctcagtgcagactaccatcagcgatctcagtaacatcctgcctttacgtcaactagcaacttggaactctccccatatctcatgcacagaccacagacaccatcccccatgctctcacccaggaaaagaactctgtttgtcattttccagaagtctagttgctcaacctttgctggactatttctagaaggcaacaaacccaacaagcctgaaggaacaatgtggacagagtttgctccctctttcacatctcattttaatctcttcttctgcaaaataaacagtccaaggcccttctctcattccctgtttatggatacttcagtcccttagttgccctgttcttattacatttgggtatcaaagctagtttcaccaagggtgtttaccatcatcaccaagggtgtttacaatttctagttaatattattgataatgttattgacacagtactacagataatgtattatttatcacttgtctctataatgggaggcaaatgcctgggcctttaggagtgattatttactttcctcattacatactggagcacatagtaaccaccacttagctgctactttctgatttttctcaaatagttggggaaggggtttttaaaaaatcacatccatttttctttcaaaatcaaaacatagcttctaaaagtcaaattatttcccacgtatttttaaaaatttaatatgataccattcctggaaagacccatcaacgagaactaaagagcagtgagatttaattcaatgaggactggagggaaatgcatgttagaatatgtggaaaatctatgtgacactgaagagtcgagctaaatatagaagccaaatttttaaaaaattctgagtttgtgtccataagctaaaatgctgctaaatacgtcaatattaaagaaagcagcaaaccaaggcccactgtcctgcttcctatatgaagtgggcaaatattaagaagacactgggaggtcattatactttagaatcactgcatagcaggctgagaatagtgtagcagggaaggagaaatggaaggcaagaggagaaagaaggaaaagaaggattaaatctgtaacagaataagccaagcctacttgcctctacaaataccatttctgccaagagaatagaggatgagaatagtgtttcatcttcaataatccatctaacaacctctcatgtagctactataatgatttatgcagtaatttgtagaaaccatccttatctgtattatctaacatggatttgaaaaaagaacatcacgtatataccctgaaataagaaaactttaagagacaagcacacatccaaagctactattgaagagagaggagtaaaaagaaagaattgttctttcctgacatcaaaatgtggcaggtttaaaaccaggaggaagttatctatggatttgtgctgttttgttttgtttagatgatagaatctgctgagagacttttagaaatggaaagaaaagctacagcagatacagctgagacaacatgaagagctgtctttcctgaatcccaaacagcagcagataaaaagcagagagtaaacgaaaaggtcatctcacactcgtggccttctgagtttggggttttcctttttcctttggccactaccttgccagtcatttccatgttgtttttcttgtttaatcaagaaaaacaggcaagacaaaagggattattttccagaagctctgcttgtttagcgtcataggaatttgaggttgttatctagtatatttgggatgattcttcaggggtaacagcgaagtctacagtgtttatgaatttatttcctagtgtgatatttccaccaccttttactcttccggatgggtttcaactgcatctgtttgcttttcctgttgcttgtgaaagtacacctcgtgatcactatccacagctgctttgtatgagcctcagagaattctatgagcagggaaattttaaaacatacgagaccagagtttttcataaagtcttattaatcatattttgaaagggataaacgtcttgccaaatttgtctgaatttctggtcaagtaaaaggcaggtcttcaaaccatcagacaaaatgtattcagtttatatctagtgtgtccagaactacacccagctaccacatgggatgtggcacttttaaaatacaagacatggtccttgctctcctacatggtttaaagtttaactgaaacaatttagagagcaatgaaaaggtaaagcaggaggaagagaggtctcaggaggaacagaaatgccagcaagaccttgaactatttaggattcgtggagaggtagagagaggggactccagtccaggaatagcaagattaaagatatacaggagggttgctttgagaattttcaggaacactgagtaagcctgtgaggaagcaagcagagaaagccaattaacatgttcaaaaagtttcggttatttcattttcagttatttccaggaaggggacatttttatgctcattagagaattaaatgctttgattaattgggtttttatccccatttaagttctatttcctttaatgcaccatatttttatttttttgtagtaaactaaatacaggacctgaaatagtgcttcttcacaaccaaagtatgacctcttccctgaagaaaccacgtgttagcagcacatgttcctcctaccaccagcccaccctactgccagcctggtga

SEQ ID NO: 31935 - DNA, 1559 bp, Bovine  19866880633878
  misc_feature (1)..(1): n is a, c, g, or t
ngcatcactctgctgacaaaggtctgtatagtcaaagctgtggtttttccagtagtcatgtatgaatgtgagaattggaccataaagaaggctgaacgccgaagaactgatgcttttaaactgtggtgttggagaagactcttgagagtcccttgaatggcaaggagatcaaaccagtcaatcctaagggaaatcaatcctgaatactcattggaaggactgatgctaaagctggaacttcaatactttggccatcggatgtgaagaaactgactcattggaaaagaccctgatgctgagaaagattgaaggcaggaggagaagggggcggtagagaatgagatggctggatggcatcactgactcaatggaaatgaactggggtgaactccaggagatgatgagggacagggaagcctggtgtgctgcaatccatggggttgcaaagagtagaacacaacttagtgactgaacaactccctaccctgtaactcacattgctattaaaaagaaaaaaacaaaacaaaacaagtaatattccacttcaattttgatttctaaagaagacccaaaatacgggtgtcaccaagacttttatcagtttctttgctctttgacattatagcacacactatctccataatctcagtatcagcaaatgttatctaggtgtttataggtggtgctgaaaccctagctttccattctcttaccctgacttgaactatggttagtagttagtctctgaaagatcagatgcattgcttctagagaaagtgtgtcctaatttgagtgattcagaagtacaggcagaaaaagtcaaaggttattttgtaattaatagcaatttatgaatatttaatactacattggacatagatttcctttgttgttttaaaaacattttcatacacaagtctagaaatgcatttggctcaactctgaaaaacagacactgaagaatttagagcagatagctaggcagttgttgaatttaagtcctgtcttaatctggggagaggaaaggcctatctccagcatgatctgatacagaaagagaggtaaggggggatctcttctgagtaattccactgagggctcactctctttgtctatatttgtgagtcgtatgattcactaggctggtagtgaaatcattagggaaatgctgtgcttggaaaattctctatatcagcttatttttgttgttgaaatagataaagcaattaagctgctattagaggtaactggctttctaatttcaatttgtcaaaagtaatttctttcatgttatacaaacatacatacaagtataaacctgccataagtattttaaataattaaaaaattagctaatcatttttgaaattattctaaaactaaaagtcccctaggagtgactacaaacttgcaaattagatcttaaagagggtttaaaaaaaaaaaaaatctcagtaaggtctcaaaccacaagagacaattttttttttaactccaaaattcatctggcttttataagcattgaaaaaaaattttcttttggggatttccatataaga

SEQ ID NO: 31936 - DNA, 836 bp, Bovine  19866880655262
  misc_feature (1)..(1): n is a, c, g, or t
nggtttgaaaggattgtgattcagtggcagaaacagaaaaactttattacattttttttatgaggcaggatagcttctatatcatacgaattgtctgtcacaaacagcatcatgctagagataaaactggattctgttagtcttcagtcacttttatgaaaccaagcagactggtttaattatatatttttaggatcctaaaactgactctcccattcttggctcttacaattttcaataaatacacactaagagtcccaaccttagagtttcttgatgtcttccaaacaaaatatttcaggtttgttcatttgtctaaatttatttagaaaatataaatataaaggatgatgatggaatagacccagatgagtgtgtgcatgctcaatcgctcaattgtgtccgattccttgccaccccatggactatagcccaccagactcctctctctatgggattctccaggcaagaatactggagtgggttgccatgctcttctccaggggatcttcccaacccagggattgaacctgtatctcttgcattcctgcatcacaggcagattctttccactgagccataagtacaatgtcttaaactttcaaatttacttacttctttttgaaaacatccatagtacagtctcattgacagtgcagtaaaatgaaagaaaaaggttttttactattgttattttttgttgaaatgtagttgatttacaacattttgttagtttcattcattattgttatttgaccttgaagagtaatgaactcggaaaaatgaataaataaaacagtaaatcattaacaataaataattccagttaggtccta

SEQ ID NO: 31937 - DNA, 1271 bp, Bovine  19866880666325
  misc_feature (1)..(1): n is a, c, g, or t
nattaattaataagtaagaagagtagatgtcgccagagcagcatggatgtggaacataaaggatgtgtggcatatcaaagccaaaatttagagcagagggtatgcgccccattatgttcaaataatgcttaagttatccttaaaatttttcaatcagcataagagaggaaattttgagaatgagaaacggcttctaatgctgaccactaagaaatctgtggattagcagaaactctactgtgttggcaaatttttttcagcagcctaattcagatcctttgaaaacagtctcatcctttccatctgacccatttacttagaagtgataatgacagaaaataaagttactattcataaaacttcaagttcaaggagaaacttcagtcgtgcctaacacatagtagatattcaatgaatgtttattgaattgaaaagatggtatgtgatgatctcaatattgtgtgtgacttgggcagatctggtattgcaagtgtgaaaggaatttaggtgatccattgaatgaattttgatgaagacatttattttagtcagttactggagtaaaataagggtctttggtgggttacacttactagaatgatatgtgctacagacatttgcagtcttttaaacattagaattacttcataccacatacaggaagggaatatgtgaactaatttccttatgagtctctagtggcctattaacctaaaatcaatttttatcaaaatttaatttgtttatgctgtatcagtaaaactctccctgatgtttgaggtgttttttttttcctatccctttagttttctattttaacaaacaaaatatttcaaaaatgtctttagtcaacttagagatatttctgttttaatttcttatttctaaaaagagttcactaacaacagcatttcatatatgctcgcatgttctcagcctctttgacatttttatcatcctttcaaatgtatccttttttattttgtttacattcaggaattttctttgcccaatttatctaagacaactttcattttatttacatttttgctgagtatttagttctctggctgtgccaacaggctcaaacttagagattttgtggctgcatagcagaaaatgtgtgaatcactcctgtttgcctaatagtctctaattagttggcaggtgattccacttgaaataaatgctctggcaaggagctcaagctgctagacagtaaaggaaagacagagaagaagagatttctacagcattctgcctcaggtctt

SEQ ID NO: 31938 - DNA, 1965 bp, Bovine  19866880752096
  misc_feature (1)..(1): n is a, c, g, or t
nattttatacaaccattttaaaacaggggcatttaaaaagttttgctcatgggacagaggagaacactttaaaaaaaaagattattgaactcttgtcaagcctattattgttttttacttggatgccattaataaaggtaaagctacattcatctgaacctatctaccgaccattaatctgcctggtttcttatttatctagtccaatgtgcagactggaataactccccctgcttagagataagtatgcattttatcatcagctaagagtccagaactgtctttaagaccctgctcagttttgtacgagtttaaccactgaggtggcaagacctcaagtcctttggccaacttctagcctttagctctgtttcaaattgataactttgattctttggaaattttaatactttgaagtatatttggctacactcaactatatgatggtactcacatgaaactagaaataacttagatgttcagcaatagagaaatgtgtatataaaatatgttacattcaaatataataagccattattcagttcagttgctcagtcatgtctgactctttgtaaccctatggactgaagcatgccaggcttccctgtccatcaccacctcccagagcttgctcagactcatgtccattgagtcagtgatgccatcaaaccatctcatcctctgtcatccccttctcctcctgccttcaatcattcccatcatcagggtcttttccaacaagtcagtttttcacatcaggtggccaaagtattggagtttcagcttcagcatcagtccttccaatgattattcaggactgatttcctttaggattgacttgttttatctccttgcagtccaagagactcttaagagtcttctccaacactacagttcaaaagcatcaattcttcagctctcagctttctttggccattatttgttattaaaataatactcaggatgaatattaaacaatagggagaaatgtttagaatatggagttaaatttttaaataatgaaaatattgaaactgtgtatacaaaagaattccattttatggaaattaatacgaatgtgtgtgtatagtatatatgacaggaaaaataacaaggaattaaacactaaacaaagttaaagttataaaggaaacttcctttccctcttcctgtatgatgtgttttctaatgttttgcaatgtgtatgtattactttgtaataaagtgaagaataattcacaaccaagaagtcctgcatgtcttcacggaagattcgctctttgttttatcttaggatgaaaatggagatgttcctgcctagagagttggatgaagaccgacctaaaactagtaagagtgagaggcagtcttatagaacctgacagaacggcttcagtctacacagatccctctctgttctgaatttccaagctgcgaagagctcaaccacaccaactggcgagcattcagtctactgttctttccatcatccattacatttaccatctcattttcagttgggggactgttaacttggattccatcccaacagaagaaaaaaaggataatagaactataaagaagaactccagtgctatagattggctcagctctgctccactggtggcacaatttcgttactgataaaagacataaagtgtctcctccctggtgctagttactctgtctcctgcacctctaaaacggctttataataataccacgtgtgacagcataggggttccaatgagacgtctcaaaacttcaccagtgcccaagtgtaccaaggtcaagacttcaaggtctcctagtgccccactcagctcatgagagaatcatatcagtgtcagatccagtgcccattaccaatctgttaatatcactgcacttgggtgtttgtaatctcctttgaagttgtgtttgacgtatcttagtatttccaatgatgctgtgcttggtactttg

SEQ ID NO: 31939 - DNA, 1577 bp, Bovine  19866880809547
  misc_feature (1)..(1): n is a, c, g, or t
ngacagggtacccctataatcctctttaaaaccaccttttacttacgtcaacagggaccagaagacttttcccaagatgctgattaaaagagaggcaccaggcttcggtataaccgttcatgttaggaacatacttctttatcgtctcatcattgagcctcagccacacaccatcatcattgtggatctatgggatacaagcaacagaaacaagccatgcccgcctgtcattccgaggaaggtagcaaagttctgaaaggctcaaagcaggcaaataatggtggacatggagattaagaacctagtttttgcataagtatgggagaaccttttaggaaaacaaccagcaagccaagcaatacaataatccacatggtgagatcgtaaaacacattgtcacttagaagtaaaagcacaaagaagtcacactttgagataaacacttcaataataaaagcagaggtttcccaaaagaatacaagcctttcttcccctcaatttagattttaataatcagaagttacgtaattgtattattagaaaaatgtcctgtccaaagttaagtgatacaataaacacatacaaaagcaaacaacattttaaaagttcaagaaaaaccactcattttcactgaattctcatactggctctgactagtatgttaatttttatgctaaaaatataattttagttatttattgataaagaaaaataaatgcaatatttgaaactcaatgaataaatttttaaattctgtgaaacaattttccaaatactacccaaactgcttaaaacatattctaacaaaaaatttagtaaccttatatcatgcaaacagtgcaaaaatttttcatccaaaatttattaccaagtgtttctttacaaattacctcatcaatgaaagtgatggttccattgaccttcactatgcctatctgctcactctgaagagaagggtggctacggatacgcagccctgcactgtccttggccacaaattttcgaacctgagaaaggcaaagacagacagatgaaacagggaaatcatggaagagagaccttataagtggtaagagataaacagacttgaaagtataattctgagaaagcttccaaaattatttgtagctggtcttcctgtgcaaataacaatggcttatttttaacaataaagagaacatttttaagtataaaactgtaaatcactgaaaaaaatagaaaattatttgtatattaataagttaatttctaaactttgaagacatgataaaaaggaaaaaaaaagagcctttttttccttttaggaaggtatgatataaattctattacccatgtttcttttttttttaataagtaagtagtttactaaaattcctatagcacttactctttagatgttaggaaatgaatttaacagcacaggatactttaatcttgagaactttacacactttaatgtcaacagacgttttgttaattgtaaactttcaataacaggaagtatacagagtctataaattactatagcattataccaagaaccaaaaagtacagttttatacttgaattaccatgaa

SEQ ID NO: 31940 - DNA, 1079 bp, Bovine  19866880841866
  misc_feature (1)..(1): n is a, c, g, or t
ncacccaattctgcaaatcagaaccacaaatgagatgttacctctcacctgtcagaatcatcaaaaaagccatcaaacaacaagtgttggtgaggatgtggagaaaaggaaagcctcatgcactgtagataggaatgtaaattggtgcagcttctatggccaacagtcactcctgggtacttacccaaatgaagagaaaacactaacttgaaaagatacaggcacccctaaatttatggcagcattatttacaatagttaaggaagtaatgcaagtttccatcaagggatgaatgattaaggaaaatgtggcatatacatacaatggaatatgatccagccacaaaaaagaatgaaatcttgccatttgtgacaacatggatggacccagaggatactatgtttattgagtaagtcagagaaaggcagattaccatatgacttcatagggtatgtagaatccaaaaaataaaatagaaacagacccatagattgagagaactagtggtcacctctaagacagagatttaaactctattattattttttagaaagtccaatttaattgtacggagtttcttagcatttatttttatgacaatagggaatatatcgtatctgtagatttgatgttaaagatttgcatgaataatagtttgggtcaaaggttagtggttcaggaagtgtattttataaactgacctctaaagagcagaatgttactaagaggcctcaatgaaagtcatttctgtcactgggatactgattctgccatatttttgaaacttacctgatatggttgctactagaactaacgtcccattttccttccagtgactatcatcaatcccttcaaaaaagcaggcagctccttgattacaccagaaaggggcattcatttcaggtcggagatggggaaacgtgcagtttccaagttggaagagttcataccattccatcgtgtagttcttctccgttaaagtactcctgaatccaatggcatcatgcatgattttctgtgtaaaggtcatatatgtataaaagcatttgggaaataaccacggttcaggagccagacag

SEQ ID NO: 31941 - DNA, 1991 bp, Bovine  19866880918801
  misc_feature (1)..(1): n is a, c, g, or t
naaaattattgtgcatactcaagtatttataggtaaaatgagcttatatctgagaatttctttaaacaatctaaataaaaagagatagggcaatacacaggaatgattagaaaaatattaaaaattgttgaagttgggtaacaggtatgtggggactgatttttcttttataaaaaatgttattgaaatatagttgctttgcaatgctgtgttagtttcaagtgtacagcaaagtgattcagttatattgatacatatctatatatacatatatatatcaatatatattttcttttagattcttttccattataggttattatgttattgagtataattccctgtgttatacagtagggccttattggttatccattttatttataacagtgtgtatattttaatcccaaactcctaccttatccctccatcatcttttcccctttggtaacctcaacttttttctctatatctgtaagtctatttatgttttgtaaataagttaatttgtatcatttttttagattttacatataggtaatatcatatgatgtttatctttctttgtctgacttacttcacttagtataatattctctaggtccattcatattgctacaagcattattttattcttttttatggatgagtaatattgcattgtatatatatatatataccacatcttctttaatcatttatctgttgatggacatttaggttgcttctgtgtcttggttattataaatggtgctgctatgcacattggagtgcatgtatctttttgaattataactttcttcacttttcacttctttgtagatatatatctaggagtgggatcattagatcataggatatttttctatctgcttttgtgtttgtttgaaattttttctaataattatttttttaaaagtgaaggagggaggagggttcaggatggggaacacatgtatacctgtggcggattcattttgatatttggcaaaactaatacaatcatgtaaagtttaaaaataaaataaaatttaaaaaaaattaaaaaaaaaagtgaaaaacatgtggctattcaatcaacacttattagttgcttacttgagccagacctcaagagaacacggaaataaaatcagaaggctcagttttttgtgtttatgaatgtaagcaagtccttttactccttttgtacttgatttcctcaccataaagttgaaatcacaatgataactaccttcctcagatagcaccttgctgctacagtagctgaggacacaaagaaattaatagcctcaccaaattgatggtggacttgattcccaaagaagaggctgacccaacagtaccttaaagtccaaactctgctaatgaactttcctgtggctataaatgatgtccttaatgatatctgcactgtcacacgaactctaccaaaaatatagccttagaagctatgattgcctcaaaatgtctttctctagagactaacatttacaagttgtcattaattctcagtgtaacaagttaatgcaaacagtgctggaaattacatccaagttctgttaaaaacaggtcatgtgtaaacacagctaatggtaagaggcaacatgcaggaaacaatgccagcatcagcagcatctttgactataaagaaaaactacgtgtcatcaagctcagtttaagcctttactcccacaagggtagttctgcatcacaaatattcaaagccatcaacttgaaggagaatctaataatgatagggacttgggggtaaggatttgttattttttttttattaaatcacttttattactcgaatcttgaataaaattaagttttagcaaattgttaacagccttaacaggatggagtttggagggaaggaatgaggggatgtagaatttttgagaggttctaagctttatgttctggtgcctgtcctcactacttgcacagcttgataggcatgactcatgctgaccgtgcatctg

SEQ ID NO: 31942 - DNA, 1778 bp, Bovine  19866880956331
  misc_feature (1)..(1): n is a, c, g, or t
nttactatggtgcctggccagcatgggtggtttcagtcagtgtacttcccctaacaggtagactatcccttctctaggggatctttccacccaggaatcaaaccagggtctcttgcattacatgcagattttttaccaactgagctatcagggaagcccaggaaagagttaaatgtgaataagttaaaatccatggcttgggaaatagatttctgaatgaggaagatgaacagtccactgaagaaggaggaaacagacatttccatcaagtgagatgaaaattgtcagtggatagtgtgagtcaaataagcaagggatgcttttttttttttttttattgcactgttcccttttctttttcttctcttaaaatttcttttaaaagaagcctaagaagcagcatgcaacgcatttggaataatgcaaatttactctcaaattctgaaaaatagctttttttttgggggggggtgcatttgaatgaagttcattttcttgtaccttagaagttctcatttttgtggtagtttgtgttatacttctcactgtaagcagtcttgaaccaagctcagccatttctgaaaatgaggcccacgacatttctttcaaaaatttcctgttaaaaactctttctttgttcagtgtcacggaaagaactgttggttgcacagaggtcttttaaggaagaaaaacactctataaatagcaagctttattaaatcaaccccaattctccactccatgaggcaaaaatcaagctttcttgaaaactagtggcataaagtttttctagattgagaggagattgggaatgaagtgatgagaagcctgtctcttcactccttgcctcctcactccatgtagggatagtgacccaggcatttaataatcgtgataacaatcagatcagatcagatcagtcgctcagttgtgtccgactttttgcgaccccatgaatcgcagcacgccaggcctccctgtccatcaccaactcccgaagttcactgagacaatagcaaacacttatagagcacttaccttgtgctgggaaatgttctaagcactgtgttctgtaaatagctcaaggactcctctcacaccccacgagggaggtatgtttttggacgtgggaaacaggtacagagttgacgagacttgtcagagatcatgcaagcggtatgtgggctactgtggttttgccagttttactcatagatcaagatgacccctcatgggatatggtttatgtctaccagaaggagaccttcctagtcaagcatatatccttaatgctctctgagattcttatcttagtctgaagcctgatcagtacaagcttcatgtgagttaagtgttgagggtagattttattcaaaggaaagcctcaagaaagagacaagtcatatttactttcctactgtcaactaaaacatatagtgacaacctgaaagtagagagttattttatttggtgggaatgtttaggactctgagcctgagagacagcatctcagtagttctgatggggaagtcaggctatatactagtttgtaacaaagggagcaggcagtctgaacatcaaagatcaggtatcccctgggctcactgaattcattccgttcatatgcacctcagctatctagggccactccggtttccttgtttaccttgctttttgcattcccccagatcttcagcaatcatggggcatggcagcatctgatggatcacagttttgggggccctcattcacttttggaggccagaaaccactgatga

SEQ ID NO: 31943 - DNA, 1072 bp, Bovine  19866881021674
  misc_feature (1)..(1): n is a, c, g, or t
nacatgacactattatgtttccttgaaattcgtcttttaaaagacattaaagtgaatattatatatgaatggagataattagctagaaattgatactacttatatttacaaactaattaattgaacttgactaatgcttagtgcaaacctagaaaagcttatactccagtatattcttttcctaagatagataataatatcacaatgaataataccatttgctaacgatatactacctggctcctaacaaaaactaaaccagctggtattctcttaagcaatcccaataatagttatgaaggtatttttgtagaaaaatagtttagatccaagtgtgaatgtacttccttaaagtaaagcaaagaggtcatgcacttgaattcagacagatgactgtacaagctgagataaactctctcaattctgtgactgtgtttacatactatacagttaatgtgtgagctgacggccaagaagagcatattggtgtcatattaggagttttgagacatttatggggaagcctcagcagcttattaagaaaaaagaagacttggctagtataagtgcagtttgtttgggtctattttccagatcagtatgaattactattgatatcatggatgaagggccttttgcctagaaggctgaactgaatcaaatgaccagtttaatatattaagaacaacaacaacaataagcaagaaaagagacaatttgagataatctggaaacctaagttgttagtcatttcagagacaccaaattcacttaaaagaaacaaacaaacctgcccagtacggcctctcctccacccactggtaaagtgaaataggttcattctcttggggcattgccaagtaacaaaactccaatgtaaatcaacaaaagttatccctagaactggtgcttaccagtcatgcattttataaaaaatattaaatcaaatgttttctttatatattttatagtattatttgcttattttggaattagaacaaaaataacagtaatgttttaataactgcacttaataaaaatgtaattacaaatgtcttagctaggtatgtct

SEQ ID NO: 31944 - DNA, 1437 bp, Bovine  19866881026211
  misc_feature (1)..(1): n is a, c, g, or t
ncagttcagtttttaatcagctttcccctttatatggagtaaaattttttttaatcacattaaaagaaaaataaactttgttaatcctaagttatattcaagcagagaataaaaataactactttgtggttatttagccttatatctatttcctctgggaaagtatcttaggaaattaacatattggatataatttaccaggctgtttgcctttttttaatatattttctgtgccgtattataattcacctttaacaggaatatgctaagatagcctgtagcaagacccacccttgtggccatccatgtggaggtgttaaaaacgaagagcactgtctgccctgtctacacggctgtgataaaaatgccaccaccctgaagcaggacgccgatgacatgtgcatgatctgtttcacggaagcactctcggccgcaccagccattcaggttgtctgtgcttgtaaagcattaagtgtctagatttttcagtaagaaatataaatatactcatcaagtaaagaagtgattgactctcttataattgggtgaaactgtcccactaatgtctaccagtttcttaaagagcaaatgctctttttgttctgtgtccatgttgtacactgagcttttatctgtggtttgtatgagcctgtatagtcaagtgaatgtctaaagtgttcataagggagaaaaaaaataattattcaatagcttctctcttcttaatttccaaaattcagcatggcattttacagcattatgtaattgatccgtgcataataatacatacctctatatataatgtatatacatacatctgtaatatactagtaatattatggaagttacaatttgctcagtaagattttcattaacatttactggttgtttgtttatatgttcagttcttgtgactctaagacaatgagtattctcaaaaacaaatcttaaattttttaatcaatagtttcttcttcttcctaagaggtacaaaactgaatatttctcatttctccctaacccagcttactgtctataaggtgatattgatacataaataatgaaaattgggagaagctgaagatcttgttcgtaatgtcccatgaataacagaaggctggaatttcattctactaaatttccagatttttctcttacctgctctaagtagcagcctacactgaatcatctgtcagttattcgtaattatggttattacatgtggttatatcccttctccttttttcctttaagctggactgcagtcatgtattccacttacagtgctgtcgacgagttttggaaaacagatggcttggtccaaggataacatttggatttatatcttgtcccatttgcaaggtatggaaagccccagaaattacctacttcctatttatgttcatctcgtcttcatctttgtctttcaaaataaca

SEQ ID NO: 31945 - DNA, 892 bp, Bovine  19866881051465
  misc_feature (1)..(1): n is a, c, g, or t
naaatttcttcttctcagtctccactgttgagttctaattttggcatgccacagtattataggaaatcatctcttttcaaaacactaaattggcaaatagtccatgtatgggaatagttataactgtctctgttctagacatcttacccactattttcctacatgttctgtagtcatgagtaagtatactgtgcctacagccctccaccctgacttctgctcccctgcagagattcagggtgccttaaaattcttcatagattcgattcacaaatgccactataattcagccacacttcagatttaaatgtagattattgtcctgtaccttgaaaatctttcaatttacagcagtgcaatatatccaggttaaaagtcaatatacagacctagtctataaacaagtcttatttgggcttatgacagatgctgtataaactcattcccttgtgagtgaatagtgtcaaaaaccattgtacagtacactgaaatttaatccttgagaagagttagattctcaatgaaatatactgaaataagtcatcacaaatgtgaatttacatagtatataatgtttcttcaaaagtaaaacatattaactaactgcacagctaaaatccttgctttaaatgtgctttcatgtaaagatgcacaaaacaggacttcattgctgatcatatgagtatttctacttacaggcagtataggtacagtcatgaaaattgtttccagtggtttcacttatgtaacttgcgctcggaagccatatagtacatataatgtaagcagacctgtattttaattctcaactccaccacttactagactcctgccatctgtgttaactttctttcttcatctgcagctattatagtattgcttatctttacaa

SEQ ID NO: 31946 - DNA, 1508 bp, Bovine  19866881131764
  misc_feature (1)..(1): n is a, c, g, or t
naaaaggcagagggaaaagcttgagaccttgtaaaggagaaaaacaaacccttctccaggagaatcagaattgaattccaagactgagaaagtaaaactgtttaatggacatgatatgagaggataggctgcccctttgtaactggttttccctcaaagcagcacgccacagttttcagagcactttttttaaaatgaccattgtctgccctggaagaaagggaaaaaaaaaaagtttaagatggctgaagatatcaaatttaaattccagacttgtatccactagagtcagcagaaaaccctgccaatatagacagtttatttgggaaatactcaaagcagcaaaacttagagaaagtatgcagagatttcttgtccttggaatgagacagaaagaaatccagggacatattgtggtgacccacgacttcaatcagcatgcacaagcccatgacatagtggttaggaaagcattcagaactacccagtgtgacaggagaaatattgtttcacatatgtgatttctatccaaatccactcagatccagagaaggggataaagaagtgttcattaactcggattacaaaggtctaagaccactcccaagaaggcccacaacctgaaaagttcaatgaatttaactcaacttattggtgacagtgaactttgggtcaccatccagtcccaactgtattagctatttcttgctatgacacctttacataaacacaccacaaatcttaagtgactcaccatcttaaacatttattttgctcacaagtctatgggccatttggatgacccttctgcaatgggacaggctcagctgatgatggctggacttgctcatggatctgagtcagctggggtctggctgtctatggcttcagtatacagctgggatatctcctatcccattcatgtagttcctctgttcagcaggttagcccagccttgttctcataaaggaggctggggtccaagggagggagcaatagcacccgaggcttcttgggatccaggcttggaataagcagatcttgatatcggctgcattttattggccaaagcaagtcacaacatcagccggattcaagaatggggaggtagagcacttctttataggagatgctaagatttcacattgcaaggagcatggatacagggaggggtcatcaatgaaggccattaggacagctaatctaccacactagcaactgatgtaagagaattagttttgtgagtaaatcaaaggaacttggttaaagacaatgtgatatcctggcacagcaacaacaaaatcatattggtgagaaaactactgaaatctgaatgaagtctgtattttaggaaagagtaatattaatctcctagttctgaaaaattcatcatgattgtaagatgtcagcaagaggagaagccaggcaaaggacatatgggaattataccgtctttgcaatttttctgtaaaactaaaattaatttaaaataaggaagcttgtttggg

SEQ ID NO: 31947 - DNA, 1739 bp, Bovine  19866881181509
  misc_feature (1)..(1): n is a, c, g, or t
ngaggcatggcatcaaatgcttttaaaagattaaatgtaaaagtgagcatttagtaatgagtattttaaaaattccagactcagtcaaaaggagcacaaccccctaaagaaatactgagtagaactaattccttggataagctggttctgcagagttgagaagtaagagcagctgtgaatgttggcttcaatccagggtggtaagttagggatggtctgctgctcttcgtggaaaccgttcacaactccactttttaagatctgtaatagggattgtttatccattgtggttttccactgatttctctttcacataaagggaaataagccttggtctaagggtaaatccttctagactgcacaacaacataaggagatgaatcttactttttcgttatttttataactgcactcatttgccctcttgtcataatgagacagaaagaaatactgatatggaagggctgatttatcaatacatgatgcttgaaatttatacattaaatgcaattcttactaaaaaaatcattctcgtgagccagccataatgtctaaatttctactattagtatccattcctttcattttacaaagtgctatgttaaactattcaaattttaacatgaacaaaattactcaaattctgaacaaattatatttttcacactataatctctgaatgcccagagatttattggactgtgataaaagaatacatatatgaagcttagacttgatcatgagagatcttcatggacccaagtttcttttgaagtgcctctgaagatggtaccagaacaagtttatctccagtgttgcaaggtaaggggttaagaacatgcttaaaatcacacatctagtaagagagctgagagttgagccaaatctaattttaaaacattagtctttatcctatattgtgttgcttaggggagtagaactgagaagcttaatcttctcaggtaacatgacaataatcccgggaattatgtatggcatgtctttttcctaagtgctagtttttccagactacggaaatgttaatcagtgttctgtgaaaacccttggcccgacaaagaatgatctaagaattttgttgtctgtatcttgagactcatgtattaaggtttaaagggaaagtggtaatgatagttttcatttaatagtacttgtataagtttaccatggttgctatgacagatgaccacaaactgtgtgacttaaaacaacagaaatgcatttccttagttctggagacagaagtccaacatcaaggtgttagcagcaccatgcttctgaaggctctaggggagaatccttttcttggctcttccaacttctggggtctgctagcattccttggcttgtagccacatctctactctgtctcaacataacgttatcctcttgtctgaattacctacctctgcccttctctaacaaggatatttgtgatggcatttagggaccactcagacaattcagggtaatcttatctcaagagccttaatgaaatacatctacaaggatcctcttatcatttaagttactatttacaagttccaaggattgatacttaatgtctttgtgtcattattattaaacccactgtagtattatatttgggcttccctgatagctcaggcagtgaataatctacccacaatgcaggagatcctgggttaatccccctgggttggggaaaatctcctggagaaggacattctccagtattcttg

SEQ ID NO: 31948 - DNA, 1870 bp, Bovine  19866881317743
  misc_feature (1)..(1): n is a, c, g, or t
nagcccctcaaatatctgggaaacaggcaggtcctttcaggttttctttctttatcttccacaacagagagggaaatggtgaactggccagttaaagaaactttacctctggaacaaccaaaaatcacagaaatcttcaccacgttgggcattatacacttggcatttttggactttgatgaatagtatctccccttgcaattaaaaaagtacatgaatatctactaagaatgatactctgttatgtgctgcccttccggagtttttcagagtggaaaatggcattttttaaaatttggggcttctcttttgttatagtaactggcaaaaatttcccaagttatttacaaattattcctcattaattcattatctttctccattactttctgggttggtgataaagaatccaaggtgagatgaagccctcatttctgtatgttgatggaaagggcagtaaaaatatcttcttgttcagcctttatcttttttctttggaaaacattggatgaaagtcacaggttagggtgagaggaatgtgaaggaaatgaaactaggagtttagatttcctggtgacttgggttgtttgcttttctttatggtgtagtcttaatattcactcacctttgacatctatttgcccatttgtaggaggggaaaaagcatttatttctttagttttgtttcagggctccatactgcttaacacataatagatcatcagtagaagtgtgttgaataaatgaatgagtgcttatgttaattcattcttttatgtattagggaaaaaaatgaactaacttagaattggcttttacctttttggtaacactaccaagaatcacttttccctctatatacctatgtatatattttttgagaaatttgtaattgtagttttcacaaataaatacataaaaatgactatcctctttgacttgaaagtcacaagaattatgatgagacctaaactgatttggttatttttttctcaatagttgttaggtggcagctgttccaaagcccaaaacacttgacaatatttccattttatgatggaagttaagttcactgacagctatattataggctttcctctggggctgttatttgttacagagttttgaaaatcttaactggaaagtttcaagaggtgcctcttaagagttgtacaaaagaaatttgacttccctgacatgctagagtgtactgtttcaaatattcagctggtgagagttgtgagtttttaaaatgacagctttaaggacttttaaaaaatgaatgatctgtacaatgatgtgctgaccttacaatagcagacatggtttttttttccttcagctcagaaccacgtgtattcaaatgtataaattctccccctcagtttatgttagaaacacagctgtaaggtcagtgttttatccagggatctgagaggctttcttttaaaatgcgagcaagaaatagccacagtgctatgggttgagtgtttatgtcctccccaaattcatatgctggaatcctaattcccactgtgatggagtttgagggtggggactttgggaggtgattaggtcatgagggtggaaccctgatgcatagagttagtgcccttatagaagagaccccagagagacccctcatttctcccaccatgtaaagtcaacgagaagatgtgtgtctatgaaccagaaagcagtccttcatcagacaccaaatctgccagttcctccatcttggacatcccagcctccaaaactgtgagaaggaaatgtttgctgcttcagctagatggtctatggtatttttgttatagcaggccaaaccaaaacttcattatatttggttgttatatttctcccctataat

SEQ ID NO: 31949 - DNA, 672 bp, Bovine  19866881401316
  misc_feature (1)..(1): n is a, c, g, or t
natatatctcagaaatttcccaggtttcataccctactgatgagttcattgaagttcagagaggtgaagtgtcctgtcctctcgcctatgttgtaatttcagtttcatgtttttacagtgaattgatgttttttgaaattgtgaaggagaggaaataagatggaaatattttgataaaaatgttcctaagttatctcaactctaaattaaatatccagactcaattccttcttaatcccttctgctgtggccagtatcagtttctatttagcaaccagcctttcattcaatcagcagatatttatcaagatagaaacaatgaccatctggtgtctcttttttcggaaccaaaaatcaggacttctcatctgacagacaatttatatgccttttctgtgtgtcaggagcagtctacaagatataatttggatgtgaacctgttgggatttctgagatatttttatggtttatggggacagtagttcagaatatcaaaaatcaaatctgatggtgcatccacaaataaacatccagtaagctgtggggaaggcaccagccacaatgagacaaaagtctattttaaattgaacttctggttattaccatttcatgtaaggaaaaagctagtgatgggatgaggaagaataaaaccttatagcagaaaataaagat

SEQ ID NO: 31950 - DNA, 2479 bp, Bovine  19866881609279
  misc_feature (1)..(1): n is a, c, g, or t
naaattacataaataaccttttgagggaagatcaggcaaattgttttgcgttgttatccgacttgtatttgaaagtaaggaagtatgtctatagaggtttgtagtctgatagtcaaatgattaatattggttttccagcaaagatatggtctttcataatacagatttgccactatgctgattctacatcagaatctgaacatatgttaggttcactcttactgtggcaccataatgctgtatctgatgtcccaaagaagactcagaaacatattgttcatggggaatccttgagagtacattaaatgaaaataacccataataaccaatgatttggtcctattaagccaggcaaatgtggcagggttgggaagaattttgtgtgttttttagaaacacatctctgatggaacatgtagattgaagttagcatgttgggataaaaactaggagaggacttgaatggaattctggttgttcatataatttctcctgctcagtcacatagactttattatcccaaattacaatttgcatcattcaaatgcaaatgaacattcaaagccctgtgtgggcttcatgtaatttctttctgggcaagagctgctcactgttttacttatttgaaagaattcagtgatgcaactgattccaagagaaataaaaaatgtagatttgaaagtgttcttcctattggaggggatgatataatcatatcaaattcacatctggttttattttgctgtctctctcttggcttccctaagtaatatattatatctctttacctgactatcctttgtttcccagagcccaaatcttcccagaattatgattccacttaaatattgactataaaagtatggaacagagaagaaagttttgaaaagcaaaataagctaacgatgttattatggatatgtggaaactcgttcagtggtaacacttcatttttggcctttatgaaccaatctcacagtcaaccaaactgctcataatgcagggcacttcataagtcaccaaagctgccttggaagtttattttaacatcttttgttcttgaatgtaagaagatattcacacaactttaatcctctccagctgttcattggtaaagaccttaacatgaggcttataggaagaaaattgtgcttgatttaaattctaaaagcagctctacaaaacgtctgattctctttagcctctactctcagaagatatatcaatatcttttcccctcagccccgtgacacttgtgcttctcaaagtttttcagtggtttttctgtggtcactggttcaggttactcagtgaaaaactaaatggtgtgatcttctcttcagatctttttctgaccagcttgctccaacggagaacatggtttggttctgaaggggtcctctggagagctgaccacacaggacgctgcatggtgaaaaaggcgcatgggacaaattagcttgggaaattaatttacagcttataaatgatcttataaataagcttataaatgcttagtagcatattaaaggggcttcccaggtggtgccagtggtaaagaatctgcctgccaatgcaggagacataagagacaggttcgatccctgggttgccaagatcccctggaggcgggcatggcaactcactccagtattcttgcctagagaatcccatggacagagaagcctagagggctaccgtccatagggtcacagagtcagacatgactgaagcaacttagcatgcacacatgcattaaagtgtttaagatattctgcagtaaagaatttctacttaactctgcttcacccagtagtagatcacagtatttaagaccaccactctgaacacaggtagacttgtactgaaatcccaggctcaccattagccctgagacttgggcaagtttcttccctgcacaatgggaaaatgagtcccagctcaggctgttgtgggggcggaaaatatatatatatataataatataatatatatataaaatataatatatatattaggtatataaaatattcagcagagtacggaatagtagtccatacttagttactcacttttagtatgatgttattatcttatttgattgtatgacttgttttctgggaaacatacaaggaactactcttctaagaaaacgtgatgagaaatgctgatctaatagcttgatatgtgtagcaatacttttaaagaactgagagggtcggtacccttatatcacgagaattctctattaagttggctgatacctctgtcctggtattgtattcagaaacaaaatatatagaattttgggtagttaatgtgaaatcgagatgtaacacacaaaggttgttataaacaaggcctgttttctgtctggaatatcaaaagctaaattctaagacctaaacatccagaaagaagaaccaagagggtgagagagaaagaagggaaatttgtttcctggtgtagagaagaaatt

SEQ ID NO: 31951 - DNA, 2095 bp, Bovine  19866880495399
  misc_feature (1)..(1): n is a, c, g, or t
ncatgaggcccagacgtgtgctcctcgctgtgacaggggttagggggagaagtcccctgccttcattcttggggttaggaacggtaggactctcggtgctacttcctcaaaaaaaaacactccctcacaaatgtatctttctcctctatcctcctgactcatcttccacgtcagtgactcctctgttccgggtttctttggcttactcagaatgaagggcctggtgggctcttggaatgcggtgtccctcgtcattgctcctcagccacaagtgcccctggaagggccccattttaacaacatggaacattacagaaacgcttgaatatgtaagattaccttctcaaagaattccagcggtggtcttccctgagggaaatggacgggcaaaggccagaactgacacatatttttcattctcttgttttgggggatttttgtatcaggtacatgaatgttagagctaatagactgaacctaaggaaactaccaacttttgacaactttcaatctaccattttcagacaatcttgtttgtcctcaacatagtcaactgcaggaaatcagaggtgaattatttgatgtttctcctaccatccaatcatgacacctgttaagtggccaaagctgtccctcatctcttgctctcaaaccttgaccctgctatataattttccagcttctatcttctactcaccaagtttgcttcttgaagcagaaaagaagcagaatggaacctatggaagacaagaacattcccactctgtccctatgctatgtccaatacgctcaccaaggacccagacaaacaaccctctggttttctgctgaatttattctcactgcctacaggccaatggagagagagtgccattccatggcacagatgcccattcaaggatctgccacagattcagcctcatgtgtagacatatctgtctcctgcattacatgattctttttttaagaaaaaaggttatgtctttatcccccaaatgagaacagtgcgaagatcaggacagtaggttctcaacaaatgattactgaatgaacaaatgaccttgttatgaatgctggcatgatttcatagcataaatgaactcagcaaatacttgacaccgttgactccttattctggttacagggcaagagtctgtctcaatgtgcagggggatacaactgtgaatcattagcgtatgcagactcaattactcaatgggccgtgtatgacagatgtcttggatacacagtcctagcacacagaaacgcactctttttgaaaacatcccttgacaaagaagggtagccagtaagaccctggctcctacagacgataattccgttatgcctcagagcctccaaatttctatcttgcttctaagtgatgaggaatttcaagtctccaaggaggacaaataacaggagaaaacttggtcaggaaactccaggcccccagggctagagtttagaaaacacctatgcaggtgaggccgctttcaagaagtttcgactatataaattcctctttgtcagacttaccctgtattagtctaagacagttattatattttcttattataagcgtgcactgtgtcctgcacctggagcacttgccaaattgcagatttattcctctttctatacatctgcaaaaagaatgtgtgttctgtttcatcagggagttacttgaagtcacagattgctaactccaaatgaatagaaacagtgattaatcttgaagatacgagctcgccactattcatgtaacagatgtccgttatgatgagttacacatttgttccatgtttacactaaaatacaaaaagaagattcaactattttgttaaaaaaaaaagaaagaaaagaatgaatgggggagggggggaggtagggaattaaaacatactggaaagtgtttattcaggtgccaggttagatgcgatctcaacatgcagtacgtccacagggtggcaggtaaggaggcagggagcgagggataagctggggtaaacgttcctggcttcatgtcagggtgtggatattaactcacttcatctcccttggctgacagaagcctaaagccaaaaccggcaat

SEQ ID NO: 31952 - DNA, 3918 bp, Bovine  19866880527023
  misc_feature (1)..(1): n is a, c, g, or t
ncatgaagtgtatggtttttttttaaacatcataagcttattattgcttttattttgacaattaacttactatgataataatatgcattgacaccccccccatccatctatacagagtagatgtttaataaattcttgttgaaattcattgtataaatacatttataaagttggaaatctcctttgccagaaagctgagaactcttcagtacgaaaaaaattcagggcaataagaaacatttcagtagtttgtaatatatgtgtgtatgatatgtatcatgtatatgctattcatacatatataggcacacacatactttataggaaacatttctaaagacatattatcaaatgatctttaggtgtttagaggaagatttgtacaagaaaggtagattcaaaaagaaaagctgccttaacttactttattgcttctttgctaaaggtatttattcagaacatcagaagtaaagctttaaagtcaaatgtctggagaaatttaaatatatgtgaatgcgtatgtttaaattgaagaagaatgttgacagaaataaatcacttttagagagaattcccaggacctggtcccttttaggaaagctctcctggtccttgtgcaaatacatgttcctttaaagtacttgcccacataatttatgggtttatgtctgtatgcctctgtttatttttggtataaaaatccttgcttataaaaagggtagttaagtatggtactacataactgtgagcccttttgcctgacttaagagtttggacttaaggaacataaactaaagtcagaggtaattcaattaacattctgaacgcacaaaggtatgctcgcttctcagctttagggcacaaaacaaccccgttaaattatagcagtaattacaccacacatgcacattctttaaaatttcatgaatcacaaggctgagctctaatttgagatgtttgtgtctgtctctggagaatcaactgaaatagaaatcttgaagccaaagagctcaactcccatgtccagattcacaaaacaaaacccatcaccttccagtctcaagacacattccagattctcccagtttccttaccactcattctaactcatcactaaactctgtggatgatagctctgaaatagctcttgaatctgcctacttctgcccatcttccttgccatcgtcctggtccaggatgccatcttctctcgttcatatccgcatcagtggtcttctgcctgttctctctgcccccattattgtcttctccagtctccattccactttgcatacacccaaacttttaatgaaataagatcacacctggaaggctgctgcaaacctcagtctacatgtcacttctccaggccttttcctgggttccactcccttgcaccaccctcctgaaaccccttgtaattcctatgtcataacaagtgtcacataggattgtaactccctgggtacttttctttttcagtatatcataagttctgtgagggtagggactctgctcgtcttgttaatcccagaacccttggcttccagcctgggggtgaactctcaaaatttgaaggaatttatcataactttttaatattaggccagtttagaaccacaacatgtaccaacactttttaatgtgctgctgctgctgctgctaagtcgcatcagtcacgtctgactctgtgtgaccccatagacagcagcccaccaggctcccccatccctgggattctccaggcaagaacactggagtgggttgccatttccttctccaatgcatgaaagtgaaacgtgaaagtgaagttgctcagtagtgtctgactcttagcgaccccatggattgcagcctaccaggctcctccgtccatgggatttttccaggcaagagtactggagtggggtgccattgccttctataatatccttctaatacactatttttctcatgctagaacatttatggctctaaaggaaagttccccaaggtgtggtgtatcctaatagcccttattttaataagaatagtaaaattttataaattttttcttgcactaaagttaccaacttaaattccttcttttgactttgagtgaagtgctaatcatgagattttaaagtgtttttattttaggtatgctttatgatatcttactgtgaagttatctagaactatggtaataaaatgtgatagggaaatctgcccctggaatgtgtggagtggggtgtggcattgatttccttaaccgtgttagatgacctttcatgtgtttttcttatttcttcctttaacaccttatttatagatttttttcccccgtgaccaaaaaaatctggtttggtttaggcttagaagaatgtgatgcaagaagaaaaattacatatgtctttctgtatgtgtgtttgtatgtatgcatatatgattgattaatgactattattagccataagaaaaatggaacatgtgggagttcttggagaagttcattcacagctctgttgttaaggaaaggtcattgccagttcaagtgcattcttttttcccctagctttattgagatataattgacacataacattgtgtaagtttaaggtcaaatgaaatcttgtctttattgcaaatgttaaaaatgagtactattgaacaggctcagtctattttacaaaaatagtaggaaataaaagcaattctcctggcggaagtcaaaacaaatatttaattattgttgttattcagttgctaagtcatgtctgactttttgcaaccccatggacagcagcacaccaggctccactgtcctccactatagccattgataaaactgtcctaaaatcccacaagaaagataaacctaagcatatacgtatatacagaaataattgtaagtggcatggtaataacccagggtgaggaggagagggaaaagtaggtaagggtatggaagaaaataagaaaggtcctgagttgatagttcttgaaactgagtgacgagtacatggtgagttattatatattcttctgacttctgtatatgtttgaaagtttccatatacaaagtttttacagaggaaagaattatgtagaagtaaaaacatcctgaagctgataaagcttaagcctgaggaccaccactggatgggtcccttctagaatgctggcaggagcctctgtcttcaaatggtcatatgtttgtgtaaaatttgtgaatgtaatataatttaactagagtggactaaaactgctgtctcttcctatttcagaaccccctctgttatacttctcttcatggtatccaagaggtcatgggctttgggaggacctgctaagggaaagttgagttggggatacaaatacaaaacttttggtgtgtttacttgtggatgaaaaatgcagatataaaatcccagctgtgactttgacacccccatgattattggaatatatttattataagtctcttctgtgtatattaccactagttgtgctagcgtaggaatggtttccaggaagactccagtctccgtccctctgatgactcactctgtgttatgacttgaagcataggaccacagattgtattggggtatgagtgtgctccacggaatgtggcagaaaagtgtgtagatggtggggaaagaaataaagtttgaaatgtatgaagccagaaatcattctgtggacatttttgctaatcaacagatgtgtaaaattatatgcattggttttggttctcattgatacttagttaaactggaaatcctctccagtcagaaatatactcagtgctacaaacataattataaatgcatcctatttttgcattttgattgaagtcaagagaaatataatttatcaaaatgttgtgccgatagtgtacagaactctactaccagaagcataaattttgagttt

SEQ ID NO: 31953 - DNA, 765 bp, Bovine  19866880558977
  misc_feature (1)..(1): n is a, c, g, or t
ntaaaaagcagagacagcaaattaaaaagcagagtacattactttgccaacaaaggttggtttagtaaaagctatggtttttccagtagtcatgtatggatgttagagttggactataaagaaagctgagcaccaaagaattgatgcttttgaaatgtggtattggagaagactcttgagagtcccttggactgcaagaagatctaaccagtcaatcctaaaggaaatcagtcctgaatattcatgggaaggactgatgctaaggctgaaatttcaatcctttggctacctgatgcgaagaactgagtcattggaaaatatcgtgatgctgggaaagactgaaggtgggaggagaaggggacagcagaggatgagatggttggatggcatcaccgactcaatggacatgagtttgagcaagctctgggagttgctgatggacagggaggcctggcatgctgcagtccatggggtcgcaaaggttggacatgactgagcaactgaacggaactgaaagactaagcacattcattgatagctgatatattctaggagtttatatcatttccacatttataatatcatgtatcctataaaacactttacccaatgatttactgtaaattgtagtgggcccatacatggctaattgacatggacaacacacatgtgccacaagtaggaatcaccgaaaagaagaggaagtgaagaaataaaaagtgattgctctatataacatttcttcatacataatattatgtcctg

SEQ ID NO: 31954 - DNA, 2074 bp, Bovine  19866880592723
  misc_feature (1)..(1): n is a, c, g, or t
natcagagtttcttggagaaatggccaattcaagatctggttcagtggcagggaagatacaagatgaacccaggatttttgtagtgccagaaatcaaggaagatttcaaagacaaatagaatcatttcaaaaggacagtggaatcactttaaagaggctcctactaggtcaaatctatgaacatctgagcaaacagtggctacagttcagtatccacactttctaagtattaactgtagaaacacaggctgggggaaatgagatactttgtccaagaacattcagccaatgagaagtgaagttgatgctgacagttttcatgacttcaaagtgacgctcctaccatacagcatgctcctcgaccaaagaatgcttaactgaagagacaagtgcagaagtgaggagcataagagacagctagaaagaggcaagtaaggaagcctgaacgcactcttcattgggaaaggattttctactaagtagctccatgcaaagttaccaaagaatgactacagacacccaagcagtggctgggtaagatggagtattagagaaatgactcaagtccttccaatactgatgtccagatgtacctcatggtgacatttccctttaatgtccctgcgtatccttgtgcttggacatgagtttgggtaggctctgggaattggtgatggacagggaggcctggcatgctgcagctcatggggtcacaaagagtcagacacaactgagtgactgaactgatctgatgcttgtgctaagtctctcagtcacgtccaagtcctgcgaccccatggactgtagcccaccaggctcctctaatccatggaattcttcaggcaagaatattagagtgggttgccacgccttcttccaggggatcttcccgccccagggatggaacctgcacctcttatgtctcctgcaggggcagcaggttctctaccactagtgccaccttcctgtaatagtgctcaaatgcccgctcctgacagaatgttcttgagctcaggcatctctggagaagggaatggcaaaccacttcagcattcttgccttgagaaccccatgaacagtaggaaaagacaaaaagatggaaaaaaataggaaaagacagtgaaagataaaccccccaggttagcaggtgtccaatatgctactggagaagagtggagaaatggttccagaaggaatgaagaggctgagccaaagcagaaagcaggcccagttgtggatgtgtctggtagtgaaagtaaagtctgatactctcaaggacaatattgcataggaacttcaaatgtcaggtccatgaatcaagatgcctaatggtgtgttaactatccctcagttcaccctggtgcccttgggggcctacagccagtcctggaattcagtgcccgacgatttcctagtctttcccagaaggttacagtaactcttctcacagttttgcccccaactttcactttaaagtgaaagtcgctcagtcatgtccgactctttgtgaccccatggactaaacagtctgtggaattttccaggccagaatactggagtgggcagcctttcccttctccaggggatctcctcaacccagggattgaacccaggtctcccgcagtacaggtggattcttgaccagctgagccaccagggaagcccaacagggaccctatccctcctttaatttcacaaagcatggctaagaccaggctctagaagttaatcaaattttactgactacatgaggctactaggaaatcagatgggaactagtgcagctcctggtatccaccatgttatggagtagagcccacctcccattacccactcatcctgggaggggttttgactgttgtctcccccataccccaactctcctgggacttagagagaggaaacgctagtttatccttgattaccagtctcaggttcccttcctgtgagggttcaactccagcctgctatgaagaattattatgcacatggctcacagttacagcttccctttggcataaccaaaaagtttactgtgggtatttttcattgccacaactgaggagcaatcatc

SEQ ID NO: 31955 - DNA, 2732 bp, Bovine  19866880617852
  misc_feature (1)..(1): n is a, c, g, or t
ncccatggaccgaggaagcctggtaggctactgtccatggggtcgcaaagagtcggacacgactgagcgacttcactttcactttcaccccactccagtattctggcctggagaattccatggaatatatagtccatgggttgcaaagagttggacatgactgagtgactttcacctcaaagagtcctgtacaaagcaacacaattaagtaatagaagtcattagaggagatacaccatcaagaaaagactttcctaatattaatttcaagtttatctcttgatgcacaaagggatcaccacatgggtgctaactggacactattacctcatgtggcagaaaggaagagggagccaggtctccccggccccttttgtaagggcactaaccccagactcccatttccctctgacaactaaggaggagacatttactttctcaggaaagacatcttcttgccaatttcaaagcagtaacgcctcaagtcctttgcacatgatggcaacttaaaattactccactgtaaataatctgatgacaaatttggcagtttgattttagccacagtggggaagggaagagctaaagggctcagagttgggcttctctccatccaagtagacagatttacctcaagcagtggttctcacccttgagtgtgtatctgagtcacctggctgctgctgctgctaagtcgcttcagtcaggtccaacttttcatgaccccatggactgtagcctgccaggctcctctgttccaagggattctccaggtaagagtactggagtggattgccataccctgagtgtgttacatcacagatctctgggtctcactcccagtagatttaaggtggactctatagttctaacaagctcccaaatgatgctcaagatggtgttcaggactcctctcagagaaccactgcctgagggatgcaggagtcatgcctgcaagcgacagcattagcctctccttgaatccccacctgtgaactcaggctcaaccccagtcaaacaatggagagcagagcatgcgaaatgtatgacatttctgaataacttcaaattatttccagcttgcagaacttgagactagacgacttcatttgggggtagatccccttcaaggaagcttgaagggagatgagaaaggccacctatccaaataagccggcttctcactacctcactcgccgacttgccaacagagagaacaaagtcacactcaaattctaaacgcttttaagggcgtacaagtatttcaagtccatgatcccttcctttgttttaggtctcaagaatgtagggctttttgcctctttgccatcacaaaaagccaggactgtgctccgtcacaaaatgcaagagcgtggcccagaggaactgccgggcgagcctgctgtcaactgcgtggccaacaaaggaccaaagagctggattagacaaaaaaaaaattttctgtcgtttgaggcaacagatttttccaaacaatattttaatttgcataccaagccagattccctctcggaggacggatagagaacattccatcgtgtaagacaatactcattcccatagagtgatgtcagggccaagcgagcaacgctctttctgagattcttttcctggccgttaaggttcctgttataaaatgttaaccacttcagaatcgggcaagaggttgcaaatctctgttagtgtttttacagaagcaaaagagacaaggctgtcatcaactgcctcatgcgcaattatttaatgacttttccctcctggtatgaataggatttctgcaatctatcttcacctcccaggactttcttctcccaggaataccaatttgggtagtttatttctgccagcttttgacgtgcagggagcagtctgattgtttgctaaaatgataggaggcatttcagggctctaggactaaatcctggtaggaattttgaggttaataggaaacacactgggcattttgctagttaggggaataccacggcacagggaagattaaggacaaaacgctctctaacgcataaatgatagaaaatggtgtgaagaagtacagcacagcagggagatgctgccaagagcctattcttagggttacttgaaaaaacaccaagttaaaaaaaaatacactatttcatctactaactaatcaagtatccttttctctctctgcatatgtattccataattttaagatgaaagaaaaaacttgtattccatttgaactctaactatgtgctactttttaattgtgaaaagcctgaaaaaatggatataggacactgaggggaaaatacagtatcaaacagcctgaaataactgacttttagtcaatttaacagagctattttttaaaaataggagtatagttggtttacaatgttgtgttagtttctgctgtgcagaacagtgaatcagttatgcatacacacatatccactctttttagattcttttctcatataggtcattacggagtattgagtagagttccatgcactatacagtaagttcttattagttatctattttatatacagcagtgtgggtcaattccaatctaacagagctaattttaggatgaaaaaaaggaatacagagaaaccttgaaatccccttgatttttccccttgtcctatttacctctcattatcaaatttgttgggagtcttccctatacagggctttgtccttttattttatatacatatatt

SEQ ID NO: 31956 - DNA, 865 bp, Bovine  19866880666432
  misc_feature (1)..(1): n is a, c, g, or t
ncacagataaacaaggagtgcacataacaacatattaaaaggcacagggacaactgtcctaatactcaaacaattattcataaactataattagaggggaaaggcacaggatgttcctacctgtttacaaaaattaacaaatctcagtcaaaccctccttcttttccttatcttcagtaattgtcaagcaagtccaactgcaaagctaaaaaatttgccaattctttctttcacgagtttacttctctctgtatacactgttcgttttcttcagtatttcatcagaagttccttagatctgcctttagataaattgcccctttttatttagctgcagcaggcctcacacacaaagcaaaaccaacatctatgaacaattttccttctacttttttcccatcaaattaagcaactggcctcaaaggagtgtgtcattctgtagatgctaaaaaagaggcatggcaggtgacctggctttcccaccttcaccctgtctatccatggtaaagttaaaattgccttccaatcctagaacaatcctccaatcccacctttcatccatcacctgccatcttctttcagcttccatagttgcatttgctgattcaccacactccctcactagtacgcactgatccttcttaccacccaagccatcacatattttataaaatcaggcaaccttgttgtttcccgcttttctacagaacttgaatttcttcctctttatctcattaaagaagaacaatgacacccagttattgagccagttgttactgtgtttacataggctttgcatgaaaattaattttgccctctcaatacttgtatgaggtaagaaccataggagataaggaaacttaag

SEQ ID NO: 31957 - DNA, 1855 bp, Bovine  19866880691622
  misc_feature (1)..(1): n is a, c, g, or t
natttttgtatcttgtggccaaggtgctccttagacatgaacagcatttcaacacttacagaggcatttgatcaaacagctagaagattgagatgtttttcactggataatttattccatatgcacccagcggcaagcatttggcaaaagaccaactggtatgatttagaaagcctgaatagctcatgcaggaaataagtagctgacagataaaaggaaaatggcaactttatgctttaaaggcaatgtgaagtatttggaagggacatttatcagttcaacaaggatcgattttcttccactctcaacccctggaacaaatcttgtcctctgaaaatgtaggctcactgggcctggtaatttatttgtttgtgtatataaatagcccatttcgagacaccctataagacatgtctctctggcacatatttcgtcttgatcctgggtggaagataacaatgaccgactgacctgttgaacaaggcaccctcggagttcaggtaaagaaatgtgatttaatgtgcatcaacactcatcaaggcaagtgttgtctgaacattcagacagggaggcagacggcagggtgacccctgctcctaaaagagacgtgaactatttgaactgcctgattgtatcccccttgatattttaaaatgatgtaagtcaaaagaggcataacttaactagtgaaaatctcgaaacagagcatttctggttaattcacagaaaacagggaactttgaacacatttcaagacaacggttttactaggggggagttaattctagcatgagctgaacacacagagaatggagaattaatgttcagtcaacattatccaatttattccttcgatgatcaatcattcatttagcaaatgtttattgagcgcctctctatgcctgggttccaagaataaaaccatgaatgcaataaaagtttctcctgttaagtaaatagcagccataatacgtgatttgagagctagggaaccactatagagagaagaacaaataccattttgtttgagaaccaacggacaatggtgcaagaaaaggtgaaggataaagtgacttcgaacgaaacaggaattgaaagaaagaagtccctatagacagagactacgatgtctgcagagccagttatgatggttaaacaaccaattacatccatctttaccaattacttactattcattctgaggcaaagtacttagcattctattctctgtctttatgcccataaaatagagatactagtaatacctaatttacaggctattaaaggatcaattgagataataagccttgaacagcgtagcccttggccacgaaaggctgatcttgtggtgcattccaattagttaggttaccaccccttcctaaaggttctcctctcttctcccccagaaggatacagacaactttgaagacaacacagagcacgaaattaaagttctgttcttgttgtttaggtgaagcaattcaaagctatcttcagtggctccctggattttactgtccctcatatctccagttgttctatcccagaagttcttgtcattttagcattgacttttctacatcatcttttatcatcaaaagatttcaagtgaggtcgaactgtggtcaaatcccatccctctttagggaccgacatttttgctgctgtacactgggactcagatttctcttgaagtacttccacttcccaaatcatattttctggcagtttggtcaatgatttataatcttatgggattaaaattagcgaaggtgaaccgtatacaatcgctggctttttctagtttctactccctcctcaaggggggcttcccttgtagctctgtcggtaa

SEQ ID NO: 31958 - DNA, 1918 bp, Bovine  19866880729732
  misc_feature (1)..(1): n is a, c, g, or t
nttgattctggctaaaatgtacaaagtcctaacagagcatcattcttactccaaccaccaaaatagccctgatggctacaaaaatcaaacttttataaactcctttcaagagcaaagatgcaaagaaccctaaaggaacaaatttctagaaaacaatgagctagtcccaagtgagaggagagccgtaagtgttctcactcacagcagaatgacaaatggagatgaaattcagacggaaagcgtaaggagaaaggagccaagttgcagtgaaagttcagtggtcatgtgtggcggacacgtggacaacaccaagagttcggccacagagcgagtctatgctgagccatcaaatcattcccacagtgtgtcacaaagttctcaggagtattgtgccaaaggttggggcaggacagaaaatggatttccccattggaggaatagggcctttcccaaggaaatggcaaccctctccagtattcttgcctgagagatcccatggacagaggagcctgacagactacagtccacggggtcacaaagagtcagacacaactgagcgactgaacaacaagtgcaaggcagccatctcccatctccaaaaccagacctgattaaagtgtacccgtgaccctctggactctgaggtcccaaaggcctggggcttgtcagttgagagaaattaacctatgacattcctggtaagtcagcaatagaagaacaataagaatctacaaattaccaaggaaatgtgaccttaaacccaaactgaaaagactgacatcaaatactggtgaggttagggagcaactagaattcttgtacatttctcatcagagtttaaaacagtacaaccactgtggagaactgtttggccatttttttaaattaattactttattttaattggagaataattactttacaatattgtgatggtttctgccatacatcaggatgagtcggccacaggtatacatgtgtccccctcccatcttgaacccccttacttctctcctcaccctatccctctgggttgtcccaatttctaacagtcaaacacacatcagtcctaagaaacaacactccgctcctgggtcataatctaagatgaataaaaatgtatgtccaaaaaaagatttatttacaaatgaccaaagcagtgtaactgatgagctcaaaattggagactacttatgggttcatcaacatgtaggtaaagttttgtgtgttcacacagtacaatactagtcagcaacctgacttacctgtacaatcaaaaacatagatgattctcagaaatatgctgagtgatagaagcaaggcataagagtacccatgaatctacccatttatacgaagttctaaaacaagaaaaataatgcatggtgataaaccccaagttgaattagccagtgaagggcacaagagagctttttgggataacagaaatgttctatttttttggctttggatggttaatacatgtcattgtcaaaatttagttgaaatgaagatttgtgcaatttactagagcttaattatacctcgcttttaaaaggtataaggttaaatattgttctttcagagtacgtgaatgagtcagctccaaactgagtccataatatcagagttaaatgccaggtcttgtaggccacccaaggtcaatataaaacaatcacagcacttctcttattcagagcttttgacagtcaggtgcagacatgacgggacctgctagaaaagggcacaatcccacacctcatgagtgattctatcctttcatctgtttctacccagtgttatctcatgctgagttatccaaaacctgctgatgtgtcactgctataacctctcagtgtgagcctttaattgctcagggtcagcccttaaaacactggggattcccactctaactgca

SEQ ID NO: 31959 - DNA, 1367 bp, Bovine  19866880833768
  misc_feature (1)..(1): n is a, c, g, or t
nacatactttcttttggatcgatgactatgtcgaggggtagaacagggtaatatgatttgcgggcagcctggagtgttgcaattgattacaaccaccatgcaatgggagacaggatgtccctcagagcaagtgatactggacagactaaagcagcaggaatctacatgcaaatgatctgtctgtatggacaggaagatcaataagtcaaataataacaagatccatttgccaacagtgtaattaatcccaattgtagttttgcctccttaaattctaccacaggcctaatgagaaggctctggattcttgagtaaataatttggggaatgtctctactaattcaaagaggatctaagaactgttttctattgacaaatgtctctataaaaaggaacccgggttataatcaatacagtaaggaaaacaccatgacttcaatatcagatgctgaaaagaaaagggaacatactgtctaataatgaaaaggacccacaattgcatctgggactaacagtcccgagattttccctggaaaccccttaaggtctccgtaattatttgcaaggctcccttaattcaagtgatctgctttctatggaaaccctaatcatacaaaacacatgcaaaactgaaacaaagtaaaatttcaagaaactgaacgcctacaataactcacagccagcactgatagggtgtgactggaaacagccgtggcctttggggcctgagcggcaagagtctgtaaggatgagagggttgtcggaagccacagtgctgagggctgataccaacacacagttccaaggtctaagagaaaagccctaggccctgcggtggggtggcctggaagtcttttccagtactcgtgaaccttctgtgccctcgatcgagttcttctcttgagctccgtgcctgcgggctgtgactctggaaggcacttctgctcccagtgaactggcgggattactgatctaaggaggcatcttgcagatggcaccaactatcacagattggtcgaacccaggagctggtgcactttttctttaaaggacaggaaagctcatatttgggtcttcaggagcccttagtctactcagccagcctagcgggaaagcagccctgggcaaaatgcagatgaatgggcatgatggaggtccaataaaagcttcttgacttaacaaagatgacctttgaatttgacccgatggccagagtgagctgacctctagtccaattggttgttcttcccgtcctctaagagttagctcatccctgtcatgcgatgaattcttctgtcccttgtcagagagcaccctttttatggatggaattggagtttggggggtacccttccctactcgccagg

SEQ ID NO: 31960 - DNA, 1778 bp, Bovine  19866880914556
  misc_feature (1)..(1): n is a, c, g, or t
nctggggattcccactctaactgcacagagcttatcaatgtatggcgtgctagagctctactgcttattttgttattgccatttctgatcttaacttctccacacaggcaaacacttttccataaggctcctctgacatgctccaaaatgactcctcctagagagatagaaagtggtattatgcagtagggtgaaatggaggtgagaaaacaagcagcttgtcttaatactgcctaaaatgtcactccccacacgtgtttgtacataggaaacatcaaggaatattgttaaaattatgatgctgattgagcaggcctggagtggagtccagggttctaaatgtctaacaagttcctaggttctagggtgttgctggtccacagtccacactgattttaaggccaaagttttcctttctcttcagtttctggaaggtgccgctctccatgtgtgaattctcagtccagggttcagcttttgactgcttcaggtttaaacgtgcaagctagggttccagcagtggaccaaggttagcttttggaattaaaaataaacaacctggaaaggcattttagttttcatagattaattcaaaattattccatctcttctcatgtcctcccatcattcatctgtaggactcccattgatcagtagcttccacagagtaggcagaccttccagaagcatctaggatcagacaatgagtcataggcaggagcttcaccaagacttcagctcacatcagttaggatatacatcctgactgacagagaaatagggatgcaggtcagcaagttcctctctggaatgggtcagagcctgcttccataaccaagtggggaaaacagcttccttccccattgactctgctgggtacaatgatgattctcagatggacacaaaggaaaagatattttaccccagagtgaccttttggcaacagcattctaagagatggtaagattatgacagcatggtatttggcatccaagttcttgaatcattcaaaaaacatttaagatgtgatctttacccaagaattccagaaacttttttaaagaaaaatacacttgagacattgaatctaaataattcagaatattcataaattccccaaccatttaagcacttgattcattatttaggaaaaactttatatgcaaaacaaaaaataaccagtgcttaacataaagacatagaagacttattgcaattgatcaggtttaactggataagtggcattagtccttgaccacatgaatattttgtgaaaaaataaaccacaaacaaccaaaacatacaagggggccacagaggatgagacggttaactggcatcacggactcaatggacatgagcaaactccaggagatagtgaaggaaagggaagctggcatggtgcagtccatggggttgcaaagagtaggacacaacttagtggctgaacaacaacaacatacacaacgtgacagcaaaagaagtctacaatcagctcatagttttgctagatcaaactcttagaggaaaacaggcagaacactctctgacgtaaatcgcaaccagatcctctatgacccactcccagagtaatggaaacaaaaacaaaaacaaacaaatgggacctaattaaacttaaaagcttttacacaacgaaggaaactacaagcaaggtgaaaagacagctttcagaatgggagaaaataatagcaaatgaaacaactgacaaagaattaatctccaaaatatataagcagctcatgcagttcaataccaga

SEQ ID NO: 31961 - DNA, 1550 bp, Bovine  19866881120136
  misc_feature (1)..(1): n is a, c, g, or t
nccgccttcgcccccgtagccgccgatcagagcagggtccaggctgcgggtctggcgcagcttccttcttggagaagcccttggcagaagccgcgctgcccgaggccggcgaggagcaggagaagacactgtggagcaggctctgcgcggacatctcggcgggctgtgcctgggggccaccctcttccagctctcggaactgctagcgatttggggccaggaagcaagggggctcaggagaggctgccaggcggcgtcggccccaggatcgccgagggcggtagggggcagttcccggctcacgcgccaccagcgcgctccaagtgccccggtgggggcagaagcaggagatccatcaccagccttctaggaaaaggggtggggagggaggactccttcggtggcgagaaccttcccgcagagcctaagtcctgaagagggtaaggaagaagaggaaggtcaggcgctcgctgggttcccagctccggcggccagcgccactcccccttcccagctgaggcaggagacgccgcgctcgggctctctggctctggacagcctcgaagtctccagcaagctcctcctcgcgccctaaggacggtcccgagggctgaggaggaggcctcctgggcgtgcgcccagggcgcgtccctcgctctccgctctccgtgagagggacttcctcccgcgctggagctgggcacccgatctgcgccccagggcaccgtcgccgtatccgggcccctgaagctacgcgtctcgccgccacttggctgctgcgcccactcctctgactggctaggcgcaagagtgtctccaagctccaggctcccccgaggtgctagtttctcgctacaaagtgaggacacggagcgcgcagcgcccagggccttccaacggctgagcggctacggtgggagagaattcctggctgcgcccagggagctaagggaagaaccccagggccggctgtccatgacccgctggagagggactcttaatattctcaacccagctttgggcccagggctggcgcggggatgtccccacacgctcgcgctagaggcagcgcgaagggggcggcccgggacgggtagggtgggagagacgccaggtctggagctggggcggagccagaagtaggagaaagcaaaacgtggagttttccaggcgccaaacctgggagcggcgcacagcgagcgccgctcaccactgataccgggtctcctggggagaaaaccctgaggacggaagtgcggaccttgtccccggtctcccctcccccagatcgaagggggcgccagctccactcacgtttctggaaaggaaaggaagtgtcagattgcaccccacccactggtgtcagatgggcagcccaagacggctgctctgaagttggagttaaatctcctgccttccttccccccacccccccccccaccccccaactgctgtttttgtttttaaaaaggaaggatagagattcagttcaaatgcagtggctgccgatgaatgggctggagatggggacctactaagaaaagtggcgg

SEQ ID NO: 31962 - DNA, 2774 bp, Bovine  19866881132286
  misc_feature (1)..(1): n is a, c, g, or t
ncacggctgagtgacttcattttattgcctttactctggaggagatgacctctgaattgtctttttgaaagccattttgggtgtttttaagtaagtgtacaatttagcggcattaaatacatttataatgtacaaacatcaccatgaattgatctttaaaggctaattaggggttattgcaatgtatcagacctgttagatgcaatattacacctattctctttttccttcagttaagatatcttggaggttttccatattgatgtgtaaagtgttcccttttgtttttatttaacagttgtacactcttccattgtatagattaatatactttacgtaaccggtctcttactggtgaacaacaaattagattgtttctaatactttcccattactaacagtgctgcattgagtaatattgtatttacacattgtttctcacatgtgagcacatctatggaataaacacctagaatcaaaatgactgggtcaagaggaagttgcttttatctttgataggtatttccaaattatcatcaataggtggttataccagttgacctgtccctcttggaatgcatgtgtttccccacaccttcatcaatacaatgtattgctctttttgttactgattttgcagaaattatttatatagtaaagaaattagctctttttctaaagtgtgagtgtattagtctgcttgagttgccaaacagaataatacagactgaagggcttaaacaacagaaacttgttttgttcctgaggtcagagctttagatcaaggtgctatcagggttggtctctggtttgctggcttggagacagctgctatcttggcctcttctccatgcatgtgcagagagggagctctctggtgtctcttcctttgaggacaccagtcctttcagattagggctgtgcccttatgacctaattgactttgattacctcccggaagacgcaaacaccaaatatagtcatatttgggttagagctttgacacgtgaatttggaggggaaatacacaattcagttcacaatgatgaactagacatattttctcagttggtcatttttcttttgtttttgtttgtggtgaattttgctttgagtaatttttgtgtaccttaatttcacagccttttcttttatgatttctaggtgtggggcatggttggaagtactttgagtcctaaatgaattcttctgttttttcaagttaaaaaaatttcacctgtttactttaaacccttaatatgtttgaaatttattctggtgtaaggaatgaagtacagctctaatctcccctctatctttttcatttactcaattgtctcagggctagtttttcaataaatcatcccccctatatccccttacatacagtgatttgagacatcattgatccctgggtcgggaagaactgcaggaggagaaaatggcaacctgcttcagtattcttgcctgggaatatcccatggacagaggaatttggccggctatagtccatagggttgcaaagagttggacacgactgagcaacagagcacgcatgcatgctcattattaagacactaaattcccatgtgtatgtggatctattttggactttgtactctgaaccattatgtccacaaacacaccaatactatattagtttaagtattgggaccatctggcatcattctcctcattattctttttcagaatttttcttgatactttgcttgtttatttttgaatgaaatttggagttggctggtcaaggttgtttgttgttgaaaatctggatggtaatttactgggattatgttaagtttctatatttaggaaaactagaactctttagaaaaatgtgtcatcctatacatgaacatgcagtacctttccaaatgttcaagtcttcttttgtgacccttactacaattttaaagtgtttcttaaaatcatttaaaaatgttgagtttattacttgttatttaaactttgtttttgtaatgactgggagatcttttcctctttttatatcttcaaatttattgttggtatatttatgaaagcttttgactacatttgccttatgttttgcaaagttttgaattcacaggttgttgttagtcttactttttgtttattatctttgattttccagattttccagggattctgtcatataatttcaacttataataattttacctccttatttctaactataatgcctgtaattttttctgattatgtgggttaggactttacagcaaaataaaaatattaactcaggaaagtggctatggatattcctaattttgagggggtgggggcagtgtgtctagtgttatttatccattacccattgggttaactttttagattggcatatagtttttttttgaataatgttcataaaatatccaagtagctgtgttttattctgagttttaacaaaatcaacaaaagctttggcaaatggatttctgtacaagatgatagaagggttgatttttttcatctgggtcaatgtgaactcagtcagcccacgtagaaagaggagtccagaggcagaagtgaccataggaacatagatctctgagaagcaccatgtaacttagggaaacttgatcttcccaggacctagagattcaggtgactcagatcttgagccctggggggataggaaggccaggcctagatgatgaaggcttatcctttgcttaagggtgatactattaaataagtatcgtacaaaatatgagttgataataaaacat

SEQ ID NO: 31963 - DNA, 1711 bp, Bovine  19866881392978
  misc_feature (1)..(1): n is a, c, g, or t
naactgttatggatccctgagtttttactgttggatggcttggaaaatctttgtagatcttgctttcctcattgacaaaaggaagaggccaaagtagatgatttcaaaatctctcttaacaccagtattcaatgatttaaaagaaagcaacgtatcttcactggaaaaattgataccattagttttggaatacctcagacaacaaaatgactaaaggaatatacaaattgttattcaagaaacacttctttaaaaaaagattccttcatgcttgtcacatagacaaagttcctttgtctctataacatcaagatgtgtctttcaaacttgtcattttactgtttggcaaaatgtgttctaggtatagaaaaataactgtgctgagctgtttaacatttgttcctaatgttaactgttaaactctgcttagaaaaataattctgctcagaaatttgatctgtctgccttccttttgtattgcttttggctcttccagaactcagaaatgtcaatttgttattcaagtttgccttcactaatccttccaaaagaatgtgaaaagtcccacagtcttttatattaggaaataactatgattaaaacggattaagtctgagctcctttctcttgctctgtactggtgtaaagactgttatcaccacatttataaaagcgatggggtttttcatactaaactataatttcattgtatgagcattcagtaggggcattgatacagttaggcctggcaacttctcacaagctcagtgccaagatcctgtggtgtccttctgaaatgttggacaaagtggtggatgggcagggattagagagacagaagtgtgtgtcaagtcaaaagtcttcaaggggggcaggcagggactggagagacagactgagggctcttgacttgtaaacttagcaggagagcatagcatggcgggagaattcagctgcttatgaataggaagtagacttgtttatgtgaatatcttctatgtagcatctacttttatcaccagggataatagaatgctatctctttacatggaagatgctacaggttttacatcagaaggatggtgttttattggtggctcagtggtaaagaatccacctgttaatgcaggagacacacgttcgatcccagagttggaaagatcccctggagaagggaattgcaacccactccagtattcttgcctgggaaattcagtgaacagaggagcctggtgggctaccatccatgaggttgcaaagagtcaaacacgacttagcaactaaacaacagcagaaacagttccgtagaacatgcagatctatccacacccagtttctgtagacctatttagggtgagacagtgtgaggtaaggcaaagctaagcaacctacagaggtggaaacacatgtgacattggacttcaattctagcccccaggctggcatgtcagtgactttaaagagactgaatgcagagtgaatgcatggtgatatttatcagatctttctcagctagattctataacccagagccaagagaatgctagaaccaaatgctctcaagggtctgggcaaaagtgttccccttttatttatttattttttaacgccaaaacatttttattggggtatagctgattaacaatgttttggtagttcaaggtgaacagcaaagggactaagccatacatatacatgtatccattctccc

SEQ ID NO: 31964 - DNA, 2362 bp, Bovine  19866880276467
  misc_feature (1)..(1): n is a, c, g, or t
ntgaagaagaactaaagagcctcttgatgaaagtgaaagaggagagtgaaaaaattggcttaaagctcaccattcagaaaactaaaatcatggcatccggtcccatcacttcatggcagatagatagggaaacagtggaaacagtggctgactttatttttccaggctccaaaatcactgcagatggctaatgcagccatgaaattaaaagacacttactccttagaaggaaagttatgaccaacctagacagcatattaaaaagcaaagacattactttgccaacaaaggtctgtctagtcaaggctatggtttttccagtggtcatgtatggatgtgagagttggactataaagaaagctgagcactgaagaactgatgctttcaaactgtggtgttggagaagactcttcagagtcccttggactgcaaggagatccaaccagtccatcctaaaggagatcagtcctgggtgttaattggaaggactgatgttgaagctgaaactccaatactttggctacctgatgcaaagagctgactcatcggaaaagaccctgatgctgggaaagattgaggacaggaggagaaagggacgacagaggatgagatggttggatggcatcatcaactcgatggacatgggtttggttggactctgggagttggtgatgtacagggaggcctggcatgctgcagttcatggggtcgtgaagagtcggatatgactgagcgactgaactgaactgaactgaagggttatatatatttgttttacatatacgtttactcaacaagttattattaaaatttatttatgatacttataatactcatatatatgtgatatatctccatgaggaggaattggtgagttgacagcttcagagaagaaagggaataatgagtgagggcaggcaggcagacagtaagtgaagaaatcagaaagaaaatcaatatttatttagctatcatgtcccaagaattataggaagcagtgacatgggttcaagccctcactttgcagtttaatagccagacgacttgagaccagcttcaattccctgtaaagcttagtgtctttagctgcaaaacagaaataatgaaaatgtctactttttagaaatgtgatgaagactaaatgagaccatgcatataaagagtgttttgtaaactgtgattcagtaaacaaatgctaattgtgatttttactatctgtggttcctttctctaccattagcttgaaattaaaagacatgaatcattgccatgctctcctttgtatacagaggacacttgaatgcaggtgcctgactgatatgatcattgaagagagaatatcagagttagctcaatctgaaagaagataacattagctaaacagacaggatcagctttgcatacagacaaatactgctgtactttgtggagatgacaaagttcccaggggcttaaataactacccctacttcctgattcctgcctaaaattttgttatgtatttatcgcctcaggtaaaatatctgatgcctctaaaatgaaaatatctttggaagggtatccatttcaattatttgccagtcagatctaatgaaagatcaggaagacaatcttggtggaaatgggactcaagtacacttgctatcctaggatgaaaaggagaggtgacattcattggaaaggctggtaaccaagagaacaacctctcttcttgcttgcagtcaatttctatccctaatttcactgtattttagtaatattctttccactttatgagcttgaacacttctggaaatttctcaaattaagatatatttcttatttgtaaaactgcaggtaaagtttttgaataaaaatggccatttgcaagtctcccagtcaggagatacccactttttaaaaatactttattcaataccaactgaagtgagaaaaatgcctaaggtttttaatagagctgtgggtacaagttgaaaacttcagacctgtcactgttaaaaggttctctcttagttgaatgcacactttagaacacttttctgcccaaactctataaaagaaaaaacttgaatctatgtccttaagacagattctacctgtttgtcacatgaatcttaacctgttactattttcaacttctagagtttttgcataagcaaataaatgattccttaaaattacatacttagcaagaaacacaagaaataaagtccagtatgaagttatctgattgccagccttaacaatgttccttttgaagttatatacatatataaatattacatatatgtatatatttaaagaagcatataaagggacttctgatatagtaaagtgattaagtcagacaaacttatcccag

SEQ ID NO: 31965 - DNA, 1597 bp, Bovine  19866880389204
  misc_feature (1)..(1): n is a, c, g, or t
nactaaataaaggaaagtgaaaagtctgaaatagctactccacaggtgaaaaaagatgggcagccaaaatatgagtgaagcagggaaagtaagaatttctgcataaaatatgtcaacaggcaaaagagagcaggagaatgacatggaatcagggagcagtcatcaatatagaaaacagtggaaaataaattgattttatagacaatatcttctgttaccctttaaatcagttgagccgaatactaatacttacacattcagttttatcttcacgaaataatattataaacactttcatattattgtagtttggttgcaagtcagctaattttacatacttttttctgcttcatttttaacaactttattgtgaaatgcaacatacacagaaaaaacatatctgcataaaatatttatgtacaaattaacaaatagttttaaagtggttttccatgaacagtcaaagtagaacatgtgaggggtagattatagcaataaacattgttatatttcaaatggataaccaacaaggacctacttcattgcacagggaattctgctcaatgttatgttgcagtctggatgggaggtgagtttggggaagaatgaatacatgaacatgtatggctgagttcttttgctgtatacctgaaactatcacaaaattgttaattggctgtactccaggtacaaaagtaaacaaaagtttttttaaaaaaacagaacccaaattaaaattctggttaaaaagcacaataatttaaataatcaaaaaaatattactagagaggttcaatagcagatctgggcagacagaaaaaagaatcattgacttgaaacgttaacttgaactgctaggtttaagtgattttccatttgagaaataaaaaagacaagaaaaatagtccattacattccaaaaatcgtcattaagagtttgtgttttatcagaaaccatggaggtcatgttggagtccggtattccctgactgcggtgtgaggatggcccccatcctgggtctcacttggagctgcccccctgcccctgcacataccggcctctctcctgctttagtctcacagctgagtgtcttactagagtcactgctaggaacattggaaaatgtctgcacatcattgtgccagacttacccagatctctgcctgctgaaacaatgggaagcgagtgaactcagcatgtgtgccagccgtgtggccgtgtggatgaggctccacacgcagccccatctcccttccccccgccccctccctccccagggcttggcccttctcaggagtgggacccgccactgtggtcacagggcgtcttcaggcgtcacgaaggagctgggggtgctgtatgtgcacacctgtttgtgcacatgagtgtgcgcgggatgtgtgtgcgtgcggctgcagtgaaatcatgtggcccactgccttgatctcatctgaagcagtgttgggaagtgggagtggttttgtccatgtgccgacgagtccagaatttcctgtcacaggaggaggaaatgtgtgtttactggagaccgtgtgtcaagagaatttcttgagaggtgtgttgttggacaaacgacac

SEQ ID NO: 31966 - DNA, 2003 bp, Bovine  19866880457819
  misc_feature (1)..(1): n is a, c, g, or t
ntaaagttagtcaatgggaggaattccctggtagttcaatggttaagaatctgtcttctaatacaggagacacaggttcaatccctggtgggagaactaagatcccacatgctgtgggacaacgaagcctgtgctctgcaactaaagaacctatgcactgcagctactgagcactcgtgctctacagctcatgtgccgcaacttgagtagcccgagcaccacagtgaagacccagcgcagccaaaaaatcaatccataggccctaagacaaacacattccctctttctctatttataaaactcaagctcccatgcctgtccaagtgaaaagacccagatggggaagggagagtgatgtatggagctgtctgcacccatttcagccagacaacgtgccatcttacacccaaaccaaatttatggaggaaacatctcagtcgagtcctagacagaaagagcgatgataggagcttgttgtctctacctataaatcaagttgtaaaattttagggaatgcatcacagtcatcttccacataaatttttatgcataattgtgatctttacaggttgaattaattgttctctcttctgtggccctatactacatttatctatatctttactatcatatggacacaacttttttcttgcattactgtgatttatgtatgtgttttctctctcctcctagattgtaaacttcttaatgccagagaccatatttatagactcaaactgaatatttaaatgtttagaaattgtttaaatctttctgatagtctcctaccatatatctatgaaacatctaaagttaaaatttaaagttcaaaataatgactttaactcagaattcaaggttgggtaaaatgtttaggattattcttttgtaaaaaacaaaatgttaggaaataggattatcaatataaataatatgtccttacaatttagccaagtcagagcctaacaataggagaaattctgtgaaatagaaagaaaaagcataatcattttctgttgacaatctcccttcataaagccaggctagtatctcaatagagaacagtgctcttagaagcattctagacttttgaaagattcagttatcatttctgtcccaaattctgtccttaagagaataaagatatacaggataaatgatacatttcaatcaaagagagataatggctttatcaatttatatatgttgttaaaattttaaatgtcactcactttgattcactgaccattcagagatgatcagttatattgccattccaaaacccttgggagctattttttcccgctctttgcttttttgaaatatatcctttatccataccttaatgaagatcaaagtatgaagttctagagattttcactgataaattctgaaaggtcgataaactgacatttagcccagagatcctgataatcaagattgtgtcaggacttttcactttgtttattatttattatctctctgcctacctaccatttactttgtatgtcatctatctatccagccatttagccaccttttttcttagtctaagaatctgcatttaatagacagtcctctaattttacaagtatgttttcctccttcgttccttgtctctctttcccgttttcattccgtcttttcttccttagagatcctactttagaccaggcaccatataaaagggaaatacatacaacccatgagagcaaacgctagagcacttacagtatgggtagtgacacaggctggtgaagaagtcatttaacaaaacgagataagcagctctcacgaatatattcaaagcaaaatgagagcagagaggaaagagcaggtaagaaaaagggataacattttgagtcaaaatttgaaagacgagtatgtagggagtttttatacagacatttcaggcagagggaattatatatgccaaggcatagttgagacacgtgagtcaacagggcatattcagagccttagaaacattcgatattgcctgt

SEQ ID NO: 31967 - DNA, 1682 bp, Bovine  19866880490966
  misc_feature (1)..(1): n is a, c, g, or t
ntttaaataaaactcatttccctattgaatatatttccattttaaggccttttttgttgttgttgggatagtctagtgagacctcatatatgccatattaccatcacagtgctggtaaagacactgataaatgctcattttatttcaaattatgtactcagaagaatagtcattcctgcataatcaatttgaagatatttcaactggaaaagaagcagtgtggcttactctctgtttttactctgttagcattaaatttctgctatggaaataattatcttttagtaatgcagctctaaaattagaatgaattaagagttttaaagttagaagtggaaaagtactattaaaatgattttagagcaataatcaatttgtgtgttgtgaacatcctaaattctacacagaaaaggtgtaaattactctttaattgctcagctaattgctagcaattgtccaatctttgttattaaacaaaaatgctttatcttattcttcttaatttctttaggaaaaaattaacctagctttaatttttagatagtctcttgatgccctgctggtcttctaaatgtggctttgatagttctttctgcccctgatatatttagtatttttgcaaagcaataaaaagaatagggacctaggactttaacaaacttacatctgtaaatgttacagacttttatcaaaaaaatttttactttattataatctcataggatatgctagggtagctaccctttcatctattggacgctatacaagatttttttttttttttttttttttttgagtgctaatggtaacaatataaggtttaggtgatttacctgcacacagctaaggggataaagagacaaggtactgcacagaaatggccttaaatttgttatcttcactggcaaagacatattagaaagttagtgaagtggaaattcagaaggtagcctaagaatagttacagattttgagagttagacacatcaggtgagaatataaaaattcagagaatatggaaaactgagggaaatatagttttaatctttagtaaaagagactatagaaaatttttcatgatttgtacaattttcattcatttctccttataagtgctggcaatattatgtgaattataagtataattaaaataacatttcctgacacattgaggctaaatgaaaatgaattagcaaaactcaatatagaatttctttctctgaaatttataacaaaaggccttatctcatggctagaaatggtatgtgtgagtttacttgaaggcaaggagatggattaagttacttatttcatcagacacaataaaagtaatactatataagcataactgaaaggagtttagagtaggggtttcatacttcctaaatttgaaatgtcagatataattaccatttatgttctcaagatctttatttcaaggcttatttgaaagaatgaattgctatgggtcttttcatgtaggccaaggcaaaaatacacatagtttgcttccatgagtttatcaaatgttaaaacaaacaaacaaaaaatagggttacagagtatggaaaataagaaatgaatatttctcttgtgccagctttcatatgatggcaaactgatgagatgcaggatgaacacaatcttttcattttctaatatatcttacaggtataatcaaa

SEQ ID NO: 31968 - DNA, 2333 bp, Bovine  19866880528437
  misc_feature (1)..(1): n is a, c, g, or t
nttagaatattcaagttgttttcatgaatctcccctcctcccaatctactccatatttgtccataaaaatggaagtcaatactagatgtatattttgttatttacgaaaaaaaatctctgattgtctacttgttttttgtttttgttttttcagtagacagatcattaaccattttcttaactactttccataaagggagaattaatgggctttgtttatttctcatgtttaaaataaaaagaaatcctaatctacacgtatgtgatatcagcataatgtgcatctatctaacacaatttgctcaaataggtacttcccaaatattttgtaaagcttttagctctacttctcagttttcatatccaggaccaagtgctgtgctgtctagaataacaaagtccattctctctcctttaactacccatttttcagccaacaaggcaaccgggcaaatgctaatggctggtctccagcgacagcactgtatcactcccagaattaaccacaggcagttcctgagccaggtcagcccagaacgctgccttgcacactttctcaagtattaattacctttctaaaggtcgcagtgcctgacatgaggacagaaatgcaggacctcaccagccacgctccctagaccagttcacacaaccagttgcactttgcttgaggctgggtcacttcacttgcttactgtctcatatgatgttataatcttcaaatgggtctcctgctgaatctgacccccttatccacctggaaaatccactctcttgaagtgcaagcagcccagggcaaggctttgttgatgccacaaggcactgtttatcttccctttttcattgcaaccagcaggttctgcactcactttctttcttctactagatccctgatgattacgctgccctatggtgatatattaacacatacacgtccatccttctaccctggccctacctttgcccttagattttttcttgggtctaatcttaatgtcactcctcaggctgacctttcctgaaggctcaaagttggttttctctgttatgtgctcccatcctattctactttattcctttatataaaatcacatgtcagcatctataccatttctaattcccaaaccttaaattctgtagggaccttaacaaccctgcttacaattgcatccctaatgccttggacagtgcctgaaatttgttagttctcagctgtgaaaacattgggtgaataaataagtgcatcatagcttcctgaaagctggaaccatatcttattcaagttactatgcccagtctatccaagtcagtagtggaaattttttgaatcaatgatgaactcagtaaactgtatgctattcatttataactctacaaatacagtcacattataacaatcttgattctcaaggaacgtgtataacccaatttccccaaatttttataagtttcacagacatggaagagtaaaagaaagcattgagaatatagatttttaagtataatttatttttcactagtagtatcttgaaaatatggtaccatgccataaaaaattgctttgatgtatgtccagcagctaaacaaaaatcaatacatatttatctatgtttattatcaagcatgggaaaattaaatcacaggtaattcagagtaattcaagccttcactttagttttgctttcaatgttactttctactcatacttgcatatttcaaaaaataatcaattagtcatagtcaacatttatgtgcagagaccatattaggcaatatggaaaaatgcaaaagaaacaggagggagacagatggctccatgaaaaatacataataaaatgtcctgctttgctctgccttacttgggtattatgcattcaatctgtaatgctttatattcttttgcataggtgtgcgttctttcttctgattagacctaaaattccttgacaacaaataacttgacttttagttaacaccttttgattatcgtttgaccttctttcttactgtatcaactcatacatttgctcatcaaatatttattgaatatctgctatgtgtcagttactctgctagacctatgctatagagaacaagataaaggccctgctcccatgaagccatattgaatgtgtatgtgggaggtgaggtggagcaaatattaaacaagtacacaaacaagtatgaaaaatgctagctagaaaaagtgcttaaaaacttacataacaggccaaagggctatgaattgataatcctgagagttgtttcagatgaaatggccaaggaacaactaagcaaaaaccagaattattggaaagcattgaaagatctgg

SEQ ID NO: 31969 - DNA, 1419 bp, Bovine  19866880535967
  misc_feature (1)..(1): n is a, c, g, or t
nttttaataaaggaaatatctgtgaaagtgctttataattaaaatttatcatatacaataagtcattttgtaacatgctattctttaaatgagtttaacctttcagaacttcttttttcaaagaggaaattagtcatgttttaattttttttttttcctgctagcttattacaattgacagtttacaactcaagacacgtttctggtttggaaaaagttttgtttgtattccaaagtaggtatatttggttatgaacatattacaggagataccaaacatattcaaaagagcttgactacagaaaagacattcaagagaccaggacttcacagctagttcattcaacaaaacctatgacacaattttcaatttctctgagcctcattttgtttgtctttcaactacaatggtagactgaaataatctgatgctccttcttaatccaaattttcctataattttcttataagttccctaaagcgtccccttaaatattgataaatagtggttatttacaaaatatcagctgccatttctggcttttagactcctaaactcacaattaattagaccttacatagaaacatgctttgaaataggtcatttacttatagaggaacagtccacagtccttttgttattagaactacagagtggtgactgttctttttagtcactggggtacatagaaaaggttcagaaaaatttaaatccaaaacatgagaagctactttctcaggatgtaaaaaaaaaagaaaagaaaaatggaacatctctgaaagtataaggcaaataaaatacaagatctattttattctattcttcataacatatcaattgcatgaagatctataaaattttggaagcatttccttttttttccttttcttttaatacataacttcaagttttcctgttttgaagggcaattcctcaccccaaactcttcctccaacctgcttctccttcgttataggtctgtcctgtggccacagagctctgaaatacactccttagcccaccttagaacatttgcttccaatttaagcacaaagaaaactaaagcgaaaacaacaacaacctcgaatacaaataagaatcattctacacataagaaaatgtgtgacaactgcccgactcacacagggttaggtacagaagtgaaaatgggacctgactgattccttagataagaggaagccttcctggaacttatttattacatgatgaagaagaaaaggatgctctttatggaaacagttttcttgggaactcaaaatgtaagcttctaccactgacaaggtggcatttttagattaagccgtggggaaatctagcatgatttacaaatacacccgtccaagaataacagccttcctgccattcgtgattggcatcgttattacagactctattat

SEQ ID NO: 31970 - DNA, 1742 bp, Bovine  19866880565473
  misc_feature (1)..(1): n is a, c, g, or t
ntagctgtgagctaatacagttgtgttgtttaatgctgcaagtttgtagtagttatgtagcaacagaaaactacccacattgtaaatcttttcattgtctttcatgtcttttattcccttttctgtattttactgttttatttctttgtacactatttaggatatattatttggggggcttctatttcagttcactgattctttcttcagctgtgtttaatctgctggtagaaatgatcactgtgtgcttgcacagtctctgttttattgaactctttgcaaccccatggactgtagcctgccaggctcctctgtccatgggattccccaggcaaaaatattggagtggcttgccgtttccttttccaggggatcttccccaccagggattcaacctgcatttactgcattgcaggtggattcttaaccactgaccccacctgcgaggcctaaattcttaattttggttaattttttatactactttttaatctagtttccacttggataatttttatgatttctagttctttgatgaaatttctagtcttttatatctttgtgtagagtaagaacactcattttaaattctgtggagtatctgtagaccttaaaactgtgtttctcttatcttttattactgttgcttttaaatcatatcctcttgttcacatatgtataaatttttatttggaacctgatattatgtttgtaatattgtgtaaagaaataattcaatgcttagagtgatgtcatcttccttttgagaaaacttatgttcatttctccctggagacctaccattatgggtgctagaaccatttgctctcagaccacttaatacaatttcaatgattgataagattcaaagttgggctacagttcctgtgaaatgcattaaggtggattcaccaaggtcccttacatggtcatcctggacatcattcaccgtccatctatcttcattaggccacccaaagctctgcctcagtcttttaatctctcaaccgctccctccacaatcagtcgatgccctgagggaaaaattaaacctctaagtggactttcttttctgagcctatttcctttatttgtgtttttgaaatttgtctttaacaccctcaagcagctttaaaaataaacattctgtccagcttttatagctgtcctcaactgaagagttggctcaaattgcctaccattacagaaatacttactagatggactcaatggacatgagtttgaacaaactccgggagataacgaaggacagaggagcctggtattctgcagtccatggggttgtaaagagtcagacatggcttagtgactgaacaacaataacaaccagaaatagatgtcttcacaatcctgactttattgtttctatcttattaaaatgagtgctcttaacaaaaactttatgtgaatagagaagtgtacttttgttgatagattttttgaattgagcatcacattagtcccctcttgattgaaactttttgaattgctttttcctagaaaaatattctccttaaggtgataattgctttttatcccccaaactgaaataaattctattgtttaccctgatactagtaattttaaggtatctagagctgtagttttggcttccttttttttttttaaagagtattacattaaaaactttagacagatttgttgacatcctttttattgttgttgtttttattttattttattttttaactttacaatat

SEQ ID NO: 31971 - DNA, 2525 bp, Bovine  19866880580468
  misc_feature (1)..(1): n is a, c, g, or t
nctgctttgatttatttgcagctcctggtacactaaccaggagaacagaacagccagccacagatcaaggcagttcaccggttagaatgctctggttaccaagaaagcacctactatatttgaaagaacctttacacagaaacaagcacagtggaactgaaggcagtgcatatattaactacattccctctgaagaaaaacactgtttccactaaacacccaagcagattcatattactgtcagcccccagtggcctggtaggcactgggggcttcaccattagcaaaatacaaaggctaccatagcgtaaccctgttacttcctgctagtccttcttttgctctttcttttctaaagaccaagcaaggataagtctaaataagagtagtgtttttctttactgatggaaacagagttttatgaatatacagtttcacaccatccccaaaaaacctatatttgggggtcctcttataagtaaaacaagtttccatttcagtcttcaacattaccacaaaccacacacacacaccacaaaatgtattcacaattttcagggaacctttagctatctggagtatgtattaaaatcagttcaaatccacaatgcaaccacgcacagccatgtatttggcctgtcaaggtatgttcaaatttgaaacaggtatgctaagtgaaggttatattcacctttgagcctcggactctgcatcatcacagacgtgacaaatgaggcatagaggtctcctccctctcttgctgcccacagtaagtactaaagatttagaatgaaactagagaagctctggcctaagttagcaagcgagcaaaccaattaaaggaaaaaaatcaagactgactctaatcttacacttgagaggtgactgacttctggtgccatttcaacacataggagagaaacagcacaatcaaattagtgctgttagctctatttagtaaagctatttccttatttcctaagagaatgagttttgggggacaaaatttgataaaaaaaaaaaaaagccaaattagtcagaattaagtgataagtttcactcacaaagctacagggtacatttttctgtagttctgtgtgtgtgtgtgtgtgtgtgtgtgtgtaaacacgattctgtacctgtttttctaacctatgactaaaagaacaataaatgtgtttttcaaggaatagttacaaatgataacatcatttccttcactgagtagaagcaggggacaaaattccaaagtcattgttggttctgtcattgttagattttgctttctgcttaaggtttccattatagtttaatgctatgaagtatgaagaaaagaattaagaagtggcagaagatgaaaatctcaaacctccaaatgagaacaccactctcatttctctaccggcacacatggctccatcccctagtccccagcctcctcctacccaggacaaggacccagtcccatccctgccccaccaccctccatttatccctaagagaccacttcattatacaatttgacttctccactctgcctactctagatttgcctagcttttgcaaagcttttgcaactgttcaaagtgttgaattctctacttgcaaagcttttgcaacttggagaaaacaccctcttcatgctccccaggtggtgctagtggtaaagaacctgcttgccaatgcaagagatgcaggttcgatccctgcgttgggaagatcccctggaggaggaaatggcaacccactccagtattcttgcctggaaaactccacggacagaagagcctggcaggctacagttcatggggtcacaaagagtcggacacgactgagcatgcacacgcaggcagggcgatctcttcacgtccctcagtccacgtgcagttacagcttgcaacagaacatgcccacgtgcctccctgcacctgaactgacatggattcaaagtgccctcgcagtagcatctcaggcacgcagagagaagagaccacctgccccaaacccgggccaccagcgagctctccccctggttctcctcagcccccacgcagctattacagtgctgagtgggaaagcccagctgccccagtttgactcacacctacaggcttttcttcattcccactctcatttctgtgagccccaactgcttgtctctctcctccccttttatctgtattagaggaagtataacgccgtgggcagagtcccctttgtcttcccgtttagatcagacatgtaaataaacacatctgtttggctagggcacaagcaaagccttaaatagtagcattgcctaaaagatatcactgagttctgtgaaagaattattacaattaagacttctcatgacaaggcagctttcacacagctaatcaaacaacaagacagcatctcacaaactcacttgcctctttttttgcatatatgaaaaatgctggtacttagagaaccatagaaggcaagcaattgcatataacagccaagtaaatccagttctcaaaacagggcaccagagagaa

SEQ ID NO: 31972 - DNA, 1546 bp, Bovine  19866880667111
  misc_feature (1)..(1): n is a, c, g, or t
nggaaagattgaaggcaggagaagaaggggatgacagaggatgagatggttggatggcatcgccaatgcaatggacatgagtttgagtaggctccaggagttggtgatggacagggaaacctggcgtgctgcagtccttggggtcacaaagagtcacacacaactgagtgaccgaactaaactgaaagatgaattagaacactgctgcagccaattgaaaataatttttacccatttctactcttccagattgcaaatattgaaatataacttcacccaacaacattcattgaaagtttgatatatctaaagaggtatttgagctcaaaaattgaaagtaagtattgtaaaaaaaaaaaaaaaaacttaattacaatgcaccataatttcatcataactctcagggataaagcaaatctccatttctagaacataggtatatgcatttggattactgaagtaaagactctctgtgttggtaattatatttaatgagctcaaatggatttgatatatagcatcagctaacacccaaaagattagcagaggttagtgctgatagttaagaatggctaaactagctctgagtgtgtaattacaattatgatttcttagttgcctcatttcaccaattgattcatccctctgtcttaaaacaattatttcctttagcatgattccctattcctgtaaagagcatttctttgacctctcatcctcatagcagcaaattgccctgcagttacaaaatgaagtttctctagaactttatataagctgaaggccaaggaccatattaaattggagaatgcatattcagactaaagtcatgtaaatgcaaactcctcaggcacatgctcagtcactaagttgtgcttgacccttttgtgaccccatggacagcagcccaccgggctcctctgtcaatgggattccaccaggcaagaatactggagtgggttgccttttcctactccagagactcttcttgagctagagatcgaaactgtgtctcctgcattacaggtggaagttatcaatacacatggtttaggagtcaaatcgtatcaagaagattatactgaaaattgccccttttcaaatcctgttttccccacccctccattcctctccccagaaaccaccagcttttactcagattcttattttaattagcactttattttaaaatacttgtattgctaattaaaataatcaaaaacataattttttatttactttatgctatgagggatgaaaattaagtaatctgataataagcccagctgtccttctctatcttctccaagtattatgtcactattctccattaaaacttacaagaacatttatggcaatatgtctttgtgtgttcacagccaagacaagtagaatactatcactacatttctcttctttgaatggcagtacttcatcttttcttgtgattctaattgtcctttttggcaatatattgtactcacaaattccattatatcaggcttttcatcattcttagaagagatatctttagtagattggggtt

SEQ ID NO: 31973 - DNA, 1246 bp, Bovine  19866880769252
  misc_feature (1)..(1): n is a, c, g, or t
ntttgggtggactccggcagttggtgatggacagggaggcctggcgtgctgcggttcatgaggtcgctaagagtcagacacgactgagcaactgaactaaactgaactgaactctcctaatagactcttctctgctgtctcttctagtccactactttcatgtgcaagaattcatgtttctttatcactagcaatcgatttagattttcatacaagtgtattagagatcactctaaggaatacttatgggaaaacaatgtaggctgatgcaaactttttcaacatgttaaattttgcacataacagaatattgttgtttctctgtgtcaaaaaactcaaaaaaattaaatataaacaacttgaactgccatggactatttttgctcttcatatttaaagatgaaactgctaacaagattattctcagctaaggacacacacatgactgatgcatgagctgcaatcattcagggctatataacagcttctccagggcctgtcattattcagtgggctacaggagacagcgctgggtcccttacttctgactggtacatgccatcacactgtctaacggcatcactttcccaatctctcttgtctgccacaattattctttaatcaccgcatgaaatcacacacgcacacactatcgtgtaccttctcactaagccataaacatccttatgcattcttgtctggctgtgcctgggaacttcaccttaaatacactgcctctcctctccctagaagctctgcccatcttcaaggtcctattcaggctctgctccatccatgcaccttccctgactactctagctctcagatatttctcttaactctgacctcttacagctcttaaacacttcactgttcactttcacttcacatgtatatgtcttgcctcttcaggtagcatttgacttccttgtgataagactattctttggaatgcctctgcacctctcatagcacctagctggctctcatacatactgacctcaatggaataccctgcttcaaacctctaccctcccttcaaggctaatttcaggttccacatctcttaagtattctttctaagtacaactcaaaacggtatcttactatgtatagtataactttgcttgtacatttagtatataattgcttcttctttcaagcatatcagctgttcatatattttcttctttgcccgtgtgaggttataagatgttagaacatgcactcatctttgtatccttca

SEQ ID NO: 31974 - DNA, 1006 bp, Bovine  19866880821784
  misc_feature (1)..(1): n is a, c, g, or t
ncctgtgttccctgcctggaagccaagtcttaaccctggatcaccagggaagtccctgcaatgaccattttctgattgcatagacacaaccaagacatgagcaaacccaagttttaaattagaggctttctttgcgaaagcagtcttagaataaatagctcattagagcaaagtaaatgagatccttactatagatagacctatattactagagaggaaaggccagaaagtcagatactcccacagttacttctcttggactggcaaaccctcaacttgcccagattcctctactgctttaatttgttgatttactcattcattcaccatgcattcactaacatttttcaactagtatttgttgtttatagaaaagggttatagaaaaggcagaggaaccagagatcaaattgcaaacatctgatggatcatcaaaaaagcaagagagttccagaaaaacatctatttctgctttattgactatgccaaaccttttgaatgtgtggctcacaataaactgtggaaaattctgaaagagatgggaataccagaccacctgacctgcctcttgagaaacctgtatgcaggtcaggaagcaacagttagaattggacatgtaacaacagactggtttcaaatagggaaaggagtacgtcaaggctgtatattgtcactctgcttatttaacttatatgcagagtacatcttgagaaatgctgggctggatgaagcacaagctggaatcaaaattcccaggagaaatattaataacttcagatatgcagatgacaccactcttatggcagaaagagaagaacaactaaagagtctcctgatgaaagtgaaagaggagagtcccacaagttggcttaaagctcaacattcagaaaactaagatcatggcatccggtcccatcacttcatggcaaatagatggggaaacagtggaaacagtgacagactttattttcttgggctccaaaatcactgcagatggtgactgcag

SEQ ID NO: 31975 - DNA, 1188 bp, Bovine  19866880936510
  misc_feature (1)..(1): n is a, c, g, or t
ntgctaagtgtgttagtattcttggcccattttcttcagatatgagactgagtcacccatgtaaataggatttatagcctctaagatctactatacagatgtctatatttgtcattgttgtttagtcactaagtcatgtctgactcttgtgaccccatggatcatagcccgccaggctcttctgtccatgggatttccccaagaatactggggtgggttgccatttccttctccaggggatcttcctgacccaaggatcaaacccatgtatcctgcattgcaggagggctttttaaccactgagccatcagggaacctgaaatgtttatataattgtctacagtgaggtcaacgctctgatataaaatagctataggaattgtgaaatgaagctctagaacctcctttgtgttactattctaagtaagacacgttcacatagggtctttggactaaaaggacgaatacaacctggtttggaagcaagttaaaaaaaaaaaaaaatcttctgaccaaaagaatcatttttttttctggcctcctaaatctacatgcattctaaaatccaatctcagatcattatatcttgaattactccaactttagatcaaccatagttagtaagcaatgctattctacttcacattcgaggaaatttgggttcaaggccacatagctagcgagtaaagaagacattttgtctataatgaaggattgtttttaaatctttattaatttgagttctgtcagggtgtttttaaatactatacacaatttctttcagattttctcttccttgttttgggtacatgaccttcacggctttgttctgatttgtcaggggatgtgagatgtttctctttgttatggtttttgttttatgtgcagttttgacttttctccataatggtaatctaggctggtttggggaagaaagagaatacctgggatttatatcaaagacattgtcagatactttttttttcctctttgctctcactgtctgccccagccctgaaagatgtgccatgagaaacaaagtattagaagttttcagctggcctaaggggaacagtctcatttactgtgctacatggcatcataaatcagcaaggataatacccatgtgactctaatctggcattaattctggcactaaaaatttaatggttccctggccaaccctca

SEQ ID NO: 31976 - DNA, 1315 bp, Bovine  19866880986912
  misc_feature (1)..(1): n is a, c, g, or t
ntgagataagtgcaattgtgcatgtagtttgaacatcctagggcatttcctttctttgggattggatgaaaacttaccttttccagtcctgtggccactgcccttgcatttagatggtgctaaatgaatagttctcttcaaacaattttaagcaaagtgatttgggtcacttttattttggaacagtagagagcagatgtgtcttccttattctttctctatttatctttgctcttcttcaggctggatcaggctcagaaaaccttcacaccacatattgtaagctcagtggaacctgagcctctgaatgactgcagagccaacacacacacacacacacacacacacacacacacacacttacacatccctatacaatcaacctgcagtggacacttatgtaaataagaggtgaactttttttcctaagaaactgaatctttgggttttacaacttatagcaggctactgctgctgctgctgctaagtcgcatcattcgtgtctgactctgtgagaccccatagacggctcccaacaagctaagtttgcttaactaataaaaggaaactaggaaaagaaaaagttttggaaagctaagttgctaggaatttgagcaatcatgaccattgtgttatcattgggtttgtggtcaattaaataatgattatctgaagatttaataactctttgagaaatgcttgtagagaagaatttttggcaatctttaataaaagaaagctcattaatcaatgtttaattttcatgtgtaaattccactaacaacaagaaaaagagcatttattaaactgtaaggaattattaaagatctattcataaagcatttctaaaatgtcacttagataaaccctgcacattatgaatcaaagcacaaaactctttcttgatctaaatgtgattgacctttataatggcaacaaaaatcctaagaggtatcatataggtaatcttgtgtaatagtgtaataggtacactattacactattacacaaatcttaaggaactattacactattaagattgtgtaatatttgcagaaaatgataattttgtgatgcatatatctgatcttagttttatgtttcagattattgatgtatttgtttatatattttataaaaatatactttgtttaatgaattgtaaagtgatgaattttgctaaattgaaacttataacataatgaaattaatctaatttttctcagctatgccatttgattaaagctgtccaatgtgacccaaatctctattgctagcaagaaactcaggaaaacccagtcactttttaacaata

SEQ ID NO: 31977 - DNA, 873 bp, Bovine  19866881168114
  misc_feature (1)..(1): n is a, c, g, or t
ngaggatgtgtgaggatgaagatacgtttgttaacttggtgatgggagaatgaagcatttgcagtctgcttttatttgattaatgaggtacgaggtaggctatcagtttaggatgtggggagtatataatgtgcaggaaggttaaaggaaaaggagatgttttcagagagttcttccgaagaatagtaaagcaaatttaccagggaaacctaaaagtggtgctaggcattattaagtggagttctgctttatagaaactaaaataaaactagttattcaaggcgggtgatttttttttccccagaaatttcagttgttcgcttatggacatggaaaagacagatgcttgaaataaagttacagtttttacaagtgcataggatagacacagagagacagagttttgtatccatagggaggtaatcaaaaaacaaaacacagaaactaaattgaatatggaaggaaatgagggcaagagggaggtgatggttttatgtaaatataattttcatgtggcatcattccaagaattgatatttggaattagaaaaggaatgcagatttcgcaaagttcagacagaaggagaaaagaatagaagaaaagcaaagacaaaattgtaagcggtagagctgaagcttctggtcctgacttagcaaattttctgcgagtagaaaagcaacattttagagagaaatgggggcagagcagatcatagacggtagaaaagcagttgggtaggactgacggccttccaaggctggaggtcatcagtttaagatggcacaaaatactcaaagtgaggtgttttctcaggaagtgttcagtgttagagatattggaataaatatgttactttgataaaatgaagatat

SEQ ID NO: 31978 - DNA, 875 bp, Bovine  19866881260462
  misc_feature (1)..(1): n is a, c, g, or t
ntgcagttttcctgtgtttatcacaattaattttggtgtgaagaaaaaacaaaacctttgatattttcatgaccatgcgttaacattttggtttaagaaaaattcacagcaaacatgaaaatgaatctctttggtagaagtctctgagttcagctttcaatgttatcataatcataatcatttaataaagggttactgatagcctgctgttctgctatatgccaagcattgtgataagaagtcctatagatcatggaacatggtaagcaaagctttagaccttatttagaatgaatgtattagaaataatataatttttatatgtgtgtgcacatacacaggttttctatgttttgaaaacttttagtatcttgtttgatgtcaggagatacaaagttctgaagatgaaacttaggaatctgctcagattcttcattatattacagggatggtgtacatggttatgggcttcccagtgactccagaaatgattacttttcctgcattgtgtgacacacaggagatacagagacacttcagttgacaaatggggctatttttgcttgtctttcttttggtgcagtgcagtggctaagaatacaagttctggacactgtcctcgttctgtcagacttgaaaaaaattatttttttcccggagccttaatttcttcatctgtaacatgggttaaatgagagataataagattgaactccgaattatgaggatttaagtcaacgatgacccttgggggtctaacatctgtgtttcctgtgttgctcaccagattcagttgcttatgagcttgcccattcagaagtctttcctcaatagaaaaacccttagacaaacatattctttttggcattggctaa

SEQ ID NO: 31979 - DNA, 761 bp, Bovine  19866881282451
  misc_feature (1)..(1): n is a, c, g, or t
nggtttggaaaaacgaagagaaataaggcatagctcaaggaggatctagaggttaagaaaatagctttccttttatttttatctctaaacatgcgtttgtaacatgtgactatatcatatgaaatatctgagcatgtcaaagggaaaagacatcccggggagagaggctggaactagagcataggaaaagctgagacagaaagagggtggctgccagagcagagtactggaagagatagaaaaacagatctggtcagaagcatccttcattcccatgaccaaatgaaaatggcttaagatgtggggagatagatggctgaggatcctcagcctgaatatctctctttcttttgaaataaatttgggtgttacttttgactatgaaagacttaaaatggctaagtagattttaaaaggtggtacaagcctgaaattggaataccagatctgactatactaactgtgtaatagaacgtggtagcttgcccactaatccagactttagctagaagaaaagaaaatttccttaaatctgtccttagtctaattatgcagcctcaatcatcttaattccttaactctatctcctagaataagcagttcactcaaatataaagaatctgaaggaaataaagcaataggcctgaaagaaatgtatcatatcctgacccactcagcaatctgtacaattttatgtgattaatatttaagtggacatgatgatgatatgcattttgttctcttagcccagcatgtggaag

SEQ ID NO: 31980 - DNA, 737 bp, Bovine  19866881363144
  misc_feature (1)..(1): n is a, c, g, or t
natacacttctttggcatcctcttaattagatctggcttctgaacacttaattactgaactctacatagagtgattgagaaaatttaaaatatatgcataatgctgaccatataatgagaaagttgttttcacagaaaagaaatcccaactcctaagtaactattgcaataaaatcatacaaatttgctattatacagtgtaaggacttaaattgaagattgagctggcaagattatataattgcatataagagataactagcttcaagctgggtttattataaaaactaatttttaagcattatctaaatgtaatatattaccaactcaagaaaatgcttttattaattgctatatgcttatgtaggcttccctgatagctcagttggtacagaatctgcctgcagtgcaggggacctcagttcaattcctgggtaggaaagatcagctggagaagggaaaggatacccattccagaattctggctggagaattccatggactgtgtagtccatggggtcacaaagagtcggacataactgagtgactttcacttgcatatgtcatgtactttgagcatataaatacatcatgttaagagagttaatatttttaataataatacaatattagtatcattgtcatatataacgtattatatataataatattaacatcattgtcaagtcactgtcaaatctaagtttaaacagtctccatcaagcatatcaagtcag

SEQ ID NO: 31981 - DNA, 1854 bp, Bovine  19866881390002
  misc_feature (1)..(1): n is a, c, g, or t
ntttaggaactgttataaaatcacttaaagggcagaaaagtggaaggagtcaattctactaaaaatagggagagattttatagcacaggttcaccagatccttaaaaacgtaagtggctgttccagtgtgctgccccttcctgcttcccttgactacctgataaaattctatttactctccaaagaccaatattctcagacgccaagcaaaccattcacctgttattccatgatcagtgagtcattcaaagcatgttgctgtttgcactgcattgcctttgctctgaaggtaaaacagatatctgctctcctattgccccaccctatgctacactgtcacatgcaaagtaactttcatgctactgtcttacccaaggggccctgttatttataataggcttaataaacttgccaaaggctttttctcacattaccttatttgcactgcatacacaagttgagtgtatgtgattattcccattctacagataggtaaatcacacagctggtgaaatgccttgccccaagttgcacgggagagttaagtgcatgggcaaaaatgaagacagatggcctcctctcagaggacacattctcctgtggcattgctcttcccaacagcaggtgcaacatgtcatcactttgccatctttctcaagctatgctttagcttctagattctcttttattcacagtatatgtggtgcagatttctgtacaggatgtaaataaatgacttcacacctctgtatgaaagcgctgctgctgctgctgctgctgctgctaagtcacttcagttgtgtccgactctgtgcaaccccatagacggcagcccaccaggctcccccgtccctgggattctccaggcaagaacactggagtgggttgccatttccttctccaatgcatgaaagtgaaaagtgaaagtgaagtcactcagtcgtgtccgactcttcacgaccccaaggactgcagcccaccaggctcctccgtccatgggattttccaggcaagagtactggagtggggtgccattgccttctccggtgaaagcactacatttgtgtaataaatgttatacagtaaggaagattcaacagaaaatatcaagatgatctcaaaccttacagagtcatccacagtcacaattagctcttcacctgattgccttctgtgggctgttgttgatgtctggggataatcactaacttagctatcctagtactcttaagctatatgacctttccagtgtaagttttttgtccccatcagtatttattgcatctttttactgcagctattttccattaggaaacacaaacagaaataaatattgatatcattctctaggaatactatgttctctgcactatcgctcctttaacaagtgaatttttgtaaatccaatataatctgctatttcctaagacctcagtgataaactcagtccttgaaaaatgcataaattttaaaagtgagccaatgtacttctcagggctgtgtttacagtgtgaaacctcacttcatgcatcccaaccatgcctattgaacttgcttaaaaaagatactcacctctgcctttctgaaagagacagaccctctgaattagttttccatgaattgtttccctcgtgagactaaggccaaataagccatctgggacaggaagaaagcacatcttttcccccttgtattccaggacattttacaccttaaaatctaccaagattgtatcacatctgaatatctcaccagggtcccaggtcagaagtgacagagcacacctgtgcagagctctgaccgacacctacggaaggggcagggaggctcttgcgagggggcctgggaacagca

SEQ ID NO: 31982 - DNA, 933 bp, Bovine  19866881579798
  misc_feature (1)..(1): n is a, c, g, or t
ntcactatgtatactatagttttacatgagatggtacttgaagtctcctcagtctgctgctgcagagaagttaaaattaaggaactttcttagtaaaactggagataatacctccctattgtgattagctttgttttctttttcttagagcgagtattcaatattcagcatgagatttttctggtagtaggaagcacattttccatgctatggtgaatttattaacttagtatctgctatgaactatttttatatttaatacatgtaatcacaagtatggtgcatattactatttataaagaatagattttaaatgtcaaatatttacctggcttaaacatctttgttgttgttgtttagttgcgaagttgtgtccaactctttataaccccatggactgtagcctgctaggctcctctgtccatgagatttctcaggcagaaatagatttctcaggcagaaatactggagcgggtgagttgccatttccttatctgggggaccttcccaacccaagtattgaacccgtgtctcctgcattacaggcagattctttactgctgagccgccagggaagactgcttaaacatcttgctgctgctgctaaatcgcttcagtcttgtccgactctgtgtgaccccatagacggcagcccaccaggctcccctgtccctgggattctctaggcaagaacactggagtgggttgccatttccttttccaatgcatgaaaatgaaaagttaaggggaagtcgctcagtcgtgtctgactcttagcgaccccatggactgcagcccaccaggctcctctgtccatgggattttccaggaaagagtactgtagtggtttgccattgccttctccagcttaaacatcttattagtccacaaaaatgattcatgaatgtttaattatgccataaagaacaactg

SEQ ID NO: 31983 - DNA, 810 bp, Bovine  19866881745427
  misc_feature (1)..(1): n is a, c, g, or t
nttcctttcacaatggtaacactagtctcacagccatgcatttccccaacaccgtcttattttgctcttgtcacctgaagtccttaaagaatgcgaaaaaaatactaaactgttggactgcacatgtttgtctgaaggagagggtaaaatggagagttagcatactgaaggagtttaatcctgatgaaacattagctgtcatttgagtaaaaaaggaaatatttacattataacaagacaagaaaagcatattctttgttcagctactccacattaattatgtatatttgggggaacttctatatgatctcccacaaagtttccctcctttttaaattctccccctggaactaaaatgctagagataaatgtttatggggaaaaaaattaagttttctcacagagcaaatcccaccaaagtaagtatcataaagaaaaaaaattgaactctatttttttcctacctgaaaatattagggtacaagttgtctcacaacaggaagtcctaataaggaatgaggggctgctttgaaaactcaccagctaattaggcaggtgccaaaagaagggaggaaattccagcccataatattgtcctaccaacctccaagatcagttttcattccaatcccaaagaaaggcaatgccaaagaatgctcaaactaccgcacaactgcactcatctcacatgctagtaaagaaatgctcaaaattctccaagccaggcttcagcaacacgtgaaccgtgaacttcctgatgttcaagcggctttagaaaaggcagaggaaccagagatcaaatgccaacat

SEQ ID NO: 31984 - DNA, 824 bp, Bovine  19866881952122
  misc_feature (1)..(1): n is a, c, g, or t
nattcagtataaattctgcacaccaaaacagaatatgtctagatttgaacgactgcagagcttacttgcaacactggcaatgcccatttatggaaaataagaatcctaacaacttgtgtgtaattgtacttgtcagcagcacctataacttgaatgtaagttttgaaggactgcatttattatgtcagaggaaaattagcagctgctcaaacggggatggtagaattttaatataacatctgcaaaacagcttttacatatctagaatcagctttttctcatgccagagagttttcagagagtttcattgataaacttctcactccatatgtctcatgcagtatttcatactctctatagtaacagctattttaactggtatggctagactcaaaaacctttatgtcactgacgtttatccatctcctttacatccccttcaaattaacctccaacataagtgccgtgtttctctaactgatagcaatgttctacatttccacagtagcaacttatcaatataggccttccctggtgactcagatggtaaagaatatgcctgcgatgcaggatatgcaggttccattactgggtcaggaagataccctaaagaagggaatggctatccacttcagtcttcttgcctgggaaaccccatggacagaggagcctggcgggctacacaccatggggttacaaagattcagacacaaatgaacaactaacactttcactttcagatgttttaataggatatgtctagttttatagtctttaatttaatatattttaaaatattatttttttacattacattcttttct

SEQ ID NO: 31985 - DNA, 731 bp, Bovine  19866880393187
  misc_feature (1)..(1): n is a, c, g, or t
ntggtaaggaacctgcctacaatgcaggagacgcaagagaagtgggtttgatccttgggttgggaagatcctctggaggaggaagtagcaacccactccagtattcttgcttcggaaattccatggacagagtggcctatagtccaggaggtcgcaaagagtccaatgagactgaacacacaacacacacacaccacctgccccatgggcttgtctgaggggctttcagtggccagtgtctgaattagccttatgaacatgaaagggcgtccaggtgggcttatcattaaggtacggtttgtatggacttgctccttgtccctataaagaaattcatggagaacagtatatgagattaaaaaaaaaatcaccttatattgaagatctcttgtaccagctacttcatttatttttagtttactttggtgcaaatgtatcttacagtgtttctcattttgcatgggccatagtggttgctagctctgtttggaatcagcgaaaagtttcttgggtaaatttatttcttgcccaatccttccttgtgtttcaatagcattttgccatgcgacacttgtcccctattcatatatttccttcctctctaatttgttctgtagaaacttgaggagtctatttctcgtttttggatgcattataaaatgggaaatgtaaaaggctttctgaaaaagcatcttcaaaatccacattggacagttcattttgatgttgga

SEQ ID NO: 31986 - DNA, 1098 bp, Bovine  19866880505120
  misc_feature (1)..(1): n is a, c, g, or t
nttatgtgttgaactgacaaaattaggattttattttaatctgcttctgttttttactagtcctttgacatacagaggagaaaagatatgtttgcgttccacccagaacaataatactgcctttctaaagtaacattatttgcattacacacatgtaagaaaaatggtgcaaacatgtactaatctgatggggatcagtggtttttattcaggtgaaatttctttgaaagttaagcaagattatttaattctttataggaagtaaatgaaggaattcaggctctctcaaacaatgaggaggagaagaaaggggtggcagcgtcactgcttgctcctctactgcctgagggaataaaagaggaagaagagagatggagaagaaaagtaatttgtaaagaagcagagccagtttcagaagagaaagaaacaagtacaacagaagaagcagcagcagtaaagccacaggaagttctgttggacagtgtggaagacccgagtcaggaggatctctgcagtgttgttcagtcgggagaaagtgaagaggaagaagaacaagatacccttgagctggagctggttttggaaaggaaaaaagtaagtttttgttaaatatgttttcttccttcaggactgtcatactctgggatcattgtgcttcatttacgccattggcggggcagggggtctgttcttcttatcctttcatatagatagatgtttaagcctatgtaataaaaacctgaactctggagttgatctactgaagccctgagtgtgaagcagagtctcaataggtgttgtaacagtaatacaacttcgaagcttcccccttttgaaaaatttgaagctttggagagcagctgggcttcctaggtagcccagtggtaaagaatctgcctgtcagttcaggagactcaggtttgatccctgggttgggaggatcgcctgaagtaggacgtggcaacccactccagtattcttgcctggaaaatgccatggacagaggaggaaaagaatgtggagtttaatgctcagtcctgatggagagatgtattaagaaatacttcttgttctcaaagtacttaaattccaaaaaca

SEQ ID NO: 31987 - DNA, 1299 bp, Bovine  19866880541240
  misc_feature (1)..(1): n is a, c, g, or t
ntgacacagccacagaacatttcccaggctcccgtaggtgcagccatatgatcaagatctgacagtggaatgtgagacaaagtattctgtgcctgcctcctccaggctcagcccataaaaccttctatgtttccagccccagggcagccttgatctcttggaactggcaaaatctatgtatctggatccctgaatgacgacatgaagtccttgccgccaacgaggaacatctgatttggactttatacatgcaagatatcaagctttagagtgttaaccaatgtggttttcgggtttatcttttacagcagctagcattgcgtgaatcaaaactcaaggctaggggacttccctgggcagtccagtggctaagattctgcattcccaatgcagggggcccaggttcgatccctggtcagggaactagatcccacatgctgcaactaggagttagcaagtttcgactgaagatcctgcatgccgcaactaacacccagcaccaccaaataaatacataaaactttttttaaaaaaagctcagtgctaaagatgaagccgttacttagagggaaaacctacataggtttgacttaaaccacggtggcttttgaaacaccaaataagaaacaacacaactgttagggaggacattcaaattttcatattgtactccatcaaacttacgacacctttttcaacataattttaacgtctccgaaataaggccgttaccaagtgtgtagtaacgggcggcatctcaaatcgcaagcagccgggagatggcggtgatgtagtgcgtgtgcacgaacttggtcacggttccgcatcttgtcatccttgtccttaagctttgggcagcgtcagcaccgcaggcgttggtttaatctctgctgacaacgtcttcaaaaagacttcatgctgatttggcactgaaatgaaaagttattgtgttttttaaaaagcaaggaaacagagcagattgatatacaataaaaatctgtgtctaaataagacttaaaagagctctttcgatatgcacgaaatggaaattctaagtgataagaaagctttatgccatgattttgtatttcttagaaatccattagtaatggtgtgggttataattgatgggtgctttggctcagatggtaaagaacctgcctgcaatgaagaagacctgggtttgatccctaggtcaggaagaacccctggagtagaaaatggcaacccactccagtattctggcctggagaattccaggacagaggagccggcgggctaagtccacggagtcgcaaa

SEQ ID NO: 31988 - DNA, 729 bp, Bovine  19866880599961
  misc_feature (1)..(1): n is a, c, g, or t
ncactctatcagacctaattccttgaatttgtcacttcccagtataattgtaagagatttgacttaggtcatacttggaatggtctagtggtttccctactttcttcaatttaagtctgaatttggcaataaggagttcatgatctgagccacagtcagctcctggtcttgtttttactgactgtatagagattctctatctttggctgcaaagaatataatcaatctgatttttgcattgaccatctggtgatgtccacgtgtagagttgtctagaaagtaatttttaaagttagttttctccaaaattatttggaacaaaaaaaagtatttctgaacaactttcaaacaaggtttgccctgagcagtttgttttgggacttgtcctttaacgatatccttttagtaacaaaaagtggggtttttgctgggatgatttctagatagaacgttgactagatgactaaagtttcagggtgtaaggtgtggactagaagaaggccacttgcaggctcctatgtaaaaagcaagggcagatactcccccctaaaaacacacacacagtgtgtgtgaggggtttcggggaggtgggcagtatataggaactctctgtactaaaaaatttcaatttctctgtaaacctagaatggttctcaaaataaagttgcctggccttccctggtgatccagtggttaagaatccacccgccaatgcaggggacgtgggct

SEQ ID NO: 31989 - DNA, 1444 bp, Bovine  19866880608456
  misc_feature (1)..(1): n is a, c, g, or t
ntaaagctcttataatatgtatgtaaaaaaaaagtctgtgaatagacagggcaaaaatatcacttaatatacagaaatatagaaaactacctaagaccatgtaaacaaaaacactttccaacactttttaaaatgtgtgggtcacttttaacaacctctacctcttaacatggttttcactttaagttaaacatttccccctcactttttgttaattttggaatacatgtggagtcatcacatttttcctccctaggttttaaagaagaaagttgcaaaggacaaaaaggaggactccaaggcagggtaaccagttaggatgctattacgatattttctgcagatcttaggacagttgaaaattcctccaaactattcagtagtgtcaggctttttcttaggctgctacttcctgggtgtcagagtctctataatctcacctcatctgctatgttcagtaggtgaacagggaggccatctgagagggagctgtcagaaccgctggtgctgtttccagaaggaaaggaaaagggaaagacctgtcattaatttccaggatgtgtatcactgaccagaatagtggcatggggtgaggacacctggtctgctatttgcccgcaatgtgtatttcaattactaagaaatcaagacaagcacatccattcattcactgcgaacacctcggcatgccaggcagtgcaccaggcacaggaaacagagatgaccggtgtggcaaaataaatactggccagatggacaaagctgcccttggcagtgattgtgagaggctgtgggattcttaaggaatcccccacagagaacagcccgagagaacagcagggggctgtggtttgtctgaaagcaagggctctttccagtgtgcaatgcctgtctagtcagtaccagctcagagagcaggatgtgaccagttactctttaagaatgcgttgaaaatacaaagagatactgtaataacaaaagatctgtaggtcacagattaggagcattacttttaacaccccaaatcccccttggaaagcttcagatgaacgtctaggctgatctgaagtccccccgcaaaccgtcgtctccccctttcttcacaggctgggatgaataaggactcagagaatgcatcctcttcatcatgtcctcagtttctgagccgtgttctattttctcctctcctgggggtgtggttggcgagaactgaaagctgtgccctgtgacacgtcctccgtatatgaaaagcgtcttaggcacaaaacccagatctcttgggaaaggacagcatctccagccgctcttttgctcagccctttcatgctgttcgtgctcctctccctcccatcagtgcacaatgaggagccctgcagcaaagcagcgggaaggaagctctcgcttctcataatttccagctcccctgttctcataggcttttcca

SEQ ID NO: 31990 - DNA, 1512 bp, Bovine  19866880616173
  misc_feature (1)..(1): n is a, c, g, or t
ntttaaacagcaccagactccttgccaagagactcttcaggcacaaacactctcgagagcggcacagccaacagaaatagaatgcaaaccacataagtgattttaaatttaccagcagcctcattaaaagaagcaaaaaataaacaggtgaaactagttttaatgatgtattttaactcaattatccaaatgttgtcatttcagcatgtaataattatttttttaatatttattcacttatttcgctgcccttcgactcagatgtggcacgtggttgaagcatgtgggatttagttccctgaccagggatcgagcccaagtaccctgcactgggagtgaagagtcttacccactggaccaccagggaagtccctcaacacgtactaattattaatgagatattttaagttctctttctatacgaagacttggacattcagggtgttttttacacctacaacacatctccgcttggaccagccacattgcaagcgctcaagaatcacatgggcaagtggctatccccagtatgggcgtccatggtgtcaaagcaagaacttgggccactgacccaaaaggctcgcttacgcagaagcagccaagcctctttctccttccctcagcccctgcccttggccagtttagggtctgagatctcccttgggtgctgtgcgttcctgcccctttcaggcctcttccccttgaagatatccacaccccccaccgtaacacccagtgacccactggagacccaaactctctgcagtgggagtgtccggggtcagcctcctcctccatcgaggggaggaacgagggacagcagaccctgtctccccctgccctgggaatggaatgcacacaggggttcctcctcttcggggagggggtcggcaggcccagcccagcgcatgggggaggggaggcggctacaggccctttggctggaatctctgttcacgcctctttccaggaacaacagcaacaacaacaacaaaaaacctctggagcaattttggcttccctcttacaagtcaggacagtcgaccagttcccagggtggaattaagtggacttcagcccccgcttctcatacagctcttccccaaagactgccactcggtcctgttgtatatccgctcttgcttcagctcgtgtccaggcttccctatcgccaggatgctgactgtaattttatcaccttcccctcaaccccacacgctcatttctacctgcgcctctgcacttaccgtttttgtttgtttgttttttatgatgatgacttcccctttgtttaatcattccggtgaaattggactcaaaatagaaaacaagagagtgctgacacggaagggaaataggtccgctagaaccactacaagtccaacaattgcttccttacagcttcgagtaacaacgtgctgatcaccacccctaagtatcaccggctcccccacttatggacgtaacgtcatctcacaatccaggggcagccctttcactcccgggatagcg

SEQ ID NO: 31991 - DNA, 1963 bp, Bovine  19866880629648
  misc_feature (1)..(1): n is a, c, g, or t
ntgtttgctgcttcctaggagcaatgaaatgctgagagaaagtagccagtcaaccgaatggtaaggggtccatccatctgaggacaggtgccctcccttgtagtcaaatcagtggaccaaagaaaagagccttctgcaggatagtgtaaaacggtcttcgattagaagagacctggtcttttgcctctgcagaatgataaataggtgaagcaactgaagatagaaatgatcaccgttacttttctaggctattgggatttatacagatgggacacttactgtatgggaaggctttattcctatgagcacatcagtccagtacatctactccccatttgaaggctaacagtttttgaaagtgatttatttacatgtcagctcctcactggattctttttttttttttttttgccttggctcatgggatcttagttctgtaactagaaatgaaacctggactctcagcagtgaaagcatggactcataaccaccagaccaccaaggaattccctcagtggattcttctgaaacatacttgcctattggatgggttcattcctgctgcctccctaggtgccatagtaatttgtatctttggacttttgggtggttttgttttgttttgttttctttttagtttcagtggagccatgcagctctgggatcttagttccccaaccaaggatcaaacctgcgcccttggcagtgagagcacagagttctgatcactgggctgctagagaattgctctggagtttgtttttgaaagtagacaaagatgggtgtctcactcctctagagagattttttttttttttagggttaaggatgtcatatgtgacatctcattttttctccctctcttgatccctcattttattgtctcatcagacttgagagaattagagtcttgaactctgatttttgtcctagagagaaagtttcaaaggaaagatccttttgccaccagtgcccccccagcccaaaaaaaaagaaatctttgcagaagaatatcttggctagtagcagcaattagttttctaaagcaactgtttcccttccaaccaactttgtccatatgagtcagcttcctcctctgttcactgccttcccacgctgtcttgggaaggcaggtcttccaaacacattgtcatgagaggaaatgttgaaaagcccttttgcctcggtctcataagtggattcctctgcagccggggccccagtctcctgtctgggatcaattagtcaaatcttgtattaaaaaccacagttgttctggaaccaacttactaccaccccaaaaaagcatgtttccaagtagattcagattagtaccacacaccaaaaatggctgaagacagtgctttggaaaagggggagaaagaaaaatgtgacctggaagagtttttgaagacgcaccaactacccgagggagagtaagtaaggaaataaacccgccccatgcaaaatccaagaagctgtctggggtgagagaaccttttctagcactaatttttgcctccctcgggcagccagaagaatggactgttccctggtaatgccacatttccacggaaaaatctattaggctttgcagtttttatttccaaactgagtagtacgaagagctagaggtgagataaggacaagaagcagaagtgtgcctactgactttccatcctgtctgcagccctgccttgctggcaccccaaagactggtgagtgtcctctggctggaagcgaaaaaggaggtgaaaatgcaacgacagccgcgcctcacgtcagacagctccccacctcctgcagtccagcatctcagacccttgctcccgaggggaccgcacttagagtttatacacaaccctcagccactcagcgcgagaagccctgccacgggggcagtggggaggtactgcatctccatggcccctgggcctgcctgtgcactgaggaaaggacggag

SEQ ID NO: 31992 - DNA, 991 bp, Bovine  19866880638992
  misc_feature (1)..(1): n is a, c, g, or t
ncagagcagggcgtgacttgccaatcacccagctcgtaaagggccagacctggcattggaactcagacgcttgaactacctcctatgatttcacatggagtaggaaacccagggcagtattcttgcctggaaaatttcacaggcagaggaatctggcgggcaacaatgggttgcaaagggtcggacacgactgagcgacagagcccgatttcataaccccctgtgagataggagtgttcttcccattctgtatccaagtaaactgaggcagctcaggccagtgtaccccagtctctttctctccccagccccgtccctccctgcccttccttccctacaaggcaaggtctctgtccgacagccctgcctgcagccctgccctatctccccttccaggccctggatgccattgagagagcccaggacctggccgaggaggtggggaacaaggtcagacctgattccgtctgctgggtctggagtcaagagcccaaggtgggatctagggtggatggggagaccccccccaccagcctgctcatgccctgagtccttcctgatctccaggagatgcccctagtcactccctgaccctggctgtttctcctccactcagagagcacttggggggtgtgggcagggtgagagttctgtagctcaggggacatcagaattcctcagtggtttctttctctctttttggaaagtttctttctttctggctgcgctgggtctccactgctgcttgggctttctctggttgcggtgcacaggcctctccctgcccaggtggcttcccttgtggagcacaggccccagggcacctgggcttcagaagctgtggcctcccgggctctggagcacgtgctcagtacgagtggcgcacaggcttagttgctccgtggcacgtgggatgttcctggatcagggatcgaacctgcgccccctgcataggcaagccaattcttcaccactgcgccatcagggaagc

SEQ ID NO: 31993 - DNA, 948 bp, Bovine  19866880667718
  misc_feature (1)..(1): n is a, c, g, or t
nagagggcctcggggactgagtccctgccggagcacctaatcgcggggctcagccattctcctgtgccggaaccctcacgtatcctctgctgaaatctggcatgttcggagaccgtcagttccgccttggtttccctgccctgccataaggccaaatctgcctcatctagtgagtcattactgctccgctctccaactgcattctgacttcagcccactcgtgcagctcaggagggctgtgccatatgttagtgccatgtagacagaatgtgactgggtttttttccctaaaacactgtcagagttactttttaaattaccttataatcttgatatctctgaagagtcatttctgtaatacacaaccttctggagatgactttataattattcttctgagtgctcaaaagagattcttcagcatttttagtcccatattccagatgagggaactaaagtgaagatatcagattgagtgacgcaggttccacagccagccagtaaaatttgtactttctggagtcacggggctttatttggtaaaatacacccgtttgtaaaatgcgctttttttgcggggggagggggcacaatcaaaatattagtttgcttttattttctgaggtgattattaaactttaggtacagcaactacttggaattttttttttttttttaaactacttggaatttattggctgattcttgtgactggtctcatgacatccacctgagtaggtgaaagagaaaaggactgaatgagagatggaccacaaatgttcttctaaggcagagatcacaaatgggtgaaactaacattttgagagtaaaagaaatatatctggcttacagatttagctaccatcaccacgttccctaaaaatttttaaaaaggaggggctaaaaataaataaataaaataaaaaataaaaaggaggggtactcctg

SEQ ID NO: 31994 - DNA, 1805 bp, Bovine  19866880730231
  misc_feature (1)..(1): n is a, c, g, or t
ncaagcagggagtgctgaccctggagatcagaaagccctgccccttcgatgggggcatctacgcctgcagggccaccaacttagaaggggaggcccagtgcgagtgccgcctggaggtgcgaggtgaggagccaccggggccaaggccgggtgacccggggacgctgggcttctgccctgctgcgcgggcccaagctgctgctctggctgagagcgcggctggcacagccggggtggtactggcccctgcactttgctgccagagctgttccctgagccttcccgaaggctgggggtgggggcgggggctacacgtggtgctgggaggttgcagcacagattcggcatggccgcctcctctcccacagtgcctcagtgaccgggctggctccctgtggatggccaggtatgtgctccagatcacccttggtccaggggcagccaccaggaggtggggtccaagaggctgttagggtttcagcccagctcactcagatgggaacctgtattacagatgcagctggagctggcccgtatgccaggagcctggaaggaagctggataggccgccttcctgctgctggatgtgtgtgcaagtgtgtacactggagttgggcggggggggcacccgtagggcagcatagtcacgacaagcgggcacattctgacctcagagctccatgcggaagctctcagaccctgtgtgggctttggaagtggttgctgggacgggcctttctggcctgccgtgctttctcagcgtgtaagggcaataaaagatcggtgcagccactgagaactgacttttgtccaaggtgcctgttttcacaagaagcacaggaaaatttatattgaaaacaaacaaggccggtgttctttctcctggatgaattaaacgaggaccagaacagggtcctaaattcacgaaacaataatagaaggaactcagtctccccgaccttccgttgaggaaaccaaggagctgtgacagaggaaagtgcactgttattagcaaaaaggccagaagccccaggctctgccgttgtcgtcctggcgaccgtggtcacggtggcctggtgagggatagtgacgggcgtctgtgtttctttgcccataaggcctggggtgaaagcatcccagcggctttggggtcccagtaggcaaagaacccgctgcccacacacagctgtgttgcacggggagagggtcctgctgttggaccagacaggaccaggaaggtgtgcgggggccagggccctgctccccccgtcgccaagtagtcagaagcccaccacggatgtccttttgggaggaggaagccagcagctttcagaggtcctctgatagagtggtttttccacggtatagaaaagaagttccatgaaggctggtccaaggactcctgccctgcctcagacactcctggtttccaggccctgggggaggcccagtcctgacacctctctggggagctgaggcccaggcctcggtctctgtccagccccactgaatccctgctccctgtcaaagcccagtttggcggctccctctagtggcccactcgagcacagccaccctggggccgccccttggagcgggcggcggggcaaggtggggcgggcacagcctcacctccccaactgcctctggcggaggtgcctttgtggagtccagggctggccctcctcgcacagggctgaggggcctcactgaatgcacggcagccaggaacccacggggagttcaggacgtttatttcacattcacacctctgtacaccttctataaatagtgggagccgaaat

SEQ ID NO: 31995 - DNA, 1075 bp, Bovine  19866880775978
  misc_feature (1)..(1): n is a, c, g, or t
natagaaagctcacccattataaattccttgttcacggtcgcatgctcttgtctttgggtttcgccaggtatggtcacggggcgccttgggtatcactggcctgttttccatcttgcaggggtggtgtcagtcgtggagctgaaacaaagctcagtgatgcagcgcctgctcataggctggatgcccacagctatcaggtgagtggtctctagccggtgaatcagagggcccaagagtgtgagcttttgccctggtcagcggcaattaatgcttccagtctgactccaagacaaataaacgttatgctggaaagaagaagggtctacacaacactgcattctgtctatagtaaccggacataagccaaatagaaagtgtgctgccacagcccagcctggaaacttttgctccttccgttaagattgtacatttaaaattttatttagtctcttaaattgcaaactctaaggatcgggtaattggcaccagtaaaacgctaatgctcagccttccgttttcagaggtgaccaggggccttcagatcgtcccctgagccttgctgtgcattgtgtcgagcacaatgccttcatctttgctctctgtcaagatcataaactacgaatgtggtcttacaaggtaaatgctacattgatagttactgtaagttaaaataggattgcaaattgtagagaaattgaaataagtcttgtttcctctcgtaaagatgatcagatctcttactttggaaatgatgggccatttccagattcagacagtttcatttaattttattttccatacacttctcccctaaatttttgtatttttattttggaaaattaagtcctacagaaatgttgaagtgataccaagtatactcttcagttcaggacaaatgtggttttgaaatgcaagttgagaggcttctgccggtggtccagtgtttaagattctgtgctcccagtgcagggggtgcgtgtttgatcccagtgcaggggttggggaactagggtcccacatgccacacagtgggccaaaaccttttttaagcataaaaactttaaaaaataaaat

SEQ ID NO: 31996 - DNA, 1509 bp, Bovine  19866880822786
  misc_feature (1)..(1): n is a, c, g, or t
nccctcccccgctccctgagctaagcttttgctgagggccggcgggccaggctagggggaggggaagagaagaacggtttccctggcgaccgtttcccgggcgactccaggtggagcggggacactgcacgtggcgatgggccgcctctggccccttgccggagaaggatcgagctccgtctcgcgttctggacgaagccttggggagtcattagggcgagcagggaagtgccagggagaggctcagaaaagagcagatggggagctgagagatgtcccaggctgaatctcatattgtaaggtctggattccctgcgccagggaagaggagcctggctgcaaggacgtaggggtcttcttgtcgggttctgctgcctggagcctccacacgttttacgtccagggcttatttggttggactttttaaaatgacaggcttcctccagtcccttgctctcatatgttgacctgaataccaagcctcttgttacatcatggaaaaggggttctctgtgttttctcagggaaatacctcgcgtaggaaatcttgattttattaggtatgtgatgtcactgtgagagagtgagcccagctttggttcagggggatcatcagagttgtcattagcagggccaggactaaggctaatctgggttgacggtgccctcctcccttttcccttctctctccctgaattggacagttagattcatagactgtggctttcttcagttactcaaggtggtgttgttttacagacagctggcagagagagaagttggctaccaccatggaatcaccagaggaacctggagcatccatggatgagaactactttgtgaactacactttcaaagataggtcacactcaggccgtgtggcccagggcatcatgaaactgtgtttggaggaagagctctttgctgatgtcaccatctccgtggaagggcgggagtttcagctccaccgattggtcctctcggctcagagctgcttcttccggtccatgttcacttccaacctgaaggaggcccacaaccgggtgattgtactgcaggatgtcagcgagtctgtcttccagctcctggttgattatatctaccacgggaccgtgaaactccgagcggaggagctgcaggagatttatgaggtgtcagacatgtatcagctgacgtctctctttgaggaatgttctcggtttctggcccgcacagtgcaggtgggcaactgcctgcaggtgatgtggctggcagatcgacacagtgatcctgagctctacaccgctgccaagcactgtgccaaggcccacctggcccagctgcagagcacagaggaatttcttcacttgccccaccatctactcaccgatatcatctcgggtaagcagagggagagggaacgtcatgcctagctgcatgggtgtgtgacgtccgctgaaagttctcctttaggacaagggtaccctcagactcctggtgctagtttacattattcttgataagagttta

SEQ ID NO: 31997 - DNA, 1651 bp, Bovine  19866880823331
  misc_feature (1)..(1): n is a, c, g, or t
ntgcctgatggtaaactggactccctttctggaaggttagccagggttgggaccccagtcatgtctaccgtgctgagccgcaactgctccactccctgctttctcccactcctggggccaggtccgccagcacagaaaagaaaatgaaaaacgcctgatgtgagtggcaggaagagggagtcccgtgaggcagcaaagcaacaaggaaggttcacggtgtatggtaatatacgcggtatactgttggcctaaaaagaaacttctttcagaaatgtctttaagatgactgacttacatggtctttcatcaaacaacagcaatgcttctgagttagaattatgtccaagatttacagcgttcttagtatttgaatctttagcgacaaaacacaaactgtataaaattcatcgacgaaagctgcgtaaacagtttttttgcatggccttggtgcttgtgcagtgatccagctgcagggttcgactactacattttgcaaggccttctatttctctgcccgtaagtattctcttttttaccacttttttggagaggggtacgtggtagaaaataagagttattttaaaattaaaataacgtacctacttttgtttttgcttagaaggaagaaaagaatcaacagaagaaataaggcctctggcaaactgggtaacttttttattttttgccttaagacttgaggtagactttttgttattaatctctttagcaaatcagacacatgactctgaatgaaggtcaacatattatacagctaacgaaattaaccaaaaacagctaaatctggcagtgtgtgtttacacatcaattacatcaaacacttggggagcctgctacatcagatcagatcagatcagatcagatagtcacgttcttaggccgtgatttaaagttcctgagtcagaagctcttaggggttgtacctaggaatgtgctgtcttaacagacagccggataatgcttccctggggctcagagggtaatgaatctgctgcaatacaggagtcagtcagttcagttcagtcgctcagtcgtgtctctttgtgaccccatggactgcagaacaccaggcttccctgtccatcaccaactcccggagcttgctcaaacttatgtccatctagtcagtgatgccatccaaccatctcatcctctgtcatcccctcctcctcttgcctttagtctttcccagcatcaggtcttttccaatgagtcagttcttcgcatcaggtggcaatgcaggagacccgggttcaatcccccgtcaggaaaatcccctgaaggaaacagcaaacaactccagtcttcttgcctggagaattccatggacagaggagcccggtgggctatagtccacgagattgcaaagagttgggcatgactgagtgactaacaccactaccactagataatgcttagccatattaaaacatcagaaccattgccttggagatttattttctctaggctagtgagagaagatagcagatcttgatgcctcacacccagagaccaagcactttctgtggcttgctccacaggaccgaccacactgaggctaataacacattttggctactaacttctgagattctgtggcaaaagttctgtgggaaatccaaggaattgctat

SEQ ID NO: 31998 - DNA, 1390 bp, Bovine  19866880844447
  misc_feature (1)..(1): n is a, c, g, or t
ncaagttcagggaagggctgaggagcaccaaacgcagcgcctgctcctctcactctggccatatagctaagaattaggaacctaaggaatagtcttttaccacataaatatcttctgtgaaatatcctagttgaaagcgtgctgtaaggtttaacaaaacagtgctgtttcaaagtgcagtagtaacccgctagctgacgaatgtgggttatacatttccaaggtgcttgtcaccaccctgacttcctttcactccctggaccccctaagattcttgcccaggcagccaacaggacagcacaggtgtctcaatagtaatatcccacccaacccagcatggttaacacacagacaactcaggctaagctgggtgctagtagtgtggggggaggggactggaacagaaaagaatgtttcccacatacaaaagctataagcacaaaaaaactgaaaaaagcctaaattatttgtacaaaacagaaactagcaaaaacttaacagatgtccaaaaaatactgggttaaaaaagacagtctactcacagtagactattagttaccctacattatcaccaaaatatcacacattcccacatgccagagcttgcttcaatctcacaagaaacaaaaaggtacaaagaacaatgagaaagtggtgacagtttctaatttactgattcctttgctgaagagtaacaatgctatgtaaatgaaaaccacagacctatcaaaattaaacgtctaacactaaaatccaacagctttagaaccaaaaaacttcattttgtataatccccaaactaaagacatttcccaatctgggaataaaatttcaatggagtttcaatgtggggggggaagtgatatttaactccattttttcaaagctgaacacagccatggagatcagaaaaagctagcgaacaattctttctaaagccacacttctaacctacaaacacatcccaaaagaggcatgttaaaatcaattaattgagatccactagatctcactgccgcctccaaaccagaactcaccatccctcttcatattttctgccacattttctaagtgaagtaaaagaaaaatcaaaatgttacaactcaaatgctgttctaaaagtgagtccatggagaaggaaatggcaacccactccagtattcttgcctggaaaattccacggatggaggagcctggcaggctacagtccatggggtcacaaagagtcggatatggctgagcgacttcactttctatagctagctcagtgtcccaaatctcattctctaaatcaaatgtggatgagattcctaagtacaacctgtctgtccggatctcagggcaggacttcctctctatctgtgcatctatgaaactaaaatttctaaaa

SEQ ID NO: 31999 - DNA, 1787 bp, Bovine  19866880848133
  misc_feature (1)..(1): n is a, c, g, or t
nttaaagggactgactaggcccactctttttgccctccctcttcccttttcctggaacgtatgcatgaaggctggagctccagttgccacgctgggccaggagacaacaatgaaattttctgaaacagtgtcaaatagggtactcaggaggaagctgagatgaataggatgtagagattctgctctcaaggagctgatcatttagggagagcggcaggatttgggtgtaaagaaccacaataggtaaaaagagatcagcaccaggagagaggtgcagaacttcctcctgggggaatcagggcggtgtcacagaagttatttctaaatgatggtgaggattttacatagtgctgatagaggagtaagggagtgggatccagtttaagttaaaagtttgagcaaaggcatggaggtagcatacatgcgccagtgtgtggctagttgaagggggaagggttcgtgaaggagacgaggcagataaggtgtatggggcttaaatgctgagctaaggagctcggttcaacctgcagcaggagggaagagtgcccagagcagtattttaagattattccagccacagagtgaaaggcaggagacagaagaggcagggagatctataagaatctaataaaagtgtccaatctgaactatacagggttagtaagaaaagaaaagaaagggaataaacagatggaagagagactgagaagagttgcagagacagagggcacacaggcacacaagctcagaatttaattagcttcttggtttgccgatggattacaggggaattagcagagctcagagtcgagggaccttgctgggagttgaggggaagctaatgagaaaggcaacaacaagccccagggagaaacgaaaggggagggatcattagccaagcagagaagctggcaggagaaacagatgtcagggcgctgagtccctgcctccctgggagatttcagccttccggggggagcagacgttcagagcgcctgggctgggctcctggccccatggcgcctggttccaatccctctgagcacttggtaaacagcctggaatggggggaagttgggagtggctgtgaggagcaagttcctaactctccgttggcccttttcccagaagcagatccctaggtccttctgcagatggggaggtcgaggcctgctcctgactagacatggcaaattgcattttccaaagacagctgtgactcccaccctgcccttcttgcactgggaccacgcccactaccctccaagaggaggacttgggctcacctgtgaaaggtgatgctgcttctctctggtgctcgctctcttgaaattcacacttggaatccagccatcatgatgtgagaaagcccaggctgcatggaaaggctgtgtgtagatgtggtggccaacagcccgaggcaggaccagttatctaatttgcagggtccagggcaaaatggaaagacagggctttttgttcaaaaattaagaattgaggaggtgagaaccgccttacaccaagcatagaggccacatgtgggactctgtgcagtggtataaggcaccctgtgaagctgggcctgaccccagctgaggttccagcatccgctgtttgcggtacgactccggaagcctccaagatgactcggggcgcaggtactgtctgatggcaactgcgaaagaactccaagcgggacccacccggctgacccagtgcacttccagatccactagggttctgttttaaagaactgactgttttaaccagaaacttttagttactgc

SEQ ID NO: 32000 - DNA, 2108 bp, Bovine  19866880880033
  misc_feature (1)..(1): n is a, c, g, or t
naatgaaaatggaaccaagcatgcctttgtgtaaggccaagtattgcgttggacacaaagttcgttctggtttttccgtaagctgttttagaaaaatctgaatgaactttttggccaacccaacagttcatgcaggttaaatctgttatttaaatttgtgactttagtttcttttaatgcttccaaactagagaggcctatatttgataagctactgctttccaatggagacttacttataaatagttgagcatttagaatttatttttagatttccttacatcaagtcagtctccttatttcagccttaaatataactttttcactcaaccaaatgatttatacttaaagatagcaaagattacttttttactattatccagaagaaaaagtttaactactttctagaaaaaaaagtagtcggcctatttaagatggttggccaattaaaaaatatttgtcaagctgcattaagtaatatacatactttcaagtcctgttcttcttctactttaggtactgtctgtacttttaatttttctggagattcttctgcttccatctctttgtctgagttttcatccattttttctgaattttcagcaccaactgctgcaaaagaaaatatgtgaaattaaatcaaaaggaccataaaaaggtcttactatacagtgcagggaattatactccatatcccataataaaccataacgtaaaatattaagaaaaaaaaaaaaagaatgtctctatgtatataactgagtcactttcctggataggagaggttgacacaaaaccgtaaatcaactatatttcaaaaaaatattaaaaaaaaaaaaaaaaacagaccagtactaatagagccccaaatatactttcttatccctagagcagaggtatctgaaggttattagtgctctactttgcctatgtgttccttacatgttaaggaagctctaatgacttaccaacctactatctttataaagccaaaaaaaaaattatttctttataacaggggtcccctatctttgagggtctaatgcctgatgatgaggtggagctgatgttaacagtattagaaataaagtacacaataaatataacttgtttgaatcatcccgaaaccatcccttgccctccccacccccaactgggtccaagggaaaattgtcttccacaaaatggtccctggtgtcaagagctggagaccactactttacaatcacatttcttaaaatgtatctacatataggatttacttgttttatcacattaccccaaagtttctgtttttcctttctccatctattaatcttttatttttttggtcacatctagtggcttgtgggatgttagtttcctgaacaaggatcaaacctgtggtcccctgcagcagaagtgcagagtcctaaccactggaccaccagggaagctccttttctgatctcttccaaaaactcatggcttcaactacttatgaaagctagatatcaaacctggaatttgtgaggattctttatcaagagggttttgataaaaaggctttcataatcagagcagcatattaaactaccaaataactcccttcctggttaacacctgtagacaacctttactggacctacttattcctctggttagtgctatctgttggtagtgggaatctccataagagaacaggtttaccacataattaaatggactaaaagttcataaaagatacgaactctttgttatatttgattaacacctgcttatcaaactaacccatatatccagtataaatcactctcatgaggatcatagataaaaagaaaaagaacaaatttgagtactctttcttaacttcggttcatctttgatctaaagaagaaatgtgactttaacaccactctcaacagctttcataaaaagtttgaaatttagtattaagtactaaaccttatcatacaatggcctttttctttttatttgttcattaacatcgcttctgcattttcaaattgtctaaatctttctactctcccattgactagtttctagtttatttatatatcagacatcttacatttaagacaggtttaagaatttaacaatttcaaaga

SEQ ID NO: 32001 - DNA, 1323 bp, Bovine  19866880977554
  misc_feature (1)..(1): n is a, c, g, or t
ngtcagcctgagcatgggcaacgccttgctgggcctcagtctcttccagaaggccctggagagcttcgagaaggccctgcgctatgcccacaacaaacgaacgacgccatgctcgagtgccgcgtctgctgcagcctgggccagcttctatgctcaggtcaaggtgcgccccggggcccccggggggagggtggtggaggtcccagctcccggagagcctccgaggagccgtgctccctgttgcatcactgggttcagtcctcccatatcagtagggacgaggcagatgggagtctgagaagagaaagacttggccgggaggaatagacatggccgggcttcccagatggcactagtggtaaagacccacctgtcaatgcaggagacataagagatgcaggttcgatccctgggtcaggaagattcccctggaggagggaatggcaacccactccagtcttcttgcctggagaatcccatggacagaggaggctgatgagccacagtccactgggtcgcagagtcagacgcaagtgaggtggcctagcgtgcagagatgtggccaggcatggcagagtcaaaattcaagcttcagtctgcctgacttcctgggggagtgggaagctcctatgtgaggacaggccttaaacctgtactttgctgtgtttgctgtgggatcttaggcaagtcacttctctccaagcctatgaaatgagggcgaatggaacccgccttataacacggtcgtaaggattcattcatcaaacatgtactgagcatctattgtatgccaggcactgttggtcaggatacagcagtgaaaataacagccaagtgcctgggctcacgaagcttgctttctagctgggggaggaaggtgaataaatataatcagcaaagccaagtatacagcatggtggaaagtgcttaggaaaaaggggagcagggaaagggggttggaagggctgaggagggggtgttgcaagttcaaacagggtggtaggggtgatgtctgatgacttggagaagagagggtgagccatgcagaaatctggcgaaagaatgaaaaagggaatggtggaagcacagctctgcttttgggggagcttaccttgagtattccaggaagggtggaggccagtgtggctgttgcaggtatgtgagaggtaggaggtggtgggatccggggggttaggggaaagggagatagaagggagaagaaactgatggagccaatgacctcaggcttctggccctgagcctttgctctccgtcctgcagacatccaggctgtgctcggccctcggggcatgtcagccccgg

SEQ ID NO: 32002 - DNA, 1116 bp, Bovine  19866881075506
  misc_feature (1)..(1): n is a, c, g, or t
ncctcggcaagcgcgaggggcaaggagtagacaggcctggacccggaaggagttaaatgcataaggggcctgggtgaatcagaggctccgcaggctgagatggaaattccctgtgcatggcgtgtggtcacccagaaaagggaaacggtgcttttcggagcagaggatggcgggggctccaacccgggagcagatgcctgcctgggtggggctggcgagggcgtcgtgaccaaggaggcctggcttccgggtgggaagaaggaggcaaggagccatgaagccaggccaggcctggtcattctgtggtgtgtccatgggccttgacagatgaataggagttcaccgggcccagaggaagaaagggcacttgacttgaactgtgggaagcactagagcccaggcccaggggtgggactcagcatggagagcccgtctccccgggcttttgttggggacctcttttcccatcccacccgagggacccctccttgccccgggaaccacccatcgccttctcctgggtctcccagcctcagtctcccttccagagtcctcgcatcttgtcacccatctgcctcccgcacaggactgtgggcaggcaccatgtcctggctccagagacagcttctgcctgctgtgtttgagcactgacaatccacggaagaggattctgacgttcagagaagttaggcgaaatgcagcccgctggctggggctgagggggatgcgggagccagggctctgcttcagctgggacttggtgggaggcatggagtggggcaggcagagccttctcctggggccgtggagggggacctgggccgctgacgaccaggtctggcagctccagggtccaaggcctgcgtgtccctcaagcttcgggacagcctggcttcctgccttgtccccggggctgggaaacttgtgtcctccctgggaaggagatgggcggatgagatggagccagggccagtcagatggacagacaaggggactgggtgtcgggaaaccctgactcccggtccagacacttgcccactgcgtagcctgggacgcgcgccttgccctctgcgtcccagcatccatttctgatggagacggtgggacaggctctat

SEQ ID NO: 32003 - DNA, 1330 bp, Bovine  19866881096561
  misc_feature (1)..(1): n is a, c, g, or t
ncccctcggtttgcaggcccgctcgttggcagagatttgccacctgctcttttctttctggaatgtgcttttccttttcccctgatctctgctggtcggttgcccagtgatgtgttttcagccctcagatctcagcctgagggatatttcctcggggacagctgcctgggccccctgttccatgccaagtctgggccagatctctctatttcttctgagttttagttcagtttgtgatggcaccttcattgggggcacaggccaggcagcgggttttgctcactgttctgtcctcagttcggcacctgagcccaggagctctcacatctgacaccatttctgtgctgtccctgggctgggggcccccaggctgagcgggactcctctccgccccgggatgggttgggttgggcttctggaggagcaggggagggcgtcccccgagctgtggcctcaccagtgtctccttcggggcccagcttcgacagtgagaaggccggggaccgggaggtgcagaggacgatgctggagctgctaaaccagctggacggcttccagcccaacacccaagtgaaggtggtgtttgttctttcacagggggaggaaggggcgctgagaggtcaggggtcttctgttgtctcactggcgcagctcgagttagaattagaggcggttttgaatatccggtgccgtctcacctgacccgggctgcctccttgctggtcgtggccatgcctgtcacctgtctctgaagctccctcctcattcaagcggccgcgtctccttctcaggtcatcgcagccaccaacagagtagacatcctggatcctgccctgctccgctcaggccgcctggaccgcaagatcgagttccccatgcccaacgaggaggcccgggccagaatcatgcagatccactcccggaagatgaacgtcaggtgcgtaaagtcacgagcgaggcgctgagacctcaggggcagcagagccatcccagtcctcttcgtactgagcctgcccgggcttcccctctccctccacctcccattcacacagcactgtccccgcagcggcctccctttctctcaggtgcctgacctgacacagaaccttactggggcccaggatccttagcgttcacctgcacacacaccccctgccccgggatcggaaggcgtgccagcccgggccgtttcctggcctcctctgccctagcaggtgaacacagcccagcctggcccaggggaatgctgccaggggccaggcagacctggttcagatctgtgtgcccgtctgcaggtggcataagcctttggttttcttcctgggacttg

SEQ ID NO: 32004 - DNA, 3777 bp, Bovine  19866881140179
  misc_feature (1)..(1): n is a, c, g, or t
ntcttaaaggcattcatacttatttggaaaagcacataagatgaaaacaggaataaaaacaagtccttgaaaacagatgtgaacagaggttttgatatagtctaggtctgaaaagtttggagtaattaaatctattttagtagtctaaatgtaagaatgtaatctagtgtcattttttaaaaagaagctctcactaagctttcacacttcacctcagcaaaagtaaggtctcagtcaatataaggcgttttcaatcagcatttttcttaatattttccttgggttataatcaaaaagatgcagaaccaacatgcaaattgatcttaagtttaatttgttgtaaaataggaattatagtatctaccagagagagatgctgtgcagattaaatgaattactgcacatagagctacacttggaccttaacaagtatcgtcagtgatggtgatagtattactgatggcagtgtctctgatacagacagatagctccttaaaagtaacgtgttccaagaaccttgaagcgcatgcgctacaacagtatttatgctgagcaagaagaaagaagtttagagggaataaaggaaggctaggaaagaattcgggaagacttaccgccatttttgccaacagttcggaagcatctccagaaggcgcgtaggaatgatgccctgttgtgaggggtggcttggatgaagctgaattcccggaaaagaatatgagttccctgacatacactgttaaaactgcaaagagaataagcaagaaatcatcactagatggatagttacagaagactggaattagaataaaaagtcaagaatatatagaacgactgcccagagaaaaatcttttctccaacaaaactctgtactacagattagaccaagttgctgtatgaggaattctcttcacataactatatctctttggaaactcctggagtccaattcctctgaatgccacctcgtgtgtgtgtgtgtgtgtgtgtgtgtgtgtgtacactctaaggaagctttaatcagttgttggaacatctcatatagagggaaatctttgtctttagctcaatgataaactggcactcatatcctcttggagaatacttctccttctaccccatttgaaattatgtttccttaatgacattctttttatcttctctccggcctctatctggagaaggaaatggcaatccactccagtattcttgcctgggaaatcccatggacagaagagcctggcaggttacagcctatggggttgcaaagagtgggacacgactgagtggctaaacaattgacctatattaggtgccttaagaacaacgtggcttatggaaacacaactggattgtctgttccaatttgggggtggcgttgtatacctctctgacaatcaccttagaggaaagtccacatgccaaagatataaaaggttccagacagacactaaaggcaaataaggaaaacaagggtagaaagtggcccctgaatgggagtaagaagcaaagccccagggcccgagtgagtcattgtttaagctgggctggggaaggggaaaaaatacactccattgccttcgggttcttctgccaaagaaataaagactgcagagcctggcgtaatctaaaaatggaaaatccaccaaagaataggcaattatccagtaatcatcactaccaaagacagacttctggttccagaaaactcctcaagtccctgacaaataaatcatgagtggaaaatatgttaatctttgtagagaagcagacattaaactgaagatggcaagcaatagagggatagtggtaattccaaatgccacttttcatttgtttatttaaagggggaaaatattctgagtctccgaactgaacaggaaaaaaatgtcaggagccatctaatccattttccttttccctgaccaagtttagagggaagtgtctaatctgtctttaacatggagcatattatcacttgggataaaattagcctctttctgttaatattaacaacactgtatgaaaaagaaaattacatgcccttctttccctatggaaaacgagcctagaaatcttacttctaagatactatgaggaagtatgaggacaacatctggcaaagaattagaagagagatttttaaaaagcaatgaaagtgttaacctaattatgcagtttgcagtgctgtagtcttgagtaaaggaaaatgaaaaataaagcaaatgagctgttacaggtaaatggagtaggccacatttccagcaaatgaagtctagcaaatgataacatttgagcctaaatttatgaagctaccagcaaagaattagtcccaaagtgtactgcacacccctcaagggaaacaagctggtgtctaggtcatggtctagggtaaaatggaactaatactagtgaaattctattcttcgtgcagcttttaaaaaaatagcttttttaaaactagggagtaatttacgcattgaagaatctagctgagcctcatttacagatgaatacaaatatacacaagaatttataaaataggaattttatacaacagggcaagtcagataatattgaatataaaaagatttagaattgtgtttacattaccatctttagataactcataccaataaaactcacatttaattaaaaataaaaataagcaggaattagcgtggcagcttattagtatggagatcataatcactacctaaggagttaatagacaatcttaacacagccagtgaaattcttttagataagatggctgtaaagaaaaagtagaaaacacaattactccaaacttcactgtttttcttcaacctgaaatatctttttcctaccacccccacctcttaaattctatccaatcttctaggaccatctcaaataccatgtgtatgaagtcttttcctgattccaccaccacagccaattcccatcatatatcacttacaactctcttgacgatactcacaatttgctgccttgttttaaagtgactggatttattttctctattagattctatacagtaatcaatttgtttgtactcatctttgtctccattacattacctaacatgtagtagataccgcttaagaaagataagaaaaaaacagatgaatgataccaggaagaaagtactaggatttatgtttgtagccagccatactagtgatactgaaagtcaacattctatgatctttttaaaagtccaggactttggtctgatattagtgttgtaattctgcaatactagcatttttttttgattggtatgtgcctggcatattttttccatgctcttaatttcaatctttttgctaattttaaaaaggtaaatactcttctgagtagtaaatagttggatcttgtttttttaccacacagagtcggacacaactgaagtgacttagcagcagcagaggggagaggggtagagggaggggtaaaataaatggataggattcagacatataactacaaggtataaagtaagtaagttacaaggacgcaatgtacagcacagggaatatagccaatattttataataactttgtatgaagtatactctataaaaatattgaattattatgctgtacatctgaaacataatattgtaggtcacctatacgttaataaaaattaataaataaataaaattggatcacaaattttaaaaaaaaaagtcctcaagcttacctgtaaaaccaaacataaaagttcataaaaatatcttaaaagggcatgcaaaagataccagatg

SEQ ID NO: 32005 - DNA, 1277 bp, Bovine  19866881161679
  misc_feature (1)..(1): n is a, c, g, or t
ntgaatttaattgttaggaaacatttgacagaaccagatagaggaatgttctacaaaatacccagcctgtggtcttcaaaaatgtcaatgtcttgagagaggaagaaaaattttgaaactattccggagtaaataaaactatagacagcacaaccaaaggtaaaatgggatgcaaggttttgttctgctctaaggaaactgttgtggagaaggcaatggcaccccactccagtactcttgcctggaaaatcccatggatggaggagcctggcaggctgcagtccatggggtctcgaagagtcggacacaactgagcgacttcactttcacttttcactttcctgcattgaagaaggaaatggcaagccactccagtgttcttgcctggagaatcccagggacaggggagcctggtgggctgctgtctatgggattgcacagagtcggacacgactgaagcgacttagcaaggatactgttgagataatgagaaatctgaacaaagtctgaagattttatactatcacatgatcatcaataaagtatttagggataaaagggcttatcttgtctgtagtttaagctcaaatgattcagaaataatatgtatgtattacatatatgtgtgtgtgtacatgtgtgtgcgtgtgcaaagagagagaaaataataagaccaatgtgatcagttgtaaatatctggggaatctgggtgaagaagacatagtgtatttcttgtgttatccttccaacttttttgtaactctggtattaccttaaaatagatacgttttgtttaaaccctaaaattttaaaaaatcctaaaaatggaagagagtagggacagaatttaaaaatacaaagaaaccattttttgttgttttaaaaataatccacagctatagggaaagagatcttccttaacaagaggcagttgtcagaataaaggcgaaggagttctgggcttccgtttaagcatctgctgatttcaggttccagcaagtatgctggcagagtacctccaatagagggcggtgcaacattatgaagaataaatcacataccacgggttttggacattacttcaagtggattctcaagtgtttccaaatagaggcaccgagaatcttagagctaaatctatctgcatcccattttacagatgcataaactgagactcaaagaggggaagaaacttgcccaaagtcatagccaccagtagcccaagtgccttgcaaataatagccacagctatatttaggaaggcttactctctgcca

SEQ ID NO: 32006 - DNA, 1302 bp, Bovine  19866881166071
  misc_feature (1)..(1): n is a, c, g, or t
nctcggcatccttagttgaaaccaccaagggcccccaaacctgaagcttttccagggacaaatcgcatgctgcggtggagacggggagcggaggggtggagcgcagcagcggatggtgcaccgtcgggccgtgggcgagagccaaggggttacttcactgctgtttagtatactcaggcacaccagaagactccgattaataggctgtttattcttcagcatgttccttgaatcaaaggctctggatgccgttattgaagagtgtttgtgagagtgccccggaacactcctcctgggctccgctcgctgaagaggaacgggggagtcctttcatttcctgggcagcacccctcacgatcaccgctcactgcagtctaaaggtctgcacagcctttgtgagaaacgggattttttgttctgtctccacgaggtcccattccctccagcaccttgctctcttagagtctaatcatttcatgttcttgtctttgagcctcctgaacctgatgaacgcagccactttatctcaagtttttgctgttgttgtttgggatttctggcggttttgagttgactctgtttggcaccaattctctgcctgggcagtattgtcatcttttcttttcatggttgtttaaaggcatttttgccaagggtgaaaaaaaaaccatccatctgaacccttttctgtgaagcaaatgaagatcttttttttaaatttgactattagaaatacaatgagacttcttcaaaccttggaattgaaacatacttattatgaaagagttacttcctgcatcaccaccccctgcagtagacatctgtgtgcacgtgcgggtgtgtgtatgtattagtctctcagttgtgtccgactcttcatgacctcatgggctgtagcccgccaggctcctctgttcatggaattcttaaggcaagaatactggagtgggttgccattcccttctccagggaatcttcccaacccagggattgaacctgggtctcctgcactgcaggcagattcttcatcatctgagccaccaggggagccctttatatcagaagtcaaaaaattaggagggacaccgcttctccagtcccccaagaagtcactgtcagcttgggggacacggaagggatcgccgtttcctattccctctggcagttatgcttttccatggcctggaaaataattgtatttcaggccttccatgacttctgtgcacacacggacaacacaaccacgaccctcatgggaatgccctcagcacagaggcatccagtgtattgcagagggctcga

SEQ ID NO: 32007 - DNA, 1752 bp, Bovine  19866881171690
  misc_feature (1)..(1): n is a, c, g, or t
nctctcaagaggaatactgaaaagcctgggaacggcagtcagaccattccttctctcaagcctggtctcccaccaccctggccctctccccctcccttttaaaacttcgttttcttttctctttttctggtctgaggaggaaaccgcggcccccacacctctccgagggaggctggggacgacgtgagagcaccagggcctgccctgtgtgtggggacgcgggcagggagagggggcttcactgcccaccttgatttcactgtccagcagccgtgtgcgctggatgatctcttctgtggacatcttgagaacttcctccccgattccatcttgctgcgaaaagaataattttttttcccttaaattcaaggcagttaactcagcactgtgagttagccaactctgcctcaattgacccactatgcgccaaaaaacccagaatgcagtcgcgaccgcataccaagcggccccaatcccgggaccgggctcgaccttgacccccgcagccaccgcctcccctcccgccagcggggtctccccgtggcccgagctccagcaccgcctgcgcgcacctccgcttcgtcccacacagtcgccatcttctcctgccgagtcactggactctcgagtttcggcagcagattcaccattcggaggagcagcctgaagattacaccgggcggcagccgcagggagagatcaatattacctctctttacgtctgctcttgactagtgagactccgtcaacaagtcctgactcttgaaaaaaattagcttgggccgcgttgcggcggcgaatctgcttctcggattcaaaagctgaagcgcaggccacaggacccgcccccgcggctgctgaaaagttcccgccctcgtcctgttagtgccacagcgagaggaggatgcgccactggctggaacgcccagaggggcgggacctggggcggaaaagaaatagaaagcggagggagaaacgacccagggtccttgggaaatgtagtcctaatcaggctgctcacaggctgctcctccatcctaaaggaggcaggtcaggtggtctggtattcccatttctttcagaattttccacagtttattgtgatccacacagtcaaaggctttggcatagtcaataaagcagaaatagatgtttttctggaactctcttgctttttcaatgatccagcctagacattttattacaaaaacagagacattactttgccaacaaaggtccatctagtcaaagctatggtttttccagtggtcatgtatggatgtgagagttggactataaagaaagctgagtgctgaagaattgatgcttttgaactgtggtgttggaggagactcttgagagtcccttggactccaaggagatccacccagtccatcctaaaggaaatcagttctgaatactctttggaaggactgatactgaagctgaagctccaatactttggccacctgattcgaagagctgactcatttgaaaagaccctgatgctgggaaagattgaaggcaggaggagaagggtgagatggttggatagcatcacctactcaatggacatgagtttgaataaactccggaagttggtgatggacagggagacctggcgtgccgcagtccatggggttgcaaagagtcagacacgactgagcgactgaactgaactgaacagggtcttgtgcctgttggctttcagactacaatgtacaccggcagctccatgggacctcaggcctt

SEQ ID NO: 32008 - DNA, 1102 bp, Bovine  19866881253526
  misc_feature (1)..(1): n is a, c, g, or t
ntgctctgcagctcctcctgtctgcagctcctcctgttgtgccagcctcacatccccctctcatgctctgcagctcctcctgctgtgccagcctcacctgccgcgtagaggttttgatcactgcgcacttgcccttcctttgggagtctagatcaatgtttgcaccatcttcctcttggtcgttaggatcaacatctagaagctgggaaaggaagaagctcagatttgctcagcccccctgtactctgcagagcccagaacttctggggcctagacaacctcagcactcccagggctcgccatccctacctcactcctcagcctagccccaagcccagcaaaggtgcggttaataaatcagaagatttagcgtgatctctgctcagagctcatctaccccctgaggaaaaatacccagtagaaaaagaaacacgaagctttcgatgccttttcaggcctgtatattcccctaaaaacttacagcggggaggagaacctaagaggtttagatcctacatgcaatttaggcctcaaaaggcccacccactctttccccaatggcaggctgtctccaagccccactgacccctcttcccctccacatacacacacacctcgatgacgttggagaccagatacggcagcgtcttgttcactttgattttctcactgttctctttgatcttgtccttcatggcctggagttcgtgggtgactcgcaacacttcgctcttcatgatctgggatgagggtgaatggaaggaaacattcagccttaccttagcttatctgagggccacttaattggagcaccttatccaggcagccggaggaaccctcctgcaccccttcactcagctcgaagctctctgaatgctcagcctaactgtgtccacaaccagcaggaaacctcctgtggaaacaggaggcctgtcgggagacctccagggggaagcagttgtagtcgagggaaaagagccagactttgagttgagcaaatacgggttttcaggttctgcctttccttacaggctccatacctcaccacagtaaaacacaaaacaaaacaacaaaaaccctcttttagccctcagtttgctca

SEQ ID NO: 32009 - DNA, 796 bp, Bovine  19866881411437
  misc_feature (1)..(1): n is a, c, g, or t
nctccccctcggcagattagctgggctgcagacggccacaaagtcagtagtttcaatcatacacagcaccctgtgtgtacaacaatcacattctggattctacaaaatcctggccttttccagagatataatttaggtaataaatattctccaccccggagctgtataaaacttctataaaaatagaaacgacattcttggttccagccggttgggattcagaacagcgcctccccaacctagcatttttttcttttttttttgttttcttttttcttttttatttttattttttgcatttatttaaaaaatcccatcatgaccctggaagcctttggaacagttttatccttgaaacacaggacacatttctcccagtgcgcggaattcaagtttacgtggttcagcttaagaagtatgtttcatgtttcttagaggacaacagacccaagttatcactatgagaagggaacagctgtcccagcttcagtggggtaatccaccaccaccaactacccgcacaacagcaagatggtcaacgctcgtctgaggcccgaggacagcatgacaaggagagcgtccccgtcggactgacagcaaagcaacccctgtgatctcgcctctgccgctagggggcagggctgacgtctgtgaggctgaggagcccagggacttggtccctggccttggctacgggtcacatcctaacagggccacattccccactaccagcgcttcttggagcagcggcagagcccggaggctgtgtgggtcacatgcaagagtgagacctgtg

SEQ ID NO: 32010 - DNA, 1814 bp, Bovine  19866881431353
  misc_feature (1)..(1): n is a, c, g, or t
nggggttgggtgaggacctctggcagccacacctttacgatctaagcacgctcaatctctccccagatggcaaaaagtgcagagacgccagactccagtggacacctccaactcttccgcagaaaacatggacttctccccagcagatcgccaagcatgtgacagaattcacctccagaaaaccagttctgcatctactagagaaacgggtcaaagataggtatgctccctgaaggccccacggcgtgctcactgtcgggagctttactgtttggaagaaagacagtgtcttgagggagccaggaagccaggcttacattgtgaacagctgtgtgaccgagggcacatggcttcccttcttggggcctcactttcagtatctgcaaagggcaaggtttggatgaggtgatccttaaggtcccttcctgctcggaaggagacccttgggcctgaccaattatataaatgaacagtgactggaccccatgatctgagctcataagtgcagccccaagccaacagctgctgcctggaggcaaaggggcagaaactacgcagaggaaggacagtacaccgaagtcccctgtgtcctcatgcgtcactttagtcgtgtccaactcattgtaactctatggaccgtaggctgccaggctcctctgtccatgggattctcgaggcaaggatactgccatgggtttccatgccctcctccaggggatcttcccaacccagggactgaacccacatctcttatgtcctcagaggtcaggacaaaacagaacacatcagatcattctctgatagaggttaagggcaggattcttagtctaaggaaaaatcatctgacttgcatcacataaaagcctagcttctcattttaagacaaatgtgcttgtcacacttggggggggaaaaaagtgactgattgataacaatccagcaaaatactggagtcagaacaagagcaagtcagtgcaatgccaactccaaaggggaggtttctatctttattttctaactggcaatgacaagctttacacaaaacgccggtaagctgcaagtcactgataaaggggacagccagctctgccactggaacagaaacaggcccagataggagaggccacccgagtgacctcaaggacccgggcaagcctcagtggcttgaaggtgatgtgcaggcagaatgaggaagggacgtgctggaggcagccactgatgctgagggcaggtcagtgccagactcttcctggaaacgaaagctccaattcaaacactaggaaaaatcaacagttccagggtgacaaccagctcattaacctctgggtaggagctcttccagggttcgggactcccccagatggtcagggatgttcctcctcccagaccagctggcgacctcctcccgagcctgcctgcacctgccgcgtgtcccttcccgccgcctccctcccagacatgttccagcaggttctggtcccccccttcttcctttctcctcctcgcctcccttctgcccttctctccccaccctccatctgcttcttgctcatttcagccttcagggaggcaggaggctgggagaagagccccaggttccggacgaggaagttcaagttcagaggagacaagatctgcccaaggtcacagagatggtgccaagaatccaactggctctcaatgactccagctcagggttctctccactgtcgcagctgcacagcaggtcctgcccctgatgcctgtacaaggcctcccctcccaacacacctgtctcacaccggtgcacacacacaccccactctatcccactc

SEQ ID NO: 32011 - DNA, 448 bp, Bovine  19866881467353
  misc_feature (1)..(1): n is a, c, g, or t
ntgaccttgtgatgagagggaacagagcaaagctggaggcagaactttgagatgggggatgtcagaggggcttttctgaaatgtgaaaatgaatacatgggcagattttgcaacactgcccagcctgctgtcttctcaagttttggtccccaacttccacccattccccctgtcccaccctgagcttcctcccatctttcactaagctcctttctgtttctgcttgcctggtgcctctcccacccagttccccccaccccgtgtccactcttgccctgctctctctcctcttccctggtgccctgttcatatccgtgtctgtccctctggctgcccgccctggcctcctgtcctctgctttaatgtgggacccatgggaactggagttcacagcaaaacaggaagagcctgtgagcaggaaactgggaagtggggcggggtggtgggg

SEQ ID NO: 32012 - DNA, 1507 bp, Bovine  19866881647012
  misc_feature (1)..(1): n is a, c, g, or t
nccctggggcagcagagaggagtcagggccctgccaagctccacccggaacacccagcatccccagactgcccctgagctgcctggtaggggtgcccagaagttcttctatctacaaaagaagaggaatgccaccccatgtccacctccccctacacacatgcacatagacattcactctcccaggcgtcatcccaaacccagataccatctcggcaaatgtccatgactcctcctcgaacttctacagttcccctggccaagagctccagcccaacgagtcacaagacacttccctttcccattacccctccctatcatcatctggggacagcgtgacctgaaacagtgccagtgaccctccccaaaggtgaagaccgctttgagaaggacctagtcctttcccgctcctcagtaagtgactacaagacaggaggccaggcaaagcaggatgcctgccgcagcttccgcatctctctgcggtgctgcctaacccttggaatgtctgccctaagcccagggcagttcaggaggtcctgctttgcacatcagccagaagaagcccaaggctcgttgagagcactgagggcgaaccaccctcacttcacctggacctttctggttctgagtgaggcccacatcattccgtcccccactctgcagcacagggcagcctagcagctatcacacccacagttcctaagccctgctggactcagataggaccaagtgtgactgctgtcagccagcagccttccttagctccctccaccccaccctaaggcccgggtacctgcatggtggtaggttgtagtcaccccggggaggaggcaaatggctactgtcagccaagccaggaactgcattgtcccggccatgccccaccaggccctctgagtcttactcttcacggcgtctctctgcacctccatctgcctggcacacactggggctccaactttccactaggctgctccagctgctccctgcgttgcgtgtcggtcttcagagctcaacagggaggggctggctctggcttcctaggggctctttccatcccagagaaatgtggaatctggttgttggcagtaggagcctggctcccagtttgtcaggccctaagcctattcctgcccagatgggcgggatgcttagttaatagaaaaaggcatttggtagcaaacagctcaggcttggccctcccaaagaggtaggcgagaccccaggcagtaagactgccttactatctgtcctcacccccaaaacactgcaactggctctagactgacactcagtctggcccagtacagcctggcccagcctccaggaagcccctcagtagccaagaacagccacaaagcctgatcttccagctgcctggtgggctggctgagtggcccctggacaggcagagaactcttccccctcaggcactcagccactggctgaacagaccccagacggctggaatggggagtacttgtttcctgagacagatcagcagctcc

SEQ ID NO: 32013 - DNA, 1817 bp, Bovine  19866880035886
  misc_feature (1)..(1): n is a, c, g, or t
naggagagtgaaaaagtcggcttaaagctcaccattcagaaaacgaagatcatggcatctggtcccatcacttcatgggaaatagatggggaaacagtggaaacagtgtcagactttatttttgggggctccaaaatcactgcagatggtgattgtagccatgaaattaaaagacgcttactcccttggaaggaaagttatgaccaacctagatagcatattcaaaagcagagacattgctttgccaacaaaggtctgtttagtcaattctatggtttttccagtagtcatgtatggatgtgagagttggactgtgaagaaagctgagcaccgaagaattgatgcttttgaactgtggtgttggagaagactcttgagagtcccttggactgcaaggagatccaaccagtccgttctaaaggagatcagtcctgggtgttctttggaaggaatgatgctaaagctgaaactccaatactttggccacctcatgtgaagagttgactcattggaaaagactctgatgctgggagggattgggggcaggaggagaaggggacgacagaggatgagatggctggatggcatcaccgactcgatggacgtgactttgagtgaactctgggagttggtgatagacaggaaggcctggcgtgctgcgattcatggggttgcaaagagttggacacgactgagtgactgaactgaactgagtatatttttatggaaatacagttgttttgcaatgatgtgttcatttcaggcatacagcatggtgattcatacacatgtatgtgtattgtttttcaataactcttttgcattatagattattacaaaatattgagtagagttcccagtgttatccagtaggaccttattttttacctattttattcatagaagtgtgtatatattaatcccaaactcctaatttatccctcccctggactttttactgagttacgatgttttgtttagcacagtttcctttcttattatgttgctggagactagaattctattccaagagtgcaacctcccagtgtactgagcagacagtggggatctgtgttagagggtgaggaaagcagacctcaagtgagatccttgccaaacataaaccaggagacaatgaaacaagggagggagagaagatagcagattacagcagatagagctgatagggagaaggctccttcttgtcctcaaaaaaaaaaaaaaaaaaaaggaagaaagtaaagtgatgtctttggaaatgttctccgtttgcctgctgaaggggtcgtggtggacactgctatcctccatgcaaccccccaggcacagacctggccctgaaggatgtggcagggggcagtccaaacccagccttctggagacatcgggagggctgcctctgcagagagcttcagagccgagagccaggaccaaagccagccccagcgcttgtccagctctccccaaactcacagccgcgcctgcaaaaccacagctaggctggagggagggacttgcctgaaatgcctaatgtaacaggtctgagttgatgaaggatgactaagatgggtttttctctttccccgcagggctctccaggtgtgaaaggcagcagaggacacaggggagaggagggagagcctgtaagttttgtgactcgctgcccaccacactctttccttttccattaaaaaagctttattctccagaaggaatagtggggtttttgtttatatgccttttgagtttgaggggtggggggtggggttgccttttccccccttctctttgtctgcgtcacgaggcacttgctgaat

SEQ ID NO: 32014 - DNA, 2157 bp, Bovine  19866880465257
  misc_feature (1)..(1): n is a, c, g, or t
ncagtaaattctttttattttaaaccactatgttctgaggtaatttcttacatagcaatagaaaactaaaacatgttaggttaaatcagatcacttccatatatacacaagggtctcattcgagagaaaggagtctcaatctttctgaattctattaaatacaaagaaaacaaaacaaccacacctatcctataactaccagatccttccctataccaacatctttattagtagttcacaaaaacatcatggtatcgattttactatgtggcaagtactgtcaaactgaatcaattaacatttccgggaaattttcatttctacaagcaaaccacattcagctgctagaaacacatgaactaaattaaaggtcacgggtttacttttatttttcaaggcacatgggcatccccatctgctacaaatgagatctataaaggtcagattgtaatataaaagtcagctccatcataattgcaaacctgaacagtgatatcccctggaattaagtgactttaaaagttctcagttcagttcagttcagtcgctcagtcgtgttcgactctctgcgaccccatgaatcgcagcacgccaggcctccctgtccatcatcaactcccggagttcacccaaactcatgtccatcgagtcggtgatgccatccagccagccatctcatcctctgtcattcccttctcctcctgcccccaatccctcccagcatcagagtcttttccaatgagtcaactcttcgcatgaggtggccaaagtattggagtttcagcttcagcatcagtccttgcaaagaaaatcccagggctgatctcctttaggatggactagttggatctccttacagtccatgggactctcaagagtcttctccaacaccacagttcaaaatcatcaattcttcggcgctcagctatcttcacagtccaactttcacatccatatatgaccactggaaaaaccatagccttgactagacggacatttgttggcaaagtaatgtctctgcttttcaatatactatctaggtcggtcataactttcctcccaagaagtacgtgtcttttaatttcatggctgcagtcaccatctgcagtgattttggagccccccaaaataaagtcttgacactgtttccactggttccccatctatttcccatgaagtgatgggaccagatgccatggtgataggttatagtactcactaaaagggaataaattcatttcctcctctggaaaatgaagcccgaggtggacacattttaccccctgtctgctttgaacagcaacctgaagaggttgggggtaaacagccaaagatctgagcactgtcccgaactccataaagacacacatgttaggttttcaacatgtaagtcaatagggtggtcaaaatttgtctcctggaagtatccttaggaccttagggtagatttacactcagcacaaaattgttcagaacacactgcaaaccaaaacgcgttccaactgaattcaagaagagaaaagaggaggaaacctcgaaaaacctcaatcaaaattgacctttaagacctcttaaaaggtgattgtgttatataaaggctaagtaacaaagatgcaaataggaaccacatgttactctctagaggacaatggcttcgtgacattaataatacacatatcagactgggaacataggtcaggttttctttgtgggaagtgattattttttttggctttcataatgcaagaagatgggtttgtaattctatttctcaatggcaacttctctttctgactcagttatttaaggcaatctattcaggtaccagtattattcacccatattttaaataaaaggtagatgaaaaaaaatgtgattgtaaagctccaatatttgattcagaataaagttaactttcccttttgagggtacatctgtagctttttatgtcaattcaaattcagattagagctgtgtgaagcacattttttttttcaaacaagaattaaagtatgtggagtactttatgttctcgtttttaaagtggaacttgaaagagaaagagctcaaggaaagccgctcaaggcaggtggcatcatttccctgtgctcctctgtacttgtaagttagctacatccagtgccccagctcccaccc

SEQ ID NO: 32015 - DNA, 1753 bp, Bovine  19866880466213
  misc_feature (1)..(1): n is a, c, g, or t
ncgactcatggacatgagtttgcgtaaactctggaagctggtgaaggacagggaagcctggggtgctgcactccatggggttgcagagtcaactacaactcagcatctgagccataatcacctttcaggtttcagcgtaattatcatccttccaataaagattcctttcctgattctgcctctctacccatcaccaccaaagactcatttaagtatccttatgttcctgtaacagtaccctaagcatatcaccaccacagcaaaaaacactgcaccgaaatctcttttcaatatcaatctctccaattaaaaggcaagcactttgaaaatagaaacaactactcatctctctcacttaagacagtgcctgacccatactgaagaattcaaatattccttaaacatctgaataagcagaccactctctgcattttctaggtacttaaaacacattcaataaaataatgcatctgactgaagagtaggtggatttaccaaaaagttaatttctgtattcaagagttaaaataaatgcacattcccaccttagcaaagctgaccaactcaaatacctgctgaaaagatatccattgctcgcttcaattctcctcttgttctctgattgctgtttaagtctacaagtggagttgaaggatctctcatatattctaactctgtggcaaacaatccaccatcgacaaaacgttcgggagcaatgtaacaagttctcctccgtgaagtgtcaaaaaaatagttgaaatctgccgggttgtcctctggaaggtaagtgggcttgaaactggcaaaatccgttagaagaacccagttccaactggtgaccatcacattctccgtcttgatgtccccatgacggacgccagatttgtgcgcttggtccacagctgtgaggatctggaaagcgacccagcgcttctcgatgttatttaggaacggacgggtgctgattcggtcgtagaggttgtctcgcacgtactgcctgaagagcatggctgccttctcagaggctttttcggcagctttctggaaaggcagacagttctgggcagaatgaagcctgattttcagttcctccagctcctgtttatagctggtgagaggcaatgtgggatcctgaattgcaaagaccttcacaactaccaggccttctcggtgcttcgctcgagcaactttaaagaaccgagtactccccagactcttatcatattcaaagtcatggatgtctgagaaataactctccacagaaaggatctgggagggagcaatgccagcgagctggtttcccatgatggcagcaagcacctctgagacagcaagttaggatacaacacgtactttctgaaaaaaaagaaagaaaaaaaaagaagcaatgaaacatcattttttatctatccttctacaaggtagatacatcatatttctcttccatcccacaggactgtacttaacaacttcttggcagcctctaaatttcagacatatttatcttaaaagatattattttgtcgtcctttccgggatattaaaggaaaataggccccatcaatattaaattgaaatgttacaatgtgtattttctgatacttgaaaaatttaacaaatctttactacgtgttcagtattgtgcttggggctgaaagaggcaccaaagtgctatgtgacacagttatctgtccaagaagaatgtgtaatctgaatacgaaacccaagcacatcttaaatctaactgctgctg

SEQ ID NO: 32016 - DNA, 674 bp, Bovine  19866880610594
  misc_feature (1)..(1): n is a, c, g, or t
naacgctgatacctggacacttagtgccttcaatgaccttcctgtagtaggacacggacggggagcccgcgctccccgcgacgatgtaggacctctctgggtaggccaggtcccaaaacctgcggaggaggagagaaggggtcattgtgtcgcaggagacaagggatggctgatcactgactgacactcgtcaacgctggtgtgtcctcttctgtgtttgaaatagagattttctagaagagcctaaaatcagttacaaatgaagtattaacagctgtccctgcagggtgtggatgactgccatcatcatcccactgctggtatctgcagtaaacaccaccttgtggtaaccacggtattcacacacatttaactgcccttcttctttcaagtgctgaatatgaagtctctttactgtaccttattttcatgtctgagccggccgttagcaggatggggttcccatccgcaggactacagtagagcccgtggacactgtgagaagaaggcttaaaggaagtaaagaagagagtcaaatgtcgcccataaaggatgcagccatttctagagataagtcagctattagcagttaactgaagagaccagagacagatcacttatgtcttaaatctttctttgggaatttaaaatacatttgttctgtatcaccctga

SEQ ID NO: 32017 - DNA, 3195 bp, Bovine  19866880667786
  misc_feature (1)..(1): n is a, c, g, or t
ncaaaagattctgaagaagtgacaaaggcatcagcataacaacatccaaggtccattaaactgaaccagatgcgtcatgccagaatatttctgcatattaaccctattgggtatacgtgtattaaagaggaaaatgatatcgcaacatgcattgctatgactagtttccccatataataatatcacctgccagaaatgtgatgattttccccatagagatgttagctactacaggcatgcctgattttaagaaaataaggctctcttaaacttaggagtgattgttcaattataaaaaagggttatgtattttactaaataatttaggctttaagaaagcctcagctccataacagaattaatcaactcatatacattaaatagatccaattacttgtcttccttgttctcctttggagcccttttgtcctttgatggtactgctttgtcctggattaccctagaggaagatttaaaaagtactttagaatcaagaaatatcagcctttttttttctcaaaatagtacaatgttcaagaactaagctaatctgggctaaataatgagaggtgggagaaaattctccatatttgaaacacaatttttttttaaagatgaaagtaaatctgaaggaggcttagtgagaaatgaagagttacgagtgcttgctgagctcacagtggttctccctcctctatactggcagcttcactagtgcacccatccagacaggcccatgacactcactcaaagacgtagcaagactcccctgtaatcgagtctgcatgagggaatctacaggattgaaaactcagtaagcaaaattatggaaatttcattcccaaaggaacttgaaagtctgaaaatgaataagatggaatttttgttcccatctctgagttttttatatataatcagcccagaccatatgcaggcttacctcaaccaaataagcctcagtcaatacctactacacccctcccaagtcatgtgtttgcctacaagtgagaggaaacacaagagaaaaaaagacaggaaatgtggagtaactacacaattcaggaccatctgggccccagaaacttacaggatcccctgggaaacccttgtccccatatcccccagggaggcctctggaacctgggctgccctgaaagaaaaataaataaaatgagctccaagttagcttgcaggagggtgttaaaatatcaagtgttgtggcgactgtaggggagaaaatccatcagacaaaatgattcacattcctctctcccagctagattcttttcagcctctcaagcagaaccaagcccagtttgaaacctacggtcaggactatttataatgaggctgagaaaaggtaaaagttctcatggtctagcaccgccctctagaaccttctgcagaggatggagaggttgtccatccacactgtccagtacactagcccctggccatcgatggccgtcaagcacacgacaggagagcagaagttttcattttagttaacttgaataaatctgacatcctggagccagagccacggtgagacaaacaagataccaagggtacaacatttgggcaggcacccactctacatcactctgagaataagtgcttcagtaaattttgcatgccaggacctcactccagcctggaccctattacatccttaatgtgtcttttgtctgttgcttcatttgaaggcttcagcacttctcaccctgattactacacatccacctctcatctttgccttgcatctatgtcatccccaacacatcctccacgctaccatcatgcaatagttctaaaaatgcaaattggattgtgacctccttgcttaaaatcttttaaggctccacattcccaatgattgtgatccagacggcttctccttggctcaccagtgcctttcccagctcttcccaactccttttgaaccccagctccctccatctgaaccctaacgctcataacaggcagaacaactttcagggcccccccaagcctccgtgtctttgcttaaatggatggataagaaagttgtggtgcatatacacaatggaatattactcagccattaaaaataacacatttaaatcagttctaatgagatggatgaaattggagcctactatacagagtgaagtcagaaagaaaagcactgatacaggaacgatgaccttatatgcaagacagcaaaagagaatagacttttggactctgtgggagaaggggagggtgagatgatttgagagaatagcactgaaccatgtatattgccatatgtgaaatagatgaccagtgcaagttcaatgcatgaagcaggccactcaaagccagtgccctgggacaacccagagggatgcagtggggagggaggtgagggggcttcaggatgggggatgcatgtacaccatggctgagtcatgtcagtgtatagcaaaaaccaccacaatattgtaaagcaattagcctccaattaaaattttaaaaaaccgctccctctgtctggaatgccccctctccacgtcttgctaattcctattcatcttcagttcagggatcatttcctccagaaagatttcctgcactccctccccactgttctctgggaccacacagtcgcctataacatgatcccaaccacatcctgcgttccattagctactgatatctctgtcttcccaaccacaccaaaggatccctgaggacaaggacagtctggttaatctctgagtcttctgtacataactcagtgcctgacgcacgccaggtattcaaagtatttaataaataagtgaatcagaacataaaaggagagctgcttggaaccaaagaggcacacattaatgagtgttgaagtgaactgaaaataaataaacatgtatatatatatatatatatatatatatatatatgtatatatatatatatgtatgtatcattgtgatttgctatatcaagtccaccaaaataattctgtctcattctcttgcttttttttttttttttggatgcaataaagaaaacaaattgctgaccggcaaatggattcacttgcagacttccgaaaagattcttgcaagcagattgcaatcttgcaaaagattcttgctcacaggttcttgcaagccttggatctttctagctggaaattctgaaaatcgcaagttacccactgccccaaag

SEQ ID NO: 32018 - DNA, 1101 bp, Bovine  19866880905864
  misc_feature (1)..(1): n is a, c, g, or t
ntcaagccttggccaatcacgttaatgttctcccaaagcattgtgggtcattttagacaacttttgttctgattctgtttgctttctggcctctgcatcttgggatttgcctccaggatcagggtcctcaaataactgttcactgcccgaaggctccatcagtagacttaatacgcttatttgcaaactcaaaaaatttttttaacacaccacgactgtcaaattaggtaggcattgcttcgacagtaactacacatgcagctgtgagacgaaggcttcatgcctacctaatgttaaaaaaaaaaaaaaaaaaaagctcgtattataaatccatgcagaaactccagtgttaaaagaaaaacatgccactagcccaagaagtagacactatcattaagcaatctttaatcagaagattaaaagatagttttctagatagtgggtaatgattattttctagaataggaggaaaagctccgaaacaagtacaaaggaaatgaaaaaacagcgctgttaaaaaactccctacaagttgcaatgtgaagaggaactacatactagaaggttcatcttggaatgcaaaccataataatatttgagagaacagccattacttgggaaatcgagagacatccgagcacagagcattcaatacagacagtctagctgaggcaactgaaaatgattcctctcaatcacaaccatagttaattatctgcatgctgaagctcaatatagtaaattcaaagaataactgtgaaacgtggacatcccaatctaactgcattgtgggttttaatggaaaagaggaatttccagttatattcatcaaggtcactggcaactagacacttctcttttgagaaggtttgctcttttgaaaagaaaatgcaaactgaaatcttataggttggattctctgctggaacacaaacgacctttcggtacaatgagtacatgatccagaaagaatctgtcttcagagactagagcttggctcagaaccagtgaacaaagaaagagactcaaaggaatccctttcttgaaaagggtcgactcgacaagaggctgcccatgtacagtccaccctccatatgcacg

SEQ ID NO: 32019 - DNA, 1197 bp, Bovine  19866880973118
  misc_feature (1)..(1): n is a, c, g, or t
naaatgtattctttttaatggctgagtaatactccattgtgtatatgtaccacagctttcttatccattcatctgctgatggacatctaggttgcttccatgtcctggctattataaacagtgctgcgatgaacattggggtgcatgtgtctctttctcttctggtttcctccgtgtgtatgcccagcagtgggattgctggatcataaggcagttctatttccagttttttaaggaatctccacactgttctccatagtggctgtactagtttgcattttctccacaccctctccagcacaaaattatagtattaaattggatataaagtgaagacttagaatggaataagaaacctcaatgaattacagatttgggtgacaaatataagaaacatcacaaaatctaaaaaaaaaaaaaaaccgcatttttgctaattcatggatgcatcctaaggtgttttgttcctacatttttagactacagagtctttgatcaccacttcatgtgaaaatggttttctaatattttctattgctaaagctgaaactccagtactttggccacctcatgcgttgacttattggaaaagactctgatgctgggagggattgggggcaggaggaaaaggggacgacagaggatgagatggcaggatggcatcactgactcgatggacgtgagtttgagtgaactccgggagttggtgatggacagggaggcctggtgtgctgcgattcatggggtcgcaaagagtcagacacggctgagcgactgaactgaactgaatattttctaaacagctcatcaaaagataattcagatactcctaacatggttaatttatatttggtttttattagagtctagaaaagttctagtgactagtttctggctctgtttctcctttaccaccatacacttcaggtgctgggcaccactggacacacttaggtgaagatttcaggtcttgtgatttaggattatacgtggtgggaatattcctagacgtcctaccaagacagctagtgataacttaaccatacacagacatgactacaaaccacacttatatgtcatgaaatccaaatgcaatctaaatgtctcctcatctcaacttcctttaagccagattcagaattttggcttgagggcccctcacttgcagatgtaccttttagggtcctaaaagaaatg

SEQ ID NO: 32020 - DNA, 1934 bp, Bovine  19866880975965
  misc_feature (1)..(1): n is a, c, g, or t
ntttattcttgggccttagggttaatccctgataaggatagaagtgcctagaagtgatggcctcccctctttctggtcatccatagccaatggggtgagtgtataaaagcccacctcttttacctctaggaggtgtaaaccctagatgagaaaaacatcagttctgctctactgtgccctgtggggtcaggctgaacatggggtgccacctgaaatcacacctaacttggcttcttctattgccttcttctgcttcgtgaccccattggtttctgttggaagaatgttaataattcacctgtaccaaaatccttgggacttcctaggttgctcagtggtaaagaatccgcctgccaatgtaggaaacgcaggttggatccctgagtcaggaagatcccctggaaaagtaaatggcaaccctctccagtgttcctgcctgtgagatcccatggaaagaggagcctggcgggctacattccatggggtcacaaaagagtcagacatgataccagctaaacaacgacaacaacccaaatccttggctaagatactgcttctggaaaaatccagcctacaatattatctaaatgcattcacatgcaatttttaaaaaggtcatttttctgtcaaacaaaatatattagaataccagagctagccagtaaaccaccagtttgcaatctatggttttatcttttattcccattctagtgaaaaaagcagggacttgaagagattgcaaaagattttgacaaaaatgctgaaaaagtgcagagacctatgtgtacaatgcctgcagctattatatgctctgttttcctaatgtacttgcttctttctgctctatatatcaacactggctataatgattaaagaacaggaacaaagtggctaattcttgggctggtttataatgcacagtggaactcacttattctttccatattttaaagacgctctggtgttctctgcactaataacgcctaacatttgtttagtgtcacatagtcttcaaagtgcttaccaatgcatgatcttatacgactcctactgtccttatttcacaggtgaggaaactgaagttctcaaagttccaaatcagacaaatataaccctaaaatgtggatgtttttctagcatatagagagttggttaaagatcttttatcttagacaactggtgattccaaatgagatagtaacaggagaaaagtgtgtaaaaattgagataaacagagaaagttagaagcatatatgcagagaaaataagacttttaaaagggaaaccaaactagtggaagtcatgaagagttgttgggaaaataagcaaaatgaagacagaaaatgatgtggttcaaaagaaagactgaaaagtggagagaggaaaatttggtggagagagataaagactcaacaaggagaagggtcagaagtaaggctggtgggtcttttttttctttaaaatttatttacctatttatttggctgcgctaggtctgagttgcggcacttgggatcttcagtcttcactgtggcgtgtgtggtctttatttgtggcaggcaaactcttagttgcagcatgtgggatctagttccctgatcagggatggaacctgggccccctgcgttgagcacagaatctgagccactggaccacaagggaaatatctggtgggtcagttttgagaatgacaaaaggcaataatcaaaacagactcattatgttacccaaaaactgggtttgcgtattgttgggtactgagccaaaagatacaaccaagacaaagaacagaagaaagaaggattaattacttttggcaaataaggagactacacttaaaatatttcccaaagcagtgtctatgtgaacagtgaaattgggggaagttttaagctaagggtacatgcgtattcatgaaggagccttgggtcctg

SEQ ID NO: 32021 - DNA, 789 bp, Bovine  19866881049928
  misc_feature (1)..(1): n is a, c, g, or t
ntgccgtctatggggtcgcacagagtcggacacaactgaagtgcattgaagttgaagatgtttgatgctctgtgtcccagaaattctgtttcgacacaaatccctagagaaagcttcatttacttaagactaaatctatcgaggatgtttacacatacacacatgtatataaatatgtatatatgtgtacctatatgtaatcaatagctatagacacctacacagggaaatttagagtgaaaaggggttaagaccttttaactttccaaattcggtgcctctctctgcaatgtgctgccccctcccaggcagagagcctttgcctctggcagctggctgcctgcttctgacttatggccctcccgagtctccagccctgtttctctgtggaaggacctatgtttttaccaagatgcttgatctgtctgcatatcttcaaacactatttgtggccttgatttgttgagtcgtctacaaaaagctcacgaagtagagtctcggttgccatgatttcttacacaatacagaacgctgttctcctaccaaataataaccaaacttcttttgttcttcttccccagctggcagacagggtgagtaattttatttatagcatattataatcaagctccaaaatgtcgcacatctggaaagatgagttagaacattgtgttgcctgccaaattataaaaagtttatctaagccctcttggtagtacagccgtagccctgcctccaataaatcactcacgtttaagctgagtctcacaactctttgtcaaccaagtg

SEQ ID NO: 32022 - DNA, 660 bp, Bovine  19866881073037
  misc_feature (1)..(1): n is a, c, g, or t
ntgagcattggttcctaaagccaaaagcctggtgccagagcttgaaaaactcattaacaccatagttggtcaatctgtcatctgagagaaggaactgattacgaagtcccaagacatgagtaaacttgtccaccaacgcttggaactctgaaaactttaagagtgttagaagaaaatcgtccaaccctctcattccttagtcaagcagaaacgtacatggttcacttctgctggcacttaagacatagaaatattagatagcatggggcaagggaggcaggaacatactccaggaaagcttaggaagaaaaaataaagtaatacgagagaaaggataagacactgcattcagtgctatttcatatgggcaggagggaaaaagtagatgccaaaatgttgtgagagcttgcttgccctcccaagcacattcagagtggagaggctgcaaattaagtgctgtctgagagtctgcaaatgtaagagccaggactcagttttgagattcaaagttcgccaacactcgtttcccagccctccccatttgtgtggtaccttcttttctaagttcatcagattttcgttcaagtttttcaacatcatcatccaatccatctgaaaataagagggccacctaggagagtattcaaaaaagaaaaatga

SEQ ID NO: 32023 - DNA, 1369 bp, Bovine  19866881095544
  misc_feature (1)..(1): n is a, c, g, or t
naggcatatataagccaaccctgtctaggattgtgttagctgtgctgccaatttaatcaccactgcacacttgagtggttgctattagccccattttgtagatggggctgctgaggcccactgaggttaagcatgtgaactggtttgcatagtttgtgtctaacagggccaggacttaatgctgacttaagaccaccttaatgcaaccttaatacaaactaagaaaactgtaagggagtagaggtagatttgaaaaagagagtactattacttgtaccaggatgggatagataacacatagtgttccagagtaagaaagttgcttgtttgttctttgtttagtaggttgccaaatatgccaactgtcacaaaggggtcaattaaatgcaaaacatatgtgcatgagaatatccaattatctcatttctgatccattacattcctcgggatgtttcctattcagactttaatgcggcctgggctacatgccgctggcctgcatgcatttccctctgcagagcaccaaggacacaactgaatctccattatagacaataagtgcatttcggaaggagtaagaaaacccattatttatagagaaaacagtttcacaaaagctggaatttcaaagcacagtgagactttctcacattaagccatgaatcaaagttcgagtgcataagactaagtaactcaatactagaagggataaaaaaattacattgcagtgttgaaataagaccatattttattgcaaagaggcagcaccttaaacttccctgagtattttatatctttagctttttttttcttcttcagatggtgatgagtgaacctgagattaaagtgccattatttcagagcactgaagcacaaccatgtaatgactccagaaatccctggcagtttcagtcagcaatctcttttttattaacaatctcgacattgttggggctagaatctttcccgactttagattgttggtttacttgacacttgagaatgtttttgaggacaaaacaagtttggagccagatccatgtaaagccagtcatgaagcacttctatgaaaaatttccacagaaaaaatcagaaacaagtgtttctttgaagaaaaggtaaaaataaggtgaagttgatgccatagtaagtctacattactcacaaatcatggatgaattgattccagtagttgtttgtttagctttcttctaggtaaaaagagcttatttttttaaagcatggttttttctttcgtagtatgttgacttataatgtcaatttctgctgcacagcagaatgattcagttatacatatacattcattcttttttaaaatagccttttccattatgttttttcacagcat

SEQ ID NO: 32024 - DNA, 787 bp, Bovine  19866881165011
  misc_feature (1)..(1): n is a, c, g, or t
nctggaaggcttaaagaaagatgctgtcttaaatatgatgccaaatccaaagcaactgattagtttgtctgtttctctttttaaggagagtgagtggagttatgtatgaagaaaaaaggagaaatcctatagaatctaaaaaaatgatagaacgaactatttacaaaacagaaatagtctcatagtggtaggggaaaaacttaatgattgtcaaaggagatagtgtggtggggagagtttgggattaacaaatccacacaactatacataaaacaggtaaacaataagcacctcctgtatatcacagggaactatattcaatatcttgcaataacctgtagtgggaaagaatctgaaaagaatagatagggagatgtatgtataacggaatcacttggatgcatacctgaaactaatataacatgctttcttatagttgtaagtcagctatatttcaataacttttaaaaaaaaggtagaaattttagagacaggaactcctcacaggaatcaaaggacccacagaaaacacttttgctgcaagtgtcagctctgccagagaatcagagcttcttattcagcctcagcatggaatattctttgagttagaataactgtcacactgacagctttattttggccaattacttcgacagtcattgacaatcacaccaaataagcagtgtattcagaagaaaattatagaggaccctgggttgctacagtgacagaccagcctgccagacttaatatttcccctttcagcttcttattaaaatagccttaa

SEQ ID NO: 32025 - DNA, 812 bp, Bovine  19866881360233
  misc_feature (1)..(1): n is a, c, g, or t
ntggcttcctttctggctcccttgggtatccctttcctcaaatgtgaatctgcaaaatgttttagtcattgctaagaggcaattctatgtagcagatacagaaaagtagaaacaacaacaacaaaaaacaaaaaaaggggagggggccggggcggggggtggagacccaaaacataagcgacacatttatcttaccaaagccccctgtcaggcagtctgctgattttgcttgccacaaagctcatccttcatttgtgcactgccagcgcaagcttggatcgcgcaaacaatcacaacctcttttggctataagctctttccatttgtcccagcttccaaactgcagacgagctgtggcagagtctgtcacggctgcacatacttggtttccgagaataacgcggtaaatgaggacagctaccactgggaatgccttcccccaccaacagccagccgaaatgaagcttctagttgatccctgggcttctcaccttcacagcctcagagaagtgcctttcacagaacaggcaggtacagccacaccacatcaacatccccgcatagccaccaccctgcagtacggcctgcgtactgttctgcttctgtctcccgtgtcagctcttggagctttctacattggggagccagggaggaaggactctgtgctgaacaaacagaaagcttctgccaaacaagcatccgtgtgtgtgagagagagagtgtgtgtgtgtacgcgcacgcgcgtgcctgggtgtgggcacagtttgctagagctgaatgcaaatgaacagtttgagaccggagatcacaga

SEQ ID NO: 32026 - DNA, 1543 bp, Bovine  19866881418772
  misc_feature (1)..(1): n is a, c, g, or t
ncctaaacccagtgtactgttcactggatgtgagctaaactggcttcctctggggcatcttactttttaatattttgccatttttaaaagaaatcaaaatgcttatttccctaccttactaaagaatattttaaatataccataacctttcaatggctcagagtcatcatcagatgcatgttactgtagtaaatgctgtaaaaaacatcccctcaaaacagcagtgtggatacacggctgacatgacctcccagaattcctcacgtctgatctgatgccgtaaaaaacatcccctcaaacagcagtgttgatatacggctgacatgacctcccagaattcctcacgtctgatctgctacactaacaggtgattcaacagccccactgccagaactgccctcaggtcaagggaggtctacaaagctagctgcttctatacgaaatgctcctatactactgtattatactcaagctgattctcctgtctcctcattttacatatttattctctttattacttatcagcaagctctatcttggacaacctctctaatgcccaagtacctccttatttccttccaaatctgtccaaagcagagttaggaatctaatggaaagatgtgtgtgtatttgtgtgtttgtaacataaagtcaaatgagctctgtgtctaagaagggggaaaaattatacatttctgcctaacaaactaaaaatgataggaggcgtatattagtctacggggctttattgctcgtcccaaattcagaatgttccagagaactaatactgaagggagaatatagttctatttaaaacattatggtaaatatttgcagcatagttaccagttctctgatactgcgatcttcaattttactcagcacctgctcagggaaaaactgcccatttctataggccaaaagttgagagagatcaaacaaaggcacgccttctgtaaaaagctcagcgatcacacaacctggaaaacagcaggaaataattccattaaaactgaaaagcaagagatccgtaatacagatcaagaattcagagaattcatgaaactcaagatacgtaacttctttaatttaacacacaactacaatccagcaaggcagaaaaaacatctactggtgaatcatcagtttccaaaagtatgaaatcaaaaaaggcctacttaatttttcttcttaaaaaaattaaatcaaataaaattacttccttgttctgtagtttaaaacaaatgtactacacatgcattatacatcagatcagatcagtcactcagtcgtgtccaactctttgcaactccatgaatcacagcacgccaggcctccctgtccatcaccaactcccggagttcactcagactcacgtccattgagtcagtgacgccatccagccatctcatcctctgtcatccccttctcctcctgcccccaatccctcccagcaccagagtcttttccaataagtcaactcttcgcatgaggggccaaagtactggagtttcagttttagcatcattccttccaaagaaat

SEQ ID NO: 32027 - DNA, 2759 bp, Bovine  19866881453891
  misc_feature (1)..(1): n is a, c, g, or t
nacagctagcatcacaagcaggacgaagagcaatacagttcactttttggctaggatacaatctacagaatacttagagctaaaacactgcctttactgaaaccttgaacaagcacgtggtaggttgggttccctcaaggcagaatctagacaagaatttgtgtaataagtttattgaggagaggatccctccaatcactagtagaggggcagggaggtgagacagggagccaggttgaactgtgaatgagcaagtgggttagtgttctgggcagctggagctcatccccttgggcacctcaggaagaacataaagatcagacctcaagagtggcctcccccaaggtgtgagaagccagaggatacttattcaccagctttcatcagttactgggtaaggggttgctcccagagtattaacttccaggcccctctagcctgctctgcatgaatcaaccatgctcccaaggccagagaaaaccctcaaggcctccaggggggcttgacataagaagcctgcagtgaaacgccgaatgcagaaggggcatgcacaaggctctgatatcctctgccagccagcggagaagagaaaagcctgggcatcagggaaatctattacaacacaaaacgccatctgcccagagacatgcatacataaatgggattgatcatagtgttatccacacctactgacttatggtgaggtggggtactgaaagatagcacatgggccatttgatacactatggtattttttttttccccaccaaacaaacatcgccaaatatgactctgactcgcccagaatcttcaaagttctattgtatttggactcatgcaatggagaatttcagtcataatattttgccagacactcatcaagttgtttttaaaggactcaataagtgattagcttatgggttttcaagccaacacaaatgcctttgccaactaactctggcaaaatctttcccctctaaagtttaggatacagtacttaaagcactgcaaaaacatgtttgagtcaaatcaacacctcatccttaactataaatggctaaaataatggttaaatgtatatttattatctctttgtgacttaaggggaatgctaaggcttgagacagagttggtttggatgctttatttttcttgcctcctctccatctttgtagcatttgggggaaaactttcttttcatggcaaaattaaatcagccaatttcctgaggtttgctgtttggaatcataaaaagtgttagtttttaaggttatctcagtcaatcaagatgactcataaaggtaagatttagaatcttcttcccgattcttttgtctggattttctaagtgcaactgctccagatttacatgaaaagggtacttcagccagactctttcactaaaattgcaaagtgacttaaaattagtcattgatttatcaaatatttcttgagtaccgactaagtgccaggtaccgtgggaaacataagggttacaagagccacaggagacatttccttctgtgcattgcttatgttagccaaacagtatccattttttctcatggtatcttcatccaaatttccctgtcagcaccctggggtcaccccaagaaaagacaagtttggaaggaggacgaggaatctggataaggagcaagaccaaatctttctaactattatttcttcattgaaaaaagtttggccttgactgttctgtaaagcatcctgtacactttctaagttttcctttcccttgaagaactgaaggttgctttataggccttcaatttaaaattctgaaaatgtaaacttaatacctttctgctgaaagtagaaagatatttttgttaccacaaaaccattatccaaagacactaaaacagtgggtgcatttttcaaagtcttcgacctgcaggcaccactggacttttctagaaaatttcctctaacttgtaaagcagaagaggcaaagagacacggaaggaatcagaacagccacaactcccaaacagctctttcgggatggcagcatgcctgagtgactggtctttccttaaatgatctccaccaacgggaacacttccaggtggaaaagggagattacaacgttgggtgagctatgcatgtctatgaatcatgttacaatcatcttacactccatggcaacaaggtatttcagtgagctcaaaatatggactaaaattgggctcaatgataaatgaattattgggaacactcctaggggccttgacccttaagaattccccactaccatcaccatcaccctcatttattgatcatgtgtacctggcattttataagaatctttttttttttctttcctcacacatccctgtgaggtacataggtatcatgctccctgtgacgggtgagaaaagactcagagagattaagtggctgtccaagctcttctatggacttccctggtggctcagctggtaaagaatccacctgcaatgtgggagacctgggttcactccctggttgggaagatcccctggagaagggaaaggctactcactccagtattttggcctggaaaattccatggactgtatagtccatggggttgcaagagttagacacacgactgaacgactttcacttcacttcaagctcttctataatttgaatctggattcttttcataacaaagcttatccacttcctactttaaccagcaaagacaagaaacaacaaaaagatcaggacaagagaaaaaaaggtttgtccaa

SEQ ID NO: 32028 - DNA, 1026 bp, Bovine  19866881456360
  misc_feature (1)..(1): n is a, c, g, or t
ntatttgcatatgcaatgatgtcatgggggtctttcatactatgattttggaatgaaacaatgaaccacatggaacccaggcttcagggagacaagacaatgggataaattgtaataatgcctcagcagaggtgtaaaattaagaaaggaagaactctggattttggctgaaagtaaagatgggcttcgaagaggaaacggcttcgatcagggacttgagggatggtatggcttccctgggaggaacaagttctcagggaatgtgaccagaggtccagaagggtggaacagcagttcacccaaggcagacaagagtccagtgtagccagaactctgtgctcatgatgcggagagatgggaagtgaggttgagataggttgaggctgaattctgggttctattttggggtaaaatttcaatatggaaatttctgaggaaatcatgaattttaaagcaaaattgcaataagctaatgaggatgtcataaaatctgtcaatccagaaagcatgcttgatgtgtaacttctgctgcagattgtgggacatgtgaagagccttccatcagagacctcatcagcttcctccacctaatacccgccatcagccagttacacactgctcagtcaatcaatggtcactgataaatatcagagctttccaactcacgggagaccgatgccttgattttcctcgtcttctgaatcaatgagttggcagatgttctcaagcactggtggtgggtactgattgaatcctcctattgagagaggaaaatgatagttaaattttaaactataaattgtatgtgctaaggggaaaagaactgcagtaggaatcttcgtgaagcaataaatatcactaaaatacttcagcacaatttggctggggtgagaacagaaaatagtagcaactggaaatagcattcagaatttgattatagaatacttttcagccagagaattaccagggacctcctcaaattgttcattttaagagttcattgtaaccagagacatttatttccat

SEQ ID NO: 32029 - DNA, 1700 bp, Bovine  19866880396434
  misc_feature (1)..(1): n is a, c, g, or t
ngggaacctggtgggctgtctctatggggtcgcacagtattggacacgactgaagtgacttagcagtagcagagaggggagagaacgaataaagcaagaagtgcagtttataaattctgtttccccaacatggtcataatttgaaatctactctgcatatttatttcagatgtaatactctgtacatgcacaattgatttaagacattctccatgatgagcacaagcattttaaccacatttggttctcaataggaattcaagtggaaaagttttttttcttttcaattccagtatgcccttattttggatgttgttgcctttgccagtcagggggaatgcctttgttttcattttaaaaaggaaagatggtggagttagccatcatttagaggagaattaatttgcttttccaccaagtagagtctgtctggttattctgaagcataggaatattctgaatcttctgaatctgaacagattttgttgaaatataatattaatatgcactattgagaggattttgatgatttataaaactcttgtgaatcatgtttgagagagagatagggaagagtctccatagatcaagtaatgacatgtatgccatttgtatatttttcatttgactatgtttttgggtgttgtgttataactgtttgatagataaagggaattgcagtctttaattttagagggagataataattgcagtgtgacattggagggtggtttgtgagtctgagttggggaatttgtgagagtcccaaggttggtcctgagtgccctggttatagaggtgctcaggtgcccaacattgcagtcctctgagttcagggatgacaagtaggagaaagagatggctgtaccttgtgtccctttgcagtctgcgttattaaagcttgtgtccaccggtgatggggcaaagtggggtgggcagaggagaggcctaattgtacattgtacatccctacactccctgctcatcccctgctcatcccctgccccgcctcccacatcaatgtctagagaaatctgaacatatttctactgacttcaccacgacttttaatgagatggcattagactgttcaatggctagggtcttgcggttctttcagagcaggggatagcaaaatcctggctttccttgtatttatgtacatacttatcaatgaaggcttattccaaatgagctatcactatggatgtgcctgtctttatgcatgtttatgcttgagtgtgtgtacatatatatgaacaagttacgtaacaagtcagcttaaaggattagttttgccttctgatccgactgatgcatatatgttagaactttgaacttgttcacccaataaagctggggtaatgtaagaatcttctatgtttttatgccccatttcagcattctgaggaactctcaggcagttcattgcttaaaaggtagttaaataaagatgttaaaggattaattaaatattaaccacatgttatgccaaagttagtgccgatacctaccaacaaaagagattaatctctgagcctttccctaaactgcaggctaaagcccagtcacatctcaacgtgcttgtttgcagggaggctgttttatctctctccaaggtggtattgatagacttatggaatacgttttcttgttctccagaagcttgtcagccctccactgacatgtttttgcaaata

SEQ ID NO: 32030 - DNA, 1298 bp, Bovine  19866880434823
  misc_feature (1)..(1): n is a, c, g, or t
ncctaactctcagtcctatgaggaattaccataaggttttttatacagtgtacattttaaaagacattaatggacagtggctctttgccagatgttttaccagaaatgtaaagacatttctcataacatttcttcatagcagctaaattctaggggttttaaaaatactagataagtagcagttaactgcttcaataagtcaattttcagttgtgccgtgccagaagaaagaggagaacatttatggaagtggtctcagagaactgaacttagtttttcgccaccccaggaaaatggtgaatgttacaggtagccttcctattgacaggtgggggtaaattcactggtggcagtgctggttgtggtggtttagtcgctaagtcgtgtctgactcttgcaaccccatggactgtagctcaccaggctcctctgtctatcaaattttccaggcatgaatactggagtaggttgccaattccttctccaggggatcttccggacccaggaatcaaacctgagtctcttgtatctcctgtattggcaagtgggttctttaccagctggatcattggggaagcccaaaagatttataatactgtgtctatatatctctcccacctcattttttttgatgcctttgtcttttgcacagaagattgacattttttgtcagttggaaccagcattacaaatcttttccacaggttttcaaatgatatctcaattgctacagatatgaatccttctggagatatgattacatatacacacaaacaaaaaaatttggaaaactcagcagtggccacaggactggaaaagatcagttttcattccaatcccaaagaaaggcaaggccaaagaatgttcaaactactgcacaattgcattcatttcacatgctagcaaggtaatgctcaaaattctccaagccaggctcaacagtccatgacccagatgtacaagctggatttagaaaaggcagaagaaccagagatcaagttgccaacagccactggatcacagaaaaagcaagagaattccagaaaaacatctacttctgcttcattgacaatgctaaagcctttgactgtatggatcacaacaaactatggaaaattcttaaagagatgggaatgccagaataccctacctgtctcctgagaaatctgtatgcaggtcaagaagtaacaagctagaactggacaaggaacaatggactggttcaaaatcaggaaaggagtatgtcaaggctgtatactgtcaccctgcttatttaacttatatgcagagtacagcat

SEQ ID NO: 32031 - DNA, 2536 bp, Bovine  19866880541300
  misc_feature (1)..(1): n is a, c, g, or t
ncccaccaggctcctctgcccatgggactctccaggcaagagtactggagtggggtgccattgccttctccaagcatcaggctagcttgtgtctaataagaaacctggtttagtggaagttctcaagaaatatcggctctataaatgaatgcatgaattgttcctcagttggaaatagcttcaagacagattcttttgctcaactcctttggtcaaaaatgattcttaaaaaaaaattaaaaataatggcaactatggatttggtacaaagaactgattttaaaaaaaaacttgtcttattcgctttctctgatatgacacagaaggtagctgctgtgatttctagacttttcactcttccccaaatatctcaaataaacaatttcacctgactccgtgtgtgtgtgtgtgtgtgtgtgtgtgtgtgtgtgtgtgtgtaacataccgttcttatttactctggggctcacctaaataaaacctcctgtggaggagaaacagatgtgcagaaattaggccagaaagaggggccatctctgtacttacttcatttccccctgtgattctcttcgaattcactccttcaagcaggaagcacatgggctttcatctctgactgtgaaaattgtttatgtggcgcattcctctctcccaaatccccatttattcattgtttgtgcctaaatccaacactctgtgatagttttcctgctgagtgagagtttctcatcagcctctggatgggtgtgtgtgcatccacatggctgcagccacagcttgtataaatgcccactctggggggtaatcaacacatttctgcctgttgtcctacacaggaggttactctggagaggctgagagcaccttcaagatacttgagtcagtacattaatgagtcatccgtggaaaaacattacttactgtccaagaggagcagcagttaaatagctaacattaggtgagcatttaccatgggccaacgagctgcatggtttgcacgcattatccaattctctgcaaatctgcatagggactaccaccgtaatccacacttgacaggtgacagaccagaggctgagacaggatcagcaacttgtgatcagccaccaacagaaggcagagctggagtccaaacccaggcctgcccctgctggagcctaggggttttcttttttcctttttctaaaatggaagtataactgatttactctactgtgttagtttccagtgaattagcaaagcaattcagatacacgtgtctgtgtgtgtgcgcacagtcaggcttgtctgactctctgcggctccatggattgtagcccgccaggatcctttgtccatgggattttccaggcaagaatactggagcaggttgccatttcctactccaggggatcttcccaacccaggggtcgaacctgtgtctgttgtgtctcctgcattggcaggcagattctttaccactagtgccacctgggaagccctatatattaatatatgtatatatgctctcttttttttccaattcttttccattatggttactatattgtggagcctaggatactaactgttaccctgtgcttcctccttccaaaagcaaatgaaaccacccttactcccaaacattttgggtttcctctttttgctagaattttattttccaacaatttgatcagggagagctgccctggttggggcgtgagctgacggggagcccctccacctcctctcaccccatccttgcctggggtggcctttccacagcgcagaatgcagtttggccatcactgtgctgtgagagtagaaacagcagctggtgtctcgctacaccccccttgcagcgcctgcaatgctgtgcacagccggttctcaatcactgtctcccacaggaatgtggttctgagagggggcattaccgcctgcggccactgacaacttgagcttccatgagctgccaacagggcacccaaggacagcagcgcctctggcctttgagctctagagggagaatggtctccatccggaaggcataggtgtctgcacaactgtgcccagagaggagactccagaggagactgccctgggatgtcctggcaggagctgagaggtgggggagtagcctgctaaactcaaatggatcttcctaaagggatctttcttttaggctttgtttttttccaatcgtgttttccatgcttgacattaccaggtgacagctcctcctccgtggagaaatttgttatcccactgggataattccaaagttattctaagagttcctgctcagaacaaatcaagccaatcaggaagctcctccacttgggctgtgcctggctgattgtttcctacttggacacttcctgccattgttcgatggcctgttctcagaggcacaaccatggggccctgccccttcctctccggagcccagggccacactggtggctttgggttgaggtatatatgaggctcagagatcaggtacttggctgggaggaagatgcctacaaagaaaagaggggcagtttcggcccag

SEQ ID NO: 32032 - DNA, 3319 bp, Bovine  19866880580903
  misc_feature (1)..(1): n is a, c, g, or t
ntggcatatgactggtgatggaaatatgtctataagatatggcagcaagcaagcatgggaacggtgtcagggaagacttccagaaagaggaaatacctaagcagattaataagtagtgataacccagggaacaaactgacagaacttagtggcttgtatacgtgtgtggtgtttaccaaagaggggcaagtcagaggtcatggtaacatccagagactcagacacagaggacagacttgtgttgccaaggggcaggcaaggtagaggagggatggattgggagcttggggttagcagatgcacactactgtatttgagatggataagcaacacggtcctattcactagcacaatgacacaaggaactatattcagtattctgtgatgaaccataatgtaaggaatttgaaaaagaatatgtgtatgtataactgagtcattctgctatacagcagagatgagcgcaacgctgtaaatcaactacacgtcaataaacagtttttgaaaaattaaaaacgcaagataacatccaggtttccatcttaagtaggatggattcatggtggtaccagcagcggaactaaaaaaggccagatggaggaacagctctgtgaagaggataagtttggcctcacatatgttggatttgagatgcttatgggccacccaggtggagacactgaaaatgcaattgttatgtagaggctggagttaggagagaggctgaaggtattggttgggtagttataagtcagtgtttaggtgggaattaaaactcgagggtggacgtgattagccaaggataaagtatccagccaagtgaacatttagtgaagaagtagaagaggcgcctgtgttgaggatatggcatctcagcttctgaaggggaggaggggtggtcctcagagttttataaaaggaagatgtcggtaggttcacactgaagggtgtccattagatgtggcagttaggatgtcatggactttaacaagaccagattcaacagcatggcaggtgcccaggtggagtggagtgggttgaggggtgactggggtgtgagaatttgagacagcaagaggcaggcaagtgctactggggaaatctggaagagagattcagcagtaataggaacaggactcagggtcaagataagttcacctatttttggtgtgagagaatttattctaaagggactaacgggaaggaggcatcctggagataagttgaagctatagcggagaaggggtctttgataaagtgtcatcccataggcatttgcacaaggtcaggtccacagatggagtcattgaccttcacagggagagtcggaggtgaaaggctggatgagatatttttttctcttcctacagagaaagatatttcttgggaagataggatttaagttactgagaaatgtattgctttggaaggagatcatctcattttcatgtaatcaaaattctgtatttctgatgaaacagactcacacgagaatcacacccaagacatcaaggctcagcgcctgcttggaaatgattttctgcagcggaaatcaacttgcatagattctgacagtatgagccatgtgatttcagatgagctaaatatacaagaaaagaataggctggtttccagagactaagaaaaactgacagagaaattttcattcatatttacttgattaaatttgattgtaccaacatcaataatgaaaagtgctaatatgtcccagcagttcactcagataaatatagaaagcaatccagtattgatttttttcaatgaatatacaaattttaatacgtttgagggagtggtgaaagtagcaaaaccaagctgagagtttacaaaatatatatatatgtatatatattttgcattgctctgtcttattttgttttttattttattttttaactttacaatattgtatttggttttgccatacatcaaaatgaatccgccacaggtatacatgttgaatagcaccatctccaagttagtttcagtatagaatcctttaaaaatgtgttcttgctttgctttgcttttcattcactcaacaaacatttattgggcctctatgtatacagaaaagaatatatggtccagtaataaattcataaaatattgtcctatttctcagtaagcttgtactcaggagaggatagtacaggttggggaggatggacacatttttagtgccccagtaccaggtgaggtataccaggtatctaagagggagttggtgattgacagggaggcctggcgtgctgtgattcatgggatcgcaaagagtcggatgtgactgagtgactgaatgaactgaagagggctaaggatgctcttagctctctaaggatgccatgatggggattgggaaggagtgaacacattaggatgagtgggttgaagaaaaacattactaaggcaacagtttgggctttgattatcagatatgtttccagtagatagaattgatagagggaagtccaggctttttcacagagcagcatgctctctgttctgtctaggacacgggaatgtgtaaggctgggaaggggtaagagcagagcatggagggtgtgaccttccagcctaagaaggtcaatcagattcgggaaggagatgatgggcaaccatcaacttttcaacaagggaaaggatatgagctacacttcaggaattcttaaaggcaccattctcttcttggccatatttctgtctccatgatgacgaagggggaaaaaatgaaacgagcttgagtttccactgacaccttgcagtcaaggaaggtcctgttctttcacaaggagaagtggaaatcctctgtttatttaaaggccattaacctttttcacagtaaaataccaaatgatctgtggtgattccagatatactcatctaaataaaaggaaactgtctccttgcaaactgagtcacaaatgaaaaatatttggggagtgccatagaaacaagtgcactgttttcctgaaatatggaaaaagaattttgtagcatctagttgtgtgaaaggagacagtattctgcccagtgtcctacctggaatatggaaacagaaagctcttaagatagatagataggtggaaggatggatggacagacagacagatggatggatgatagatagatgaatagatggatggatggatggttagatagatagagctaaatattcttagaatggaggggttacataatcaggtcccaggtagaactgaggatccaggcagcaaaaactgacagggcagtcttcagaatcctgctgtaggaagattagccacgcccctaccattat

SEQ ID NO: 32033 - DNA, 725 bp, Bovine  19866880586783
  misc_feature (1)..(1): n is a, c, g, or t
ntgcacagggcaggggttcggctagcaagactgtcatggtggcaagaaggctggtgctggtataataatctggagaagacagccatggctccctgtgggccagcaacccacccagctgcctagtaagtagcttatatattatatcccaagggaactggaaccatgaaaaggaaaatatctcatacagagggtttcccagcttaacctctgcggaaacgcctttattctcatcttgaaagcacgcagcagctgcagatggtttcaggcaggcctgcagaagtcggccgtgttccctctggggaggccagtgggaataagagcagctgccaggggtttcacgtggagagccgctcacatccaaaagtgggcaagtgcgagtgtggctgcctccgttggccccgctctggcccgtaaccttgaaaagcactgagagattttcctaccctcgatttctctttcgaacagacccagaaagtggccatgagagatgattccctcgggccaatgttcaggatacagtgaggggggccatttccagacctacagccttggccctggggcacttagggactggggcaagcaggactgtgactcccaggggcaaccctatatcctgcctgcctggtttttgttttgttttacatacttatgtccttattttaattgtttggctgtggcgggtcacagtcgcatcacgtggcatctcttgttgggcctcaccagct

SEQ ID NO: 32034 - DNA, 1225 bp, Bovine  19866880631104
  misc_feature (1)..(1): n is a, c, g, or t
ncagggtggatctaaatcagtggttctaaagggggagaaagggaatatgtgcccctcgtccagaggcaaggaggttgggaagacaactgagggagagggactgctgctgggatctactgggcagagatgaaagacgctgctgaacatttcacaatgcagagaaaaagcgccacaacaaagaattattgaaccccaaatgttaacagtgccagaatgaaaaaaccctaatctaaataatcactgaaagttgagtttgggagctttttagatgagaaatcttcctaaccaggctttactttcaagcatgagctgcctaaacacttgcaagatggattgccagacagctcttttgtaagtaaagctgaactgccaactcttggagtttctaaacgtataaaactgcttttaaagaagatgctctccgattacaattcagctaaactgtttttccaaagatttcaggagaagttctcccaggcacaaggcagggtctgtcactctgccactgggccctgaagatgcccagtggcaaattctaatttcctggtgaaatgggagccacgagggtctctaaacgaattaaattcacatcacgccaactgctcgcttgctttgtgctgggcaccgtgccaaacacctccacatcatttatcccacttaatccacccaacaacccagtgaggtgggcattattaccggctgtttgcaggggaggaaactgacgatcagcgaggttagacaactcgcccaaggtcatcagctggcttaaggtgggggcctaacctgaaccgaggtctccagtttcccagtcacaagctctttccaccacctcggaaaacccaggtgtcaagtcgtctcaacttcccatgaattttttaaggcaaccgcaacttctcagtaagttcaggttgctgaaaatgggaatttccggggcactgggcgctctcacatacagtcccccactgcagctgtctcgccgcaggtacctgataaatcattccatatcacccgcggaacggggaggatttattggggctggacttcgtgccaggcccaggaaatgccatctttgaaagccgagaggcggattcgccctgggagccgagaaggtctggccgccgcgcttggctggctccccgcgcgggctgtgcgccccctcggcgtcgggggcggggggtcgcggcggcgctggggcctcccggatcaccagccgctccggctctac

SEQ ID NO: 32035 - DNA, 2273 bp, Bovine  19866880668372
  misc_feature (1)..(1): n is a, c, g, or t
nccctaaacagacacttcctcttaagaagctatacttaatatgagccaggcatccttctaagggtttgccttcagtttttcatttgaccctcagagcactttgaggtaggtacctttaatatccctgattttgtgaaagagaatagtcaaggcttggctagggtaagtaaacttactcaagatcatgagccaagaagtagccacgcaggggttgaaactgagacaatctgactcagggcactttatcctgaacacagatgtgtgttggtggctaagatttgtttacctccacacaggacacatgaaacacattctctcagcatcttcatgcttgtgtgccaaaaccttccagaataaatgagatgttgaaaatgcaaaacactctgctgtcaaatccttccactcctaagacaggaagcctcttacaaaatccgggggcatctcccaattccaaacaaataggtccaggctggactggaaccttcagtaacgcctggtgaaccaatatagtcttctactttaatccccgtgggagacatttctgggggactaaatgataaggcgagaaaatgcagaacatttcgctcccattttcattgcagagggactgcttgcaatgaggcggcaactgggaaagcgctcaattcaccacattgggatcatgaaaactctctaaatccgggcttctcgatatcagaatatatctccctaaaattagacgacaggaagagaaaagagcagagatgtccattaagttgacggcccaattctaggaaggtaccacgaggcctggaggaacatccctccgcaggaaggaggcggggttgctgtctggacctcgctataagcaactttcccattggctccttgcaggtctctgagcagcagcccacggagacagcagaggagctggggcaaaagtgagtatagctgtggcgatggcaaatgtaaaatgaagtaggatgcacaaaaacagacaacatgatgtttctgataacaacaaaggactgcgaactgaggtacacaccttttatgactttggccaattgtgtttttgttttctttagataccgacctcaggagaatgtctgtatctaccagataaatatagcatttaaaaatataaatcaaactaatgtgtttgtaggaaaatttagacaatacacaaagaaataaaatgaacagctgaatttcccttcactccatctccatcaatttctttcctttagactttctatgtatcctacttggggaaaaaataaggaatctatctattacccatatgctgcttttattctttacataaaagcaatcataccataggtgtcctattttcagcttactctttctatgccattttccccattgggtccccccaccacccttgtaactgccacaagggagttcacaaatgtcccttaacttcttttaccagtcttttgttgacagatttaggtggttcccaggtgttttatttgctgttataacctgggctgcaatgaatcttcttctacatatatgtactttttgacaatatccatagggtacatttccagtagcgcaactgctgtgtcaaaagatttgagcatttaaaactttaataggtccaaactaccctcttcaaaacactttctctgtgttttaaatgatataaatctgatttgaaaacaggactcaaacaactaataagagttttgatgatttttcccccctttatgagtcctatccttagtgacccaggggcattttaaatgaaagaaaatatctatcatcttattaataactgtaagctgttcttaaaacacacttgggtgatctgtccttatcatagactactactctatgttttcaggtttaaaaaatgattttttacctcataaacaagtctgttatgactccatcagttttctagaaggaaccaaatttgtacttcttttccttgcactgttaatattagagttatctcatagccaagttgtgcccacttatccataatggaagagggtctattccttctgctgttgttgctattctccatgatttaaaatacaaaattttccatataccaaaataatctctagatggactaaagcaatgtaaaaacggaaacatgagaaaatagaatgactatctgattttagggtagaaaaggcctttaaaaccaaagcacaggaagaaatcttggtggtccagtggttaagactttgccaatgtggggggcataggtttgatccctggtcaaggaaaactaagatcctgcatgccacgcaatg

SEQ ID NO: 32036 - DNA, 833 bp, Bovine  19866880799216
  misc_feature (1)..(1): n is a, c, g, or t
ntttcttgggaaaaagaaaagtccatcttttatgaggagcacgatgctgttatatatctgtattttcatagcttcagcaaactccataatataatccccattttaatagaaaccaaaatacttattatttgaatatagaaaggctagaataaaaattacatcctgaaagtttccaggggtaatttccctggggaatccttggatcagcctcatcctaccaccccttaatttttatatgacttaaataggcctctgtgtcccctctccactccagtctaaaaggtctgaactgtacacaaaaaacttgctgtcagtgtgaaaataccatgtgtattttggggggaccacagactttctgcatcaaagatctgggcagccttaacttttataaaagaattttcagtgctctcttttactaagcagggaaacaaaatgtttcctgaaattaatgacttttttatattttgtgactattttctaagtttctacaggttcatcttttccccatattgcctcttactagtcacctggggctattttttgcaagtcattgcatttttatcaaaagaaaagtacatctcatgaactacaaaattccctctagacttcaggcagtccttctggagtaaaagaacagaaacacagaaagaaatgaatgacagggtggcttttgtgttcctatggttaatgtactgtatggtatatatgtttacagaatgtatctgccttgtgatgttaacaaaatgaatgacaaaaaaaatgagttctgatgtgccatttgaaagtttgccttagcatcgctgtttatgttcttttctgtcctttcaaaatca

SEQ ID NO: 32037 - DNA, 1795 bp, Bovine  19866880858359
  misc_feature (1)..(1): n is a, c, g, or t
ntagaaaaggcctttaaaataaagcacaggaagaaatctggtggtccagtggttaagactttgccaatgtggggggcataggtttgatccctggtcaaggaactaagatcccacatgccatgcaatgctgaacaacaaatggcattagaaaacttgaatatctctatgcaaaaaacaaacaaacaaacaaaccagcaacaactgatcatatcttgcaccatatacaaagactgactcagaatggattacagacctaaaatataaaaacttgtaataaagaataaaaaagaaagaacaaaagtgatacacttcattacataaaacttaaagctttgctttttatggtaccaaccacagatagcaactcaaaggcaagtgccacctgcaacatatatatgtcaaaagactaagacctgtagtaaatacagggttcttataaatcaatatgatttataaagaaagacataaacaattcaatataggaaaaagaacaaaatataggggaaatcttgaacattattaataaacaaagaaatacaaattaaggattgaggtgtcactttccacctatgaaatgcattctctccaccccaccaaagtatattttaaagtatcatgtgttctgtgttggggagggtatgaaacaaaagaccctctctgtaatctgtcagaattataatgaatagttataaaagtataactctgttggaattataaattgtctttccagaaggctatttcaaaagttttgatccactttatcagaaagagtttactagagaaaatgctcttcaatatgtttgaagatttttgtaaagaacattcaatacagagcaatagcaaaaaaaaaaaaaaaaaaaaaaatcaaaacagcaaataattggttaaataagatgacatctaatgactccccttttcacttgaaataaaatcaaagcaagcccactcctggtccattgcctgcctttcttacgcccctcaccttgtccctctctcctcctcatttcccactctagccacattggccttaccgggaaatctgccatgaaagaggcatgcagggcaggcaggcagggtggggtccccctaagtctggctcagaatcaaggggaactttgctctccctttgccattatcccacatgtgcctatctccctggagaatcctccagagttctggctgcactatggggtaagatgcaagatctctggctattaataccacctaagtggtgccctgaccccattattaacatctgacttccagtctcatccagttcttaacacgcatgagcagctggatgccaccacactttaccttaattcttcccccagtgcaaaaccctagatgaccattaagatcacccaagaggaacattaaaaagtaccaagcccaggccccacctccagagactttgattttatcgttctgggcattggaggaagctgtaaacgctcccaggaagttttaacgtcagccgaggtggaaaatcattgctgggcaagtggtaatctcatggtccaggctgataagcagttcctatggcttaagctggtttgagctctttcttcatcagtttgaaataagctatttggttaaattttagaagacagcactgggtcggtcatttttctattttagcaattatgtccttgcttcctttgctcttcagagtctgggtttcaaccacaggttaatgggggttttgacacaggccttggagatcttgttctgatcacgtggctttcaagagtcgacactgctttattattgtaggatttatcatccttatcag

SEQ ID NO: 32038 - DNA, 2306 bp, Bovine  19866880862113
  misc_feature (1)..(1): n is a, c, g, or t
nacgtacataccccagtaaataaagcctgctccccacaaggtagagcagaatgttgtccagtctgtattttttcctgggtcaggattctttatcctcaaaggattgcctgtcatcacccaccaacatatgctttggcctcattgttgtatttgtcttttattcacttaaaaggttaactggatggttgaattacaggattctagccaaagtatgcttcccataaaggagttcccagctcatcagtaagctgagctggtttggcatctgtcttacattagtaaggagctgggcatctgcagtctgagctcatactgcagaggcatcagcaagaccttgatcagccttcacaccatcattgctggatgacaggggagcagcggaggtcatggttcaaatctgagctggcaggttgtgaggacaaagcctgcagggatcactgtctgttggaaactctttcattttaattcaatgtcagaatattccaactccaggtcttccaaccccagacaaagtgaaagcaaatctaccttttctctttccaccttatcattgcctccagatttttttcttttggttaaaattttctcagataattagatcaggcttcccagatggcacagtggtaaagaatctgcctgccaattcaggagacagaggagatgcgggtttgatccctgggttgggaagatcccctggagtaggaaatggcaacccattttagtattcttgtctggaaaattacatggtcagaggtgccaggcaggctacagtccatgggggtcacaaatatcagacacgactcagcatgcatgcaatggaatgcaagatcttttccacttctggctagtatgtttgggtcccctttactaataagccaactccgtctccaaaatgtgctatttctattaatgatgctatctatcggtgtctctaatctctctggttctttaatatcccatccaggaaactttttttcttctctgccttttctccattgtctggtagagacctagctgaaagcctgaatggtattggagatgggaaggaaatagtctttatagtcaatacttcaagttgaccaaaagtgttggctgtcctgtcctttttattaatgaacttgaagcaacccttgactctttcctcttccatcatctgtcatatctagttagttatatatgaaatcagattctttaaaaactgtttgcacatgcatccttcatccagtaactttcaacaaatccctattacaaattagaatccaatacattagtcaactgtttgaaccagtgatgaatacttttaggaacttatcttgcaaatatagtcatagtcatgcaaaaacacctctttgcaaaaattatcatagcattatatataatagcaaaagacaggaaataactacacccattaattcaggactaataaattattattcattcatacagtagattactgtgcaggtatgaaacaggagattctttatttactgatggcaatgatctctaaactctactgtcaaatagaaaaagttaacatttgtgaaaatggggtatgtattcatgtatgtatgtagtcagtcagttcagtcattcagtcgtgtccgactctttgcaatccccatggactgcaagcacgccaggcctccctgtccatcaccaacttccgggagtttacttaaattcatgtcgattgagttggtgatgcaatccaaccatcttgtcctctgtcgtccccttctcctcccgccttcagtctttcgcagcatcagggtcttttccaaggagttagttgccccaggtcacaggactgggttcctcctccaggcctccctgcctgccccttctctgaggtcctggtttcctgtctttcttgcagtagccccggctctcaaattatctgccccttccccctctccctcctgattcactgcagactgagaaaccctgtctctaagtgtgttaccactgcaaggtaaatcaggagtctgcaggctctgaggaagggggactctgaggaattaagcacaaaagcctgagcccagagtctgatttccaatcaggctgctcccggctgcctttgcaggaccacctccattcactcagtcaccatctggctcagatctacctggggcctctccagagatgaaagaaaacacagagaccagtcccagagggaaggcagaggtacagacggctgagctgtgatactgctggagcttgggcagagctgggtctgacagcagcaaggctgcagagccctgggagggagccccagtccccagcgaagtccacaggggatgggattc

SEQ ID NO: 32039 - DNA, 1456 bp, Bovine  19866880872012
  misc_feature (1)..(1): n is a, c, g, or t
nttaacatagaagtaaaataattctgcaggtattgacataattgtcatgtacattggcaaaataaaagtattcctggggactctataaatatcttagcatattattgtacaaacagattcacagggttctagagttgggggcaggtactgtagatggtatctggtcaaactcaagctaggatcccagggtagttaaaaaccttgtagctacagtcatcctacgaagggaccattggcagtgatttaagctgcagattcttttaaatgctccaagatgcacttctgagatcaactcgggataacaattcttcaaaaggcacatacctccctgcgtgttattagagtgttggtggttcccagtagttgtgggtaaacagctttctagctcctctccacatttctgcgactcacaggacatgcaatatgacctaattaacggatcagttcgtgaaggcggtagggccagtgtgtggggactgagagatatgaacaggatttgagcagcatcggcagtcaaggaatgtgagcttcaagaatgatatgttactgggattgcagttctgtgtgcataggaatacacacactttcacaagctaggatccttcctcttggaagatactgtgaaaacataatgaatccaaatagcaaatgcctttttgaaaaagtattctgtattaaaagtcttctaaaaaataagtctacatgtacttttgtttatcagttaagaaccaatatgcataaatgtatctactgtggaaatatacagatgcagaggcttgaaaggaattgcatttgatgtggttaactgcttcgtccaggctgcttttgaaatagagcatccagattaatgatcagttatggctagcagtgattacacagagcatggacagcttacaaatgagtggcagtcgcccctggaattctttcttataggtatcatccatcttgctttaggggtgtccttttgaaaatttgcacagtcttagggccattttaaaaaatgtcactggtcgttactcagtattatgacaaatattctggttgtctggagtttgggaggttttgggttctgtataaatgggaatttatttacaatctttgctttgcagaatcaggaggcatctgttccaattccttattcaaacatggaagcccagggacagagccttgccacgaggccttcaaaccacagggacacaccatgacctgggtctccctacagatggcccattctgtctgtaattggctctgacacctgggaagttcatcctcagatggagctctcattagtctgctgctttcatcttttacctatttttacgtatccttaagatacaaaccgaagtttgtatcttaggagcccttcagaacaaacctaagttctgatttccgtttaaatattgaaaacggctatcacatcgtgtctttcccaggccttcactttccatccccttaa

SEQ ID NO: 32040 - DNA, 1589 bp, Bovine  19866880886887
  misc_feature (1)..(1): n is a, c, g, or t
nggccaggacttggtaccgtggttggtggagccacgaagacccagagtttatcagagattgctctggtggcagagtggaggcaagggtgcttgcctgcttgcccagtgtcccattgctgttggagctggtaaattgctgcaggcttctgaggtggcctctctgttttgtgcaggggtcacctttagctcttattatcgctcgtgtcattctctgtagacggaagcccaaaagaagcatctgaaccaacttcagctgaaagcctgattgttgatggaggccaatttagagttggaatgtggaggttatttctggacactgtgacatcctgttcaactttcagaggagcctgggaataaaggggtgactcagtctgtgagcttatttttaggaaaagctgagaattcagtctagagccactcacagtcctccgtccctgccagtgcagaggtgctgctggtggagaggatgctgagcagaaatgctgtatttatcatcaactgctacccggtgcctcctacacaccagcatgtggtttattgatttgaaaacaagatgggaatcaacgtaaataaacctttgagtcagaggagcctattttagggcatttacatttgagaactgatttggagctaaagaattagtattgtaagtgcttctgtttattgggcatttaatatgtattaatacaacatattttgctttgcgaacatttaatgggaactctgatactctgttgaaggtatagtgctgttatcactgttttagtaggcatggaaatgttaactcgaagttaaatattattctaggcaaaggtggctgagtttgaatttgaccccagatctggctccaaagcccatgcaaaggatcactccaggtctggcaaataactgcgtctctttggtcttgtgggttcgatctcagggtcaggaagatctcttggagaaaagaatggctacccactccagtattcttgcctgaacagaggagcatggtgggcttcaatccatgggattgcatgggaatccatggacttcaatccatgggacacgactgagtgactgactaacttggtcctgtgtatcactaattgatcatgggattattgccagttcagctcagatttggcctcagaatccttctcaacacagtgctctcagtagagctactgtgaccaacctagcagcttagtatttgagataaagcccatctgtcatcttaattttatctttgctttagttcaaaatggagactttaagtctggagaatctgttattgttgatttctacagctctatttatagccttttattttctaaacacttggaagcagtagagcattcactacagtttccttttacagtcagtggagactctgtattctttaataggggtttctgactgccttggagggaagaatgacatttgaggaccccaagccttgattagacaattggcttatgtgtgggtgtctgcagtggtgactgggagatggagaatgagccttaagaactttggccatttatagcagcaaaccttttaaatagcccagtctgatgggcggatgtggtaggcagcctaagacaccaaga

SEQ ID NO: 32041 - DNA, 3331 bp, Bovine  19866880895852
  misc_feature (1)..(1): n is a, c, g, or t
ntcctagaaaattgctcattcttactccatagacataattattctttgagattccaaataaataatgactagactcactggatgcttactgttctaaagattaactttataaatattaatttggttcttgtaccaactgtatgaggtaggtacttctatcaacgtgccagttttatagattaggaaactgagatagaaaaacttaaaaaaacgaaacaagtaacttgcccaagggtattttgctgctaagtaatgaattcaaacccaagcacactggctctagaactgcgtgctggccactgggctgtattatttctcaaagcttcattataaaagtcaatcaaaatttttagaaatacatactaagtattccagaattatattgcctgaggtctgagattgcttcaaatattttcgtacagagtggtgggaggaagacaggtagatagcatagatgaaacaggagtggtaaaatcttgataatgttaatataattgataagtccattggcatcatgatagcatttcctaattttcataataaaaaatagaaaccatttccagaggatttcaagaccttcaaatatttgtacccttactgttaatatcaaaagactttttaccaatgatctgggtaattgagatcaaagcaatgagtttcattaagttactaatgtaacggtgccaatgtattaaaaattaaaaatttcctacataattgccagatgggctggtcatatactttttttttaaaaccagtaaaggttgatcttcttgccaaatatatttgatagaatagcaaaatgtttgagttagagtagacttctaagacagcgtctccccgtattctcatttcctcgctgctgctgctaagtcgcttcagtcgtgtccgactctatgcgaccccatagagggcagcccaccaggctcccctgtccctgggattctccaggcaagaacactggagtgggttgccgtttccttctccaatgcatgaaagtgaaaagtgaaagtgaagtcgctcagtcatgtctgactcttagtgaccccatggactgcagcctaccaggctcctccgtccgtgggattttccaggcaagctagggaagttgaaacttggagaacctaagtgatcaatccaagattaaagtgggaacataacatggttgtctgcagccaacctcatggctggttcatgagagagcagaaattaaaacccaagcttcctgaactctgaggggcttcccacctcccatcaaaggagctctgcctggtaaagtcttatagccacccacatagagatgcagaccccaggcttcacttgtgattctggctggctacatcaggcagtctggggagtaaggcaaagaaagatgacctgccttcatcctgggtctgcaggaggtgggtcacgtgggtcttgaacctcccctggtcgtttccaaacttttgtgctttaatagccccgtatattttgtgtgttttctctacattccttgtttacagtccctatgtctctcacaaggggcatagttgaaaacatcatgactgttgaacctgaagctacttctcagaggtgcatttggggctctggcaataaaacccactcctacctgggccagaagtcagggccaggcttttccagagagggtgggatgcatgcagtcgtggctgcagtgcctgacatcaccacaccactgcgactgaggacctgatctcatcctgagaattcctgtttggcatctcaaaagctggaacctcacctttcccaagtctgtcacacccctttcctacaacatggaacctgcggttgttggcattcattccttaagacctgggaactcaaacctaaatgctttcaggaccatggcaggtaaggtaaaaaagtgaagctggctgattgatgtaagaccaggaagaacaggcttagttctcactcaggggttttacaacccctgctgtccatacgaaaaactcgggctagtcatctgaccatcggtgacctctgatgagaaagagcctgggaaggaaaccaggagacctggataccatcgccagcctcctggtgactcagcagagccttccctttgcagagcctcagttttccttatctgtaagaaatgggcctttaagattcaaatagaatacatgtccccaaaacaaccagagccaatgtctgtctatgtgtctgtctgtctgtctgtctgacatatttgcgaaatgcttgacaggtctctttggtctaactgactttagaaccagtttccttgaggtctttgttggatgcatttgtgacattaatccttaagcacttggatccttgtaataaaatgacctgcacttaaccatcattctggtaccacgctctatgtcacaggttgcttttttgccagtgttctcttctttccgaaagctgtcatgagcagacaagcttattagaaagggtgttctcttcgtgttgtttgtttcagggaaaatagagaaagtcagacctcctccatcccccacacctgaaggtcccagcttgcagcctgacttagcccccgaagaggctgccggatcgcagcggcccaagaatctgatgcagaccctcatggaagactatgagacacacaaatctaaaaggcgcgagagaatggatgatagtagtgtaagtttctcctctttcctctttcctgcatccaagggtgaacgtcggcctggtgtatggtactgtggatcaggctctgatgtgtgtgcgggtctctggccagcatcatgggaccagaaccaattttcagatgtgtggttttaacatgcctggagttgggttggggtttgtcttgtttctcaaaaacattgatcatgcaaagagtgggtctttttactgccaagttttggtctgaatctactggcacagcttgtacatgagatatgggatgtgtagaaagataccacgcagggggaacacagaaagaaggacgtaagctccctgaaatcacccacagacaccagggagctgaccgcagtcattgctcgcctgctctgtatagatgttatttctctaggcaggagtccccaacctctgggatctaatgactgatgatgatctgagatggagttgatgtaataataataatagaaataaagtgcacaataaatgtaatgcacttggatcatcctgaaaccatccccccatcccgaccctggtccatggaaaaattgtcttctgtgaagctagttcctggtaccaaaaaggtcagggatcgctgcagagacctgtgatgaggctgacccttcagtgtcagctcagggcagtccttgtaagtggtacccagtgctcagaaggctca

SEQ ID NO: 32042 - DNA, 1264 bp, Bovine  19866880943845
  misc_feature (1)..(1): n is a, c, g, or t
nggaagctacacctttttttccaccaaatgagtactactgaagatacatggttggttagaaagactgcaagacacccccctatctttgcataagtaggatatatgatctaatgaacccagcagactgacctttgcaaatgactatgtctccattctctcttctttaacctttttattttgtactggagtatagccagttaacaatactttcatagtttcaggtgggcagcaaaggcactcagccatacatgtacatgcattgttccctattctgttttgtgaagcatcctggggtaaagggtgactattattccttaaggactctttgtatgcatataccaactctctgaaaaggcaataggtgttttttaagaaacggtgatttctaaaattgtcttagatttcttaagccaaattcaaagtctcagaagtaccctattggcaaaaacacggcagttagccaaaggccaactgtagaagaattcactcctggtagtgcagtcccaggcaacattctagactaagtcaacattatgcaacagccttattaaaaactggcagggaggaacctgccaacttctagaaatggttcatcacctcacaaagataattggcctaatataatgcttatgttgtggctaaagtccaacttctggccaatgtccacagcaggacatttatgaattggggttttatttgcactttgattgtgaaggtttgtcatttattaccttatgcaagattttattcacggattcctgctacaaattattagatggctgaaattcatgtctccattcctttgctcacgctgttgttctctttgactataatcccttttcctccattccctcctcccttctttgacctagacctcctactcaatctttgatacccatttccagaactctcctctggaaactgtctggtttctgtttcctcaaggcatttgcttcccactatagtgcatttattcatccaagagataattgttgaatgcctgctgtatgcaatcactgtgctaaactctaggaactcagcggtgagcaagacagagtccatgctcttttattaatttggaagaaaatcaaccgtaatataatttaagaccaaatcatagcattctcactcacaaactttcacaatacaagttcctctcttttaggaaacaaatggtcttctgggggaagaaatacatttcctggtagcctaattgcaaagaaaggataacaggtcctccaagaatgccaaactcagccaaggg

SEQ ID NO: 32043 - DNA, 1546 bp, Bovine  19866880972363
  misc_feature (1)..(1): n is a, c, g, or t
ncaactcccaaagtccagattcctaatcactacactctgctgggggacctttgcatcatcacacatggtttccagcagagatgagggttgtatacaaccaagaaagtgtccttgggagccaagggctttggaaggctacaatggaacctgtacttcttgaaagaatctgaatgggccagcctccccagtcatgatgctcactcacaatggatccaagcccagactcttccaggtccttgagaagggagaaggagtatgtctatctgtccatccacctataccatgaggtaaactttggtatgctctcactcaatatcataggtctcaaagactttcagcttaaaataaccacttctgttgaaaattttggaattgggcagagctgaaatcaaacactggctctttcacttcttaatggggtcattctgggcagcaagtcactttatctctcttctaagattcagttctcccaactgtataatgggtatcattatcatcacaactatttcatgagagtgttctggggatgaaatgagaatattaatgaattcatggaggccccaaagttaggtcagtacccaggacagaggacaagaccaatgcatattagacaatacagtccattatatcatcatatgttttacagtctatatggatatattttgaaaaggatgggaatcagaccagggctagatgtgctcagatgtggaatgccaatgtggcatgctccgtgccatgctgagaaagaacagtgcatcatggacttaaaaatagcaagcacaaagaacacactgaatcttgagcaagtatcctttgtgattctaacgaacatttctgcggttgccttttctagtacagctatttgtgggtgactgtcatctctttggttgccaaaatcccataatataacacacacatgcttatgcctgatgtcgccagtcttctgctttgagtgcctcaagaatgtggaaaattaagtgaattctggtatccatcagagactaatgtaggcactcgaagaatctcgagtcagaagtagaaatgaaccaggccacttgcgtcttgaattttatttctaaaaagttgtatgaccctctataggttagcaattgagacttgaatcttttactcagtgaatattttgatgtcacatattttagaactgatggctgttgagatgaaattagtcacctctgggatgagtcagttacatgtggagtttttgtttcctgagaatttagcctctttccccaattctggcctgtctccaaaactacttccttctacaatagtgatattaatatttcactgcacaggtatatttgtttaggagggatttttggccaacctcccaaattagaggatctcagaataccatagctgaaagatcctgagagacctcccactgaaaacacgagggaaccgagaccagagaggatgagagatttactgaaagcgacacaacgaattagctgcagagctagaatcagaaccttggctttggcagtttgttactttttcatttaccactgcataggtttctcat

SEQ ID NO: 32044 - DNA, 918 bp, Bovine  19866880994638
  misc_feature (1)..(1): n is a, c, g, or t
nattgaaggtaggagaagagggtgacagaggatgagatggttggatggcatcatcaactcaatggacatgagtttgaacaaactcagggagatggtgaaggacagggaggcctggcgtgctgcagtccatggggtcgcaaagagtccgacacgactgagcaactgaacagcaagagtgatcttcacaggtttcccccggaaggggcttgtcttgcatctgtgtacggtaagcatcttatcaatcccttcttgcctctgacaatcatgttgaaactgctttctagtctaggtggaaacaattaaaaaaagaaaacaggtatcagtttgaacagactaataaaatggtttgtccacatcaccttcaaagggttaggctatatcttgtcgggcatcttatgaataacctccagtattcaaaatccattttccaaaggcctgccccactttcctgcttccaccactgctggctgaagtcatctgacttccattttggaacttcccacaagaattcaagcttggtccaaaacctctccagcctccaaggaaaacagaccattgctgaattaaagacactgttaggtcggttggagccaaaataaatggagccagcttttccttaatgagggggaagcagcctttccagggtggtgacctaatgaggcaagagacaaatgggtgtcaggtttcaaaccccagccccttggaaagccaggcaaatgatattttctttcaggaggaacttcaacaggcttggaggtagcctggagatttcacacttgccctctgagcaagtgaagccctaaattcgataatcctattatttaaaaaacattgtaacagcccttgtccatagaggaaacatttatgtggtaagaatatgaccactgatggaaaaaaaatgggcaaagatactctttt

SEQ ID NO: 32045 - DNA, 1334 bp, Bovine  19866881011272
  misc_feature (1)..(1): n is a, c, g, or t
ncggaatgtgacatgggctctaacaaagcacacacaggggcaccattactggagagtcagttcaggaagtcaaaggtgtcacagaagcagtaacatctaagacgcacacggtttacaaataagagagggaaagacatgtcaggtagagacaagaatgtgggcaaagtttttatggctatttctagttcaagctcaacatgcaaggttggagacatcaagcttttattttaaaataattctcttcattttataaaccaagagatgaaaaactatttcttaggggcatttattcagaaaaaattaaatctggagaacttacgttaactttaaaggtctgtaccaagccatctaaaaagcggacgctacagatgacttctgatcgcgttttttctttgggtaattctgaggtgcgtatgttattaattcttccacccaacgcacgtaaccgggaggtcataactatcgctgaataacctgtaacagaagacacgcctgttagctctaacatgaaaattaccatttccatttgaatgtatctctcagtctatccatccctcacctgtctgccttgatcctcacaaaaccgtccgaagacctcagataaatgtgagttggataacaaaccatgttccctttgagttttgagttctaagctgctttagacaatatttattgctcaactataacacattcagagaattacatggcttatttggtgtcttattatctctctagtctaaatcttctaattcatattttccatgcctgtaattgttgatgttttactactttatatatttgtgtattctacccctaagaatttttttttttgcaccacagaactaaatgcggtacagaaattatttaaaatatgaagacatttattgatcaattagactacattaagaacatctattcattaagaggctatttaaaagaaaaggcaacccagagacagctgtaataaataactacaaagaatatacaaagggctcctacaaatcaaaaagagaaaaaacaagtaggtaaaaaatgggaacatcagttgtcaaagaaatgcaaagtgaaaccgcaaagcagcagtgccacacccaccagaacggctgccagggaatcgggcaaaaccaagggacacagcgaggagcagctggagcgcttgggcaccacgagtgaggacgggaaactagtgcagctaatctggaaaagcagagacgttactttgccaacaaaggttcgtctagtcaaggctatggtttttccagtggtcatgtatggatgtgagagttggactgtgaagaaagctgagcgccgaacaactgatgcttttgaactgt

SEQ ID NO: 32046 - DNA, 1459 bp, Bovine  19866881043340
  misc_feature (1)..(1): n is a, c, g, or t
nagaaggtggcagggacgcctgggagacaacaggtttcagataaccaggcttacgtttgagcctcaggagaagcagtcacagatccccagagaaaggagacactgcacccccacccccagacctctggtctggttgatatcgggggaagtcagcttgctggggcttctctgctgtgatctctaaccaccctgcctccagtatggttccaactaagcctggaattctcaccccatcttaggaatcacacaggtcatcaaaaacctagtttgcagctcaatcaagttttccccttgatttgttgtcgttcagttgctaagtcatgtccgactctctgggaccccatggactgtagtaaaccaggctcctctgttcatagggttctccaggcaacaatactacaatgggttgtcatttccttcaggggatcttcccagaccagggatcgaacccatgcctcctgcactggcaggagattaccactgagccaccaggaaagtcccttttccccttgatcaggatggtgaaaaatgtctcatgctcatcccccagcagtagacactgcagacaccaccatttgggcctcatgacacaaacaagtaagcaagtgatgcaagtaatttgcggtacaggcccgagaggtctctctcatcctgtctacagccctggggggcctcttgaaattcccatggcccttaggacacaattcatcaggatcttcaaacagtgagggttatctctggtgtttgctggcatgaacccagattccgctaccctcaggttccatctccacttgtctcaccaaaactggttctcagtctgttcagctgggaaggactgaacagctgacagtagctggaagtgtcctctatttcaatgataaacatcctgttatctagttttgtacctgggcagaatactctacaaaacatttcccttaaaggagccagctggcatccctggggtgtcatgtagacctcagggcagacctgtgttggtcttggccaagagctgctacctgacatttacagagcaggggtgatgtgagtttcacgactgacataggaaccaaaagaacaaagctagattgcaattcggagtggagggtagaaaatgttctcaagtttatgtcctacacatgattttgtccaaactattccgtctagagtgattttagatttaagcatttaaaggtgtttgaggataagcagcttcacttggcaggatgatgccaaagctgtgtttctaaaatcatgtcctattaccttagctttgtaagatagtactcaatgctgcaaacagtcaaaaagacattggtcaaataaatttgagacatactcgactaaagaaagttttaaataaaacaagatagcttttctttaccagaggacttctccgaagttttagtgctaatagattgtgaatctctagtttaaggatgggtgtacagcacttctcaaa

SEQ ID NO: 32047 - DNA, 1066 bp, Bovine  19866881089684
  misc_feature (1)..(1): n is a, c, g, or t
nctgaaaatataaattcatactaaagatgggcaaggagaattatgggcttaaatgtgacagtcatttctctggattcatctctaaaggttaaatcctgattccgcttcttgttagctgtgtaacttacttacttcacttctctaaatctcagtttcttcaccagtaaaatgggaataaaatagcatcagcctcatcaataagttcatagagtcagtgcacaaaaggcttccctttagggttattattatttttgttgttattgcagtttttgttatgttttaggaaaagacttagaaaacttttagcagaattacttaagagttattcagtagctattgggagcctgacataaatggcacagcttgctttataaaattgcgttctagtcctgagaagtattcattgttatttccttagatttagtttctctcataacatctgagttcacaattagctttcagtagtcacctgtgatttcaaaaaacaaaggccattattaagcatgttgggtgagaatgaaattacaaatcactatgaaaatattttcttttagggggtggttgtcttcttcatagagccaggctcaccatgttggtagaaatgtgtttaaccaaaagatcttggtccaggattcactacttaccatgattttcattcttactggtttagttaaatttttttcttttttggtcttaaactatatttgccctggagatgcaaaactctttccttctccagttttccttttccagctccgttcagagaaatgacaactcatcccaactcatccctccttaccctgaagtagtaatatttggaagtttctgagacttgtgtcagcaggtagggatatttctcatttctcatttctgagctagacctatagtatgaagattcatatcatcgcattgtcccactcctggggccttcaaaggaggagatgaaaggagcaagggtgtgtgggtcacagctggaaccgtacaagccagtgggatccaacaagcaggatattcccttgtacgggaggaaaggattgcaaaacctaagtcggactccttcagcaca

SEQ ID NO: 32048 - DNA, 639 bp, Bovine  19866881186756
  misc_feature (1)..(1): n is a, c, g, or t
ntttttggggtgaggagaccccacccctgcttttaataccctctaaggcagtgatcctcaaagtgtgtgacccactaattttcgctcctccatgagtggttattcctctgtgatgaggtcagtctagaaatccagagaaatgtttagaaactttcatagcaatttgttgaatctaattagaaaaagttggtacctatattatcctgacctttttattccatttcattttttttaataaaaaaaaattatgcaagtattgttctgagatgaattggaaatttaaagagaagaaaataaaatctgacccattgccacagctggttagagaagcattgttctcggggagttcaagttccccggggctgggtggattgcatctctgagaacagagagaccctattggcaaggtccaggaaacatctgggtgggtacttcctatgtgtcactctcctttccagttgcagcaggtgggtgagttttgtgttctattgctgggggcagaggagggactgtgggagaagctgcttttggtcagtggtccttcgggtcttttgcaaaagccgaaattcacgaaggagatgacgctaggcctgggcggtggtgctggggtggtgggggtgtactttcctcccggagctg

SEQ ID NO: 32049 - DNA, 1261 bp, Bovine  19866881196524
  misc_feature (1)..(1): n is a, c, g, or t
ntcggtttcctccccctcaaattacacttgtgacacctgaatgcagacggtttaaaacatcttattaaatgattaagcacatggtaatcattttcaccaaagatactacttcccgttgaatgattcaatatgtgctaattatacaaaatgacatactaatttttctggttagccttaaatgatggtgtttaggactcaagaggtttttgtcagaggtaagaggaagggaacacatgtcattgaagagaacacatcttctccctttgctttctccaacctgattattcccttacccatgctattctttccttgtcaggttcctttcattagtgcccttcaaacaggcattttcccaggaagctggtatggggtctggcactgcccacaccctgtcccacagagcttggtcagttcatctctaactcaaggctcttgttaggtgggaggctctggagtagacatctcttagcttcttcttcagaattctcccttcacgttagacttaatacgggtaaaaaccaacagagcacctcttcctccccaccatgcacaccacttccccagcctcacgtgcctctttctgtccaccatcacttcaaactttgggatcatctctgaatggcccctttcgacccagaaagagaagtcactcccttactccagagccttcagtgactctctactgtcttcaaggtaaaagagaagaaacaacttttatatcttgccacacagttgaactgaatcctcacagcgctgaccagtattcccaccttatttagttatttattcccactttacaggctcacaggaaaaagagttgtccaaggtgacccagcctgtcagggtgggacccggggattcagtctacacgtctgaccctaaagggcacattagtttcattgatcacagaagctcagattctttactgattttcatgggttctgtaactctctctgttactactatttttttatttaaatgtttattttaaaaatgaacttatcatgacagctatagaaaatcagcggcactgctcctgcaactccactagtctacaaacatctctgttcctcacctcaaacaggtgccagccccttgccatgggtcggtggaggatgcccacccagggcctggccagagcgctcgcaggccacttccccctccccctcccccaaggccccgccccttatcagccagctggcacttcacgtgatggacaggcttgcttccagttgctgggttccttccttctctaccatca

SEQ ID NO: 32050 - DNA, 1825 bp, Bovine  19866881202582
  misc_feature (1)..(1): n is a, c, g, or t
naacctcctctgaaataccgacttgtattttgggaagaatctgttcgttcttggctttccattttcaatgagttgatcttcatagtctttagacaggaagttcacatctaagatgtggaatggaggggttcacctttgggaagagggtgaaaagtagagaagatgaaggtagcagtttcaggagatgcgatgctactgcttttagagcttaggtggttgtgagaattacgcttgagaatacagagtgcatggttcattcatctgaaatcctggacagacaataatggatcatcatcatctcccagcagatatgatcacctctcccaggcagcctttagcctcagtgtttttccttggccacctctggaagcaccaggccaactgatatttgcatagactcgcacagctctcagatgaactcatctttcattcattatagtaagagaatcaggagctgggagaaactcaggccttttcaactgtacatctggggaattacaacgaccaatagaacgccagcaccatgagggcaaggattttcgtctgcttgctcaccgccatcatcccagtgcccagacagtgctgagcacctagcaggtactcaccacttagttgaatgagtgtgtgaataacttcatagatacttacaagagttaataatggtgagatgagagaactcacctcatggagatgactcacagctgagcccaatgtgaaaaaggctttagtcttttctctaaagccttttctttagagtcttttctctagagtctctgcttttctctaacaacctttaaaataccccagttttatggggcattttactggagataaacttaataagttaaagttacataattagttagactcagcttccattataattccttattgatccaaggctgcccatggagcacctggcaacagtgaaagaaaaacagtagcaggtgtttggacttagttcgcttgctaactaattagatgagggattcccccctcccacccccaccccggaaaccctaagcagtcttcatttggctccagaattgaaagtacaaacccagaggcttcagccaactctgtttctctctcttgcttctggactggaagacattctagcattaagatgctttcacataaaactaatgttgttcattagaagttgattttatagtttaagtctcagtattctgacgatgccagattttactcaatgggtggactggagtcagagtgtagggtttgagtcacagctctcccttttactgtgtgtccttggctatacttaacttttcgttgctccagcttcaaaacctataaaatggggataacgatgatatttacatcactagattataatgacaaataaaccgtgccttggacacaataaatgctatacatgtgttccttcaatcataaaactacttaaattttaatgctttagttcccagtaaagtttttgttaataactgactatctgatcatttaggaacatgatcaaagttgttaataaacaggtttatagttgacttatattcacatatgcctagtaaaaattaaaaatgtaactcctcagtgaagggttggttgtattcaaggattgtttaggcagagaatgtcagctaaggtttttgacaacctacaagagaaactcaggctgactgctttaagtaaagccactggggaggccccccagtattaagccttgggaaggacaggaatcgggcatttccaggcatctcaggaacatacagagaaggcaatggcaccccactccagtactcttgcctggaaaatcccatggaccgaggagcctggtgggctg
